United States Patent Application Publication US 2007/0061916 A1 - sequence listing, part 4

SEQ ID NO: 12066 - DNA, 321 bp, Gossypium hirsutum
  Clone ID: uC-gsronu33b023d04b1
tttacgcgttcgaagaaacttaccaggatgggggtattaacggcgagcgaatgtttgctatattgttggagcactataagggcaaatggcctttctggcttagtccccgtcaagcaattgtttgccctgtgtcagaaaagtctcagcaatatgcaatgcaggtccgggattggattcatgaagctggttattatgtagatgttgacatgacagatcgaaagattcagaaaaagattcgagaagctcagttggcacagtacaactttatattagttgttggtgaagaggaaatgaacactaataaggtgagtgtgccggtga

SEQ ID NO: 12067 - DNA, 797 bp, Gossypium hirsutum
  Clone ID: GOSHI-09MAY01-C53306_1
tctacgcgtccggaaagcaacttttagatgggggcatggctgtcatatgatcgtatggttgcagtgctttcaactttcaatgtggcaacaattgcagcaattaaattagttagattgacgagcttaacacgatgaagcggagcgcctcggagttggctcttgaggagttcagcaggaacactatgagtaccaccaccatccctgcaccctctgccttccctgatttcgctcttcatccgcccatcgcccatctttctaattctttccacttcactgaattttccggagatgcagctgagcttagccctcaaacacatgtattattgtcacagacgcttacctcacaccttgattctcaatcatccttctgcggaaatgagtcgtggggaagtacagtgtgtgaagggaataactcaaactataggagtagggagaatgaagttagaggagctacaactctttcctccgatcatgatccgtccgatgatgatgacgacgatgtagaagaagaagatgatgatgatgatgatgatgatgaagaaggaggagaaggagaaggcgcagtagaagaagcagatgctggtcagtctgaacagagcttagacccctctcatttgaaacgcctccgcaggaagctttctaatagggagtctgccaggcgatcaaggaaaagaaagcaagagcaactggcagaacttgaattccaggctgaacaattaaggggagaaaatgattccctatgcaagcagcttaccaatgctcatcaactaattcgtgatgttggcactaacaatcga

SEQ ID NO: 12068 - DNA, 1128 bp, Gossypium hirsutum
  Clone ID: GOSHI-09MAY01-C53276_1
ccgatggctggattttggcggctatgagaataagatgaataaaactgctaaagcgttggatgaaatttccgggggatggctagatgaccacagaaagggtggacattgggatgaaaataaaaaggagaaggatttcttggatgtaatgaactctgttcttaaaggtgcaagtcttgcaggttatgatgctgacaccatcaacaaagccacttccctgaatatgattttagcaggcagtgacaccacaacagttactttaatatggggtctttccctaatgttaaacaaacctcatgtactcaaaaaggctcaagaagaactagacacccatattggcagggataggtttgtgaatgaaacagacattggaaaattggtgtacatccaagccatagttaaagagacattaagaatgtatccacctgcacccctgtcagcgccccgtgagctcagtgaaagttgttccattggaggctatgacatccccaaaggcacccggctgatcataaaccttcacaagatccaaagggatcctaaaaaatggccagaaccatcagagtttaagcccgagaggtttctcacaacccacaaagatgtggatgttaggggccagcattttgaactgatgccttttggcagtggtaggaggagttgtcctggaacatcgtttgcactccatatgctatacttgaccatgtctaatttcttgcacgcctttgatttctcaacaccatccaatggtttgattgacttgactggcacagttggattgaccaacattaaatctaccccgcttgaagcattggtctcacctcgccttgctcctgagctctataactaagattgcaataataaagtgtgaaggacagaaaaggtttagcattttggttcttacggtgtagtgttatttattggggcaatctcgcctatgttacatccccttcttttcaaaactaataatgataaaattactcatacatgaatagaataaaggatttttgtaatgtcaagttaatttcctagctgttttatgggttagctataccatcctgtaaaaatgatatttgctgggcaaaatatattccatttctttttattaaaaaaaaaaaaaaaaaaaaaaaaaaaaaa

SEQ ID NO: 12069 - DNA, 335 bp, Gossypium hirsutum
  Clone ID: LIB3149-013-Q1-K1-F6
ttttgtctaaggttaaacggtagtataattaaatgattataacagagaaagcgtgggagggaattggggaaggatggctagatgaccacataaagggtggacattgggatgaaaataaaatggagaaggatttcatggatgtaatgaactctgttcttaaaggtgcaagtcttgcatgttatgatgctgacaccatcaacaaagccacttccctgaatattattttagcaggcagtgacaccacaacagttactttaatatggggtctttccctaatgttaaacaaaccttatgtactcaaaaaggctcaaaaaaaactagacacccatattggc

SEQ ID NO: 12070 - DNA, 475 bp, Gossypium hirsutum
  Clone ID: GOSHI-09MAY01-C48466_1
tgagaaacttaaacaacccaaaaacaaacagaaaaaaaaaaatggtgctgctgaagggacagcctttggtcgcaagactggctgctttttccaaatacgtagtccttcctggatccatggttgctgctattatttactcccctcccaattatgattctcccaagaagggcaaatcccctaattaatttttctctcctggtatctttttccattaatggggttttctgcaagatgtcacctgcatactgtttctaggtttgtagagagttgaacgtattttatttgcctttagaagaacttttctgttatgaatcttcccttcttctcagactttgtcaaaagaataagatattatgtaatgaatacaagaatgccccattcgtaaccctgccgaataatttggattattatgttgttaattggtcctctgtgctatactatggattcagcttgccttaaaaaaaaaaaaaaaaaa

SEQ ID NO: 12071 - DNA, 214 bp, Gossypium hirsutum
  Clone ID: LIB3135-045-Q1-K1-H6
tctttctacctataaacttattcaacccaaaaacaaacacaaaaaagaaaagaaggcttctaaatggacaacctccactcacaatactggctgctttttacaaatacgtagtccttcctgaatccatggttgatgctattatttactcccctcccaattatgattctcccaagaagggcaaatcccctaattaacttttctatcctggtatctt

SEQ ID NO: 12072 - DNA, 1233 bp, Gossypium hirsutum
  Clone ID: GOSHI-09MAY01-C48086_1
gggattattagtaaaagcgtttaataattcaaatgaaaaaaacaagatttcaatggaagattgggtggagaggggggaacattttattttggccgaccagaaactgttaacgcctcgcttgcttgggcagtgctggttttggctatccatagagattggcaagacaaagcaagaagagaggtgatggagatattcggtagccaatatccacactccgaaggccttgccgaactcaaaatcatgagcatgatcattaatgaaactctacgattgtatactcccttaaatgggatggtaagaagagctagaagacaagttcaagtgggaaagctagtcttgcctgctgaagtagatgttttgatcccaaacatggcacttcaccatgaccctgagttatggggagacgatgcccatgttttcaaaccggagaggttcgaggaagggatcgcgaaagctaccaagtacaatgcggctgcatttattcctttcggaatgggacctcgagcttgtgtcgggatgacctttgcaatcaatgaaacaaagactgctctttccatgattctacaaagatacaccatttctctctcccctgcgtatgttcactcacccgcacctcgtatcacagttcaaccacaacatgggattcaagttatgctcaattcactgtctaatgatgcttaaactaggcgctgttgatctgtaacgccgtaatcaatgagtaaactctggtgtcggactctagtaatgcttgttcagtttgacctgccatgcactttgccaattccccatgttcgcatgtctgtgaatgttaggttgtagaattattagagttctttattttctctaaaatatatgtaaatgcttctattagatccggagatctgatatgagaacatatccaaatatattaggagacttcaagaagtttagtttaaaaaaaaaaaaaattaaaaaaaaaaaaaaaaaaaaaaaaaaaaaaaaaaaacaaaaaaaaaaaaaaaaaaaaaaaaaggaaaaaaatataaaaaaaaataaactaaaaatcagggggcgcgcccccaaaaaactcaatttatcccccccgacttgggtcgcaccccgcttttttttagtaccccccaattaccaaatcccgggggcttttcaccacaatgggcctgggaaacacccccctttccacaattatttctccctgaaagaacccccctctttcccccgttttaaaaataaaaa

SEQ ID NO: 12073 - DNA, 615 bp, Gossypium hirsutum
  Clone ID: GOSHI-09MAY01-C48356_1
tttgatgccaaaaccaaagctgggaaaaccccacttgatcttgctgtcactgaagaaattcggtcattactgaaagaacgtgaacaggcccctgaggaagtaaatacgggtggtaaaaggaaggttgaacaacctgattcttcaaggccaccgttggataaaccggaaaactccaatgatgaagctactgtggctgagcatgacgggcaagagggggaaagtgtaaaaaggaaaggtgatgacaataaaccagaaggcgtatcagaacctaagaaaccaagagttgttcttaagcatctcagtgaagatgacactcaggaagatgacgataccccataaggacaacgctagagtggaatccatgagcattgcttgaaccaaaatttgttacaagatggtgaatcagttaatgcaacgctaacaataggagtagtgccttacgattagattgtttacgctaagttttggtttttgtgtgtttggatttgaacccagcaagcttcctggcagcagacattgccatttttttagttgtaagtggctagcaatttgatagcagatgcacttgagcagttacgccaaacacagtctataacaatttactaaggatttggt

SEQ ID NO: 12074 - DNA, 624 bp, Gossypium hirsutum
  Clone ID: GOSHI-09MAY01-C48346_2
tcgcgccgcagcagttctcctccgccgttccagtcccctcccatgtccgactagatgacgacgaaacgaggacgctctctgacgactctcgcaacggtacgagcgtatggcgtgcgcggagtgctgaacgtgggagtgtggaggctagttgctgctagggtttctgctgttttaggtcaattgggccctataattgggtttagcttggcccaagttttattgggttcaattgtatttaatttgggctgtgtaaataattttggattggtcttattttgaatgggccgggcaaaaataggctattacagtcactatctaatgtaatttggcataatatcacacgatgaaagtagaggcaccaaaaacgaattaaacccttctatatgtgagatcaatcccttttatatatacatataacctaatatactataatataaataggggttatgcttcaagaacacgtgtggggagttatgggaaatggaagcaaacaggtaaatttgtgtctccgacacatatgatgattaccttgtgagtgaagaaaaaaaagcaaaaaaaataaaaaatccaaaaagacaataattaattgagtcaaacacaagacgaccctttgttgtgtaatgt

SEQ ID NO: 12075 - DNA, 597 bp, Gossypium hirsutum
  Clone ID: GOSHI-09MAY01-C48346_1
ttctctccgcagcagttctcctccgccgttccaggcccctcccatgtccgaccagatgacgacgaaatgaggacgctctccgacgaatctcgcaacggtacaagcgtgtggcgtgcgcggagtgttgaacgtgggacggtgtggagactgccgaacgtggggcatgtggcgctgctaattgttgctagggtttttgctgttttaggccaattgggccctgtaattgggtttagcttggcccaagttttattgggtttgggcccaggtatatttgggcttgtacagttgtccctctttgctcgttgtcgtgtaactggaacagagtaaagactaaaagtccaattgtgctcggtcttactaagccttgacttcttcggtgcttttcttctttaaatagtctcattccttcctattgcatcttcagaggtataggaactggtgcttctatgtactctactgcaatgtcggggtgataggatttctacgttgtagctcctcaaaaaaaaataaaatttgctatctttaatttgctccaaaacaaacaagaaagatataaaggacacgatcaaatgaatgaacagacaaaattttgacggg

SEQ ID NO: 12076 - DNA, 563 bp, Gossypium hirsutum
  Clone ID: GOSHI-09MAY01-C48376_1
gttttgttggttgacctgaaatgatgatcatggatagcttttttgccatgggatgtgttggttcaccaatgctttgaacgcatggggaggctggtagtagtggtatgtgctgtaaaaacaaggcccctcctgagcccccagggattcagtgcatgcccgttaggtgaaactgggtcccatttcccaccctgttcctcttttattattacctttgaaaacacgtcatgtttgatattttaatctttgttacaagcatgaagacaaaagtttctagggtggggatgtacatgtacatgcatgcagtgaactgaagagagattatttagtttcttcttttcttttcttcttttcaatgttccaccttccatcaaatcctgtagtaaaaaaaagttcggtctttttctttttctggttcatgtacaagttatatgtgtgtttccttctttatggctcatgcagggtctttgtttgtattcataattggagcatgactctgttgagtttaaagctccaaactatggcttgtttgtttgttgtactctcgttttcagttttaatgtaat

SEQ ID NO: 12077 - DNA, 918 bp, Gossypium hirsutum
  Clone ID: GOSHI-09MAY01-C48366_2
aaaaaaaataaaaaaaaagttctggaaaaacaaaaattgcagaattcgctcgtatacggttccttgtctctcgcttgtatcgatctcgatttccagtatttaatcttcacattttctttgttttttttttgttttctttcttcaggactcactgatttaccagatccgagttcgccaagtctcgattttgggtacacaaaaatgttttaaggaaaaaaatagcatcgaactcagttttagcattgtttgtttgaaaactgggtttttctttaacttcgaaaagcttcagcggggcaatcaatggttttttcctttgatccttgtaattttctaagaattggggtttcatagaagaattattaaaagaaactagtgtttttaggatctggcgcttggatataagggaaatttacaatcgtattaaggaattggtttggaaattctttgaggtttttgctgatcttgtgtattcggaaattgaaagttgtatttcaattgtagtcatgttctatggggcgatggtatgggatccttggcttattggagcccgaattgtttgccttcaatgcttatactacctcacccttggagtctttttgtcctttcttgttggcactcatgtttctcatatgagcttagtctatttctttgactttgctactatcacatcctcaaccgttgtcggccggtgtgtcattgcttcctttctgttcagctctgttgcaggagctggatacatgatttatttgattgaaagggcaaataagtgcttagatttttcagccaccctctatattatccatctttttatatgccttgtatatggaggttggccttcctctggaacctggtgggttgtgaatggtactggagttgcagtgatggctttgctaggtgaatatttatgcattaaacggg

SEQ ID NO: 12078 - DNA, 992 bp, Gossypium hirsutum
  Clone ID: GOSHI-09MAY01-C48366_1
taccggtaacaaaactcccggtcgacccagcgtccgattttaacttcaattttgctttatttggatctatgcagcgctgggtatatgctttatttgattgaaagggcaaagaaatgcttagatttttcagccacactctatattatacatctttttatatgcatcatgtatggaggttggccttcctcaataacatggtgggttgtgaatggtactggagttgcagtgatggctttgctaggtgaatatttatgcattagacgggaactcagagagattcccataacacgatattgatcaagtaagaaataattcctaaatatgttaaattgatttcttaagataagtgtaatgtagaatatatatatatattcaagtcattctttcttgcatttgtaagattgctattcatcttcctgctctacttaatatattctgttcaatgcttttctgccacattaattctgtatctggtaaataagcaaaagaatagaagttgttgaactatgtcaagttaaaacataaatgattgaaagacttacctgagaccttgctagtttatggttgaacttagtatttacatttgctctcttcagttaccaattctttctttggttcctcaattgtaatatattggctgccttttatctgatgcagatgtttgactgataaagaatcaggtatgaagaaattccttgtggcattaaaatacattgtttcccaatgctttgaaggatataattatttaaaacccaaatataatccgcaatgagaaagatgaaagagagcacccatgaaagtttgggatagtgatgctgaggtgatatgaagctgaagccacccatttgggtttgatctttgagacctgttttcatattttagctgcatagctgattagttttttagttttttaagtctgcatatgattagataaatttggggttatctgatcatatgcagccttaaaaaaaaaaaaaaaaaaaaaaaccacc

SEQ ID NO: 12079 - DNA, 520 bp, Gossypium hirsutum
  Clone ID: GOSHI-09MAY01-C48306_1
ccgggccgacccacgcgtgcggaatgcataaaaatattaaagattttttttttatcaacaccaatagagaatggggaagtgatacttttttaaataattttgaaagaatatagaaatagagtgttttatgacattacatttgtgatggacctcgtaatgattgcacataccaatggtaaggagagaacatatgcagaatgtcggaaaatcttgggaggaggaggcttttctcactataaaatcattaacatccctgcactggtgtccatcatcgaggcgtatcctgatgctcagtagctttttagcataatgccagtggtggggatttaatttcctattttatgaatcgtccttttttcgtgtaggcgtcaataaatgtatgtgattgtattattcaatcttttcttattctctgttgaaatggggcaattttatttgcctaaaaataaaataatttaaataaacaaaatattaagtccaaaaaaatattgggtagacttttcggccgatcaagagcatt

SEQ ID NO: 12080 - DNA, 745 bp, Gossypium hirsutum
  Clone ID: GOSHI-09MAY01-C48266_1
ggcctgctttgcaacatcttcatgtgaagctgatgtgccctcaattccattaggggactccgcattccagaatcctctgtatggttgcatgcaagactcttcagagctgcagaacagagggcaagttgacccaccgaccccaactccaacatttgtcaaggtttataaatcagggtcagtgggacgctcgttagacatctccaggttcagcagttaccatgaactgcgagaggagctggctcagatgtttggaattgaggggaagttggaagaccctttaagatcaggctggcagcttgtatttgtcgacagggagaatgatattcttctccttggagacgacccatgggaggcatttgtgaataatgtttggtacataaagatactttcacctgaggatgtgcagaagatgggcgagcaacgggcagagccttttagccccacaaccccaggtcaaaggatgaatagcaccggcactgacaccggcactggtaaactctcatctgttggttcccttgaatactaaactcccaacggcctctgccatggcactcaacttgagagtaatagtaagtattatcagaatcaaacttatttccacaatctccaaagacttatttatcaccgtccttgccttgaccaagttgtttcttaagtttacagcgtagattacaaggaaagattaaatattgttatatcaaaggcaaattattatcagtccaacttaaagcaaatatgttataat

SEQ ID NO: 12081 - DNA, 477 bp, Gossypium hirsutum
  unsure (1)..(477): unsure at all n locations
  Clone ID: uC-gsflnu33B058d10b1
tcgtccacgcgtccgcccacgcgtccgcccacgcgtccgctcaattccattaggggactcctcattccagaatcctctgtatggttgcatgcaagactcttcagagctgcagaacagagggcaagttgacccaccgaccccaactccaacatttgtcaaggtttataaatcagggtcagtgggacgctcgttagacatctccaggttcagcagttaccatgaactgcgagaggagctggctcagatgtttggaattgaggggaagtnggaagaccctttaagatcaggctggcagcttgtatttgtcgacagggagaatgatattcttctacttggagacgacccatgggaggcatttgtgaataatgtttggtacataaagatactttcacctgaggatgtgccgaaaatgggcgagcaacgggcagagccttttagccccacaacctcaggttaaaggattgatagcaccggcac

SEQ ID NO: 12082 - DNA, 408 bp, Gossypium hirsutum
  Clone ID: LIB3135-043-P1-K1-B11
ctggtttattgcaaaatacaggagagaatgatccgacaactagaacttttgttgagggttacaagtcaggatcagtggggagatccttggacatcacccggttctctaattatgctgaacttcgagaggaactgggtcagatgttcggcattaagggtcagttggacgaccctgatagatcaggctggcagcttgtatttgtcgacagggagaacgatgtgcttctccttggagacgacccgtgggagtcatttgtgaatagtgtatggtacatcaagatactttcacctgaggatgtgcataagatgggaaagccaggaaacgatccacgctacctatcttagctacctatcttaaatcgatacatggagctctttctggctcccatgacgattctgcggcacactg

SEQ ID NO: 12083 - DNA, 711 bp, Gossypium hirsutum
  Clone ID: GOSHI-09MAY01-C49586_1
gcgttcgtttggtaccaaattcaactgtggttcaggtgggtggcgagttgccgatccagtcttttggaaatgagatggagcgacagctccaagcggatcagatcaatggttcaatttggacaaatgatcagagtggtgatgtctttactccatcagatcgaatcttgggaatgcctcttcaagttgagggttggtgtacaatggtaataatcaagatgaaggtgacaaaaagggcgagggtgcaagccgattttctactgcactgtggtcatttgtggattcaatacctactactcctgcttctgcatctgagagtcctttggtaaaccgagcctttgagcgaatgtctagcttcagtaggttgagaatgaatgttagaaacaccaatgcgttgacagtcaatggtggcacaactgctcggaggagaagcaggagtaaggggttctttttcttttctattttaggtgcattgtgtgccatattatggtttctgatagggatggttagggtcgtaaggagttcgatctcctcgtgaagatataatgtaagtgggaagttttgttagttatgttctactgggaagttggtgaaattgttgcatagtgaagtccaaatttgtcattaaattaaatagtttttaatgtctcaggaagaagtgttagcagaaggaaagcataataggtaccttgaaatttctttgtagtaggcgtc

SEQ ID NO: 12084 - DNA, 428 bp, Gossypium hirsutum
  Clone ID: GOSHI-09MAY01-C49566_1
gtttttgctcttttcccgttttccatttcctatcttcacagcggaatttagggtttaggaattttgaatatgagctctacgggtggatcaacgaaaggagggagagggaaaccgaatgcatcaaagtcggtttcgaggtcgcacaatgccggtcttcaatttcctgtcgggaggatcgccaggttcttgaaagctggaaaatatgccgagcgtgttggtgccggagctcccgtctatctctctgccgtgcttgagtaccttgctgctgaggttctagaacttgctgggaatgcagcgagagacaacaaaaagacccgaattgttccaagacacatccaactggcagtaaggaacgatgaagagttgagcaagcttttgggttcagtcactattgcaaatggaggtgttttaccaaatattcattaaac

SEQ ID NO: 12085 - DNA, 614 bp, Gossypium hirsutum
  Clone ID: GOSHI-09MAY01-C49716_1
tcgtcgttctctcaaaattgaaggcgagctatatggtggaatccctcctggtgtggaagctcgacttgctaatctgacactagatacagatgatctgaagaagttctcagaaatgcggaatcgagctgacatgccgtcgactttccagctaaacaaccattactgagctctgcagaatacttgcctgctttctttaatatgcttaacgctcgtcgtgctattgtacctgctgctaatggacactgctcacctcgtgcacttgcacgctactatgcagccttagctgattgcggtgtggtaccgacaccacattcctctgcttcaaatccaccgcttggcagccatccgcatatccccaaatttccttcgaaaaagaccgatgaaaagcaaaagggtaaggtggatggtggtgtgaagaatgaaagaagtgatggtaggcaaaacatttacatcaggatcgaggaggacgatgacgacgatgaagagaagtgtagcaaaagtagcaaggatacaagtaaggggggaggtcttgaaaacaagaaaggcaaaatattttcaaaccctaaggttcatgaggcatttatgggaaggggtgaatatgagaatatgtgttt

SEQ ID NO: 12086 - DNA, 813 bp, Gossypium hirsutum
  Clone ID: GOSHI-09MAY01-C49616_1
cttttcaaggagggatcgttttataacgcttttaccttcttggatgccttaacttgggggggggcgggggcccaaacacttagtgttgcttattcttaagggaacatttacgtgaacggaaatggaaggggtaacaccactatggttggaggaggagctgccgcaacatcgccaccacctcagcctttaacaccgtctaccactagcgcagtttcaccgggtttatcaattcagagttcagaagtaccagaaaatccaatgggactttcaccagcagcagctactacagctaccaccaatgttttcgctagcatatttgcacccaactctcaaccatccaaaatctcagcaccctcgtcgttccttcaggcgacgacaccattggagcgcacatccctctcgctttcctctccactctacctatccaacaatgggctcctcatcttttgcgggacttgaaacgaccattggcactatgcttcaatttcccaacacgaatgtgccgtatcggaatggttccaaaaagttgcccaattggtgcccccggtttcaaacctcaatgcttcaggtctaagcttgcagtatatcagcttccctgctgtcagatcctaacgtaagtcgagagcatcagcacagcagctcgcctggctccctaaaacggatttggtaaccatccatatggctatccccgtgtgaacagcctcaacttatatttgcctgatggcaaaagggatttatagggtatccgggctcactcttgggggtgataaagacgcccccctccggcggggggatttccaaaacgggggggga

SEQ ID NO: 12087 - DNA, 450 bp, Gossypium hirsutum
  Clone ID: GOSHI-09MAY01-C44486_1
tggtgctattgatctgctagaaaagatgctcatctttgatccccataggcgcattacagtggatggggctctatgccacccttacttggcaccacttcatgacatcaatgaggagccagtttgcccaaggcctttcagttttgatttcgagcaaccatcttttactgaagaaaacatcaaggagctaatttatagggaatcggtaaaattcaatccagacccaatgtattaaaggcttatatgtattcgatttgtatatgactctgcaagtgtgtgcctagcggcattaccgtttgtgacccatcattcccctttgtgattaggaacattaagaatagaatactcttaaactgaatgacagtttattcaccttcttttgcttctaaaaaaaaaaaaaataaaaatattatttctaaaaaaccctatcttatttttctttttcttatctct

SEQ ID NO: 12088 - DNA, 609 bp, Gossypium hirsutum
  Clone ID: GOSHI-09MAY01-C44446_1
gcatcagagacgccgtatgctgccgatttcacctcttgtctgaagctcaagacggagcagaggttctcatgtctgagatacgtattagcgctgaaaagggtggggaattttttatcgacaccgatagattaatgcggcaagcaccaactcctataccaagtccacaaagcagtggagacttttcagcactaagtccgatctctggtggctttgtaatgagctgcagagtccaaggggaaggtaagaacagcaagccattagtgcaactggccatgcgacacgtgacatgcatagaagatgctgccatcttcatggcccttgcggcagccgttgacttaagcatcgaggcatgcaagcctttccgaagaaagtttaggagaggctcccgaggctctcgccattctttatgaaaaaaaagaacaaagaattaaggtgttttgtttccatgaacaaagtatagctctatatttgctttcatttctgtataatttggcattgtgtataggatattttggtttaggttttatcaaaatattgtttatggtgtcagtccagcctataaatgacccctatttaatctatccagtcttcaagctggggactttgtcc

SEQ ID NO: 12089 - DNA, 550 bp, Gossypium hirsutum
  Clone ID: GOSHI-09MAY01-C44406_1
gtacttcgcaatgagccctcaaatgagaaatgtgatgtttatagctttggaatcattctctgggagctcgccactttgagattaccttggagtggaatgaatccgatgcaagttgtaggtgcagtaggtttccagaatcgacgcctcgacattcccaaggagctcgatcctttggttgcaagaataatttggcaatgctggcagactgatccgagtttgcgcccatcctttgcggaccttacggtagctttaaaacccttacagcggcttgttatcccattgcatcaagatcaatcaagctcccctatgccacaagggatttcagtaaattctacaccctgaaatcaaaatactctgctcctcaattgtgaataagaagaaaagttcgctgtatgttcctttcccttcacttcaatgaggtaattactgtatttaaattctaaaagaaaagctgcatttttgaagtgtgcatgttcataattttgtcaaaagaacaactttgtaatgaatacatgagtactctttaaaggaaagggaaaattgttattat

SEQ ID NO: 12090 - DNA, 579 bp, Gossypium hirsutum
  unsure (1)..(579): unsure at all n locations
  Clone ID: LIB3829-029-Q6-K6-H8
tccgattctggacaaattgatgcccttgggcaagnacctgctgtaaatctaactcttagattttgctggtcccgaaagcatctactggtctgaggaaattaacgatcttcttatcccaagcgtcaaaatctgaccagacccctgggctcattactgttaacagaccaggtcggcaccatgaaccagggggcgtagccaccacgaacggtggctcgggaagcggctcagtcggcgttcagatccatcaatcccgaaggctcccggatttccttcaaagcgttaatctcaagtacgtaaaactaggctatcactatttaatttccaatcttttgaccctgtgttttattcctctcatcgcggtgatctcaatcgaagtttctcaaatgaatctcgatgatttacgccagttatgggttcaccttcagtacaacctggctagcataatcatttgttctgctatcttagtctttgggttaacagtctacatcatgactcgacccagacccgtttaccttgttaactattcttgctaccgtgctcccgaccatcttaaggcgccctacggtcgttttatggatc

SEQ ID NO: 12091 - DNA, 376 bp, Gossypium hirsutum
  unsure (1)..(376): unsure at all n locations
  Clone ID: LIB3148-030-Q1-K1-G9
atctaactcttagattttgctggtcccgaaaacacatactggtctgagaaaattaacgatctttttatcccaaccgtcaaaatctgaccagacccttgggctcattactgttaacagaccaggtcggcaccatgaaccaagggggcgtagccaccacgaacggtggctcgggaagcggctcagtcggcgttcagatccatcaatcccgaaggctcccggatttccttcaaagcgttaatctcaaggcctgtgcctgggggcaatgattgtcattggagatggaatgtttggcatttgtcacaatccatggatctgaaaggcaggcactngaaaggaaaaatgtttgcgtgaaaattattgttctgaaagccattaa

SEQ ID NO: 12092 - DNA, 721 bp, Gossypium hirsutum
  Clone ID: GOSHI-09MAY01-C44126_1
cccacgcgtccggtcgttagggcacaaaagttcggggaatccagccgccatcctttcttctctcatgaacaaaagagaaaagcttcaagacgagctcgcaatatcgaaaagcaggtttttgagttagaaactaattatttgcaagattcgagccatttcgggcatgttttgaaaggattcgaagggtttctttcttcatccaagaacacggcaaacttgaagaggtctaggaaatttcagcctgaagatagattgttttctttgtcatcagtcacgtcaccagtggctgacgaactcggagttcgacaagatgatggaagatccgacttcggctcagctcggtctaagggtggaggcttagctgccaatggccaagggaaaccaaagaagggaaggaccgcctcatcagcaagagatggaaagagaacgaggccatcaagcgaacaagatttcgatgatgaagatgaccctgatatgagcttgagataacttataaaacaaccacttaaaatgtaattttaaatgtaggtttgtaggtgttcttttttattacaattgaagggaattcttagtattagtcttaggtagccttgatgttgaaagcagtcgctagggtagcttgtattactttgtcaaatgtagcaaatctaggtgtcatgtattatgtataactattgtataatttccacctttcctgtatcttgattgatttcattgtatt

SEQ ID NO: 12093 - DNA, 471 bp, Gossypium hirsutum
  Clone ID: GOSHI-09MAY01-C44366_1
ggtatagcagcaaaaagaatggcagagattttgggatacatattgacaccattggagtttctcaagattcagcaaccacaaaaagctcaagattcagcaaccataaaaagaaaggtatttgagcagcctaggttcttgagaatccctttcctatgtagtaagtttgcatcatataaccaaatttagagccctatctgaatcatcatagccagccatagttatagctttgagttgctgtaaattctactattactataagaggagttgaaatgctgaaaggcttgtggatgatggccttattttgtgatgcaacgcagctaccagataaagcttcataactgatatgtctgtcaatacttttgatttctattttctttttgctcagttttacatatatatgaacaataggtttaaatgggtcaagttctttcaaaaaaaggaaaaaagttcaagtttgctatttagtccatg

SEQ ID NO: 12094 - DNA, 386 bp, Gossypium hirsutum
  Clone ID: LIB3149-013-Q1-K1-A9
gcgcacttcttggtgttcttcaatcgactaagacttcaaccatagttggctgtacataataatcgagcatgtttattatttggttcggatagcttgggttcaacatgatatttgtcaccctatagtatagcagcaaaaagaatggcagagattttgggatacatatggacaccattggagtttctccagattcagcaacaacaaaaagaaaggtatttgagcagcctaggttcttgaaaattcctttcctatgtagtaagtttgcatcaaatacccaaatttagagccctatctgaatcatcgtagccagccatagttatagctttgagttgctgtaaattctactattactataagtggagttgaaatgctgaaaggcttgtcga

SEQ ID NO: 12095 - DNA, 577 bp, Gossypium hirsutum
  Clone ID: GOSHI-09MAY01-C44206_1
cgagaacattgaacaaaggccagagatggcagctcccatgttgtggctcctttccatcttctccattttgtccatcgccgcttgcatcgatgacaagtgtgccgcttgcaatgccgtcgcggcggagctagagattcaactatcgaaggaaaaacccaggaaccatttggatatgagacatcgtttggactcgaaaggtcaacgccaaggaaaggttattgattacaggatgagtgagcttagagctgttgagctattggatggactttgtgaaaagatgcaagattacactcttgaaaagttagattcatctcgacgtgagtggatcaaagtgcataattgggacatcctcaccattgataagcaagaagctaaggcatactcaaaagatatatcctcttattgtggacggttactggaggaaactgaagatgagttaacagaattgataaagaaaggatccgttaagcaaggagatgtaagcaaagttctatgtgaggaattgagtgagcactgcagcggggcaagtgatacgactccaataatgatgaactataactattgtggttcagctgga

SEQ ID NO: 12096 - DNA, 395 bp, Gossypium hirsutum
  Clone ID: GOSHI-09MAY01-C45996_1
ccacccttgtcaaataatggcagatgcactcactattattgaacatatcggtcggttggaaggaacgaaggttgtctatgtcggggatggaaacaacattgttcactcttggttgttgctggcttctgttgttcctttccactttgtctgtgcctgccctaaaggttttgagcctgataaggagactgttgagaaggcacaaaaagctgggatcagcaagatcgagatcacaaatgatccaaaggaagctgttaaaggtgctgatgttgtgtattcagatgtctgggctagtatggggcagaaggaagaagctgcccatcgtcgccaagtgtttcaaggatttcaagttgatgaaactcttatgaagatagcagcccaaaagcttatttcatgca

SEQ ID NO: 12097 - DNA, 555 bp, Gossypium hirsutum
  Clone ID: GOSHI-09MAY01-C45986_1
cacgcatacgtctaacctgaagaaagaagagagtttatgagaatttcccaaatggatgcttttcagtggcacaagattgctgctgtttctggaatagcagcccttggattgggcacttatggcttccatatctttaaacctgaaaatcccgtttacaaggaggtatggcaaatcgcttctacttaccacttgtttcacacagctgctcttctttctgctcctattaccaaacgcccccacatttttggaggccttttgactgctggcattctttctttctctgggtcgtgttacacggcagcatatctggaggacagaaaatattcggcccttgctccatttggtggccttgcttttgttgccggttgggcaagtctgttattctaaggttggattttccttagaagaacttatgctatcacttgaaacaagttagagaacatcttgtcctctttgttatgccatatatgtaacaaacctttgtatagttgttgtctcataagataccctaatacatttttaattgcaaacaagacataattatgtatttttggt

SEQ ID NO: 12098 - DNA, 423 bp, Gossypium hirsutum
  Clone ID: GOSHI-09MAY01-C45966_1
gcttttggtggtgaaaaggccacaggaggaggccgtgaagctggcagtgattcttggaaacaatacatgcgacggtcaacctgcacaataaactacgggagtgagttaccgctggcccaaggaatcaatttcggctaggaatgcagacatgggtgaggcctaaggaagcaaatttgcattcctgcaaaatcaactcccagaccttttatgctctacatataggctgggatttgggtcacataattgtcgctgaaaaccatgaatagtaacatactaatgaaaagaggcataatgaagaaatcaatgattcctgaaacacactttgctacgaaaatcacgtgtagtgtgtgtgctgtaataattcttataatagaagcacattattgatcttgcggctggggttctagccccgtgacacttgca

SEQ ID NO: 12099 - DNA, 1524 bp, Gossypium hirsutum
  Clone ID: GOSHI-09MAY01-C45916_1
ggcgcgtgggttctagcccacgcgtccggccaaggcgagacccgattttaccgggtttcggaacacccaaatccccccgaatctctttcaagtcaaaccaccgtcatctccgccatggacttccaccgtaacccttccacaaactctgcctcttcttccacctcctccacttcctccgccgctgctcaccaccaacctcctccttcctccgccaccgacaacgatccgatgcattcatggtgggaatccgtctccaaacaacgttcccgcatcctttccctcgccgctctcctcccttccggtggagtcgccgtttcttccttggctgattctgaccgtcccgctgtctccctactctcgtcgcccttcgcttactctttgatttcctccgccctttcttctcctaaatccggctctggctccgaccgtctctgccaatggctttacgaaactttccaatcgtccgatcctcatctccgccttctcgtcctctcttttctacctcttctttccggcatctacctttcccgtgtccactcatcggattcttcttctctgccgtcgcttgccggattcgaagccgttctcctcgctgtttactcttccgaagcgaaatctcgtgccgggaaaccacttctcgttcaaattcccgacctatctcaaccttctctttaccacgctcctcgtaacaagcctgttgacgacagatctagacaatccgtcggcgttttatcacctccactggagccacacttagccgttaagtcaactaagcgagccatcatcgttggaaccgcacttgattgctattacaaacaagtatctcaaatgccggcttggtctaaactggatttctgcaaattcgccgccgcttgggcggggcaagattgtccttgcagaacaaagcttgacagagatgaagataaccaccatgaaaacggcaacgtaaacggtaatggtcacattcgcctcttaagggaggattcagggtttagcaacggaacaagaagcggcgacggagatgaagtggactatgaggatgatgtgattaaggaagtggtggtggtggaagatgaacactttgggaattaatgaagagaatttggagacaaagggtgtgaggatcccgttaccttgggaacttttgaggccggtagtgacaattttagggcattgtttgtttggtcctttgaattcacaagatgtgaaggactccgcctcggtcgcggttaggtgtttatacgcgagggcatctcatgatttggcaccccaagcgatcttggcattgcagagtctgataaggcttgattagaatgcaagagcagctgctacaacggctgctacggtgacaactaacgcttcttcgaatgctatacactcctagcaaggctaagaagcccgaaatcctattggtttccaagtgatttcatggttttgctttttcaggtaatggatgtgcatagtgttttaagcttctggtatctttgtgtaagaaaattcacacttgtggaaattcaattttac

SEQ ID NO: 12100 - DNA, 422 bp, Gossypium hirsutum
  Clone ID: GOSHI-09MAY01-C45526_1
atcacaggatcagcctacttgtgcagatgccaccaccaatggaccagatgaagttgctgggactgagcagaccgaggaggatgcatctgccgttgatgtgaaagagcggctaaagaaggtggcgtctatgaagaagaagaaatctagtaaagagatggatgctgccgcaaaagctgccgcacaagaagcagctgcaaggagtgcaaggctagctgcagcaaagaagaaagagaagaaccattacaaccaacagccagtgcggtaaaaacaaatcccgttcttatatatatatatatttgagatatgaacatgtattttattgttgttcatatgacaatatgaaataaacagtgggctttggttcagtgaaaatggtgtcattttagttggttttgaatgaactaaaacgaaaattttaaatt

SEQ ID NO: 12101 - DNA, 636 bp, Gossypium hirsutum
  Clone ID: GOSHI-09MAY01-C45436_1
aagggatataggtgaattcggttacatagctccagagagttcaagcacaacggttgcttcgatgaaatccgatgtgtacggattcggtgtcgtgcttctcgaattggtaaccagacaaaaacccctagaagttaatgcaggtgaagaaggattcaaaggtggtttggtggattgggtaaaccattctctcaaacacagggagaatcaaagatgccattgacaaagatctgtatgggaaggggcatgatgaacaaattgtgcaggtcctcaaaattggatgcaactgtgtggttgctcatccaaagaagagatggtccatgttcaaggtttctcagtcattgcgaaccatggctgaggaaaatggtttatcagaagagtttgatgatttccctctgattttcacagaccaagatgatgaatcaatatagattgggagtaatgttaattgctttttatttatgtcagttataaatagttgtataatatcaataaaaatgttaaacaaaaaaaaaaaaaaaaaccaaaaaaaaaaaaaaaaaaaaaaaaaaaaaaaaaaaaaaaaaaaaaaaaaaaaaaaaaaaaaaaaaaaaaaaaaaaaaaaaaaaaaaaaaaaaaaaaaaaagggggggccccttt

SEQ ID NO: 12102 - DNA, 384 bp, Gossypium hirsutum
  unsure (1)..(384): unsure at all n locations
  Clone ID: LIB3148-039-Q1-K1-F10
agttaatctaaaatcaaattctctaatagagtcccagtaggactgtatgctcatccaaagaagagatggtccatgttcaaggtttctcagtcattgcgaaccatggctgaggaaaatggtttatcagaagagtttgatgatttccctctgattttcacagaccaagatgatgaatcaatatagattgggagtaatgttaattgctttttatttatgtcagttataaatagttgtataatatcaataaaaatgttaaacaaccgtaggttcttagatcttgaaaagatctatttattttgcaccttgcctttttttttttcttctaatgaaattaatgctgattgcttgnccccnnnananannnnnnnnnnnnnnnnnnnnncc

SEQ ID NO: 12103 - DNA, 993 bp, Gossypium hirsutum
  Clone ID: GOSHI-09MAY01-C45726_1
acctgattgggaagccactgccatggcgtctctttcaatccgcttcctggctctttccctttccgtcactgctttattcacttgctcctccggccatggtcacacttacgatccttataacgacaaggcacggatgatccaccacggtggtcctatgctcaacgggaccgttaaattagccatcatgtggtacggaaattgtggcaaggaaataaagaacaccatgagaaacttcattaaatcattgaccgtcccagccaaagccaaacttcaacctcaagttacctgttggtggaaagtagtggaaagttaccaatcaatgataccagacgcaaagcctgggaaaagccccaaaatcaaggtcaaagtggtgaaacaatcaggagagaaaacatataaatatgggaaagttttgactttgcaagggcatatcccggagcttatcgagcatgtcactaagggcgatactgaactcttaccggtcatcgttgctgcaagggatgtctctattcaaggaatttgcaacgggcaatgtgcagatcatttacttactgaggatccccatccgcgaccatacatcatagtcggtaacccagaaacggagtgccctggagaatgcggatggcctttcttcccggctgacatgggtccaaagggaccagtccttaaaccaccaagcggcaacatggcagcagatgctatggttgttgccttcgcgggtgcattggttgatgcaatcaccaacccaatgaacgatgctctctaccattcaaacaaggctaaagaactcggcccagccaccgtttgcaaaggcattttcggtcgtggtgctgcccctggcaaccccggcgaagttctcaccgaccccaaaaccggcggaaatttcaatgcctatggaaataagaacaaaaaattcttgcttccagccatctggaaccccaaaactaaatcttgctggactgtttaatgtaggtggtttgcaaaatttgagac

SEQ ID NO: 12104 - DNA, 738 bp, Gossypium hirsutum
  Clone ID: GOSHI-09MAY01-C45116_1
gatgtcttctgtccaacgagtaaggatggagttaaaacaattctaattccgcccaatgaactacttaggttttctcacaaggttccatcctttgtgctgaccggtaaagagagaagggggtgccaaaggttcttttgaacttgatccagcttctttacctgaagaagttttcgttcccaaggcttgaaggaggaaggtgatggcagagatcctagtgtttcagaaatggaggatccaatggcaggatcaaatgatcctgatccttcagcttcggctccaaaatcctttgaaattccagaatcagaattctacgattttgatgctgacaaaaccgaggaaaagttccgtgctggtcagatctgggcactgtatggtgatgaggatggcttgccaaagtattatggtgagatcaagaaagtcgagtcctcccctgttttcaaagtacatgtgagatggcttttttcttgcccattagaaaccacgactcagtggcaagattcagacatgccaacttgttgcgggagattcgggattagaaggggttcccagacctacacctccaccgattccttttctcatttgttaaaagccgagcctacagatacgaagggcaaatacaatatcatacctagaaaaggtgaggtatggggattgtaccggaactggacgcccaatatcaaatgttcggacttggagaactgggaatatgacatagtgcaagttttggaggaaacttat

SEQ ID NO: 12105 - DNA, 649 bp, Gossypium hirsutum
  Clone ID: GOSHI-09MAY01-C45056_1
ggggcaccagggaaacgggtaccaaggttgttaaagttgatccggctcgattcacatctagctggggttaataacaagttccgtaatgctcagttttcatgggtcaccgagaacgggaagcaagagcgtcatttggttgcaacggtaggcaagtttagtgtcatatggaacttccaacaagtgaagaacgggtctcatgaatgctaccataatcaagagggtttgaagagctgctattgttacaagatagtccttaaggatgactctattgtcgacagtcgtttcatgcacgataagtttgcagtcagtgattcacctgaagccccactggttattgctaccccactaaaggtcagctcattcagcatatccagcaggcgctgatgacatggttcatataaacgcatgctcttcctttatttggtcgctttccaaatgtaattgaaaaagtcgagactgcaattttagagccttctaaaatgttgttttccttgttagattgaagtgttgtttgcaagttttatctggataaagactcttagtgatttccttatttgctagcattttctattgtgtaactccttatgttatcacttgttactgttgtgttttagttctaaattctaaatgaagctgttattgatatcta

SEQ ID NO: 12106 - DNA, 435 bp, Gossypium hirsutum
  Clone ID: GOSHI-09MAY01-C45066_1
ggaagggccgggccgagcgacccgtaccatgtatgagaaaagcggtgctgatttagattctcgatctgaatttgctgcgaaagccccttcaatgagcaggactagtattgcttataagttttcttctgattatatacttagggagcagtataagaatccttgggacgagatgaggatggggaaattgcttgaggatcttgatgctcttgctggaaccatctcctataagcactgtcgtaatggtgatggtgctacaaggcctatattattggttactgcttctgttgacacgatggttctgaagaaaccgatccgagttgattttgatttgaaaatatccggggctggtacatgggttgggaggtcatcaatggagtttcagctggaagtaactcaatctacgccagattctccagatccctctgattcagtagc

SEQ ID NO: 12107 - DNA, 735 bp, Gossypium hirsutum
  Clone ID: GOSHI-09MAY01-C45036_1
cccacgcgttcgggcaagactgttgcattggttggagaaagtgggagcgggaaatccacagtaatgtcattactgcagagattttatgatcccaattcaggacgtatcagtctcgatggtgtcgacatccaaaagctccaattgaaatggctgaggcaacaaatgggacttgtgagccaagaacctgttttattcaatgatacaatccgtgccaacattgcatatggaaaaggaggaaatgcaaccgaggcagaaattttagctgcatcagagttggccaatgctcacaagttcattagttcactacaacagggttacgatacggtggcaggggagcgaggagttcagatgtcaggaggacagaagcagcgcatagccatcgcacgtgccatcggtaaaagcccgcagatactgctattagacgaggcgacgagtgcattggatgctgaatcggagagggtggttcaggctgcactagatagagtgagtggtgaaccgaacaacggtggtggtggctcataggctatccacaatcaagaacgcggacgttatagccgtggttaaaaagggggctgctgtagagaaaggaaagcatgattccttgatcaacaatcaaagatggcttctatgcttccttaggtgcacttcatatgagtgcttccactgcataaaacctctttaattatatatatatattttttgtggtttttgtgtttgggtttaccataaatttca

SEQ ID NO: 12108 - DNA, 715 bp, Gossypium hirsutum
  Clone ID: GOSHI-09MAY01-C45346_1
gaaaaagtgactcctgtcatcttggtgtggatggcatactgaccacggctccttgacaggtctgacatgcgccatgtttaagaggaacgatgtagaaatatcttgtcctgatagtgctgctggcctttatataagaacacggagtggtgaaattgtcaaagctacttttggagaaaatgaaatagcataccaaattggtgaaaccactgaaattctttctcaaggatatctttgtgcaacacctcattgtgttcgggcaccaaaaggaaaggaggcttctggtgttggtcgatcaacatttgcattatttatgcaacctgattgggatgaaaaactcaaattttctgaggacgtttatattcataaagagctgataccatcaaatgacagtcttacttttggagagtattcagagacgctacttgacaaatattaccacatgaaaacgtaaagaactgtaaatattttcctcttttaccaactttaatctttattttatcctttaacgctataggtacactctaaaatacaataatcaataatattgctctgtgaaacttcatgttattttcttcataagggatgcctacatatttaattgtcatataaaataaaaatttaaaaaaaattttttaaataaaaattattatttttatttattaaatttttttaaaaattattaaaaattttaatttataaattattttttaataat

SEQ ID NO: 12109 - DNA, 807 bp, Gossypium hirsutum
  Clone ID: GOSHI-09MAY01-C45226_1
cagacatgaagcctcgtgataccgctcagtaaatacgttgggaaagcagctaacttatacgacaggggttaccaactttgtgggagtgcttatgttatttcaaaacacattagtaacacgtggttgtgggaccgtgttcgtgttagcggtggagcttatgggggtttctgcaacttcgatactcattcaggtgtattcaccttcttatcttatcgagaccccaacttattacaaacacttgacatatatgatggaactgggcgctttctccgtgaattgaaaatggatgatgatactcttaccaaagcaattatcgggaccattggtgatgttgatgcataccagctgccagatgctaaaggctatagcagtttggtacgatatttattggggattactgaggaagaaaggcaaaggagacgcgaagagatattatcaacgagcttaaaggatttcaaggaatttgctgacgccattgatgccgttaaagacaacggagttgccgttgcggtggcatcgccggacgatgtcgaaactgctaacaaggagcgcctgaactttttccaagtgaagaaagccctataaatatacacgtaagaatggcttcgatcctaaatcgatctcaataccatttctcaaattaagggaacgatactcgaaaaacacattatttcaatctttgtcacactatgaatagttagacaggaagtccattgcatgaactcttattagttttttaaaatatcaaaggtataatacagacttttagccatttcgtataagtcaaggatttgtttggttaaaaaa

SEQ ID NO: 12110 - DNA, 591 bp, Gossypium hirsutum
  unsure (1)..(591): unsure at all n locations
  Clone ID: LIB3543-037-Q1-K1-H5
cccacgctttcgttgcttggtaaactgactgctggtggggagaactctctcnnagacagagaagttcgttggcaaattccttgatttgcttcctagcaaatctcttgtcgaaagagctagctggaacgtccgacttccttcaaacaatgaagccatcgtgatacccgactcaggtaaattaccgttgtgggggggcggggtgacttatacgacaggggttaccaacttagtgggagtgcttatgttatttcaaaacacgttagtaacacatggttgtgggaccgagttcgtgttagcggtggagcttatgggggtttctgcaacttcgatactcattcaggtgtattcaccttcttatcttatcgagaccccaacttatcaaattcactccttcatatatgatgngaactggtgactttctccgtgaattgaaaatggatgatgatactcttaccaaagcaattatcgggaccattggtgatgttgatgcataccagctgccagatgctaaaggctatagcagtttggtacgatatttattggggatttctgaggaagaaaggcaaaggagacgcgaagagttattatcaa

SEQ ID NO: 12111 - DNA, 866 bp, Gossypium hirsutum
  Clone ID: GOSHI-09MAY01-C46876_1
gtttcatccaaaaaagagaagagacctggaggtcaaccatttcatcctcgcccttatctctctctcttgtctcttctctgtctctgctaatgcccctccacccttttccaatgcttctagccctgcttcttcagaactttatgatatgatcgaggtcatgtctgaatcaccgtcaccatttgcattcgatggtacaacattggaaagcattgatgatttattgagcatactacctggtggtgtcgaccctgcccttcagcaaatctgtgggaacaccgatcaccccgtcgaatgtatcatagcaactatgccattcctagatgagaatgctcctattgagcctctttctatccttaaagctgggattaaagcaatggataaccagaccaaaaatgcattggcggaggttacaaagctttcaatggaccccactacccctaaaactattgttcccatccttcaaacatgcattgatgtctacaatagcattcttaacagtgatcaaaaatcccttgaagccatctccaaccataaccttgttcagttgagcacagagctaggcaccaatgtggaaaatgtactcggttgtgacaatgctttcaaacaggctaagcttgaatctccaatgaaggacatggatgcaatgcttgcaaatatcattagcaacaccttgaccattggtgtcgacatggtccacttttagaggaacaaacgattaaaaggccgcctacaaacacatgaagcctaagtgggatattataattttattgttgcatcctttgaagagaagcaggaagtatataagaacctttgtcactatttcttattgttaaatgaagatataatttgctcaagaattacttttc

SEQ ID NO: 12112 - DNA, 620 bp, Gossypium hirsutum
  Clone ID: GOSHI-09MAY01-C46806_1
cccacgcgtccgctgaagagaaaaaactgggtcagaagttcttggtggatgtagatgcttggatggatcttcggaaagccggtgaatctgacaacttatcggacacccttagttacaccgatattaataggatagtgaaggaagttgtggaagggccatctcatgatcttttggaatcagtggctcaaatgattgcatcaaaaaccttcacaaatcactctcaaatatctgcagttcgagtaaaggttgggaagcctcatgttgctgttcatggctgtctcgactaccttggagttgagattatcagatatagaaccatcgatgcgcctaactgacctgaatatatatcatcctttgagcagtccgtcacgtggatgtggtaacagatcatctttcatccatgcttggtacctcaggtttctcattcacttaaattaatgtatttgtgttttttcttcttcatgtttgtttatagtgtaatggaatgtgtccgagttgtgaccgtattgaagttcgatgcctatggtcgtatttaatatcgtattacttttttttttttaatttatgaaatactccttttacataaaagaaaagactgtatatgagttatttttttttag

SEQ ID NO: 12113 - DNA, 515 bp, Gossypium hirsutum
  Clone ID: GOSHI-09MAY01-C46576_1
cggacgcgtgggtccgcctatcaatcgtttagttttcgccggcttttccagtttccttggtgctaagctgccgggcgagggaagaagaagaaaatgccgtctttacaaacagcgctgccccctgagcttgctaacaacgttatcagactttaccgggagtgtcttcgaagagctaaatatataggccataagcaacataatacagcattggttgttgatatggtgagacagcagttcaaaaagcatatgcatgagacggatccagagaagattcagaagctgaaggatgatgctgcaaggggactaattaaccacatactctatgagtctgagaagctatctgggacgaaaattcagcaatagctcttgatagagttggggtttttatttgagatattggtattagacaaatttcatgactgctcaactaagtaataaacaaaggcttgaattttggtgttcataatgagttcgactgtgggctgcattgaacttgcttcagttttactaatatt

SEQ ID NO: 12114 - DNA, 385 bp, Gossypium hirsutum
  Clone ID: LIB3146-009-Q1-K1-H3
ccttcttgaaacttaaagagaacgttaatgatgaagtgcaaggtgagatattaggggtaattaaagggattaaggacggtgtctccggtattcaacagatcacttgtggggagaatttctcacccgcaagagctaaaggcttttcgattgcctcggttgcggtttttaatggagtcaatgaaatggaagagattgagggaaacgaagaatatgtgaacctacagaaacagaaggttagggattatttggatggtgtcatagttgttgattatgtggtgccatcatcatcatcatcatcaaatctttgatatgttattaactacaaagaaaaccttgttacttgcttaattaatggttgctgttggaacaatattcaactttgaat

SEQ ID NO: 12115 - DNA, 283 bp, Gossypium hirsutum
  Clone ID: LIB3148-058-Q1-K1-C9
gaaatggaagggagtgaggaaaacgaagaatatgtgaacctacagaaacagaaggttagggattatttggatggtgtcatagttgttgattatgtggtgccatcatcatcatcatcatcatcatcatcatcatcatcatcatcatcatcatcaaatctttgatatgttgttaactacaaagaaaaccttgttacttgcttaattaatggttgcttttggaacaatattcaactttgaatgattttgggactgattggattttaaatgcaagattttgcatttt

SEQ ID NO: 12116 - DNA, 592 bp, Gossypium hirsutum
  Clone ID: LIB3828-011-Q1-N6-C4
aataaaattcaatcatatatatatattgaatttaatcttaatacacaatcgatgtgagatcgatggtcgtcttcggaccgaaacaaggcccgctaggggaatgaaaaagaattttcgtagaataatactctcaaaagtttataacaacaaatgagtccttacaaaatgctccatatccttgctattactagattttgcaccaaattttcactactataacatgatgcttccctaagcctgcttgcactacaaatatcgggaccagattccaccgaatgcatagtttttttattcaatcctcagttcaccgtggaaaagccgggatcttgaacacggggaatcgaaggtagcaaatcactcagcaggtaatattgacaccggtttctctagacttgccatgtatgtcatgtagacagtccataaatatgagaacgaattgctcaccaacggctgcaaatgaaccgggatgaacctgaaagtgatgaagtcgcaaaagggccagtacattataccatttaacatcgtaggaagtaagtcacgctttaatctggaaataatttcatcaccgctttcaccttgtagacgagcattc

SEQ ID NO: 12117 - DNA, 179 bp, Gossypium hirsutum
  Clone ID: LIB3148-058-Q1-K1-C1
cccacgcgtccggtttcccctcggtttaaaatttggtgcaaaatctagtaatagaaaggatatgaagcattttgtaaggactcatttgttgttataaactttggagagtattattctacgaaaattctttttcagaagataaaccataaacgtgaaacaaaaagaaacaaattttaaaa

SEQ ID NO: 12118 - DNA, 356 bp, Gossypium hirsutum
  Clone ID: LIB3149-034-Q1-K1-A1
cttgttttgatacctgcatacaattttgccacatccatcatttgcagcctgcagttcatcccattcataagccacggtagatactatattcaaatttagtatcggcaattcaggagagtaggtaactctatagtctgttgtaataattttttatcggaaaaccaatataatactcatataaattattttataattttttttttttatttagtaactaataatgcttgttttagaaaaaagaaatgtataacgagagataaaataggagatgaacctgtaagtatatgggtttttcacttcctttttattaattaattttaaacttaggtaataattttcattaatttatttcggat

SEQ ID NO: 12119 - DNA, 307 bp, Gossypium hirsutum
  Clone ID: LIB3148-057-Q1-K1-F1
cccacgcgtccgctttaaagaaaaaaataaataaataaaaagaagtgaaaaaacatatactgacagggcatcccattcataagccacggtacatactatattcaaatttagtatcagcaattcaagagagtaggtaactctatagtctgttgtaataattttttatcggaaaaccaatataatactcatataaattattttataattttttttattatttagtaactaataatgctcgtttttagaaataaagaaaatgtaataacgagagataaaaataggagatgaactggtagtatatgttttt

SEQ ID NO: 12120 - DNA, 723 bp, Gossypium hirsutum
  Clone ID: GOSHI-09MAY01-C46146_1
cgtacatatattccagagcactcactgaagataaatgcggctgctagtgtctccacagggattatttaggatggatttcaacttgcgtctcatatgttactttaaattgaaccatcaaggatttcaaagcttcattttgtaacctggcattgggcttttagtgccagattgtgcagaatctttgaaaccaagatggttatcttcctgtgttgagcaaaaaaaaaagcacttgctttgctaacccgtatgaaaaatacaaccgcgaggatttcttcaagcggctgctatcttgagaacggcattttttatataccctctctgacaagaaagaaatgttctttttaggagaatctagaggcgggagagtgtaccagttgcaaataaaaaaaatcagagaaccagagtgctttatggataatctggtcatacaaaaaattattaggattctaagacagcaatgttacatttgaaaaataacgattccgtaatcctcttataaaaactgctgtaactcatggagatggcagcaagcaaccctggttcatgagcatcccaaatggcttgaagtttgcagatcaagaagactagccccggttatgaagctggtacttgtgttttttttctttggcatttgaatattttatggtggataagatataagttgctatctgcatcatttattttgattactggtcatacaattcatccttccctattctacct

SEQ ID NO: 12121 - DNA, 284 bp, Gossypium hirsutum
  Clone ID: GOSHI-09MAY01-C46176_1
gggaaatgaagggagagatgctcttaattggtagcttttcatggaagttcacaaccactgtgggtgtgatcatctttgggaaaagttaaatgaaggcattgtaggttaacccctcatgattttatgtttattttcgctttgaacgtttcttgtaactgttgtttgatatgcatagggacttttgatttagccatgtacaaaaacagttcatgtttcaaggaaagctcttcccccccccccctccccccgcccatttattttaaattattataataaaaatatag

SEQ ID NO: 12122 - DNA, 777 bp, Gossypium hirsutum
  Clone ID: GOSHI-09MAY01-C46116_1
cagatgaatactggaaaaagtcgaagttgccaaatgcaaccttatttaagcctctgcagccatataaaagacgcataaaagagacatttaaagattttccaccatcatcactgccccttatcgacactctacttgcaattgatccagcggaacttctaactgcgactgctgcattaagaagtgaatgcttcatgaccgagccttatgcttgtgaaccttctagcctcccaaaatattcccccagtgaagagatggatgcaaaacggcgagctgatgtagcacgcagactcatagcagctagtaaagccccaggtgacggtgcaaggaagacacgaacacgtgatcgtgcaagggcagggcctgccccagaagccaatgccgagcttcagtctaatcttgatggaaggcggttaataacccatgcgaacgccaaggcgaccatttgcttttgtcatcaaccattatcttctattgttagaatttgttccctacttcccctaagtaattgagcatagaatttcgaaaccggagcttgtttgtttcagctttcaagttgttatatcagtaacaagaagttaggcacgcgcataagtacttgttcgaagataaggtgttctaaatctcgtcttaactttccttgttagatatattgtccaatctcagttgtgatcaagagtctatacaaatattaaggcatattagtattgctgcaacctttcattactcttgaaatatccgtgtctgctatatattccagacacgagtatgaagagatga

SEQ ID NO: 12123 - DNA, 409 bp, Gossypium hirsutum
  Clone ID: LIB3148-049-Q1-K1-F2
cccacgcgtccgcttgtgaaccttctagcctcccaaaatatccccccagtaaagagatggatgcaaaacggcgagatgatgaagcacggagactcaaagcagctagtaaagccccaggtgacggtgcaaggaagacacgaacacgtgatcgtacaagggcagtgcctgccccagaagccaatgccgagcttcagtctaatcttgatagaaggcggttaataacccatgcaaacgcatagagcaaaagcgaaaagttccccccaccacaccaagatggagcacttggctttcctttaggagcatcacaacacattgatccttcatgtgttcctcctgatgtccccttcagcactacattcacatattcgaaagaaccaattcaaacttggtctggtccgctggtcgagtc

SEQ ID NO: 12124 - DNA, 579 bp, Gossypium hirsutum
  Clone ID: GOSHI-09MAY01-C46126_1
cacaaagcgcacaccgttaatttcacttcttttgagatgaaagctaattgcagttgccaaatgtttgaacattccgggatcatatgcaggcacatattacagttttcagagtgaaaaatgttctcacactaccttcacaatatgtactaaagcgatggacgagaaatgccaaaattggagacatgcaggatgaacatgctaccgaattgccaaataattcccgggaatccttaacagatcggtacaatactctacgccaagaagctattaagtacgttgaagaaggggcgaaatctattcatgtttacaatgtggcaatggatgctttacaagaggcactgaaaaaggttagctctgcaaaaaaccaaagccctatatctgctgaagatggagcactgagcaatggacgtaatcaagagttgcatgcagctggagatatcgagacagtggcatgtcaatctgcggacgagaaggaaaagaaaatccgggaattgacaacagagttggagaccataaaccgccgatgcgaagtgtacagagccaatctgctggctgtgttgaagggacatggaagaacag

SEQ ID NO: 12125 - DNA, 571 bp, Gossypium hirsutum
  Clone ID: GOSHI-09MAY01-C46086_1
cccacgcgtccggccgaacgagccctagcaacgatagaactcttatgccggatcccctcgggttgctccgccttcgcctcacacgcgctcactgtcccgcttttggtaaagacgatactgaggatctccgacagggccacggaatacgccgctggcgcgctgatggcactctgttcggaatcggaacagagtcaaaaggacgcggtgagcgcgggcgttctgactcagctgctgctgctggttcaaagcgattgtacggacagggctaagaggaaagctcaaatgctgcttaaattgcttcgggattcgtggcctgaagattccatcggaaattcggatgatttcgctggcagtgaaatcgtacccttttgaaaacgataagtacttcacccagattctccattaaaaagaagaccaatatttttaaatttttattatttttgcttaaatcaaaaacctacaaatttaaaaccataatttctgggtttttttttagtgtttagatcaaagtatatagaggaagacctgtaattttcatgtatctaattttttgtacctaagaatttttgtt

SEQ ID NO: 12126 - DNA, 725 bp, Gossypium hirsutum
  Clone ID: GOSHI-09MAY01-C46016_1
gttcttaactgtcaagacaccgaagaatctttcggttcagatatatcagctgaatctaatggaatggtggcctcagatggtagtaacaacaaaccaatgggatcttctgatcacagttatgttgagtgccataacggtttgaacgcatatgattttggtttagatattggggcttataaccataaagataccagtgacgagaaaaaccttggggaatatatagcgataaaacattccgcaaagaactctgacacgtccttaatggattcttgttcatttgcttcacaagacattagcttgtcaagcatcggctctctatcccttgcagacaaggacaagttggaagagatgaaatcggagcttgatgcaatagattcacagtaccagcaatgtttccaagagctcttaaggatgagagaagaagcaatggaaagcgccaggaagaggtggatatcaaagaagaaagtatctgtgatgtgatgtacaatatcttttacttgctaaccatcaagttttttctcctcttcccttagcttatgatagttgctttttttttttcggctgttgtttgcattggaagatcattttctttgacaaaatttcatttatttggtttattttcagatatgggattgaatctatgattttagttcattggttaaaaaaaaaaaaaaaaaaaaaaaaaaataaaaggaaagcgacctgaaaaactaacactaaatata

SEQ ID NO: 12127 - DNA, 588 bp, Gossypium hirsutum
  Clone ID: GOSHI-09MAY01-C46246_1
cctcaatccagagcccatccaattccaacccaattttccaacacgaaactccgctcccggggaaggcacgatccaagcgttcaagggtggccccatgcgggtggtccgcccgactccgccacctcgatccgaaatcggcggcccagaagaaaagggagaacccgaacgccaattcggagttgccagtccggaaatgtttacattgtgcggcggaaaagacgccgcaatggaggactgggccgttgggtccgaaaacattgtgtaatgcatgtggggtgaggtacaagtcgggccgattggtgccggaataccgtcccgcagcgagtccgacatttgtttcggcgaagcattcgaattctcataggaaagttttggagcttaggagacaaaaggaggtccaaagagcacagcatcaacagctgatgagtcaaacttcggttttcggcatatccaacggtggttgtcctgatgatttcttgatccaccatcatggtgggcccaattttagccacatgatttagcaatatataatctttttttttttaaaggtagttcttttcctaaaatttgatcttaaaagaaaagaaa

SEQ ID NO: 12128 - DNA, 636 bp, Gossypium hirsutum
  Clone ID: GOSHI-09MAY01-C47916_1
gatccattcaacaacttggatgttttgaacccattctcccattctttccctttccctttcccttcatttctttccacccatttccctggtttctcctctgaaattttcccctccttgggaacccaactcaactgtgtagaaaccccaagggcccatgtctacaaagcctaccttccaggggtcaccagagatgaagttctggttttcatcgatgatgacaggatgcttcagataagcactgaaaatggtaacttcatgagcaggttcaagttgcccgacaatgcaaggactgatgagattgagggttttatggagaatgggatgctcatcgtcactattgggaagcaaactcaagctccggagaggccaaatgttagggtcgttgaaatcacagagtaatttcacttttttttttgaatgcaaaatgtcaagtgatgctctactctatggtgtttgttttgttttgaagcttgaaaaaatgtgtttaatgtcaaagagtaagtcggttcttgtactagaacagtagttttagtagtaataaaagcacttttgtgttgtgtactttgcttcaactttggtttaagaagttaggaacagaattcaagccgaaaaaaaataaaaatatatataataaat

SEQ ID NO: 12129 - DNA, 898 bp, Gossypium hirsutum
  Clone ID: GOSHI-09MAY01-C47926_1
ggagtatggataataccaaagacctgttcttaaagaaaatgcccagctgatgacaatattgataatcctccatttgatttcggaatcttcacacatgctttgtcatctggtattgtttcatcaacaaagttcttttccaaatactgctactgtttatggtggggtctacagaatttgagtacccttggccagggacttgaaactagcacctaccctggtgaggtcatattctccatcgcacttgccatttttggactcattctctttgcgcttctgattggaaacatgcagacctatcttcaatctctcaccattcggctagaagaaatgaggattaaaaggcgtgattcagaacaatggatgcatcatcgtatgcttccccaggacttgagggaacgggtgaggcgttatgaccaatacaagtggttggaaacacgtggtgttgatgaagagaacttggtccagagcctcccaaaggatctgaggagagatattaagaggcacctctgtctggctttggttagaagggttcctctgtttgagagtatggatgagagattgcttgatgccatttgtgaacggctgaaaccatgcctgtttactgagagcccctacttaggtccgagaggggggatcctgttgatgagatgctattcattattccggggccgtcttgagaagtgttacaccggatggtggaaggagtggggtttttcaaccggcatttgctgaaagaaggagatttctgtggagaggaactcttacctggccttgggtcccaaaacggtgctagcttcacatctactcggacgtgaagctttactgaggtcaagctttgccctatactgagaataaatttggtgcgcaaatcagcgtctacagtacagtcaccatcatc

SEQ ID NO: 12130 - DNA, 434 bp, Gossypium hirsutum
  Clone ID: LIB3135-038-Q1-K1-F7
gtgattcagatcattggttgcattattgattgcttccccaggacttaagggaacgggtggggcgttatgaccaatacaagtggctggtaacacgcggtgttgatgaatagaacttggtccagagcctgccaaaggatctgaggagagatattaagaggcacctctgtctgtctttgattacaatggttcctttgcttgagagtttggatcagacattgcttgatgccatttgcgaacggctgatatcatgcctgtttactgagagcacctacattgtccgagagggggattctgttttttagattctattctttatttgttgcactggttgatagtgttacaacacatggttgaaggagtgggtttttcaaccagattttgttaaaagaaagagatttctgtggataggaacctttacatgggcattggattcc

SEQ ID NO: 12131 - DNA, 546 bp, Gossypium hirsutum
  unsure (1)..(546): unsure at all n locations
  Clone ID: LIB3189-040-P1-K1-C5
cgtcncnngaatatttcaaattggatcgtgcataaatggtgtggcccgatctgtaaacaaagacctgcgaggtgcgtcaagnnaatttaatgtcctgatgngnnaattggcncnnttgaagatgtgcttagcaagaaataagggcgaaaagaaaagaatgttgcgggttatatgtgtgtataccaatgtnnggcctgagggtgaccctnnacttcagcttccgtgcgaagagatacctctgttggcaggcgcagaccaattcaaaatgatgtactggagtcgtagcacaaagaattgaaatccatgggtatcgacaattctcatccacaagactacctaaatttctactgccttggtaatagggaagaagttcccaaaagttctgggccaagttcatcccaatgtaaccatagtgaaacggtttcagcttcacaaaagttccaacgggttatggtttacgtacatgcaaagggaatgatagtagatgacgagtatgtgatattggggtctggcaatattaatgaacgattcttggctggatcaagg

SEQ ID NO: 12132 - DNA, 381 bp, Gossypium hirsutum
  Clone ID: LIB3135-037-Q1-K1-F4
caaagactcaggtgctcagaatttaattcctatggaattagccttgaagattactagcaagataagggcaaaagaaagatttgcggtttatattgttataccaatgtggcctgagggtgaccctacttcagcctccgtgcaagagatactctgttggcaggcacagacaattcaaatgatgtacggagtcgtagcacaagaattgaaatccatgggtatcgagaattctcatccacaagactacctaaatttctactgccttggtaatagggaagaagttcccaaaagttctgggccaagttcatcccaatgtaaccatagtgaaacggtaaccaaacagtgacactacctttgtcatttggttatatacttgggtgattg

SEQ ID NO: 12133 - DNA, 671 bp, Gossypium hirsutum
  Clone ID: GOSHI-09MAY01-C47566_1
ctgcactctcgtctcttcacgccccaacactccgatctgtctttatcggattacccgacctgaaaccggaaagatccaaatagaagttaagttccttcaggaagatatggccgacgaagttaacaaaactgcatttttagagattcaaggtcgaatgattgagctcaccacaaattgaaacaggtgcaaaaccagatgcgaacgaaggaaggtgaaaagaagcgtgctttcttaacattggaggagctgaatcagctgcctgatgatacaaatacatacaaatccatagggagaacgtttgttttagagcctaagtcagttttagtgaatgaacaagaacagaagctgaaagatagtgaatctgcaattggttcattacagagctcaaaggagtacatggaaaaacagctggcggaggtggagaacaacttgagggagctgctgcaacaagatccaggcctcgctcgtcagataatgtcgatgagcgtgtaacttctttaactctttcttattggaaaaatacttctcacgttatcttgtgtttgtggttgctttaaaaatttatcttagtactggataagaatccccctttggggttaatgatatgcgtttttgggtattgacctatggagctaaaaggtccccaatttccttaaggtataatattttat

SEQ ID NO: 12134 - DNA, 423 bp, Gossypium hirsutum
  Clone ID: GOSHI-09MAY01-C47506_1
acgcggtcgaaattataacagattacagaaccgattcttcgcttagacatgggtgcaatgatatgctcaaggctgattgtgttgatctgttggttaaatactacaaagaagcgagacgtgcagtttacttgagcaatgaagaagacgatactcgatccaagagggatgcaagtggagcctctttaccaatagagaaaacatctagcgtgagaaacatggtggttaagtctaaaactagacggggtggaagatgttgtttgtgtttccatcctttctcgatacaaaaggtgtcggtcattgtgttcttttgttgtcatgcttatcacacgacttgcttgacggactctactgacagtaatagcagcaaaaaagggaccggaccgacttcacaagagccatacggttatgacaatgatgatgatg

SEQ ID NO: 12135 - DNA, 781 bp, Gossypium hirsutum
  Clone ID: GOSHI-09MAY01-C47136_1
cggactctaggtttgacgcgtggggccgttttgcatcatcatcatcatcatcaacctccaatcgtctatctctatgttagtgtcatattttccttacaacgaagttcttggaattgcatgttgctcgccgcctggggggcctggctgaagaaaggtcttagctgaattgcacaaaccgtgaagggggagggaggtttgtttcttttacaaggaacggtgatggcggctaagaaggcgagtgaatccttctccaagaccttaattgaggaagttcacaaatggggttgcatgaaacagaccggcgttagctcgaggtacatgatggagtttgggtctaagcctactcaacgaaacttgttgatttcgggtcagtttctccataaggagcttcctattagaattgcccgaagagcaattgagcttgagagcctcccttatggtctttccgagaagcctgctgttttgaaggtgagggactgggatttggattcctttcgtgacttaagatctttccccgagatcaaggctaccaatgatgagagggaatttacacaaatgattaaggctatcaaggtgagacacaacaatgtgctccctatgatggctctgggggttcaacagttgaagcaaggcatggatccagagatcgtttctgaggatcttgatgaggttcatcaggttctagatagattttacatgtcaaggatcgggatccgtatgcttattgggcagcatgtggagctgcataaccctatcctactctgcattgtgtgggctatat

SEQ ID NO: 12136 - DNA, 486 bp, Gossypium hirsutum
  Clone ID: GOSHI-09MAY01-C47366_1
cctacgcgtccggttcgtggggcacaggggactggtggtggcaatgatggtagtagtagtggtcttgccgataatgcgcagaggtctgccggggataatcgaccggtggagaggagtgtgcaggatatcgcttccttggccatttagggctcgtgggtcgggttcaggatcaggcgataatgcggagaccaggcaagaagatctggattgagaactattgaaatacaacaaaaagtatcaggatttcttgtattagacatgatggtagaacagcttgtttcaaagttgggatatgcagagttatatgtaaacatgaagaactaagattagtttggtaacctttttaaagaagtgctagttttggtattttaatattacatgcccatctgattttatttttttatatatataacagatttgcttggctatgacacaacttcacccccgcttgttcttttgtttgcccctctggtcgaatcttaattc

SEQ ID NO: 12137 - DNA, 879 bp, Gossypium hirsutum
  Clone ID: GOSHI-09MAY01-C47256_1
cccacgcgtccgcttttagtgtcggttgactcgtaatcttgttgttctcaaggctggaaccttttacacgaatgacaaaggtttttcccaacgctagttttaccatcggtgatgccatctcggagaaacagccaccgcagcataagctgttaccggcgggtgaagcaagtgaggagacgattctaaccgtctggaaaaagtcattgcttttcaactgtaatggcttcacggtgttcgattctaaaggtgacttggttttcagggtcgataattacatggatggcaataagggtgagatccttctcatggatgccagtggcaaccctctcctcactatccgccgcaagaaaatgagcctcggtgatagttggctggttttcgtcccacgcgccatggagaagccccgactttgcgttaagaaatcagtgaatatcttaagcaagtgcttggcttacgttagctccggcaacaataacagtcggaataacatcatgtacgagattgaaggctcgtattcgcaacgaaattgcgctgttttcgatgataagaggcggttagtagccgaaatcaagcggaaagaagctgttggcggtgtcgcctttggaaccgacgtcttccgccttattgttcggccgggatatatcacaacggactccgccatggctctacttatccttctcgatcaaatgttcggatcttctagacgataaaaactttctttttcttcaaccgaaaacatctttggtttctatgaactttctccggtcgtccccagtaaatcatttcacttttgtaagaataaacaaaaagaacaaaaagaaaaaagaaacttgagctggtttattgatcttggggcttggttttttgtttagataaaaa

SEQ ID NO: 12138 - DNA, 435 bp, Gossypium hirsutum
  Clone ID: LIB3135-047-Q1-K1-F3
cccacgcgtccgcccacgcgtccgcccacgcgtccgttccccaaggttttttttttttaatcatctctttgagttgatcttttagtgtcggttgactcgtaatcttgttgttctcaaggctggaaccttttacacgaatgacaaaggtttttcccaacgctagttttaccatcggtgatgccatctcggagaaacagccaccgcagcataagctgttaccggcgggtgaagcaaggtcgataattacatggatggcaataagggtgagatccttctcatggatgccagtggcaaccctctcctcactatccgccgcaagaaaatgagcctcggtgatagttggctggttttcgagggagaatccatggagaagccccgactttgcgttaagaaatcagtgaatatcttaagcaagtgcttggcttacgttagctt

SEQ ID NO: 12139 - DNA, 671 bp, Gossypium hirsutum
  Clone ID: GOSHI-09MAY01-C40996_1
gtgcctacttgaataataataacacctcatcttagactccaataattatcttgctatgcctgacctcttttcagctattctgccttgttctgaagaagcctttcataaagaaaaaggtacagttagttgagatcatctctctttcgtgtgaggtggccatgtttgctacttgtttcgttctgttggacaaggaattttcgactacaatcggtatcttcatgcttactttattcctgatggggttcttagcacaaatgagtgctgaaaggtatgctttgtatgaacaaacaaagcaactagacaccagtgagaacaggttcttcacaggtttgaaaatagcatcagtcgggtttctcctatatttcgtccctcagaaactgatgaaaagctttgagagcacattcccagtatttggattatgcatggatacaagtacaacaggtttaccatgtgataggaacagcagcagttcagagagagcatggccaagacaactaagggaaatggcaaaggctagctttagtaaagatggaagcaaagctccaacagatccttcaagcagcaaaagcaaatggagtgggttgtggggaacaaaaaggagtggcagctcttctttagattcctctttagattacaagtcaaagtccaaatcaaaagggttgtacaaagac

SEQ ID NO: 12140 - DNA, 438 bp, Gossypium hirsutum
  Clone ID: GOSHI-09MAY01-C40986_1
cggacgcgtgggcggacgcgtgggctcggttagttctgtcctgaagctattatgttccgtccgaactctgttgatggcggcggcagaccacaaactagcatccgagcaagattcacagttctatcattttatggaactgaaagcactcaggcccttattatgcatacatgacggtgtggatgaaattaatcctctgaatttcctcatggtaatggaaatgtcagatgactcgttgtttttccgctcggataatttcagggctagtgcactgctaactgtgattgaaactttgcaaggatttatcgagatctatgatgggttgaactcctttcccgaaattttcttaccaattgcaacattattagttgaagtttcggagcagaaacacatgccgaaggcactgaaagataagttcaacaatgtttctcaactcattaa

SEQ ID NO: 12141 - DNA, 1238 bp, Gossypium hirsutum
  Clone ID: GOSHI-09MAY01-C40896_1
gtaacttttctttgactggtcagaaagggaaaacttacaaatttagggttacaaatgtgggaatatcaacatcaattaactttaggatccagggtcatccaatgactcttgttgaagttgaaggatgtcatactctgcaggaggtgtatgaatccatcgatattcatgcgggtcaatccatagctgttttggttaccttacatgggtcggttcgggtcgacctcgcggccgcttcgacccgcttcaccaagcccatcctcaccactaccggtattcttcgctatcagggttcccaaactccgccctctttgccatggccggttgccccaacttatcacgttcactggtccatgaaacatgccaggactatcaggatgaacttgacagcaaatgcagcttggcctaatccggggggatcattccactatggggcaatcacctgtggaggacaattttattggctaatgaattagtcgagataaatgacaaattgcggtatgccgttaacgggatatcctatgtggatccagccactccattgaagcttgcagactggtttaacatccctggtgtcttcgtcttgaacgggaccaaggatgctcctccttcagggcctccaaccttgggtgtctcggtctttggactcaccctccatgactttgttgagattgtcttccagaacactgaaaaaaccatccagtcttggcatcttgacggttataacttctttgttgccggatatggcggtggcaactggacaaccgacgtaagaagacgaaaaaggtacaacctggttgatgcagtatctaggaacactgttcaggtttatcctaaaagctggacttcaattttggtctcattggacaacaaaggaatgtggaacttgaggtcgcaaacctggtcaaagcggtacttaggccaagaagtctatcttagagtctggaacgacgagaaaagcttgtatactgaaactgatattcctccaaatgcactattttgtggcaaggccgttcaatcttagaacaccattaatgtcgtcttggtgtaatctacagcagctaatttattttctgatttttttgttctttttttaggagggtgggactgtttaggaagggaaataagacttaaaaatatagtaaatttattgaggctagattttaaaaaaaaatttatattaaatcacaataatgagtttcttttatttatcatgtataaaataatgtggtgcgtgccat

SEQ ID NO: 12142 - DNA, 561 bp, Gossypium hirsutum
  unsure (1)..(561): unsure at all n locations
  Clone ID: LIB3147-035-Q1-K1-B9
accctnactaaaggggaaccaaacagctggagccttccaccgcnnggtggcggcccgcttcttagaacnttagtggatctctcccgggccttgcaggannnattctgtagtaagtgaggaaacannttgattnncgtagnntgaagaaagtggtntnnagaatangnntcaaaccanngtgaaacccaggggaananntttcaataagaagatctcggtatttgattgggtcacaacccaaaaaaaanntttgaaaattttantggatacgagagatattatganngtctattttnncatggaaaattacacggcactttcngatttggagtttcttaattctcaagttatttaaataatttaagtgacctgttgctttcaggaagaatagcttgtagctgaatttgtgatttntgttgcaaacatnggttannaaacttgttaatgagatgcntttgcgagttcttaatgatcttatgtgtgatttcaatattctggttttaaattgagttcaaattcaagtgaagtgaatttgctaaatatgcattatgttcatggata

SEQ ID NO: 12143 - DNA, 493 bp, Gossypium hirsutum
  unsure (1)..(493): unsure at all n locations
  Clone ID: LIB3147-035-Q1-K1-D11
ccctcactaaaggggaaccaaacagctggagccctccaccgcnnggtggcggcccgcnntctagaaccctagtggatctctcccgggccctgcaggannattcaaacatgtgcggtgcctcaactnnntatgggataccgnnacatcttgattgtactcnngggatgagaannaccctttcacnnattcgttcaaactctatgccaagcattgttttgaaaagtatggcacttaataagaaggggaatncgtttctaatcnttttcgaatttttgacattcgactttaagacattaataaatcaattcggtaccaattttgggcgttatgagggtgctaatccttccttgtgcgtaaccgactcccanacctattttctcaaaattcgtagacctaaaatcattttcaagggtgatccgatcacacctcaataaaaggatcggtgggcaactccatttttttggtttttttttaaagtcgacaactaattttt

SEQ ID NO: 12144 - DNA, 972 bp, Gossypium hirsutum
  Clone ID: GOSHI-09MAY01-C40876_1
ccatggtgtgcttcatcacgctattgtattcctggacatcctcatcgctgggcgcagaaatattatgttcctgtatgcttctgatgctaatgccattcgtcaagtaatagaacgggatatagcatatgttgatactgtgaattacactgcagactaccgtccagattggggttcaatgagcttgctaatagattttttgcgacccaatacatcagaaggatcttcatggtacagtctgcttaaaaaggctgggggcggctgcaatgaccttgtataccctcgcctccggtttgttgctgtgctgactgcaatggcatggacggaggcttatggagggtttagctcagttcttatatggctgcttgttatgcacagtgctcagcgggaagtacgagagcgccaccattattctgtagattgtgttgttgccatctatgtgggtattcttctttggaagatgactggttttatctggtcggctaagggtggaactggagatagcagactcactaagcttgggaaaattcaaggtagactgctccaagcggccaaggattccgacatggatgaagtaagggagcttctcaaagatgttgagttggggaatcaagagagcccgaaacaagggccgagcaaggtcatgtggttgtttgctagcggaactattttcttctcacttaccattgttattttggccttcacatggacaagcgatggctaacttctccagcataatattaccacggtgttgaggttctttactccgttacgacacaagaaaggcttcgtcttggacagtgttcgcatgggacgaggagagttttacagttacatgtgaaacttggttgtagcttttggttaaggaagtcaatgtttagctagacttgagcttacattatctgttctaagagctgttgccttcactttccatagatttatgaattttgctttcgtacctttttgttatgaatc

SEQ ID NO: 12145 - DNA, 493 bp, Gossypium hirsutum
  Clone ID: GOSHI-09MAY01-C40596_1
aaaaatcttaattccctctagaaaaaatctttgatttgtcaaaattgtcgggccgtgggaaaggaggcaagggattaggaaaaggaggagctaagaggcatcggaaagttctccgagataacattcaaggcatcactaagccggcgattcgtagattagctcgtagaggcggtgtgaagaggatcagtggcctgatctacgaagaaactcgtggagttctcaagatctttctggaaaacgttatacgcgatgctgttacctatacggaacacgctaggcgtaaaactgttaccgctatggacgttgtttatgctctcaagagacaaggaaggactctttatggtttcggtggttgatttagggttttagggtctttcttcttttgttgtaaatctttcgttgcaactgcttggtgtaggcttttttttttttgtttggatcgatgtattttcgtttcgatgaaaatttcgctccgaaagctaattgggtttct

SEQ ID NO: 12146 - DNA, 404 bp, Gossypium hirsutum
  Clone ID: LIB3147-058-Q1-K1-C6
gttttgtttactacacaatgcggtgcttaagacttaaaactttggagattcttggggtctatgtaaaactattctcatttcgcattgaatatcttaatactaaattaaatttacaaaaaaaaaaaaaaaaaactcaaaaaaaaaaagtgaaaaggatcaaaaaccatgatcacagaaaaaactcgtggagttctcaagatctttctggaaaacgttatacgcaatgctgttacctatacggaacacgctaggcgtaaaactgataccgctatggacgttgtttattctatcaaaacacaattaacgactctttatggtttcatttatttgattaaaggttttaaaatatttattcttttgccggaaatctttccatgcaactgcttgaaaaacccttttttttt

SEQ ID NO: 12147 - DNA, 289 bp, Gossypium hirsutum
  Clone ID: LIB3147-031-Q1-K1-H11
cttgatctacgaggaaactcgtggtgttctcaagatcttccttgaaaacgttatacgtgatgccgtaacctatacggagcacgctaggcgtaagactgttaccgctatggatgtcgtttatgctctcaagagacaaggaaggactctttacggtttcggtggttgattttggattttagggtttctattttgtaacagtttcttgtaggcttttttttcttggattttctctttagtttaatgtattttcgtttcgaattacgatgaatttctctgaaaatctcgtttc

SEQ ID NO: 12148 - DNA, 1045 bp, Gossypium hirsutum
  Clone ID: GOSHI-09MAY01-C40586_1
gtcctccaccatcattacccacacttgaaataccagggctaaatgcacctattcctcctggagcaagctttggttatcaccctggtggttggggcaaacctccagtagatgagtatggacggcctttgtatggagatgtatttggagttcatcagcaagaacaacctaactatgaggaggagcctgttgataagtctaagcattggggtgatttggaggaagaggaggaggaggaggaagaagaagaagaggaagaggaagaggaagagcagattgaagaagaggagttggaggatggaatccaatctgtcgatagcctttcaagtacccccactggagttgagactcctgatgtcattgaccttcgtaaacagcagagaaaggagcctgagaggcctctctaccaagtgcttgaagaaaaagaagagaggattgcccctgggactttacttggcacaactcacacatatgtggttaacactggcacccaagacaagtcggcagccaaaagggttgatcttctgaagggtcaaaaatctgacagggtggaagtcagtttacagccagaggagttggaagttatggacaatgtgttgcctgcaaagtatgaagaagctagggaggaggagaagctacgcagtcagcgtgaggactttagtgatatggtggctgagaatgagaagaaaaggaagcgaaagatgcaggagaaagagggaaaatcgaagaaaaagggtttcaaattttgagcacgcaagattctgttggtgtcaacatgaagaagcagctgacttaccattttccatggagaatgaggtcctttttaacgtttgtgctagatgtgttgtacttgatccgatttcccgtattaacttgtatgctgtataactaatatataaagatatatgccaatctgtcatgatgatacatatgagttccactggcccgggttcctgcaggacgaagaaagataacaaattgatatagccagtgactacttaacatattgctgataaaaaacaaaggggggggccgttctaaagattcc

SEQ ID NO: 12149 - DNA, 300 bp, Gossypium hirsutum
  Clone ID: uC-gsronu33B132c06b1
ttacgcgtccgcccacgcgtccggtcagcagccaaaagggttgatcttctgaagggtcaaaaatctgacagggtggaagtcagtttacagccagaggagttggaagttatggacaatgtgttgcctgtatagtatgaagaagctagggaagaggagaagctactcactcagtgagaggactttagtcatatggcggctgatactgagttgatttggactttaaagatttaaggcaaagagggataattggaaaaaggcggggacaaattttccgtccccacaattctgcagcctgcatgg

SEQ ID NO: 12150 - DNA, 946 bp, Gossypium hirsutum
  Clone ID: GOSHI-09MAY01-C40556_1
gctaccttctttgcttagcttgtcaaccaagtggcatgtctgtgtactctgtcgggtgtggcttgggtggaaagcttggacatggctcaagaacagatgaaaagtaccctcgattaattgaacaatttcaacttttgaacctccagccaatggtggttgctgctggtgcttggcatgctgctgttgttggtcgggatggaagggtttgcacatggggttggggacgttatgggtgcttaggtcatggaaatgaagagtgtgaatcagttccaaaggtcgtagaggcattaagagatgtcaaagcagttcatgttgctacaggggactacacaacctttgtggtatctgatgatggtgatgtatactcttttggttgtggcgaatctgccagcctcggacataatactgctggtgaaggacagggaaacaggcatgccaatgtgttgagtccagagctggtaatgtcattgaagcaagtgaatgaacgggtgggcctgcgcggccttacaaactcgatatactggaatgctcatacatttgcactcaccgagtccgggaagctttatgcatttggtgcgggagacaaaggtcagctaggcatagagttagctaacaatcagacagaaagaggaaaccccgagcgggttgatatcgatctcaattaggaatccgatggcttctcctcccatttgcatacaccatgggtgattcattagattctagacaatcacgcattgcatgtggtgttttaagtttccctgtttattttgtaaatagaaacaagcaaaaaagaaattgtgaagattttaagtttaggagtagcaaagggccttaagtggtctgatttcctaagaaaaaaatggttagcacataggccttaagttgttaatagctgaaacatctctgttcaggttcattgattacttatgttaaaaattgcattctt

SEQ ID NO: 12151 - DNA, 716 bp, Gossypium hirsutum
  Clone ID: GOSHI-09MAY01-C40576_1
cccacgcgtcgctacctgccactctgtctgaagctttgagctttcaacctttccaacaatggcagcgataattggtgagtctccaaagcttgctctgtattcatactggcaaagctcatgttcatggcgagttcgcttcgctttaaacctcaaagggatttcgtatgagtacaaagctgtgaatctttcaaaaggagagcagtttacaccagagtttgagaaattgaaccctctgcattttgttcctgttcttgatgatggtgatgttgtcgtgtctgattcatatgcaatcttgttgtatttggaagaaaaataccctcaaatagctctcttaccagctgatccccagcttaaagctctgaatcttcaggttgccagcatagtcacctctagcatacagcctcttcatatgctgtcaaacttgaaatatcttgtgcaaaaagttggtccacaagaatcacttttgtttgctcaaactaatgtggaaaaaggtttcaatgctctcgagaagttgctgaaagacattaacggcaaatatgcaagcggagacgaagtatacatggctgatgtatttatggcacctcagatagctgcggcgatgcaacggtttaaaatcgacatgtccaagtaccctagattgtgtccgatattcgagtcgttgaaggcgttccccgatctcgttcatgcctcgcctgaaagaaaacctgatgctgtaa

SEQ ID NO: 12152 - DNA, 613 bp, Gossypium hirsutum
  Clone ID: GOSHI-09MAY01-C40536_1
cccacgcgtccgcggacgcgtgggttggtccagtaccagctaggtgtttctcttgggctcatatggccgatgttccccaagtgcctacactcagcatcccggaggtgaaactgagctcctcctccggcggccggaacatgccggtgatcggaatgggcacggcggccgatccatttgatgaaactgctttgaaagaggcgattctggaggctatcagtgtcggttaccgtcacttcgacgctgcatcgctttacaaatcggagaagccattgggagaagctatagcagaagcgattaagttcggttttatcgcatctcgcgatgaacttttcatcacttccaagctatggtgcactgatgctcatcccgatcttgttcttcccgctctcaaaaattctctcaggatgcttcagttggaatacttggacctttatctcattcactggcctctaagtgctaaacctgggaaaattggattccctgtgcccaaagatgaacaactagctatggatttcaactcagtgtgggcagccatggaagattgcctgaggtttggcctcacaaaatccattggagtcagtaacttcctcttgcgagaaacttggaaacatac

SEQ ID NO: 12153 - DNA, 766 bp, Gossypium hirsutum
  Clone ID: GOSHI-09MAY01-C40526_1
gcctgcgctactcgtacgaccacgcgttcgaaatcctgaacatttgcagtcaaaaacgttggatccatgtgaaaaaggatcaagttctgaagatcaaaccacgaaatcgccagaatggatttcaccaaaaggatgtccaaatcaaagcattgaaaccaagaaagtttgtgctgattgtggtacctctaaaacccctctttgcagaggtggcccagctggtcccaagtctctatgtaatgcatgtgggatcagaagcaggaaaaagagaagagcaattctgggtttaaacaaaggagaagacaagaaatcaaagaaagggaatatcaatggaaacagctacaacagaaaaagtagttcaagcaacaccaaaaatttggccgattatttgttgcaaagattattatctttaggaaaagaagttttgatgcaaagatcgaaggttgaaaagcaaagaagcaagttaggagaagaagaacaagctgctgttcttttaatggctctttcttatggctctgtttatgcttagtgttttcttacttttattttaatttaaaaatatatatttagaacagaaataataggatctttaatgggtatctaaccattttgaaatgtaaatctttggttaatttgtagctgtctttttagtggctaactattgtggttaattgggggtggttggagaagaaggcttggacggaaggaaagtggaagaagatggaaggtctattctatttttccttgaatcaacttggattgggtattc

SEQ ID NO: 12154 - DNA, 470 bp, Gossypium hirsutum
  Clone ID: GOSHI-09MAY01-C40476_1
cccacgcgtccgtgctgcgatgacatgcagagctgttgtataggtctctttttcccctgctatttgtttggaaagaatgcagaatttttgggttcgggtactctagtcggatcctgcatcacccatttcattctttgggcccttgtcaacactctctgctgcgtcttaactcaaggcttctatttggctttacctggatttggatgctttatctcttgttatccttgtggctatcggagggcacttcgctccagatacaatttgcaggaagcaccttgtggggactttgctactcactttttcttgccatctttgtgccatttgtcaagagtacagggagattcgtgaaagggcagaggaccctaaaccccctgatcttaatctggctgtcgtaactgcaccagacgtccagacaatggatccatcacatctctagtaatgaggtgctattactttggaattttgtttct

SEQ ID NO: 12155 - DNA, 1400 bp, Gossypium hirsutum
  Clone ID: GOSHI-09MAY01-C40756_1
tttgaaacaagccctgattatggacacttggcaagcaaaatgggatcagagtatcttgcaaaacttttatctcagcatttagagcttgttatcaggcagcgcataccaagcatcatttctatgattaataagacaattgatgagctcaacgcagagttggatcgcattggcaggccagttgcagctgatggaggggcccagttgtacatgattttagaactttgccgtgcatttgatcgtgttttcaaggagcacctggatggagggcgacctggcggtgataggatatatggagtttttgaccaccaattgccggctgcattgaagaaactcccctttgatcgtcatctttcattaaaaaatgtccagaaagttgtcactgaggccgatggctatcagccccatttgattgctccagaacaaggatacaggaggctcattgatggttccatcacctatttcaagggcccagcagaagcctctgtagatgctgtgcattttgttttgaaagaacttgtgaggaagtcaatagctgaaacagaggaacttaagcgattcccatcacttcaaaatgacatagctactgctgcaaatgaagctttggaaagatttcgtgaagaaagttgtaaaacagtggtgcggcttgtagagatggagtctagttacttgacggttgattttttccggaagcttcatgcagcaccagagaagaaaccagagaagaatgggaacccacctggcccaaataatgaccatttccatgatacttctctcgcaaggattggatcaaatgttagcgcttatatagccatggtttctgatacattgaagaatactattcctaaagctgtggtttattgccaagtgagagaggccaagaggtcactgttgacccacttttatgcccaagtagggaggaaagagaaggaacgactgagtgcaatgttggatgaggaccctcaactcatggaaaagagaacacagattgctaaaaggctggagctttacaaagcagccagagatgagattgatgctgttgcctggaaatgatatatatatatatatatccatcttcattttcttttatttttttctttcccacatccatccatttaagcgttctaaattcttttacatatgatcaaacatattctgtcaacaacgtgtctcgtagtaaaatgcccaacttattgtttaacatgattcaagtcttgatagtttcatatactaaaataaacaaacaaattaacttctttttttcttcggggtgggggcgtggggttgtttgttctgaattaattaagctttttttttatatatgttttcgataatatttttcaactgtggcatcacatgctagaatgacttgaaaggattatatgaaatgattctgttacatc

SEQ ID NO: 12156 - DNA, 1392 bp, Gossypium hirsutum
  Clone ID: GOSHI-09MAY01-C40746_1
cttttacctcatttccttgttttggccttccaagatctttcttttattagcttacttggtttttgaaaccggtcctctttgctgcttatcctaccatcaacacaagtaatggcaattggaggaccgttatagacaagttcagcccccgcgtccggattgccttcttttcgatcttggatgataccctttatccccttagttctggtatttcaaaagaatgtggaaagaacattaaagactacatggttgaaaagctggggatagaaatggacaaaatcgttgaactgtccaacctgttgtataagaattatgggacaacaatggctggcctcagggcaatcggttatgactttagactatgatgaataccacagctacgttcatggaagactcccttatgacaacttaaaaccagatcctcatttgaggagtctattgctgaccttgcctctaacgaaaattctcttcacaaatgcagacaaggtccatgcagctaaagctctgattaaactcggactagaagactgtttccaagggataatctgctttgagacactcaatcctacccataagaatacagtttctgatgatgaagatgacattgagtttctgggatcagccgttgctacaactgatgtcccgagcagccctgaaatttttgacataattgcgccattttgctgagctaaagccaggaccaagtgccacattattacccaagacacccattgtctgcaagccacaagaatctgccatagagcttgctctcaagattgccaaaatcacccctcagagaactttgttcttcgatgatagtgtccgcaacatccaagcaggaaaatgcgttgatcttcacactgtgctgagacctaaaggagcagattatgcattagaaagcattcaccacataaagcaggcattaccagagctttgggaaacacacatgaaatctgaagtcagttactctggccaggttacagtggagacaccagtgacagcttagattccatgttatttattacttgttttaatatttatgaagatgaaaccccctcataagatggtccccattcctctcccttgttgaggtgatccagatgtctggctctcatcttcattatattaaataatattaatgtataaaatgaaaagggttcctccctgttgcggatggcttaatcaaaaaaaaaaaaaaaaaaaaaaaaaaaaaccacaaaaaactaaacaaaaaaaaataaaaaaaaaaaaaaaaaaacaaacacacccaataaaaaccaaaggcccccctcttatagggatccaaggcttaatttcgcctgaattctagggggggggtccctttttggggccccctagtttcccccccttggccggggggtaaaaaattttttt

SEQ ID NO: 12157 - DNA, 445 bp, Gossypium hirsutum
  Clone ID: LIB3147-033-Q1-K1-G11
cccacgcgtccgattgaaaaggacaaaatttttgaattgtccaatgctttgtacaagaatgatgggacaacaatggctggccttagggctattggttatgactttgactatgatgaataccacagttatgttcatggaagactcccttatgagaacttaagacaagatcctcaattaaggagtctattgcttagtttgcctgttagaaaaattatctttacaaatgcagacaaggaccatgctaaaaaagctcttaaaaaactgggattagaggactgttttgaagggattatttgctttgaaacccttaatcctatccataagaacacagtttctgatgatgaagatgacattgaattcttgggatcatctgtcacaagaaatgatagtcttaaaacccccgaaattttcgacataatcggccacttcgataacccgaaccccg

SEQ ID NO: 12158 - DNA, 498 bp, Gossypium hirsutum
  Clone ID: GOSHI-09MAY01-C40776_1
gggcaggaagacgatatgtcaattgagttgtttttgtaagatgtaaagaagattgcttttcactacggattcgagttagagaaagaacagaccattgaaacaacgtatactacaaatcctcgatccatgatgcaaaaccattaccatgctgcattctggacaatgcgaaagaaaagaacaactacgacatagcttgcaagaagatgatatgcattcctctcttaaacatactctcaggttttattcctcatttggatattttttatatataagacttaatttcccctgagattttcttgttagtttggattattacaaaacataatcagttctttgattaattatatagatttatgcaatcagcatattctgttttgaacccaaattttgtttccttacaacttaagagttgatgttaacccatgttttcatcttacatttatttggacgtgtatgattcggaaaactttaaaaagttcgaatatacatttgttggag

SEQ ID NO: 12159 - DNA, 671 bp, Gossypium hirsutum
  Clone ID: GOSHI-09MAY01-C40086_1
ctgaaactgaactcaatcttcttatacttttaattctgctcgatttcacatgcccacgaaacgcggtctcaagtctcatcggagcgtcagaaatgggatcaaatctttgaaggtttagttggtatgcttaaaacacagcaacaacagcttgaaacacttactaaagaaagaaagatcctcggagatcggatcaatatgcaatatgaacgatggacctctgatgttcgtctctatgaagatcacatatctcagatgagtactgatctggaatcgaaagaaatgacgcgtttgcttgaggctgctaaagccgatatgttggtaggattgaagcaaagagaagcttttctttgcaagttgaggttagaggaaacatcggatgaattgactgatttcagaatctggtttgacatcctctgtaaaaattcaaatgatgtttctcttagggaccccaaaggaaccaaaaagggaatgttgggagatgaggatatcggttcaaagtctgttactttgaagacattggagggcaatttaagaaggctaaagctcaaatacgaaaatcttgcttcggaaaagagttgtcaaattgctgcacttatggcagagaataagttcgcatggaaccagctcaacattatggaaactcagtttacagataagtaaacagcaagaat

SEQ ID NO: 12160 - DNA, 325 bp, Gossypium hirsutum
  Clone ID: GOSHI-09MAY01-C40036_1
gcgtccgccacgcgtacgcccacgcgtccgcccacgcgtccgcccacgcgtccggcacgccccgcctgcggaatcttgaagtgatcctgcccgtataagagcttttccacaagtatgttcaaaaccccaccaacctaaacaagatagaacctatggggctgaataaacccttctatatatatatattacttatttttatatatattttggggcgtaaaattaaattttggtgggatgaaatgaaagaacaaagaatgtatctatatatgtactgaattgatggggtttatattattagaagcggagttatttcttgtctttgatg

SEQ ID NO: 12161 - DNA, 569 bp, Gossypium hirsutum
  Clone ID: GOSHI-09MAY01-C40336_1
ttttccattctttgaggctaaagcaaccatgtcggcaactccaacccagaaatcctccaacgtcaaccaggaggaactccaaaaagtcttcaaccagttcgacgccaacagggatggcaagatctcggtgacggagctccgcgatgtgttgaaatcaatgggctccagcatcactgaggaagaactcaaacgtgtcttggaagacatcgacaccgacaaagacggcttcatcaacctctccgagttctcctctctcttccggtcttcatccgatgaagtcaccgccgccttggagctgcgcgacgccttcgatttgtacgaccaggacaagaacggcctgatttcgacgagcgagttgcacctggttctgaatcagctagggatgaagtgttcggttgattgattgtgctaggatgatcaagtccgtagattcagacggtgatggcaatgtcaatttcgaggagttccagaagatgatgagtgcttccttggcggctaatggcaaaggatctaagccgtaggattcaaaaaaatttaattgattgaaagaaaggtaaggcttaggctta

SEQ ID NO: 12162 - DNA, 786 bp, Gossypium hirsutum
  Clone ID: GOSHI-09MAY01-C41896_1
ggaaaaggtgatttgattatcagaattgttatgtgatctactttcttatcaaatttggtgggaaagaagggatcattttattcatttcccaaatccaaatccaaatctattcatcctacatattcggggtattcttcaagcaacatttaactccaatggggaatcttcttaggccgtacgattaggagtatatgaggatggctatcttaaaacatgaagaaactttcaaagaacaggtgtacgaactgcatcgtctatatcgaatccagaagacattgatgaaaagcatggaaagcagccggcctaaaggaaactttagcttgaagaataattatcaccatggaaatatcaatatgcatcacgatacaagaaccagacttgacttggaacatccggcggctgagggtgatcatcggtcaaacaatgttgttgcagaaccagactatggtcgtaacacaatattagaatccatagatgagagcgagattgagcttactttaggccccacaaggtacgtgccgaggaagaaacatgggactcctcgaacttcggattccggtccgagcttctcttcttcttccaccgaatccagtcatgtgaagaagacaagcacaacaggggatgatttcactggaaaggaccagatgggaccccccaaggtcactgatatgacatttgggtacccaaatgggagtaaaaacaacactgatcttgaagaacagttgagacaggagagattaaaacagccaccttggcttttccaagttctaagcatgaatatgactt

SEQ ID NO: 12163 - DNA, 1031 bp, Gossypium hirsutum
  Clone ID: GOSHI-09MAY01-C41846_1
ccagtatataagttcacctgaaaccccaagcgctggtatctccgtcatttggcgtctccaatctctacctctccttatctcatccaaaggtgtgttaactgggttagcaaaatgtcaaaccccaaagttttctttgatattttgattggaaaagcaaaagctggccgagttgtaatggagctatttgctgatgttgtaccaaaaactgctgaaaatttccgtgccctctgtactggggagaaaggtgttggacagtgtgggaagccgttgcactataaaggctcagcatttcaccgaatcatcccgagcttcatgtgtcaaggtggagatttcacaagggggaatggcacgggtggagaatctatctatggcatgaaatttgcggatgaaaacttcaacctcaaacacactggacctggttgtctatcaatggcaaatgctggaccaaacaccaacggttctcagttctttatatgcactgagaagaccccatggctggatggaaaacatgttgtctttggtaaagtagtggatggttatagcgttgtgaaggaaatggaaaaagtaggctcagaaagcgggaggcctttgcaacctgttgtggttgaagactgtggtcaggtggaagagaattgatgtagatgcagggaatgcttaagtaccttgtttttctttcacttgagcactgctctagaattatatctagttaatagaagaacataatctgttttgttttgagtctgcttggctgattggctataataatctctttaatgtgcacaaaatactattgattgaagtcatgcatgaggcaacacaaggaaaacaaaatttgtatctaagaataattgaagatattgatattgatattgatatttattttgatattcattattataaattaataaatatataataaaataaaataaaaataaaaatataaataataataaaaaaataaatataaaaagggcgggccgtttaaaaggaccaaagtttattaccccttcctttccgaaataaataacttt

SEQ ID NO: 12164 - DNA, 543 bp, Gossypium hirsutum
  Clone ID: GOSHI-09MAY01-C41866_2
tcgcggcgcgtgggcggccgcgtggggcgacgaacagtgaaccgtatctttcttatttcttctacattactcctctgtcctctccctctctttactgcgaaaaaaaaacttcggacagggggacgagcaaccttgaattcgacgacgcactcaaaccatgtcttacgactatctttggaggggcataatcatcggtgacactggtggaggaaagtcatgtttgcttttgcggtgtacagacaagagatcccaaccagttcatgatctaaccatcggtgttgaatttggtgctcggatggtcaccatagatggcaggcccatcaagcttcagatttgggactccgctgggcaagaatccttcaggtccatcaccagatcttactatagaggagcagcaggagctcttctggtctacgatataaccaggagagaaacatttaatcatctagcaagttggttggaggatgcacgacaacatgcaaatccaaacatgacaatcatgctcattgggaacaaaagtgatctttctcacaggagggctgt

SEQ ID NO: 12165 - DNA, 669 bp, Gossypium hirsutum
  Clone ID: GOSHI-09MAY01-C41866_1
cggacgcgtgggttggaagtaagcttttaaaacaaaaaccaggtaacttgtctgtaaatctaacgtcaccattatatctctctctgttctccattttttcccctttctcctcttttcctctaaacccagagttttttttccatagaaagcgaagaaacttgaaaacgacgacgtagtgagaaaaaaaaaaaaccatgtcttacgattatcttttcaagtacatcatcatcggtgacactggcgtgggaaaatcatgtttgctcttgcagtttactgacaagagattccaaccggttcatgatctaaccatcggtgttgaattcggtgctcggatggtcaccattgatggcagacccatcaagcttcaaatctgggatactgctgggcaagaatccttcaggtccatcaccagatcttactatagaggagcagccggagctcttctggtctacgatataaccaggagagagacatttaatcatctagcgagctggttggaagatgctcgtcagcatgcaaatcccaacatgacaatcatgctaatcggaaacaagtgcgatctttctcaccggagagctgttagcaaagtagaaggcgaacagtttgcaaaggaaaagggccttttattcttggaagcatctgcgagaacagctcaaatgtcgaggagga

SEQ ID NO: 12166 - DNA, 907 bp, Gossypium hirsutum
  Clone ID: GOSHI-09MAY01-C41476_1
ggggacatgaaagatggcggtaatatggcagacagaaagtatgaatcggatgagcagcctgcacaaactccacaggaacgtgtgcgccttagttgtttgcgggttctgcatcaacttgctgccagcacaatatgtgctgaagctatggcagctactagtgttggaacaacacaggttgttccccttttaatgaaagctataggatggcaaggtggaagcattctagccctagaaacattaaagcgtgttgtgggtgctggaaatcgagctagggatgcacttgttgcccaaggacttaaggttggtctgcttgaagtacttctgggacttcttgattggagagctgggggaaggaacggactttgctctcagatgaaatggaatgaatcagaagcatccattggcagagtgcttgctattgaggttttgcatgcatttgcagcggaaggggctcattgtattaaagcgcgcgcgtgggtgaatgcatctgatgtttggagtgcatataaagatcagaaacgtgaccgtttcctgccttcaaatgcccaatccgcggctgccggagttgctggtctgatcgagagttcctcatccagactggtttatgccatcacagctccgccacaaaccacacagtcaagattacctgcatcaacagtatcagattcaaatggaagccaggatcagctttcttaaggcaaggattaaagagaaattattttgagaggcatgaaagagtatattcagtgaagaattatacatgacagtcacacatttgtatagctcagtgtacaggctttaattatttttgtttttctttctcttggattcactccgtcagcgaacgtttgattgaagcagaggtggtagttggaatttttctagtgagaagaaggatgttttatat

SEQ ID NO: 12167 - DNA, 521 bp, Gossypium hirsutum
  Clone ID: GOSHI-09MAY01-C41606_1
atcctccctagtcatcattcaggcttcagtttcatcatctgattttggtaaccttctgccggggagattaaagcacttggctcacaccatcacagagtctcctgctaacaatcttggtcttaataactcagtctttggcaaagttaaaagcattactttatcatcttatctcaagggtacacttcatgctactgctcccactgcttcaccagctccatctccagagccatctatttccccacatccttcttttaggcctactcatcctccagcatcatcacccaagagtcatcatccccaaccttgccgtaagtgtaaagctgcttctccatctggtaatactcccctgcattcaccaggtcctgaaagtggtccctacccttctgttcctcctctgatttctcctgcaccctctactatagctcctcccccctgtccatactctcgccctgccactccaagatctcattctaacctaactctcatcatcacattccacgtcacagctgtccccagatcta

SEQ ID NO: 12168 - DNA, 485 bp, Gossypium hirsutum
  Clone ID: GOSHI-09MAY01-C41046_1
gaccggccgtattcccggtttcctacctccttttgtctgggattttcttttagctcgaggaagtggcgattttcagtagaaaaaagcttgaggagttgaaatctgatgtgggcgactttaagatcccgatatctgcatctatctgcaactacgttgccttcctcctctctcacaaatggctcgtggaagctggggttttcaggtttaaatcagacgttctcttcatccactgtggagagaataagcaatgagttgctgagcctgcaagaggtggagaaggttctaagcgacgtgagagcagacgacgtggcggtggttccggttggtaaccaatgcgattgggcagatttcatggtgattgccaccggtaggtccccgtggcacgtcaagaacatcgcccaagccctaatttacaaggttaagcagaagcaaaaaggagctaagaggatggtattacccagcgtgcaagggcaagagacgggaaa

SEQ ID NO: 12169 - DNA, 733 bp, Gossypium hirsutum
  Clone ID: GOSHI-09MAY01-C41016_1
cacaatttgggccgagtttcaaagctcactactctgaaaggcacgcaggcaaatgcgttattctggtcacctggtggccgttttattgtacttgctggattgaaggggttctccggtcagttggagttctttaatgtcgatgagctggaaacaatggcaactgctgaacattttatggccactgatatcgaatgggatcccactggaagatatgttgcaaccgcagtaacatctgttcatgaaatggaaaatggtttcaatatatggtcctttcatggtaagctactctaccggatactgaaggatcatttcttccagttcttgtggcgcccaaggcccccacccttcttgagcgctgagaaggaggaagagatattaaaatacttgaagaagtacagtaagaagtatgatgcagaggaccaggatgtttcgatgctattgagcgaacaggatagggagaagagaaggatgttgaaggaagaatgggagaagtggataagcgaatggaggcgggcaagtgaggaagagaagttggagaggcagaagttgagggatggagaagcaagtgatgaggaagaggagtacgaggccaaagaagttgaagttgaggaaatcttggacttctccgaagaagtcctttttgaagagtgagttgattgggacaagatttttcagtatgtacgagtggagtagatgatatttcggctatttttattttagaattttgatcatc

SEQ ID NO: 12170 - DNA, 597 bp, Gossypium hirsutum
  Clone ID: GOSHI-09MAY01-C41356_1
gaagaaattcaattgaaaagaaaaaagagaggtaggatccagtatggacaagaacatgttagcagcactcgagggtctccctgaagaagataaggcccgaatgtcagccatgatcgaccaccttcagcttcgtgacagtttgagaatgtacaattcactcgtcgagagatgcttcaccgactgcatcgacaacttcactcgcaagacgttgcagaaacaagaggaaacctgtgtgacacgatgtgctgagaagttcttgaagcactcgatgcgcgtaggcatgaggttcgcggagcttaattcgcaagcaccaacgcaagattgaagggtaataataagaactgcgagaaggggctcggaatttcttatttcgtaacaattttctttttggattaatcgagttcttcgcaaatcttgtttcttggaagaatttgttgattttcactattgaatcaattgcttgttatggtaagagtgaaaattgttcaactcaccttgattgattaatgggctaagaagaggaaaaaaaaaccctgtgtttcctattctaagtccatttgctaattatttaataagattttgggattttttttcttt

SEQ ID NO: 12171 - DNA, 476 bp, Gossypium hirsutum
  Clone ID: uC-gsflnu33B138g11b1
atcgcgtgggcggacgcgtgggcaaaatcgtaaaaggaaattacattcggatccagtatggacaagaacatgttagcaggtctcgagggtctccctgaagaagataaggcccgaatgtccgccatgatcgaccatcttcagcttcgtgatagtctaagaatgtataattctcttgtggatagatgcttcaatgactgcgtggacaacttcactcgcaagactctgcagaagcaagaggagacctgcgtcatgcgatgcgcggagaagttcttgaagcactcaatgcgtgtaggactgaggtttgcagagcttaactcgcaggccgcaacacaggattaaagctaataaacgaccatgagttggagctcaaaatgtttttgcatatcatgtagaattttcttcttttgggataaattggggtcttccgcagatgaaaagcattacgttgctggggttgagaattgctgctaaatcat

SEQ ID NO: 12172 - DNA, 967 bp, Gossypium hirsutum
  Clone ID: GOSHI-09MAY01-C41306_1
tccgtgttgttttgcctgtaagacaaagatgctcgaggacagcaagggtcgtatcccattaagctattctacacctccaacatgcccatcatccttcaatctgcactcgtttcaaatctttatttcatctcccagttgctgtaccggaagtacagtggtaacttctttgtgaacctgttgggcaagtggaaagaatccgaatattcaggtggtcagtttattcccgttggtggtctagcttactatgttactgcccctgcaagcttggcagatatggcagcaaatcccttccatgctctgttttatctagtgttcatgctttctgcctgtgccttgttttcgaaaacttggattgaagtttccggttcttcagccagggatgttgctaagcagctcaaggaacaacaaatggtgatgccaggacatagagattcaaatctacaaaaagaactaaaccgttacataccgaccgcagctgcatttggcggaatgtgcatcggtgcattaactgtcttagccgatttcatgggagcaatcggttcaggtaccggaatattgctagccgtaacaatcatatatcagtatttcgaaactttcgagaaggagagagccagtgaactcggctttttcggtctctaagttttgataaaagtcgggtttagtgaaaaaaacaaaatggtagagggggtggagagccatggtcaaattttgatttgattaaaaattcagatacttgataggtaggttccacctttggttaaacatgctttggatagaagaaaatgaggtctttaattgtaatctctgatgttgttttaagcttttttagccctttaatttacttccttttaaaaaaaaaactgaacttgtagatttggccttttcagaatacaaactccatcgaatcctaactttttttccttggaaaaaagactggtttttttggttattctatattgggttaatt

SEQ ID NO: 12173 - DNA, 649 bp, Gossypium hirsutum
  Clone ID: GOSHI-09MAY01-C41256_1
tttctctgctgacccctgaaaaccgcgcggggggtggtacaaattcattgaacgaaatgctctacaacaacaacaatcaatacccttgacacaattttgttaaagctaagagaatgcatggcagatgtagaaatgattggatttttttttttttaccttcatggtgattttaggtttctgagggcggcgggcgccccataggatcaaggaaaacgtagtgaaaagcacgaagaagccaacaagaaaggcgaggaaatagcaacgtcgacggtgtagggcatgatgggcagcttcaccgtcaagcaaagcttcttcttcaatggcgtcgaactctttccatgactgcttattggtgcgaggcttgcgagatccatggtgttttgagaggcgggtggaagaagactcgcgggaagaatgagggcctaaggaagagttggacttgagagtgggtggggctgagcaccggggtggagttgaaggagttggtagtcttttcaccatcatgggaatcccttgatggcctctaaacgtagtacatttgtcgacgaggggaccttggtggcgatgattgacttagctgctcgcctcggaatctgtcttggccagatcacccggcattttaaccttggttttctattgctgttgtttg

SEQ ID NO: 12174 - DNA, 480 bp, Gossypium hirsutum
  Clone ID: GOSHI-09MAY01-C42986_1
gtcacaatacaccaaagagtgaatccaggttgtttaaggttttgcttggtgccgagaatggtgatcgggttcgagctctggctgcttgtcatatggatacgtctcgatgggacgtcgatcatgtgtcgttccaattgctgaaaatcaagcccggctcttcccctgtgtgccatgttttcccaccggataatcttgtatgggtggctttgcctgcttgaatatatggagaaaaattcagtagatatcatatttcatgtgatgttatttgtaatgttattgtatgatatgaatgttaatatataacaccatgtccgagtcggctcagtgatttagaaccacgccataaatggaataaacgagttcaattagcctccctgtttgtgtaccagcaataaaataataaattcagttttttttgttgcaagggtttataaaaaacaaaatttaacaaaatccaacctatttttttttataatattg

SEQ ID NO: 12175 - DNA, 498 bp, Gossypium hirsutum
  Clone ID: GOSHI-09MAY01-C42916_1
gcaggtgtgtatggcgcggtgttgctgacatggcgaggccattcgtgaggcgtgacgcgaagtcttccagaagcttcactatttgggactgctgatggtgtttgcggtgcataggaacggcggcttagtggcctagggtttccactttttctgaaaagagtcaatggactaagttttgggttaggttattgggctgtgtaatgggctaggattaggttttaatgttttgggtcttaggcttggtctgttattgggtcctagaccgtttaaagggacttcgattatttatttggttttattttgtatgggctagtaaagactgtaagcggactatttttagactatttaatttaaaaaaattatatttttatatttttttattgcttctgatgggcccgggcaaattgggccgcttacaatatattttaaagattggattggagatgatttgatcaagccataaaatctttcgaataataaaaattatattggaattac

SEQ ID NO: 12176 - DNA, 1451 bp, Gossypium hirsutum
  Clone ID: GOSHI-09MAY01-C42866_1
acaaaagaagagaaaagtaaaaattaaagagagagcttcaccaaactcatcaccagccctttttatttatttttcttctatttcctcttcttctttacctttcacaccctcccgcccgcccccgcgtccccttcgctcttgccttcgtctcttcaggaaatggaatgcgttgaggcagctttgaagaccagttttagaaaggaaatggctttgaaaccaagcccccaggcgtttttggaggatatttgggttgttaatggacaaaatggggtgtcttgcgatgatttttcagttgacgacctctttgacttcagtaacgaagagggtttccttcaacagaaacgtgcggatgaagaagatgaggaggaagaagaagtaccagcttcttcttctttgcctaagagacaaaagctaagccaagacaacggccacttctctaacgacagtactacaaatttcgattatggttccttgtccaccaacgaactcgctgttccggcggatgacgttgagaacctcgaatggctgtctcatttcgtggaggattccttctcggagcactctacggcgtatccgaccgggacgttaatggaaaagcccaagttacttgacggcaaattgcccgaaccgggaaaatcagttacgacgacggcatgtttcgaaactcctgttccagcaaaagccagaagcaagcgcgttcgaaccggaggccgagtttggtcccttgtcgccaccccttctctcacagaatcctcttcgagttccacgtcatcatcttcctcctcaagcccttccccttggatgttttgccccaacagtggttcgggttcaatctttgaaccgtctgaacctctctctgttgaaaagccgccggttaagaagcataagaagagaccgtcaaccgacacaacaggttgcaatgggacccagccgacgcgtaggtgcagccattgtggagttactaagacgccacaatggagagccggtccaatgggggctaagactttgtgtaacgcatgcggagtcaggtttaagtcgggccggcttttacccgagtatagaccggcttgtagtccgacgttttctagcgagttacactcgaaccatcaccggaaagtgctagagatgcggcgcaagaaagagacattgggtcaggccgaacccggtctaacgcctccagttgtgcccagttttggttaatattagacggagaaaaaccaaatagttcatctaggttttagagcagtagggaaaaaaatactgaataggataacagagtgagagaacgagttgaacgaacccggtttgattgtttccggttcgaaaggccaaaaaaaaatagtttaaaaaaatttccaaggtgggtgcggtaggttttctagcatagggatgtaactgatttagagagggctttatggttccggtgttattttttttttttccttcttttt

SEQ ID NO: 12177 - DNA, 376 bp, Gossypium hirsutum
  Clone ID: uC-gsflmaxxa060f04b1
tttctcttttcaactacaccttcgctcttgccttcgtctcttcaggaaatggaatgcgttgaggtagctttgaagaccagttttagaaaggaaatggctttgaaaccaagcccccaggcgtttttggaggatatttgggttgttaatggacaaaatggggtgtcttgcgatgatttttcagttgacgacctctttgactttagtaacgaagagggtttccttcaacagaaacgtgaggatgaagaagatgaggaggaagaagaagtacccagctcccttcttctttggctaatagaacatatgcttttcccaaacaacctccattttttgtacctcagtacttactaattttggtttttgtttcttgtttaccaaa

SEQ ID NO: 12178 - DNA, 259 bp, Gossypium hirsutum
  Clone ID: GOSHI-09MAY01-C42816_1
aatgttttcagctcagaaaccttgaagctgtgtttggatctttgaatatatatagtgctttgatatgggttacaatattatttggttatacaggaatcactaaaaagaaaaccttgaaacagattataatgtggtaaagatggaatgtatagtgcatgctcaatttcttattaatgcaagtgttgcctgatcgaccgatgattgtgtaaatgctttgaaatacttcgttagtgctcaataatattgagtatatgatgaa

SEQ ID NO: 12179 - DNA, 717 bp, Gossypium hirsutum
  Clone ID: GOSHI-09MAY01-C42586_1
atttgattgattctcatgatgtaattttcttgttgactgatactagagagagtcgatggctccctactcttctctgtgccaacaggaacaagataaccattactgcagctctaggatttgatagtttcttggttgtgcgccatgggcctggtccttttaactccatccctaacttgaaagctgaaatggaagactctttagctgctggcatggacaaccttgtcctaacaaatacagatggacaacatagactgggttgttacttctgtaatgatgtgggtgccccaacagattcaacttcaaaccgcatgttggatcaccagtgcactgttacacgtccaggacttgcacctattgcttctgcactggcagtggagcttttagtgggcattttgcatcaccctaatgggatatttccggaagctgagattgccaactccagtagcggtggaaactttgagcttccactgggtattttaccccatcagatacgaagctccctcccccactttcaacaaatgacccttttgggccactcctctaacagttgcacagcatgttgtacactgttgtgtcagaatatcgaaagagaagtatgcaattcatactccaggctattaaccatccaacgtatctggaggatgttactggactaacagagttgatgagatcagcgaactcttttcaactggactgggacgatgatattgaggttgt

SEQ ID NO: 12180 - DNA, 398 bp, Gossypium hirsutum
  Clone ID: LIB3148-001-P1-K1-G12
cggtagttctgatgcataaaagaaagtgacagtttacctcaagaatacaacctattgtcgttgcgggacgaattgtggtcaatacgagattctggtgagttttcgatacttcattttgaactaacaacagacattatagagtattcgaggaaccattgtatactttcttaaaagaatgcgtggaaaggctgtaataattcaaacctaattatgtagattcaacttacactgttctttgcatcatttttactgaagattctgcttcattcctgttaaaaaaatacaagattacaaacgcgggcaatcaacgatatgaagacattttctacgtcaactaaaatcagtctacttccattaaacgcctacattcataactgaaaaaaaaggtgggtcttttt

SEQ ID NO: 12181 - DNA, 297 bp, Gossypium hirsutum
  Clone ID: uC-gsflnu33B090d09b1
tggagaggttaccagtagttttgatgcttgaaagaaagtacgtgacagtttacctcaagaatacaacctattctcgttccaggacgaattttgctcaatacgagattctggtgagttttcgatacttcattttgaactaacaacagacattatagagtattcgaggaaccattgcatactttcttaaaagaatgtgtggaaaggctgtatgctttaatgacaaactaatttctttaaaaggatatgataattcaaacctaattatgtagattcaacttacactgttcttttgtttcc

SEQ ID NO: 12182 - DNA, 677 bp, Gossypium hirsutum
  Clone ID: GOSHI-09MAY01-C42696_1
cggacgcgtgggttcaaattttccaccaaaaaagaaactccattaatggctcttcctggccatatctaagctctggataaagccttctcaggaattggagtggatgagaagtcactaatctctatactgaccaattcaaaccgaggaacacaaaagatccctaaggaagggaagttccaagttgttcattgaggatgaaaatggatttgaacgatgggaccaatcttccattaaaattctcaaacaccaattcaaccgatttagggatgctgtggtgctttcactcctacacccatgggaaagagatgctcgcttgattgaaaaagcaataagaaagggcccaaaacactataacgtgatagtggaggtggcatgtacaagatcatcagatcaattattgggtgctaggaaggcttaccattccctctttcatcactccattgaggaacatcttacccacattaaaggtcgtgagcgtaagctgttggtggcacttgttagtgcttacagatatgaagggacaggtgtaaatgaagatgttgcaaaatcagaagctcaaatcctctacgaagcaatcaacaatggcgataaaaacaaacttctcgaccacgaagatgccatcatgatcctggctaccaggagcaagcaacatcttcaagcactgtatcgacactaca

SEQ ID NO: 12183 - DNA, 492 bp, Gossypium hirsutum
  Clone ID: GOSHI-09MAY01-C42006_2
cccacgcgtccgcggacgcttgggcccacgcgtccgctcttggatctgttaaaagcatcggggagtcttttggctcgaaatgttcctccaatttcagaacctcaatggcaacttacaagattaagcttgtaggaccaaaaggtgaggtgaacgagtttgaggcccccgatgataagtacattctagatgcagctgaggaagcaggggtcgagctcccatattcttgcagagctggagcttgctgcacatgtgccgggaagatgatttcaggttctgtggatcaatctgatggttctttcctggacgattaacaaatggaggaaggttatctgctgacttgtgttgcgtacccaacttcagactgggaaattcacacccacaaggaaaccgatccttttctaagtagtttgtggtctgaaatgattacggctttagttgttggctatggacttatttaaacttgcttccaattgagatataaagctttttatt

SEQ ID NO: 12184 - DNA, 620 bp, Gossypium hirsutum
  Clone ID: GOSHI-09MAY01-C42006_1
cttggatcctcctcattttctacgctgccctaattccctctgagtgaagatgactactttgagccttacttccccttgcattgttaaagttgcaattcccgaacgattttcaagtgctattgtcaaagccccaacatctcttggatctgttaaaagcatctccaagtcttttggcttgaaatgttcctccaatttcagaacctcaatggcaacttacaagattaagcttgtaggaccaaaaggtgaggtgaacgagtttgagtcccctgatgataagtacattctagatgcagctgaggaagcaggggttgagctaccatattcttgcagagctggagcttgctgcacatgtgccgggaagatgatttcaggttctgtggatcaatctgatggttctttccttgacgataaacaaatggaggaaggttatctgctgacttgtgttgcgtacccaactcaactggaaattacaccccaagaaccgatcttctaataggtggctgaatgttagtcttagttgtttctatgactctctaacttgtacattgagaataagctttaattggctgatgctggatgcatggtgagacactgacaccttgactgcatatattgtatga

SEQ ID NO: 12185 - DNA, 786 bp, Gossypium hirsutum
  Clone ID: GOSHI-09MAY01-C42026_1
cgttcttgatgattgcagaggactagctgtccaaggaaaatattattacagaattgacccacttggagagggtgctaagtggcgtcgttcttttggccaagagatatactcacccctcctcttagcatttgcagaagaggatggacagaactggatgagttctcacacacccacattttctgcaattgatgcctcctatagtttacctgataatgttgcacttataactcttcaggagcttgatgatggaaaagtcctccttaggttggcacatttatacgaggttggagaggacagtgatctttctgtaatgagtaaagtggaactgaagaagctgtttccaggcaagaagatagcgaaggtgagagagttgagcttatctgcaaatcaagaaagagaagaaatggagaagaggaggcttgtttggaaagtagaaggagaaagtgaaaatcaaaatggaaaatccaagggtggtgagaggtgcaccagttgatccaaaaaaattggaggtggagcttgctccgatggaaatccgcacctttgtcatggaatttgagagttgacctgatgtctactactttcaagagaatagttgatgcataagtggctgcctgcagtttgttttttacaattgagagatgtaatttttgtatagtgttggaatttgcaaactgctgtgggcaccgtgtgctgtgcaggtgtgtatggactaagcatgtgagtctaataaagggtataaagtttgtcttatacatattaataatttattaaaataatttatataat

SEQ ID NO: 12186 - DNA, 602 bp, Gossypium hirsutum
  Clone ID: GOSHI-09MAY01-C42396_1
cacttctcgtgataaatggctgggcaatgatggggtggagctaccagataaggctggtctttactccacagcaaccgaggatgcagagtacaaagatgacaagatcgaattttggaataatgcttacgggtttgacatgagttgcatcaaacagcacgctatgatggaacctcttgtggacacagtcgaccacaatcaaattgtgacgaatagccaccttctcaagacaatggatatctccaagatggctccgggtgatgcttctttcactgcatcttttaagcttgttgcacaacgtgatgattacatccatgcttttgctgcgtactgtgatgtatcattgacccagtgccacacattgatgggcttctctacagggccaaaatcgcgagctacacattggaagcaaacggggttgtacctagaggatgtgctaaccatacgtgagggagaggcaatagtcggtagcatgactgttgcaccaaacaagaagaatccccgagatgttgatataatggtaaaatattcattgagtggtcggcgttgtgcggtttcaagagttcaattctacaagatgcgctgatgtttctcactactatttt

SEQ ID NO: 12187 - DNA, 642 bp, Gossypium hirsutum
  Clone ID: GOSHI-09MAY01-C42236_1
ctgacgcgtgggtgaacgcgtggtgaaccctccaaagcaagctgtttctgtttttgctgatactcaaagcagtgaaattaaagataggatatttgatgaatttaacagtttatctgtcttataccagaagccatcttacatgtttacagacaaggagcacaggggtccacttgagtttgcagatgaacttggaaatctatctattggtgaagcagcaaataatgttgttcctactcagatggtggaggaaaacgacaaggatctgcttttaacgacttcagagaaggaagaaactaaaggttcacgcaataatggttctgcttatactgttccttatgatggttcgtctacatccgtctttgcctcacaagcacagatagagtcggcagtttcaaatcccaccttggcaggccattctcctcaagcaagcttcgcaattgacgatcttcttggtcttggcataccagcaacacctgctgtgccgtctcctcctcaattgaagcttaacacaaaagctgctctagatccaagcacatttcagcagaagtggcgccaattgcctgttgctttgtcgcaggaaatctcggtaaacccttaaggtgttgcagcattgacggctcctcaagcgttacttcgacacat

SEQ ID NO: 12188 - DNA, 464 bp, Gossypium hirsutum
  Clone ID: GOSHI-09MAY01-C42226_1
cccacgcgtccgcccacgcgtccgaatcaaaaccatgcccaacagataagttgatttgttgtttttttctgaattactgatcgcgagtcactttcaatctcatcctctctcaaccctagagataactgaagatggacgcctagagacatgccatcgcttccgcagcaaaaacagaagcatcaaagttgattcaaacccacggatcagtcggcgcgacccatctacccgtctgaagtcgattcactgaacactccctgaaaacatgctccttcgtttctgtcccattttggcacctttgacaagttgcggacgccatcagtcttctataatgtagattaccaaaagtaggcaaaaaattacaagaaaacctccagtttgtaattttaatttttgaaggtagatctaggctccacaatcttttgtaaaattgtttgtagtctgtttgcatttgattctaaaaaaaa

SEQ ID NO: 12189 - DNA, 757 bp, Gossypium hirsutum
  Clone ID: GOSHI-09MAY01-C43976_1
actctcccttgatttcaaatgggcccttcttttttcattttcaatatcattatctccctagcattaaccttagtgaatggagatgctggtttgatccaaaaaacttgcaaaaccaccaagtactatgacctttgtgtctcctccctcaaatccgatccgactagcgccaattcggacacaaagggcttggctatgatcatggtgggagtcggaatggctaatgccacggccacatcgaccctcttatcatcccaattacttactaccaaaaatgacacaatcatgaggaaagtattgaaagaatgctctgacaagtatgctcacgctgccgatgctcttcaagattccgttcaagatttcgactcggagttatatgattatgtctacatgcatataatggcagctgcggactatccaaatgcttgccataacgcgtttagaaggtacccgagattggtttatccgcaacaaattgcacgtagagaagatggtttgaagcatatttgtgatgtgatattaggcattggtgatcatcttgcttcttaaccttttgggtttctcagaaattttccatgcgaataactagttttgttttgtttgtgtttattgttaatgcttgaacaaaaaagtgtgtattgctaatcgattttttattttttggtgttgttggatttttttaaatttggttgctatttatagctttgaataatatggaatctagtttcccaaagtatatggaagctaggtttttgatctc

SEQ ID NO: 12190 - DNA, 681 bp, Gossypium hirsutum
  Clone ID: GOSHI-09MAY01-C43936_1
gttacaccacctgcagaagtaccagctataagtgttcttaaatctgcaattgctgggggtggttcatgtggattatcttcagctctaatgtatccaatcgatactgtgaagactcaggtgcaagcgtcaaccaccctgacattcccggaacttatgtcaaacattccgcaaatcggattacgggggctttataagggttccatccctgcaattcttggacagttttcaagccatggattgcggacaggtatatctgaagtaagcaagcttgtattgatcaatgtcgctccgaacctccctgacatccaggttgaatccatggcatcattcctcggtacggtcctaggaacagtggcgcgtttaccttgtgaggtactgaagcagcgtttgcaggctggcctttatgacaatgtcggagaagctcttatcggtacttggcagcaggatggtctgaagggctttttccgtgggaccggggccacactttgtcgtgagttgccgttctatgttgcagggatgggcctatacactgaatccaaaaagtttgtccaacgacttataatacgggaactggaaccgtgggaaacagttgttgtcggagctatatccggaaggttagcttctgttactactacaccatttgatgtcttaaaactagaatgatgactacatccggggccc

SEQ ID NO: 12191 - DNA, 692 bp, Gossypium hirsutum
  Clone ID: GOSHI-09MAY01-C43856_1
cccacgcgtccgctacttggctggtgatagttctggtggaaatatagctcaccatgtagccgtgagagcggccgaagctgatgtcgaggtattaggtaacattcttcttcatccgacgtttggtgggcagaaaagaacggaatccgaaaaacgattggatgggaagtattttgtcacgctgcacgaccgcgactggtattggagggcatatctaccggaaggggaagatagagaccatccagcttgtaatccatttggtccccggggtcgaagcctcgaagggcttaagttccccaaaagtcttgttgtcgtggccggtttggacctcattcaagattggcaattggcatatgttgaagggcttaaaaaatccggccaagaggtgaaccttctcttcctagagaaagctacgatcgggttctacttcttgccgaacaacaatcacttctattgcctcatggaggagataaagaacttcgtcaaccctaactgttaatagtctccacttaaccgtaactacagtcagcgtatacataaatcctaaatataaagattttgctccatgtccaaacattgtttctgggtttcagacaagcaaatccttttgtctgttaggcatggcaatggtgaagtacttggaactatagtgttgtaaggacagtgattctttaatgtttcttcatattataacc

SEQ ID NO: 12192 - DNA, 514 bp, Gossypium hirsutum
  Clone ID: LIB3828-029-Q6-N6-B1
ccgaagaaccaaaatctatatattgatttattgatgcacatctagtgtataatctgccttaacgaaagagtctcgtattggactatacctaataacatagctgtataatcttacgtagggggaaacctgaactggaataatcccatctaagaaaaatgcctatagaataggatgacacctaaatttacactctttacaaaaaaaaaaaaaaacgaatggtgtgaaacgggtcaaaaaaaccatgccgaccacacaagctaaaacaccataaattacctgtagattaagcttagcacacatcatagttggattggactctgttatttgggggcttgccaatctgtaaacaagcaattggagggacagtaggagtggtcaactctccataactttgccaacagaatggatcgtataggtggtagcgttcctgcattggctttagctgaatggcagataaagtcacccctatacatggaaaggctgtcactacaaggccaagtgcacaggttttact

SEQ ID NO: 12193 - DNA, 262 bp, Gossypium hirsutum
  unsure (1)..(262): unsure at all n locations
  Clone ID: LIB3148-018-Q1-K1-C1
ggtgttttagcttgtgtggtcggcatggtttttctgacccctttcacaccattcgttttttatgtaaagagtgtaaatttaggtgtcatcctattctataggcatttttcttagatgggattattccagttcagggttcccactacgtaagattatacagctatgttattaggtatagtccaatacgagactctttcgttaaggcccanaanaaaaaagaacaaacacaaactaaaaaacaagtataactgcacaaaaaata

SEQ ID NO: 12194 - DNA, 849 bp, Gossypium hirsutum
  Clone ID: GOSHI-09MAY01-C43806_1
atgagattgaagaaggcttgtctcatcgtggatttcaggttttgaggctaaatacttacacaactgtacctgttgatcatgttgaccatattgtcttggagaaggcccaatctgcgccggttgttgctgttgcttcaccttctgcggttcgatcttgggtcaatctcatttcagagcctgattcttggagcaatgcagtggcctgtattggagagacaactgcctccgctgcaaaaagattaggattgagaaatgtgtatttcccgatgcagcctggacttgatggatgggttggtagcatccttgaagcctgtaagggctcatgacaaattttaggattgaaagatatcaaggtccctctggaaacttaagcacggagtgaagtagaaccacaagcatttctaattctttgtgaaccacaggccattaagtgaagaaagtttttccaagttaaagggttggaatttgtagaaatttaacgttttgaaggtacatatccatttggaggctgcagcactgtattttgaggtcagtcgagagcctattcaattcatgttatcagaacttgtacatgcattttctcaccattgcccattcatttgactcaatgtcagttgtgttgaaattgaatggggagcatttccactccatgaaatctgataagcagttaggagtgtttatcaattgaaattgtaatcatatttactctgccttctaagttgtatggcattttttgtgctttcttttattataataataaaaatctcttcaacttaaaaaaaaaaaacaacacaaaaacaaaccaacttattctcttttgatatttttcaaaaaaaaaaaaattaattt

SEQ ID NO: 12195 - DNA, 663 bp, Gossypium hirsutum
  Clone ID: GOSHI-09MAY01-C43566_1
agcatgcagtgatagtgaaacaagaaccgccgccgccgccgccgccggaggataaaaaggaagaagaaaaacccaaagatggtggcaaagaagagaagaaaaatgaagagagtagtggtgaaaaaggcaagaaagactcctcttctggcggtgtagatgacaagggtaaagtcaagaaaggaatcggtggtggtgaaggaggattaagcaaatgtggccgccgtaggaggaggagaagtggcggaaggcggggtggaaaagactagagtggcggtggagctgaagaaaaatgaattctattattaccccccaaggtatgccactgagttctatgcttatcctccacagtacttcagtgatgagaaccctaatgcttgttctataatgtaatcaacaaaaaaatgttgggtcctctgttgatctccatgttcttctccctgttctgtttaatggctataaaagaaagtataatctacagtgaaactgtagaattttgccattttgtatttttctttaagatgttatatataattatatctaaaataatgatatagtttcaacttatttgttcccaaaaaaaaaaaaaaaataaaaatataaattataattatataataaaaataaaaaaaaaaaaataaatatattaatattttttttttatat

SEQ ID NO: 12196 - DNA, 365 bp, Gossypium hirsutum
  unsure (1)..(365): unsure at all n locations
  Clone ID: uC-gsflnu33B084h11b1
tccacgcgtccgggcaaagaagagaagaggggggattttagtagnggtgatttttacaagaacgactcctcttctggcggtggagatgacaagggtaaagacaataaaggaagtggtggtggtgaaggaggagaagcaaatgtggccgctggaggaggaggagaagcggcggaaggtggggtggaagagactagagtggcggtggagctgtagaaaaatgaattctattattacccaccaaggtatgccactgagttctacgcttatcctccacagtccttcagtgatgagaacccctaatgcttgttctataatgtaatcaacaaaaaaatgttgggtcctttggtaatttccatgttcttctt

SEQ ID NO: 12197 - DNA, 1035 bp, Gossypium hirsutum
  Clone ID: GOSHI-09MAY01-C43746_1
ctgcgttttgccataatgtatattatctcttcaaaaccattaatccatcaggagcagaagctgtcgaagcagcactgagagaatctgaggttgatacaagtgcatttcagtatgtgaagaagatcaagtcattgaatgtttcactggcatcagcaaattccgctagtagaagtaacattgttgattgggctgagaagctctatggtcagtcaatcagtgctgtcactgcaggtatgaagaacctattgtctggtgataggcagctagcattgacaaggactgtggaagctttgatggaggggaagccaaaccctgaaatcgattcttaccttgtgtttgatcctcgtgccccaaagtcgagccctggcacaagtagcagtcatctgaaaggaccctttaaagaagctattgtcttcatgatcggaggtggaaattacgttgagtacgggagcttgcaagaccttgcccaacatcagcagccagccaaacaagtcatatatggaacaacagaaattttaactggaatggaatttgttgagcaactctcactgttggggcagaagatgggattgggcagttcttctgctgctgcttcagcaacccattaaactgcttttcgaatactttgcagagcctgctattcgccagtcaagtgcatggagtcatcatgatccgaatgggagataccatatatatgaccaagtaaaaatacagatgtgagctggttacatgagcccgtaagcacttagttgggccttgcagtcttttctcttgatattaaatccccatgctggttttaatcgagactcgaaacctttgactatttagtacggtgtccaaaaattttgacaatggatagcaagcatttctatttcctaataggtttctgcagttggggttgtcatcaatgtcaagaccctattctctcgttttttttattcctcctctttccccttcttagttgtactaaaaagtttgacatggatttcattctactccataatttcatctgatatatgaatgctattcagattc

SEQ ID NO: 12198 - DNA, 634 bp, Gossypium hirsutum
  Clone ID: GOSHI-09MAY01-C43686_1
gttcaacagtgagaaggtggcgtcattggcctatgctcgaatccagggcaaggctgctcttgtggcacatttccagaattcaagcttaatgaatgaagataagagatgccggccaattctgtttcattcagagggccaagagaccagtgatcaggaacatttcctttcttgcaatttgaacatctgtattcgtcaaccagacgggtcctattccggggattcattggagagcccgaagggccttctggatgagaagccagagaagagttggtaaatttggtaatcttaccccttagcttgaattaagaaaagggctaaggatgctaacaagttgataattttccttttttaagtgtataaaagttggacgacaaattaaagcacaagcgtacgaaaaagcttgtgtcatgtgcagtgtttgcttttcagctctggacactccatggtaagtaactagagatgtcgaaaattaaaacgaggcagaaagtgttatctttgtttgtagagcaagaaaattggtatgaataaggcggagcatgctgctaagtatcggaattttcttcgcagctgtattgcatttactaataaccttggctaatatttcctattgggtcctttctttcttaaactgtta

SEQ ID NO: 12199 - DNA, 346 bp, Gossypium hirsutum
  Clone ID: LIB3148-015-Q1-K1-G2
cccacgcgtccgcccacgcgtccgaaaagttggacgacaaatgaaagcacaagcgtacgaaaaaggttgtgtcatgtgcagtgtttgcttttcagctatggacactccatggtaagtaactagagacgttgaaaattaaaacgaggcagaaagtgttatctttgtttgtagagcaagaaaattggtatgaataatgcggagcatgttgctaaggattggaattttcttcgcaactcgtcaacctgtgcttagatctcctctgggttctttctgtctgaactgttagatgttgtcggtcattcatgtggatatgcagatattgttacttgcttggatgtaaatcttt

SEQ ID NO: 12200 - DNA, 652 bp, Gossypium hirsutum
  Clone ID: GOSHI-09MAY01-C43636_1
cccacgcgtccggttccgtaggccgcggacgccattgttgagatggaatcaacactttcaacattaccctccgctcttactcccttctccttttctaaacccctaaaccctaaatccactttgttctctttctctcagtctccactccttggccctgtcgccgtcctttcttattcttttcctctaaggactatctcctccattcccaaacgcctacaccgccgtttggagtgcgtctcttctggtaccggcggcggatttggtggaaatgatgggagtagcggcggcggtggcggcggcggcggggaaggaacgggtggaggtgattcgaaggcgaaattgggagctggagtggttgacgatctctctgccttgtctcccgatgttatcattcttaatgttgggggaatgatgtgcggcgggtgtgcttcgagtgtgaagaaaatactagaaagtcaaccccaagtctcttccgcgaccgtcgatcttaaaacggcgacggcaatggtgtggcctgtttccgaagccaaggctgtacccaattggcaaaaggaattgggggaggcattagctaaacagttgactagttctggtttcgaatctgagcttcgagtggcaggtgaggaagctattggagatgtctcaccacaat

SEQ ID NO: 12201 - DNA, 678 bp, Gossypium hirsutum
  Clone ID: GOSHI-09MAY01-C43196_1
cccacgcgtccggcaacaaatgctagaagcaaggtcttaagcaggctacaaaacatgactggtttagccacattgtatgacttcacaaagaaaatcccttaccagacagaatttgctgtcaggtttcttaacatagctgaggtaaagagagcattaggagtgaatgaatccatggttttcgaggagtgcagcgatgttgttggggatgtattgcatgaagatgtgatgaagagcgtgaagtacatggtggagttcttggtgaagaatagcaaggtactgttgtatcaagggctatatgatttaagggatggtgtggtatcaacagaggcatgggtgaagaccatgaaatgggaagggattgagaagttcaagatggctgatagagtgatttggaaagtaaacggagagcttgcagggtacctgcaaaaatgggggagcttgaccaatgttgtagtttcaggagcacgccatcttttgcctgctgaccaagctttgaattctcaggctatgactgatgattgggttttggagaagggccaatttggtggaaagcaaagaggatcatccacaaaatgcagggcaacactctaaactgtgatcgctctgaaacttgttcttcatctggaagctctaagctatgtaatctatgctattcaataaaaagatatccacgctccc

SEQ ID NO: 12202 - DNA, 865 bp, Gossypium hirsutum
  Clone ID: GOSHI-09MAY01-C43186_1
gtcgtttcttttttttttttttttttttgtaccactttacaagagccactgggcgggggctagtactgagcaccagggaaatagaaaagctgcgtctgaaacaagaagaagaggacaggcttaatagactgttaattgagaataagataaaggattttgaagctgggtggataaggaaattcgatgcacacaaggatgcagtttctcttctgagtgacaaattgactaacgcagagaatgaagttaaacttctcaaagagctttgcaacctaaaggtttcagcaggtactccagaatgtgttccaaatgaatctggaatgtctagttagtaaggtatgtctagtaagtttttatgtagtgcagaactactcttatttatatgtcaaacaatatgcatcatgcgcggcatctacgaatggaggcttttgttctagttggctcactatatggcagatttgatatgcaaagttagtagcagcaggacttcactggaaaatgctgagaaccgaaatggatgcttcaatctgtctcttcagtggataagttagatgaggactccgctggattatatgtcttcttatgaactggttattgtgctatagcaagtctgtcaacaatggggatttgggcagacatggtttgaaaggtttccttttcgattagtcggtttctaataaatatggaaatatgattcaatttttgtcttcaattaggggggaacttagtctagcagaaatttgagttgatcgaggaaactactgaaaccaaagtattgtaatccaatgaaatgcgacaaaaattgttcttaaaaatactttgtacctgaacagagatttaaacccaaagcttgatttaaagtttaggg

SEQ ID NO: 12203 - DNA, 598 bp, Gossypium hirsutum
  Clone ID: LIB3826-001-Q1-N6-E7
gaagcatccatttcggttctcagcattttccagtgaagtccttaagtaaaacaggtaaatcagaatgaagtatggacctcttaatatgaaacacaaaaaatttcgagaacctaaactacctgctgctactaactttgcatatcaaatctgccatatagtgagccaactagaacaaaagcctccattcgtagatgccgcgcatgatgcatattgtttgacatataaataagagtagttctgcactacataaaaacttactagacataccttactaactagacattccagattcatttggaacacattctggagtacctgctgaaacctttaggttgcaaagctctttgagaagtttaacttcattctctgcgttagtcaatttgtcactcagaagagaaactgcatccttgtgtgcatcgaatttccttatccacccagcttcaaaatcctttatcttattctcaattaacagtctattaagcctgtcctcttcttcttgtttcagacgcagcttttctatttccctggtgctcagtactaagcccccagacccagtgacatctttgtaaagtggttcatccggcagggaacaacgtgc

SEQ ID NO: 12204 - DNA, 783 bp, Gossypium hirsutum
  Clone ID: GOSHI-09MAY01-C43156_1
ctaattcctccttcctaatggtcgattcatctccaccagatggtgttcttcaagcctggaggaatttcagcctcgagatatcctcttggcttcgatttcaacaaagcaaaaggaagtctacgacgtatttgcaaggtaagaccctcttttctttttttccttttttattagtataatcaatcaaaaaagaaagtaagtaagaaataaaagagaaaaataatgaataaaccaccttgccctattttctttctatttgattgctttctattgtgtaaaaaaaacacattccttctgtcttgggctttatagccgatgaaagaaaataaaaaaataaaaaaataccagtttttctattttctatttctatttgctgttgttcccttgtctgtttgcaggtacacggtgtgcgtggcgctcgtacagatgctgtgcgctggcgtacagagacgcagtggaggccgtacgtaagggagcagcgcgagagaaacccaagcttctgtttggccgaacctaggtctaggttttgggccattgggccatgtatttttaggtcttgggctgatgtaattggatttgggctgtctaatttgaacttcgggctttgggttttgggtctaggtaattgggacaaggtctgtaaatagactgtttaaaagatttggactttataatttggtttatttattatttttaatctgggccaaatttggcctattacagtgattgtaaagtgaaataagtaaattgatatttgataatgatacatgatacgtgttttttgtc

SEQ ID NO: 12205 - DNA, 1069 bp, Gossypium hirsutum
  Clone ID: GOSHI-09MAY01-C43126_1
cccacgcgtccgctgctagtgacttgcctcaattggatagcttggttcccattcttgttgttcgacactgactggatggggaaagagatttacggtggggaagccaagggagatgcacataaagttaagctttacggtgatggggttcgagctggtgcattagggttgatgattaactccatcgtcttggggttgacttcattggggttagagcctgcagggcggttgatcggtggggtcaagaacttgtgggctatcgtcaacttcatcttgtgtgcgtgcttggcgtctacggtgttgatcacaaagatggctgaggcttggagacaacaccatgggtccccactctcccatcctccatttaacattacgggctctgccttggctgtattcggtgtcttgggtattccacttgcggtaacatacagtattccattcgctttggcatccatctactgttctagtactggtggtggtcaaggtctttctctaggagtgctaaacttgtctatagttatcccacagatgttcgtatcagtaattagtggaccgttggatgatgcattcgggggtggcaacttgcctgcttttgtgctggggtccatagcggctgctgtcagtgcgttgttggctatattggcattgccgaacccacctaaacaagtgtccctttcgccaggaatgggtggtggccattaataaataatcaattccactgcttctgatcagcctctttgcatgccaacaatgtgtttcaagttttatgatttgcttggtgtagtttcatataaatatttgctttgatgcaatgcagtcatggcttagtcccatgcctctccttatgtatttttaaggtttccatatatagggaagtttgcagggaaatccttgttatttctctaagatttgtaatctaagcttataatttccaatatatcagaaccttcgaaaatgaaaatttgaaaaagaaaaatggtgggaaaaccctcaagctttacaccaactaaccgagaaccaatttttaaaaaaacagtttttatagtaaaataaaagggggcggcccttttaa

SEQ ID NO: 12206 - DNA, 256 bp, Gossypium hirsutum
  Clone ID: uC-gsflnu33B006f06b1
ttcacgcgtacgggatcctgctgctagtgacttgccttaattggatagcttggttcccattcttgttgttcgacactgactggatggggaaagagatttacggaggaaaagacaaggttgatgaccttcaggaagagcttgacattgatgttatggtatcatggagagcctgagagaaacgggttacactaatactttggtgagcagtagcctggattcaaaacttctgacaatgtgtaagtgccatattactgat

SEQ ID NO: 12207 - DNA, 558 bp, Gossypium hirsutum
  Clone ID: GOSHI-09MAY01-C43096_1
attgattcagattgggcaattaataatgggaattggctctggctatcatgctcatcattcttttaccagtacaaccgcatatactcaccaatatcatttggaaggaaatatgatccgaatggtaattatattaggcattttctccccatactaaaagacatgccaaaggaatatatatatgagccgtggacagcgccactaagcgtgcaaactaaagcaaagtgcattattggaagagattatcccaaaccagtggttttgcatgatactgcaagcaatgaatgcagaaagaaaatggggcaagcttatgcacttaaccagagactcaatggacgtgtaagtgaagaatatttaaggaagttgagaagaaaatttgatgaggatgaagataagcaggaacccaaacccagaaggcagagacaaaagctgataaaatgagctgcaaaatctactttttcatccatccatatctttttttcttttttaaactataacttgataacttagaacttgttattgtgttacatgtttggcacgtaatataaattgataacttgg

SEQ ID NO: 12208 - DNA, 427 bp, Gossypium hirsutum
  Clone ID: GOSHI-09MAY01-C43076_1
acgagcggttccacaatgctcaatcgctctttgctgtcctcagacatgtgggctgtcatcgcccgcgtttttgcttaccatgaaaaggttcattggatgtactttttagcctttgctgcagtagctgttggacttgttatttattccgggggagacaaggaagaggatcggcatcaatgcacagccggtgttggtgacgaagatgctggaagaagcaagcatttttatgaggaggctggttttgataacatcaatcgaggagctatagccgtgtagctcaaaaaccgggaatactagcaagcatgactgtatcactagtggcgaaagaagtgaaactattgaaaacaagaacaccggaaaagatgtgcaatggaagaagtcatgatgtattaaactgtcacccgaactcttcattttcttaaaacta

SEQ ID NO: 12209 - DNA, 550 bp, Gossypium hirsutum
  Clone ID: GOSHI-09MAY01-C43276_1
atttggaagtgcatacaacatgggggcttaagatggcgtttgttgtggacaatggaaaaggcccaaatgagtctcttctaccacctccaagtgatttccccaagtgctgaattaaccaaaccaaaatgctgaggaatggagaagtagctaaaaggaaacaaaaggaggtggtagaaaaggcccaaatgagtctcttctaccacctccaagtgatttccccaagtgctgaattaaccaaaccaaaatgctgaggaatggagaagtagctaaaaggaaacaaaaggaaatggaatttttatacaacggcttaaagctataataacaaataagaagagtttattttgagcatgccaaggaaagttcgctccatatggaataaaagagagctggattcgcttctccttttttccccttaaaattggcatgcttataatatggactacaaatttaatttagaggatacaaatcatagttgaattgacaatgacaacttgaagtgaagattaaatattggttaaaaagcataaagagagagggaaaatgggaatac

SEQ ID NO: 12210 - DNA, 706 bp, Gossypium hirsutum
  Clone ID: GOSHI-09MAY01-C78986_1
ccccgcgtccgcgggaaaggaactgcagctctctcttctctctcgatttgcgaccacttcttcttctccctttttctttcacgcgtaacttgcgtcttcgtcttacgtataatccaatttccaactgttcaagaggccaggttgtaaagaggaaatggatgcccaagggaggaacaaggcgttgtttcgcgccaaattgaatgcacaaaagaaggagaagcgcatagattctccccttatcagttacaatgaatctgaccaacctgtctgccgggtttgtgatgtcgttttgaaatctgtatcccattgggatgcacaccaagcttctcgtaaacatcatgaggcaattaataccttgaaagctaatgctgctaggcgtactcaagctagcaatacgcaatctggtctgcctccaaggttttttgataatcatgggacggagaagcaaacaactgagattgaaaagttgccagatcctagttcaaacaaaaagcctggaatttcagcacaaacttatgcaaaggagtgtctatattcagagaccgaagaggatggttgtcctcaaagcagtgccattcaaacaaagatgactcagcctcctgagtcaagacaggtcacacagttagaaaccaagaaagtgaaaggatctcttcctgataacttctttgatagggatgaaaccaagttacctacgaatcttatgaag

SEQ ID NO: 12211 - DNA, 536 bp, Gossypium hirsutum
  Clone ID: GOSHI-09MAY01-C78886_1
cccacgcgtccgggttaaagaagttgtcagaggatttccaaatactttggagttctgcagacacttcatctgggagggagtgtccctcttgaaaaagatgccagattatctgttgcaacagcaaagagatgccaacttagcacgagagggccttccatatgctggtctcatatcatgcgttacaacattcgaaaatcacataatcatgtgtgacactgtgagtcagggagttcttaaactaaatagagtatctggaatcagttcaagtttccagttttctaatctcgggatgcttggactaccttattggctgtccttccctctggaaagcttttatgctgttgccactggactttctgtcagacaaaccgatcatattcagcaattcagtttgttgccaggtagggttgacatccggttaagcatagacatccccacagacactgaacttgtggaacctttgcatgaaagttgcatatggtgccaagcaaggggcgctgctactgagttatcggtggtagagaatgtcgcaggat

SEQ ID NO: 12212 - DNA, 605 bp, Gossypium hirsutum
  Clone ID: uC-gsronu33B038e01b1
cccacgcttccgggggaggaaaaacctaagtgcccgccctcttcttcgttctgctaaccgaccatcctcattccaccattgaagttggtaggcgatggcacgtagaggaaccatcttatctccccactttggtcctcgtatagagactgagttttagcctcgagagatcgattccgagctttgatttttggcgaagaggaaatcgtccccaatggctcgttcgcgaaggtaagcccttcttttcttattctttgatctcttaacaaaacaatgaagataggcttaacgagaaaacgaatcaactcgtagaaaactaaagcaaaaaacctagaagaaaaaccaaagaaatcaccttttgttatttctttctattcaatatgtgaatcagctcttttttttgtgtgagtatattgccttttttagaaaaggagtttccccccgttacaaataaaagaaaaatggctttatagccggaatcaaatgaaaaaatacagagaaattccttgctattttttctttgctaccatttgctgttggcctactggcattttgtttgtttttgttaatagtgcggagcaaggcgcgtgtacgggggtcgtattggc

SEQ ID NO: 12213 - DNA, 326 bp, Gossypium hirsutum
  unsure (1)..(326): unsure at all n locations
  Clone ID: LIB3582-009-P1-K1-D2
tgatgggaaaggggaggaaaaacctaagtgccccccctcttcttcgttctgctaaccgaccatcctcattccaccattgaagttggtaggcgatggcacgtanaggaaccatcttatctccccactttggtcctcgtatagagactgagttttagcctcgagagatcgattccgagctttgatttttggcgaagaggaaatcgtccccaatggctcgttcgcgaaggtgcagagcaaggcgcgtgtacaggggtcagattggcccttggcgtgggtgtacgagggctggtgacgtggaagcacgaaccgtccgtgcttggggtggg

SEQ ID NO: 12214 - DNA, 978 bp, Gossypium hirsutum
  Clone ID: GOSHI-09MAY01-C78786_1
cgtccgcccacgcgtcggttacaggttgttcatcgactatgggaaaggaatgacgtaaagggggcaatcagtgcaatggaaaagatgtctgatcatggtgtgcttgctgatgtgatgagcattgttactgaaaaaatagacattgtaacattggaaatttgcacttctcttctgccacttctatcgggtctccttggaagtgacatggacaggcatttgagcatctgtcttgacatgctgcttaagctggtccggatatttggttcaatgatatattcaacattatcagctttggcgcctgccggtgtagacattgaggcagagcaaaggtttgagcgttgcaacctctgctttatagaactcgaaaaagtaaagcaatgtcttcccactctcactagaagagggggatcagttgcaaaatctgcccaggaattgaatctagcacttcaagaagtatcatgaccgtaatcaacacattggatgcgttcactaagtttattctgtgcttttacggattaaatccttcaaggttaggcactgaaatgccttatcaagcaccgaccactactttgatacatattctgtaagtcctgctttaccttgtacatttaactgctaagccctctcgtccgcaaatctgcaatgactgaaaaatgaagacgatagactaattaggtcaacactttcctgctggattgctgcatagtttttctgtcggtttgtatgcactgctcggtgagtataccgatcttgtgttagaacacaaaatatgtttgcgcatccagttgtatcttaatgccttcaatgactaatatctatttttgttttctatcagatgtattatataaggataaatagtatatatcagacatgggaatgcatatatttggggcttatgttttaatctgttgaaaacccagaaataaaagaatgttgagctttccattggtgccttataaaattctcatcatcataaat

SEQ ID NO: 12215 - DNA, 539 bp, Gossypium hirsutum
  Clone ID: GOSHI-09MAY01-C78736_1
aacttcctaagaatttggctttgggaagattgaggggaagtgacaatgtgctagaaatctatagtcgatgctatagtgaacaacccttagttattcaaggcgcgggagccgggaatgatacgactgcagccggcgtgcttgctgatatccttgacattcaggatctgtttccctgaaagaaattcgagggagtctcacaactcgagtttgccatgtattccacctacaaaaatgcagctaagagactcgaagttgtcgaatgtctgaataatttttggtccggagcaagcttactgaatgttgtcgggggatgttccatggtaaacaatgtgcaaagcccccatggctccgactaagcgtccccttcagtttttgaagaacctgcatacgtaataaactttatgtcagcttcgtttctggaccccaagctatatcggttttcccatttggtattttaaagcctcttaattatcaaatatgtcattttacccctaaaaaaatgtgcccctcttcaataaaaacatgacacgtattatttt

SEQ ID NO: 12216 - DNA, 881 bp, Gossypium hirsutum
  Clone ID: GOSHI-09MAY01-C78146_1
aggaaaaatcactccgtctcttcagtctggttctagtcctaaccccagcgaaggcatggcataaggtggcactgcctgttccaggtaaacctgctcgcctctcttaaggctttctatggcgattatatgtgccgtttggtttgcgcatcttgatatatgtctaaaatagatcttgtggaaatgattcttattttggtgaatatctttaatataagctcctattttcgacttatcttcaacattggactaacactttttgatagcccgcggtcccgcccctttgatttctactgcatccacacctatccccatccccaacctcactgcttgagagcatgcaaaagcttccgcagcaagtaaagaggctattcgattcgccagaaccgattggagacaattacctcccccctttcattcctagccaccaaccccgaagcagatttgaaaatttgttggctaaaagccgcataaaaattaatgcgaaccacatgattctcttggagtcaacattccaaagaggaaaagtgtttgataacccaaagtgcatagcagaataatcgacattgtttgttcgaaccatcttcaaacacccaggacattctcgagatacatgcacagaggtttccactcccaaaccataccttgggcatactgtacttgatctgagttatctgcactatagattggttagggtaggcagaaagtcccaagagactttccaagttgtaatcttttgctttgctgtgagattaaggctccataattttttgtaaaaaggtttcatttaatcctgtatctcattagcactagaaacagtagggatgttgaacaatagtttgtatgcactcctaactgtaaattcgctcgaagtttctcctttc

SEQ ID NO: 12217 - DNA, 577 bp, Gossypium hirsutum
  Clone ID: GOSHI-09MAY01-C78396_1
ctgacgctcaaagaattgaaaactgctgatgcaactgttaatcaagaagttcatgtctcttctacagagaatgtctggtctgcatatagcatgccacaatcttaccttgattcatctgagggccatgactacacatcttgtagtggagtgccacttgctcatcaagccaatgcagaccggcagaaccatatgattgatctggaatcaggcttgcatgcaagaaagtacagggaaggttttgttacatggccattctgaagacggttcctttagttcttacacaaatcaagaccaaagtgagctgcttccatctttcttcaaggatcaggtagttttgccctaccatagtgagcagaaacaggatgggctagatttccaggccccgaagaatgtgttgatggaagatggtgattttaatgggcaatttcaagggcagttgcgaccatcgctgcctctagaagagggccaaaagaggcaggatgaggtttttgtgcaacaaaacatgtccggaaacatttactctgatggatctcggggtagatacttgcccccaaggcaggaacacttgccttctggg

SEQ ID NO: 12218 - DNA, 957 bp, Gossypium hirsutum
  Clone ID: GOSHI-09MAY01-C79936_1
cccatgcttccgataggcatatgaattacactcgggggtcttaattgaccttacgttgggtgacatccaacagacgcttattcttaacggctgtcacccacttccacggcggcgttgctatactagaaccccatcgaaaccgccttcttcacttccgctaactggtttgccgacttcactccccgattccggcgctatatgggacaaatactcgtggtaatctttcgcttgcttgtcctcaaacaaccccactgggttcgatctcaacgctcaacgctcttcccttctaaaatacacttcggaactcgatcttcccttgacgcagttcatgcaattggccaaatcggctaactcaccgatccgtctcggtattgacataggcggtggaaccggaactttcgctgcattaacgaagaaatcctacaacgtcacgatgttgaccaccaccatgaacgtcaatgcgccttacaatgaagccgtggcattaagggggttagtgccattacacgtgcctttacaacataggttcccagttttcgacggcacaatggatctggtccggtctgggagagcggtgaaccgccggataccattgtcggtgatggaattcatgttctacgatgtggatagagtgttgagaggtggtgggtacttgtgggtggatcgattctttagcaaagcagtggatcttgagaaaatttatgggccattgattggtaagcttggatacaagaaagtgaaatgggcagtggctaacaagacagatcctagtggtttgaaacatggtgaagtttatttgtctgctttgttacaaaagcctgtttcaaaatcattatggggaaaaattgaagactcattcaacatttaggataaatgatatcggatcacgcggaaaacatgcccgccgactgtcgttttgctcttgacaaaaactggtatgaattttattcatcggat

SEQ ID NO: 12219 - DNA, 443 bp, Gossypium hirsutum
  Clone ID: LIB3585-043-P1-K1-G5
tcgaccacgcgtccgaattttttttcaacgtccaatttccaaaccttcttccccttgttcccgtccttgacaacgttttccggaggtttaccacaatacccccaagatttaacaacttaagccgcattaacctttttttttaatcaacaattgttgaaccaagttttgttgtacttcaaaatctaatcttcaattctaaaatcggtccaatggttttttcttgtcacaacaatcctgatctttttcataggtatatgaataacactcttttttcgacttgcccttacgatcctgacctccaagagacgcttattcttaacggctgtcacccactttccacggcggcgttgtttttctagaaccccatcgaaaccgccttcttacttccgttaactcatttcccgacttcactccccgattccggggtatatggaacaaatact

SEQ ID NO: 12220 - DNA, 1352 bp, Gossypium hirsutum
  Clone ID: GOSHI-09MAY01-C79876_1
ttcgcctctttcgttgaaatcagtcggtacaatctgattccactctctgtgacttctctctgcggttgcccatgccgtctcttatccaacaaaaccctaattcccactagaagaacccccaaactcaagcttaactttgtctttcatggatcgcaatcggtcttccgggttcgtcctaccagtatttaccgtcaaacccggcgagttaacattacgagccacgtcgccccgtgcctgaaacccgaaagtatcgacgaaagcaatgccgaggaggaagttgaccaaggcgctgtcttaccaacgacaaaggattctttttctgagttacaacaataaatcaagtcagttgagaaaaaggatcgttttcggacttggtattgggatctctgtcggaggtgctgtattagctggaggatgggttttcactgtggctttggctgctgctgttttccttggtgcacgtgagtattttgaattggttaggagccgtggaatcacagcaggaatgacacctcctccacgatatgtctcgcgagtttgctctgttatatgtgcgttcatgcccattctcacattatactttgggaatattgatatttcagtgacatctgctgcatttgttgtggctacggcattgctcatgcaaagaggaaaccctcgttttgctcagctcagcagtaccatgtttgggttattttattgtggctacctcccttgtttttgggttaagctcagatgtggtttagcagctcctgccttgaatactagaataggagctggatggccttttcttcttggtggccaagctcattggacagtaggccttgtggcaaccttgatttctttcagcagtataatagcagcagatacatatgcttttttgggtggaaaggccattggtaagaccccacttactaatataagtccaaagaagacatgggaaggagctattgttggcttgggtggttgtatagcaacttctgtagtattatcaaagatttttagctggccagcttcgttagtgagtgcaatagccttcgggtttctcaacttctttggatctgtttttggtgatcttactgaatcgatgatcaagcgcgatgctggtgttaaggactctggctccctaatacctggacatggtggaatacttgatagagtggatagttacatattcacaggtgcacttgcatactcttttgtcaaaatcttgttaccgctctatggagtttgatacgtaaattttttgatcagtagcaagtaaggataccagataaaatttcttcagtgtttatatacatatatatatattattgaaaaggagtgcagaagcacatttgatggattcatcc

SEQ ID NO: 12221 - DNA, 541 bp, Gossypium hirsutum
  Clone ID: LIB3825-022-Q1-N6-E2
aagtgcaattctctttttgcataataattgaaagcaaagtttttataaatcaaggacctaaaactgcaacattcagagtcagaatttatttcagtaacctttgtcaccacatcatcatccatgatctccaccgattcaaacgacctcacttcactcttttttcatgttatttgtattcgaagtggatagatgatgtggtgggaagagttgaagaaatatttttttcaaaatcacaaaacacgtgatgaacatgaacctttaagttaaaaggaaaaccccataaaagtctgaatggcctgtgtagtatcattacattgaacttggaagaactcgtataagaaatgtactccacttatctatagcagaacctcaatttgcttctgtcagattcttaaagagcaagcagaaactgatttcttttggatgaatccatcatttgtgcttctgcaatcctgtgaatatgtaactatccactctatcaagtattccaccatgtccaggtattagggagccagagtccttaacaccagcatcgcgcttg

SEQ ID NO: 12222 - DNA, 580 bp, Gossypium hirsutum
  Clone ID: GOSHI-09MAY01-C79866_1
ctcagctgccttggagggtagtgttttgaagtctcttaatctttcaaacaatgccttaggtgagaaaggtgttagggcttttggttctcttttgaaatcacagagttgcctagaggagctctatttgatgaatgatggtatttcagaggaagccgcaaaggctgtctgtgaattgattccctctacagagaagttgaaggtgcttcacttccataataatatgaccggagatgagggtgcacttgcgatttctgatgttgtgaagcgctctccttttttggaggattttcgatgctcctcgacaagggttggttcaggaggaggagttgccttagcgaaagcactcgagtcttgcaccaatttaaagaagcttgacctgcgagacaacatgtttggtgtaggagcaggagttgccctgagtaaagcactttcaaagcatttggatctggttgaggtttacttgagttatctcaacttggaagatgagggtacagtagcaatagccaatgctctgaaggaatcggctccttctcttgaaggtttagaaatggctggaaatgacataacagctgatgctgct

SEQ ID NO: 12223 - DNA, 504 bp, Gossypium hirsutum
  Clone ID: GOSHI-09MAY01-C79556_1
cccacgcgtccgccttgggtaggagcattgagaaagctgtaaaggcaaatacagatgctttgtgggcccgtttccaggatgaaaatgcaaagcaagagaagttagaaagagaccgcatgcagcagataacaaacttgatcaccaactgtttaaataaggacttgccagccatgtttgagaaatccttaaagaaggaaatagctgcagttggccctgttgtggctcgtgctattagtcccactctggagaaaagtatatcttctgctattacagagtcattccagaaaggcgttggggagagggcagtgaatcatttggagaagtcagtcagttcaaaacttgaggcgacagtggccaggcaaatccaagcacattttcaaaccttctggaaagcaagcacttcaggatgcactgagatctaacttggaaacttctgttattccagcatttgagatgtcatgcacatcaactgtttgagcaaaattgatgtcacatttcataaag

SEQ ID NO: 12224 - DNA, 585 bp, Gossypium hirsutum
  Clone ID: GOSHI-09MAY01-C79406_1
cgttctcacatatgcttacttccaaaagtaggttggggtgcatttagtgatgctatcctaagggaagttcattctctcaaaaggtccgtggtcctgaccctaattatgatgatatatgcttttctggtgctggaagggatgtttcccaactatcaaaaagtttcccagaggttgagatggggtggggcaacggaaataagttattactgtcccctgaaaactacctgttccggcacacaaagctcattggtgcatattgcttgggaatttttgctaatgcagagtcaactactcttttaggaggaattgttgtccggaacaccttagttacatatgatcgggataacgacaggataggctttttgaaaactaattgttctgaactatggaggagggtgaagatatctggtgcacctgcaccagctccttcagtctcccaaagcaatgatactaacctggaaattcctcctgcatctgccccaagtggatcgccagcaaatgttcttccagggtcatttcatatcggatttataacatttgatatgtcaattagcacaaacgactcccaattgaagctcaacttca

SEQ ID NO: 12225 - DNA, 580 bp, Gossypium hirsutum
  Clone ID: GOSHI-09MAY01-C79436_1
cccacgcgtccgcccacgcgtgcggaaaacaacataaaaaatatgaaaagttcactccctttcttccattttcttgctcatttaaccaatttctctcaaaatttccactacccatcttaagattttaataaaatctctatggaaactacctcctaaactcattaccatcatcaatttcaccaattttagcttagggtttatggagcttttgcgagggaagacgaagctcgagagagaaaccttcaacaatggtgcagacttgccaagaagttgctctgatagttacgaagcatcgcatcacccgatgatcctataaggttgtttttcaaatgttaaagtgtaatctgtgttatattagtgggatgttgactaagtctcgtgatgaatataacgattgtgttgtgaatgacatgtccttaaggcttcaatgtgtctaaatctgcttatttcatatgtcaaatcgtccttggaacttcggtttttttctttccttcttttttttttttgtttttttttttttttcttcctttttttctcttcttctcttttttttctttctcctttttgccttcgtgggggg

SEQ ID NO: 12226 - DNA, 510 bp, Gossypium hirsutum
  Clone ID: LIB3584-018-P1-K1-G1
aaacaacaaaaaaaatatgaaaagttcactccctttcttccattttcttgctcatttaaccgatgtctctcaaaatttccactacccatcttaagattttaataaaatctctatggaaactacctcctaaactcattaccatcatcaatttcaccaattttagcttagggtttatggagcttttgcgagggaagatgaagctagagagagaaaccttcaacaatggtgcagacttgccaagaagttgctatgatagttacgaagcatcgcatcacccgatgatcctataaggttgtttttcaaatgttaaagtgtaatttgtattatattagtgggatgtagactaagtatcgtgatgaatataaagattgtaatgtgaatgacatgtacttaaggcatcaatgtgtataaatatgcttatttcatatgtcaaatagtacttggaacttcggtacggtgtagtggctgaaggcttaagaaattagttaatgttcaaaaatgtgtaattct

SEQ ID NO: 12227 - DNA, 680 bp, Gossypium hirsutum
  Clone ID: AI054601.1
aattgctctaatcgcgtcaaatgctgcagctgtgcttcctgctttttgggctctcaggcagaaggcttttgcagaatgggtgatctacacatcaagtggaatttcaagtggattatatcatgcatgtgatgtgggcacctggtgtgcattatcctttggtgtcttacagttttttgactttaggctctcattcttggccgtggtgagcacctttgtttacctcacaacaattggtgaagtttatataatggcaattcataccggtgtggctatccttactgccctgatggccataactaatgcaaccaggccctttaatgattattctagtgatggtaattggagctcctgcccttttttgtgtgtggttgatagaattatttactctatttagatagataactttaatattgtataattttaatttactatgatatattattgtgctcggatatattaacatgtaatctgctgttttataactgtgttacttatccgttataacctttatgtatctatatcgtgtgtcttttcacttatatttaatttatattcaatttatttttaatttataattaataattcatatatatgattactatatattggttatttattcttaatttatattttttttactttttattattttcattttaaagactctcttatactatttc

SEQ ID NO: 12228 - DNA, 483 bp, Gossypium hirsutum
  Clone ID: LIB3584-017-P1-K1-G3
cggacgcgtggggttttttgacttttggctctcattcttggccgtggtgagcacctttgtttacctcacaacagttggtgaagtttataaaagggcaatccatacggttgtggctatccttactgccctgatggccataactaaggcaaccaggccctcgaatgttattctagtgatggcaattggagcgctagcccttcttgttgggtggttgatagaattctctaccaagtatagatcgctttccttttcaatggatttatgtctaaattcgcttgagagacggcggatcaaagaatgggtgaacagtcttgtaaaaaccataatgaaacgatttcgttggggttttctggttgctggttttatagcactggccatggcagcaataagcagggatctcgagaacaggcaaaactactggatttggcacaatgtttggcacgtcaccatatacacatcttccttcttcttcctctggtcaaa

SEQ ID NO: 12229 - DNA, 630 bp, Gossypium hirsutum
  Clone ID: GOSHI-09MAY01-C79236_2
cggacgcgtgggctggaaagcgagccaactcgcgactctcgtcgaaccgcaccttcacctaaccatcaaaaagtaaaaaattgccaaacaaaagctatggcatttttaaggtcgctgacccctgccactgccacggcccctgccgctgcctctgccgctgcctctgcctctgctctgcctgccgcctttgttttctcttcttcttcttcttcttcctccttctcctcttctcgcaattcttctcatttccccaacgcaaaaagcctccctttcctctcttcaccacccaatcgcttaggccttacaaggaacttcgcgacctctcccactgctcttaacatggattctccctcttctcatcacaacccatctcaggaaaatgggtccttgcctgaccttcttactgagtatatggtggatatgaagtgtgaaggttgtgttactgcggtcaagaataagctacaaacagttgatggagtcaagagtgtggaagttgacttgagcaatcaagtggtgagagtacttggtaattcgcctgtgaaaactatgaatgaagcattggagcagactggtcgaaaagctagattaataggtcaaggagtgccagaagactttttagtttctgcagct

SEQ ID NO: 12230 - DNA, 620 bp, Gossypium hirsutum
  unsure (1)..(620): unsure at all n locations
  Clone ID: LIB3830-002-Q1-K6-A2
cggacgcgtgggngaaccgcaccttcacctaaccatcaaaaagtaaaaaattgccaaacaaaagctatggcatttttaaggttgctgacccctgccactgccatagccgctgcctctgcctctgctctgcctgccgcctttgttttctcttcttcttcttcttcttcctcctcctcttctcgcaattcttctcatttccccaacgcaaaaagcctccctttcctctcttcaccacccaatcgcttaggccttataaggaacttcgcgacctctcccattgctcttaacatggattcaccctcatctaatcacaacccatctcaggaaaatgggtccttgcctgaccttcttactgagtatatggtggatatgaagtgtgaaggttgtgttactgcggtcaagaataagctacaaacagttgatggagtcaagagtgtggaagttgacttgagcaatcaagtggtgagagtacttggtaattcgcctgtgaaaactatgaatgaagcattggagcagactggtcgaaaagctagattaataggtcaaggagtgccagaagactttttagtttctgcagctgntgctgagttcaaaggcccacaaattttttgtgtggttcg

SEQ ID NO: 12231 - DNA, 554 bp, Gossypium hirsutum
  Clone ID: GOSHI-09MAY01-C74956_1
gcgaaagttctgctagcagcttgtagaggagagctgaaaggggtgtcactaaactggtcccctgggtctgccatggtggtagtaatggcaagccaaggttaccctggctcctatgagaaagggactgtgattcagagcctcgaagaagctgaaaatgtggctccttgtgtgaagatattccatgctggaactgcacttgatttggatggaaattttgttgccatgggaggccgtgttctcggggttactgctaagggcagagatcttaaagaagcacgggatagagcatatgatgcagttgaagaaatcaagtggcctggaggattctaccggcgggatatcggatggagagcacttcctcagaatgaatttgctagaaatgcctagttatttcacattataatactctgggctacttgacatcttataatgttggatgctttataactggctcttacactaactgaaaattgaagtcacccatgaaacagaggtaaaagaaacttacttgtctgactcacctttattctgcatttccagattatattttcttc

SEQ ID NO: 12232 - DNA, 561 bp, Gossypium hirsutum
  Clone ID: GOSHI-09MAY01-C74946_1
cccacgcgtccgtccacgcgtccgcccacgcgttcgcccacgcgtacgaaattccttagatcaataaagagaggaaaaaaggtaagaaagtggaacatattaggaagttgagttagatccgatccgtatcgcaagtattgaatagttgaagtggaagtggaaaatggaagggataaatgagaaagaggaagcgcaaaaaggttcatctccggctgaattgggcaaatgggcggagattcaagatacgctcaagaaaagagtgattacggtggatgatttcccgtggagattagcctcaccgtcggagtcggagccacagcagcaacagctcaagtatgtgggaggcgtagacgtcagcttctccaaggaagagccatctatggcatgtgggagcttggtggtgttggacctacttcatgatctacgcctcgtctatcaagagtacacttgcctcagccttgacattccttatggcccgggcttccttgccttccgtgaggctgccattcttttacatctcttggcgaagatgaaaaaagatgctagtcctttctaacccac

SEQ ID NO: 12233 - DNA, 521 bp, Gossypium hirsutum
  Clone ID: GOSHI-09MAY01-C74916_1
cgcatacagaatctaaaattttcaaaaaagtggatttccaaaaggtgatcttctttagctttttaattgtgcccttctttttatttttccagcagttatcttcatcatttttgcatgtggaaacacacatgaaaaaaaagagttagattatacctttcgaagtggttttagcctctgttcacttcgttgagaataaagttgaaagaggaagttaaaagtattattcatcaagcctcaagatggcaccagtgaggtccctaatatctctaaaataagggcgagggtctcaggctgttgaatgtttcgatttatcaacattttcttttttctcttgaacaaataatgtgagatttaatattctttttctaaaaaaaaataaaataatgtggctcaccagattttccccgagtggagccttcgatggcaagatctggatgttgttcatgcgtcatcggctacccaataaaatggtggttcaatccctgcacatatgaactctacattttgatcggaaaaatggg

SEQ ID NO: 12234 - DNA, 636 bp, Gossypium hirsutum
  Clone ID: AI055459.1
cttttttgtgttccattgtatgtgctctgtatggtactagagttccttagatatggatggtgggtaattttgataggacgaataatgaatatattatataaagtattattgaataattttgatccactagcctgctatcgaataatgtaccatttgaggtatgctacatatcactgtttaagtcttgttcttaagagggatcaactagccaaataagttgaggcgcttgacttattttaaactcaaatgtctcactaactgataccaacgggaaattggaactggtgatctttggaaaaattttcttttagaagtgaggcatggctgaagtttcttcatgtttctacgaacttttgggtattactgtagttaacatcccaatattactcttattgagttactaggaacattgtttcaactgtaaacttagattgcaaagtggatcttaagcaaatagcactgcaagctcgagatgcagaatacaatgcaaagcgttttgctgctgtcattatgagactcaggtagctcaaaactacagctttgatattggcttttggaaagatgtctgcactggtgcttacagtaacagcatgttaactggctgcaagaatatgccaggatatccaaaactgtttt

SEQ ID NO: 12235 - DNA, 452 bp, Gossypium hirsutum
  Clone ID: LIB3584-028-P1-K1-F6
cccacgcgtccgcccacgcgtccgaattcgattgggttgttttggtattgtgtgtttagaagaaagcgcgatacgattttttggaaaatattggggatttatcttttgaatttttggtgagcaaagaagagaatggcggaacagggtggcttggaagggagccagccagtggatctttccaagcatccatctggtattgttcccactcttcagaacattgtttcaactgtaaacttatattgcaagttggatcttaagcaaatagcactgcaagctcgaaatgcaaaatacaatccaaagcgttttgctgctgtcattatgagaatcagggagccaaaaactacagctttgattttcgcctttgggaagattgtctgcactggtgctaaaagtgaacagcagtctaaactggctgcaaggaagtattccaggattatccaaaaacttggttt

SEQ ID NO: 12236 - DNA, 1498 bp, Gossypium hirsutum
  Clone ID: GOSHI-09MAY01-C74196_1
cggacgcgtgggcggacgcgtgggggggttatcagctcctacatttggaaatggatcattactgtataggctggtgttggctaaggatgcaatcaatttgagtggagcattccctaggaccccggagtatgtcgaagagtgccaacatccagaagcttttgaccctagcgtagtgaggggtagtattgttatatgcagtttctccgccggtttctataacgagacatctaccttaacagccatttttgacactgcaagagttcttggatttatggggtttgttcttgttgcaaatccaagttatggtgatttcattgggcaaccaattcctttttctgtttctggcgctttaatcccaaaagttgcagatgcaaagattgtatctcaatattatgaacaacaaacattaagggatgcaagaggcgttgtaagacagttcaatgctagagctgctatacaagacggtagagttgcctcgtttggtggccaagcacccattgttagcagattctcttcaaggggacccggttttattgacatcaaccggaacccttctgatgtactaaaacctgatattcttgccccaggaaatgaaatttgggcagcctggagccccgtgagtgccctggatccaattctgacaggttacaattttgctcttctgtcgggttcaagcatggctgcacctcatgttgcaggaattgcagcactaattaagcaaaagtacccttcctggaacccatcgatgattgcatcagcaatctcaaccacggccaccaagtttgataacaatggtgggattataatggccgaaggattcaatatcgggagcttgtattcttctaataattttgatttggcgctggctttgttaatccaactcatgccatgggtccaggcttggtcttatcatcagaatttgaagattatatcagctttttgtgttcaatgcccttcattgatcgctttgcaatcaaagccgccaccagagtgtggtgcggccagtccattggccaccctgctaacttgaacataccgtcggtgaccatatctgcactaaggagatcactgacagtgagacggagtttcaagaacgtacctaccaaaccggagacatacgtaagcttagcgataccaccaaatgggacaaccatcaccttgcgtccaccttggtttactatagctccggagggaacccaagatttagacatagaaatcaatgtgattaaatcgaccaatgagttcacctttggtgaaattattttaacaggaagcttaaatcacattgtgagaatgccggtaacgattaggccggtttcaattgtctaatagggaatcaccagagaagtatgaccaattggagatcaaaagacgagactaaactaaaaatgaaaaacaagacagcaaaacaaaggaatgtctaatgtactttatttcaatgaattaaagtaaaacctttttttaattattattaagaagatgcaaaacgtgaatatgc

SEQ ID NO: 12237 - DNA, 689 bp, Gossypium hirsutum
  unsure (1)..(689): unsure at all n locations
  Clone ID: LIB3582-056-P1-K1-F5
taagntatgtatctcaatattatgaacaacaaacattaagggatgcaagaggcgttgtaagacagttcaatgctagagctgctatacaagacggtagagttgcctcgtttggtgtccaagcacccattgttagcagattctcttcaggggacccggttttattgacatcaaccggaacccttctgatgtactaaaacctgatattcttgccccaggaaatgaaatttgggcagcctggagccccttgagtgccctggatccaattctaacaggttacaattttgctcttctgtcgggttcaagcatggctgcacctcatgttgcaggaattgcagcactaattaagcaagagtacccttcctggaacccatcgatgattgcatcggcaatgtcaaccacggccaccaagtttgataacaatggtgggattataatggccgaaggattcaatatcgggagcttgtattcttctaataattttgattttggcgctggctttgttaatccaactcatgccatggatccaggcttggtcttatcatcaggtaaaccttttcacatttccaaattctaccattaagcttgaccaatatatgttactttgttctttataatgtcatcatgaagcagaaattgaagattatatcagctntnttgtgttcaatgcccttcattgatcgcattgcaat

SEQ ID NO: 12238 - DNA, 1096 bp, Gossypium hirsutum
  Clone ID: GOSHI-09MAY01-C74346_1
caatatactacatattcttgtgtaatttgtacacattttttaatgggggagtatgaggtttaaaaattttctattatatataaaaaagtacagatctttctaactttgactgaagattgaaagaaagagaaggcaaccaaagccaacactttcggcgctccttctttcttccctttcgctttgctttgcttgcgtctccatctttcttcttccttgttttgctctccaaaatctctcttttaaaattccaatttttattgtttatttataattttcacacttgaacaaagtttcaaaacatttttttattattaccactaataaaataacatatccatagttggcctcaaaagaaaaactctttcactctctgttttcttgccccaattgtacgaatcgaaagctaacccttttagtctatcaaccttaccagacccttcttcttgttattaggtggggtcgtccgtcttctttgtggccgcatcttgctgtactagtgaatactgttggaggcaagggcacataagatgccttttggtgcttaattttatgcatcttctatgctgattactgttctagagaatatgggtttattatgcagtaaaaatcatcgttacactgaagcagatgccgaggaaaatgcacaggctgcagattttgacgcgtccgcccacccggccccccacgcggccgagcatatccaaaaacttctactacttggtgctggtgaatctgggaagtcaacaatttttaagcagataaagcttctgtttcaaactggctttgacgaggacgagctaaagagctatatctctgtcatccatgcaaacatctatcagactataaaaaaactgcatgatggatcaaaggaattagctcaaaatgatgcagattcttccaaatatgttttatccagcgaaaaacagaccttggccttgggacgctttatagtcttcggctggtttgactatacaccataaatagagaactcgtacaggagatagaaacactctggaaagatattgcaattcatgaaacctatgctcgtgggaatgaacttcaagttccccattgtactcattatttcatggaaaat

SEQ ID NO: 12239 - DNA, 551 bp, Gossypium hirsutum
  Clone ID: GOSHI-09MAY01-C74226_1
ttagtagagaaccttcaagctttttgtctcatatggagggagatgaacagccaattgaacccatatctgatcttgggatcgacaagattaacgttctcatgttcgatgatgctaaatgatacatccactctagttgtccatctatcccgtctcaccattattgggtttaaggaaggaaaccgaattagttggcaagttttgaagagatttgaatgcataaattttgattgttcgagaaaaaaaaaaagtaggttgtttctttttgttaatgtgataatgaacatattaactaggcatagaaataatttgtttatcacttcaaacaattagcaatagatttttttttgcgaacttcttaaaatttgtttggcaagaaattttttaaggcattaatataagatcctttacatgaccaattgcaattatggcagtatactgcaattgtcattagggtttaggagatatatttcttagatgaatcaagctatcttcactttgtgagatagtttgtgttaggtcgtgtgctcggtacaaccctttcttttgtatcc

SEQ ID NO: 12240 - DNA, 712 bp, Gossypium hirsutum
  Clone ID: GOSHI-09MAY01-C75816_1
gttttgtaatatcagattggcagggaatagacaggatcacctcaccaccgcatggcgaactatacatactctgttcaagctgcgattcaagctgggatcgacatggtcatggtccccttcaaccttaccgagttcgtagacgatctaacctatctagtggatagcaaagttattccgatggatcgtattgatgatgcggtgcaaagaattttgcaagtcaaattcactatgggactctttgagacacctatggctgattttagtctagttaatgagcttggaagccaggcacatcgagacctggcaagggaagctgtgagaaaatcacttgtattgctgaagaacgggaaacctggaagtacacctctactgccccttccaaaaaaagcttcaaagatcctagttgctggcactcatgctgataatttgggttatcaatgtggtggatggacaattaattggcaaggattcaatggcaataactctacaagggggacgacaatcctcggtgccataaaatctactgttgatcagagcactgaaattgttttccgtgagagccctgatgccaactttgtgaaatctaacaaatttgattatgcaattgttgttgttggtgagcccccttatgccgagactgcgggggatagcacaaaccttacgatgatagaccctggcccaagtgccattaacaatgtctgcggtactgtct

SEQ ID NO: 12241 - DNA, 576 bp, Gossypium hirsutum
  Clone ID: GOSHI-09MAY01-C75556_1
cccagcgtccgcaacaacactcctatctagagcgaaggccatgcatatcatcccattagccaaaaactaaacctaaaactgaaaacaaagcaggtgaaccatgagcggcaatactcgtaattgctcgagttactttgatgcgcgacaacgatatggagagatcaagggcttgtttttcctcgatgagacacagcgcgataccgaaggtaaacgcaggactgatttgcactttttggatctggaaagaggtgaaatctctgacgttttgagtacgacgccacctgatgtccctcttggttccactgtggttacctgtggcaaccacgtttacaccattgggggaacgatccttcggggtggtatccttcgttcattaaaccatgttttccgctttgattttaagcacgctgaacgtgggtggagaaaagttagttctatgctgtaccctcggggtcttcccgaggctcttgctgcacaagggaaagatttacgtcttcaagggatcccgtgattgttttggcgaggtttacgatataagtggggatagttgggttccattgtgcgtcccttctattg

SEQ ID NO: 12242 - DNA, 427 bp, Gossypium hirsutum
  Clone ID: GOSHI-09MAY01-C75456_1
agctttcagcaatggagtggaagctctgattcaaaagggatacaagaagatcactccattttttatcccttactccatcaccaacatgggatcagcattactagctatagacactggcttaatgggacctaactattccatttcaactgcttgtgcaactgcaaattactgcttttatgcagctgccaatcacatcaggagaggtgaagctgacatcatggtagctggtgggaccgaggctgctgtcatgccgactgggatcggcgggtttatagcttgccgggcattgtctcaacgaaatgatgaacccaagagggcttccagaccttgggacaaggaccgtgatggtttcgtcatgggagaagggctgtggtgtactggttatggagaaccctggatcatgctatgcaaagaggggctaacatca

SEQ ID NO: 12243 - DNA, 429 bp, Gossypium hirsutum
  Clone ID: LIB3493-015-P1-M1-G12
acgcgttcgcataaacatagattatagtctgattcaaaagggatacaagaagatcactccattttttatcccttactccatcaccaacatgggatcagcattactagctatagacactggcttaatgggacctaactattccatttcaactgcttgcgcaactgcaaattactgtttttatgccgctgccaatcacatcaggaggggtgatctttaaattatgcaagactgagcaacgcgtgcttgacaggatggttcctggattctccgtcattgatggatgcatgcattggattatggaacatgatcactcaatacgaagtaattctacatgagatttgatatgccacttagatcacctacaatatttagatcgatcgcaaataacttataatgagaaacaacacttacataagaataatgaatcac

SEQ ID NO: 12244 - DNA, 443 bp, Gossypium hirsutum
  Clone ID: LIB3543-028-Q1-K6-G10
tttgacttactctgaaaatttcatctccctctgttgaatttcgccatttttgtgtctttcatcgtttcttgttttgcatcctaaccctctcttcgtttctctcattctcagataaatttttctgccctcaaaagagaggggcattgttttctttattttatattgtttttttcttcctttttttttgcccaaagcaagtcttcaatctcggattcctagatctgttggaattcatttctgggaaatacccatatatttgatttacacagaagatatctatccatttggttttttgataaagagtgtgaaattatggacgaatttggcgttttaacagagcgttacggcttaaaaccgcaaggaaaatcggttccgatgtcgcagggcaaacgatccaccgccaccgccgctgctaccgcaaccaccgactggggttttcgggt

SEQ ID NO: 12245 - DNA, 271 bp, Gossypium hirsutum
  Clone ID: LIB3493-009-P1-M1-E2
tgaaaattttcatctccctctgttgaatttcgccatttttgtgtctttcatcttttcttgttttgcatcctaaccctctcttcgtttctctctttctcagaccaatttttctgcaatttgattgaatacccgaatttatataggttttttcttcctcttttttgcccaaaagaaatcttcatctcggattcctagatctgttggaattcatttctgggaaatacccatatatttgatttacacaaaaagatatctattccatttggttttt

SEQ ID NO: 12246 - DNA, 614 bp, Gossypium hirsutum
  Clone ID: GOSHI-09MAY01-C75616_1
ccaaaacaaaaagaggaaaaaagaaagctaaaaactcaactttacttgtcgtttaatggaaactctttcccatacgatcaccgcttccgcttctccgaaaccccgcctccctcgaaacgacaacgttcaccgtcgtctcctccgtttccgccatggatttagttccttgaatctcggtacactgagatcgcagaggagtactagtggtttcttcaaggttgaatgtagtcaacagagctcgaaaaattgtatcgattttactgatcctgattggaagtcaaagttccagcaagatttcgaaagacgctttaatattcctcacatcaccgatactttccccgatgctcagtcgtttccttccacattctgtctcaaaatgagaactccggtaactgaggattttgcggaaggctatccgtccgatgaggaatggcatggttatattaataataacgatagagtgcttcttaaggtcatacattactcgtctcctacatctgctggtgcggagtgcattgatcctaactgtacttgggttgaacaatgggttcatcgtgctgggcctcgagagaaaatatatttcaaaccagaagaaatgaaggctgcgattgttt

SEQ ID NO: 12247 - DNA, 956 bp, Gossypium hirsutum
  Clone ID: GOSHI-09MAY01-C75136_1
ggctggttctcctttttcagctggtataatttcagcaaatggtttggtagctcattctcgtagccatggtggtgggtttgctgttcgaactgagccttgcatggcccgttctgttagtgtgcctggatgctctgaggtcgtaagtccaccatcattgccttctcaagatgaaaatcttgacacggtcaaggatgcagccactgatatttctcgtacgggttcaagaagagacatggcaacccaaatgagcccacagggtagcacttgctcatcacccaaagaatcggcttctttctctctctccaccccggctcctctacctatcatggaactgcaaagcatccatgcctctaaatcagaagtgagagatgtacagatagatgaaagagtcaccatgactaggtggtcaaagaagcatagaactggaaacactgcgaagagctcacaaatcgttgatgatcccacgcggccggccgctgacactcgtacaccaacctgggatgtgactgagacagcaaagtgcgtttctacatgcggaggagaagaagccaaaatcactgcatgggagaatctgcacaaggcgaaagctgaggcagccataaggaaactagagatgaagctggaaaagaagagatcctcgtcaatggataagataatgaataaactgagatcagctcggaggagagcccaagaaatgagaagttcgatgttccccaatcagtcccatcaagttacaaggacctcccgtaaggctataccgttccatggaacctcattgactgattgcttcacctgccttactgtgtaatgtctgggttagctatctttacccgttcaatcgggcctgaaatgcaaggaagcaactattatacttgaagctaaattggttcactgcagtttgtgcatgtcctgtgacttcaagatttactgcaagtatgtctaataaaaaccacttg

SEQ ID NO: 12248 - DNA, 796 bp, Gossypium hirsutum
  Clone ID: GOSHI-09MAY01-C75216_1
caaaggcacgatgcaggcgaacgagttcgatggaaacgcggcctttgccggaggcggattcatgccttttcaggctactcagaccgctcccgaccgtccatcctcttcctccaaaaacagtgatgcgcgttgtttgactccagttacagtaaagcagttgaaggatctctctaaagttggagagtctggtatttccattgacggtgttgatgtcaataatattgtattggtgggaatcatatccaagatagacaatgctgtttcagattgtacttttagagttgatgatggcacaggatgggttgaatgcaccaaatggattcatgaacatgtagactcagttgaagtagatgtgctttcggttggaatgtatgttcgtgtctatggccagttcaaaagcattcaaagtagaaggtccatacacaccttttcaattcggccaattactgattttaatgagattgcacaccacttccttgagtgtatatatgttcatttgtacaacaccaagttgaggcttcggatgacaaatgcaactgacggtatgactgctcagccccaggtggcaaattcatattctggcaaccatataatgggttacagctaccaaactaactcgacaagccagttttctaaccagtataacactgatgaagaacagatcccgtggtattaagttcaatggtcctacaatacttgcgtcggccagcatgccttgcatccgaaatgggggtaagctcttgatatcgtggctcgagaactaaatgttcaatggataaagcaggaaaacttttgg

SEQ ID NO: 12249 - DNA, 642 bp, Gossypium hirsutum
  Clone ID: GOSHI-09MAY01-C76966_2
atagtagagcaactacaattaaagaagtgactcctatttgttatttggttccatttgttctgacttgaatcttgcagttttgctgacaattggtctaatgtgttgacaggaaggagtggagttgtctttgctgttaagttataccctgctggtgccaccacaaattctcaagatggtgttacagatctgtttgggaaatgtctaccagttcttgaagagatggttgaggaaaacatgccgttactggttcacggtgaggtcacagatcctgatgttgatgtttttgatcgcgagaaagtgttcattgacactggtttgcaacctttaattcaaaggcttccaagactaatggttgtgatggaacatatcaccactttggatgctgttagatttgttgagtccggtgtagcaggttttctgaagtgccttttgggaagaaatttggttcttcatttattgtgttagtggtagaatcgtttatgtccttttggatttcttccttgtttctcattagctctcaagtttttgttttccactgtaggatttttggctgcaactgtcacaccacaacatcttattctcaatagaaatgctctcttccaaggggattgcagccgcataattactgccttccagtactca

SEQ ID NO: 12250 - DNA, 1200 bp, Gossypium hirsutum
  Clone ID: GOSHI-09MAY01-C76966_1
tgcttatcgagaatcaatcttgaaagcattacctgccgatagcaacttcactcctgtaatgacactgtatttaacagatacaaccagtcccaatgagatcaagctcgctagaaggagcggagttgtctttgctgttaagttataccctgctggtgccaccacaaattctcaagatggtgttactgatctgtttgggaaatgtctaccagttcttgaagagatggttgaggaaaacatgccgttactggttcacggtgaggtcacagatcctgatgttgatgtttttgatcgtgagtttgtgttcattgacactgttttgcaacctttaattcaaaggcttccaagactaaaggttgtgatggaacatatcaccactatggatgctgttagatttgctgagtccggtgaagaaggatttttggctgcaactgtcacgccacaacatcttattctcaatagaaatgctctcttccaagggggattgcagccgcataattactgcctttcagtactcaaaagagaaacccacagacaggctattgtttcagctgtgactagtggaagcaaaagatttttccttggaactgacagtgctccccatgagaaacaaagaaaagaatgttcttgtggttgtgctggaattttcaacgcccctgttgcattatcactatatgccaaggtcttcgaggaggcgggtgcgcttgataaattagaagcatttacaagcttcaacggaccagagttctatggtctcccaagaaacaccgcaaagattaaattaacgaaggcttcatggaagattccagattctttatcgttttcttttggcaatatcatccctatgtttgcaggtgaaacactagagtggcaaccatgtgttggggaaaaggccgagatgttgaatgaagttcaagaggtaggggctaataagggttaagcatatccctacttggaatttcattcagctctatatttagagagcccaaggtgagattcaatctttagtgcctaatttggttggttaatgtaacaacatgagaataaactgatttagtacatcagtgctaaaataagttatcgtaacatcaataataaaaacagtccaatctttgatagccaaagaggttgaacaagtaaatttaagtattagtgtgtgaaatgttacttttgtccttagtgaaaggaaaaatctcaattttt

SEQ ID NO: 12251 - DNA, 444 bp, Gossypium hirsutum
  Clone ID: LIB3493-003-P1-M1-E12
cccaagttcccagcccatttgccaccaaagactgtgattgagaggccaaacacctaaagtggttaagcaagacaagaagaagaagccccgtggccgcgcttacaagaggatacaatagaaccgtcgtttcgtcatcgcagtggttggttccggcaaaaagaagggacctaactcatctgagaagtaagagctatgcaattgaaaaaggttattgtttgaagcttttatggatttagtctgtgtttttcccttttttttttttgtaatgttttatgatacttatttttatccactggtattaaggatcaagtaatttgaagttttgttggcaaaatattatgtgattttgatattagttaagcttaattcttggttctttacgtatttcttttctgcttcatcgctgccgaattattgccatttcaaatgcttaaagtttttatt

SEQ ID NO: 12252 - DNA, 424 bp, Gossypium hirsutum
  Clone ID: LIB3493-041-P1-M1-E7
cagaatatgaaaaacgctgtttgcacgtatgctgtcattgggagggccagcatctgatgtgggtgatcttgacaagaagaataatccccgtggccgcgcttacaagaggatacaatagaaccgtcgtttcgtcatcgcagtggttggttccggtaaaaagaagggacctaactcatttgagaagtaagagctatgcaattgaaaaaagttattgaatgaagctcttatggatttagtctgtgttttttccttgatttattatgtaatgtttaatgatacttttttttatacactggcattgaggatcaagtatttagaagttttgttggcaaaatattatgtgatttcgatattatgttaaacttaatttttggttctttacgtacttcttttctgaatatatcgctggcgaattattgccatt

SEQ ID NO: 12253 - DNA, 789 bp, Gossypium hirsutum
  Clone ID: GOSHI-09MAY01-C76506_1
aaagctctcttctttccttttcttcttcttgtttcatcatttgtttaaaaaaaacccatttcccccacttttttttttttggctgatttcagtcagaaacatcaaattcctcttgggttgttcttataaaaagcaaatctgtttctgacattggtttgattcctttgataaaaagaacccatcttctcgtcttatgttccatttttgtttctttcagttaaaaaacaaagatcagctattcccctgttctggcgctgtttattgttcgggtatttgcttcaaagtcaaatggggttctccgaaaagccacgaattgatggaagattagagaatgaaggggagaaatgggtgataaccggcataccttcattgaaaccaattaacacagaaccaagtgaagaagaagcaacagcagcttgttcaacaactccaacttcaaaagaatcaaagatcgcagacagattgccttgtcccccacctgcaacaaggcgtaagcctgctttaagatgccaccgtaatggagttagagagttctttactcctcctgattttgaagcacttttcaactcccattttcacaatgccattcgacttccaaactagcttttcttaagagttttttctcttgtggggggttaggaattccttgtctaatcattatattggagaggagtcgaaggtgtacaaagattttatcttgttttcaatgagacacctttttgtatatggtagggagaagcgctttagttgtttgatttgaacattggcgattaaaagagtaatagcgat

SEQ ID NO: 12254 - DNA, 289 bp, Gossypium hirsutum
  Clone ID: GOSHI-09MAY01-C76736_1
atttctagtcaagaatgggtaaaaaacccatacgacggctatggagaaaaagaaaagctctaataaaaagacccagctactttatgttcgatatggtagacgactgcgaggaaaacccataaacttactagtagcaaaactcgctgccccgctgactccattactcactgcttctcattgcaaagccaacactctttcatcagcttccagcatccttcaagctctcaatcattctgacaaattttaagagagagagacactctaagctgctctgctcctactaaaatga

SEQ ID NO: 12255 - DNA, 720 bp, Gossypium hirsutum
  Clone ID: GOSHI-09MAY01-C76006_1
cggacgcgtgggcggacgcgtgggcggacgcgtggggttttctgagaataattttaaggttgagatcatcaacgatttgcctgcagataaaactatcacagtataccgatgtggtcccttggttgatttgtgtcgtggacctcatattcccaatacttcttttgcaaaggcatttgcatgcatgaaggcttcttctgcatactggaggggaaacaaagatcgtgagtgtttacaaagagtttatggtatatctttgcctgatcagaaacggttgaaggaatatatccgtcagatagaagaagcaaagaaatacgatcatagattattaggtacagagcaggaacttttcttttgccaccccctcagcaggaagttgggttctttcttcctcatggtactcgaatttacaacaaactaatgggatttatacgaaatgaatattggaaaaggggtatgaaaaaggtttaagtcaccccacatgtataatatgaaatctttgggaaacatctggccatgctgcaatataagagaattgtgttgagattgaaacgaggttggactgaagcctatgaattgcccaggcactgttaatgtttcaacacaggtttcgtctatagagaatacctcttgcatgcttgatcggtcctgctcaaatgagctatgggcactgctgggtactcgggtagagtcaacagatatctacattttgcaagatccaga

SEQ ID NO: 12256 - DNA, 478 bp, Gossypium hirsutum
  Clone ID: GOSHI-09MAY01-C76346_1
cccacgcgtccgcgccaccttcacttcctttattcttcttctaatctcctttgaaaaagctttaattgccggaacttagctctcttaatttctttttaccgggaatgggattggaaggcgtggaaccgtcgtcgtttatggcagattttctagcagggtgcggtggttatgcggtggtggacggtgggttggccaccgagcttgaacgccatggtcaagacctcaatgatcctctatggagtgccaaatgtcttatctcttttccccaactggttcgaagggttcacctagattaccttgaagcaggtgcaaatgtgattataggtgcatcatatcaggccaccattcagggttttgaagccaaaggtctatcgattgaagaagctgaaactttaatcaagagaagtgttgaaattgcatgtgaagctcgcgaaatttatctccaaagatgtgccaaaggttggtgggacttccttga

SEQ ID NO: 12257 - DNA, 853 bp, Gossypium hirsutum
  Clone ID: GOSHI-09MAY01-C77726_1
gcgttctgaagatcagactctgagactataaaagatcagcatcatctctgggagattccttgacagctgaggatgagagagaagagggtgttctgagagcttctaatggtgttcacgataacaacctcaaagatggctcttcccatggttccagaatgggatctgaacttgaaactaataaatcacatttaaaggcattgaataatactccaaagaaatctgcaaaatctaatggagtcccccataagaatgctaccaaaagttctgtagaagaaaccttgaaagtttctcctaaatcttcatctgagtcttcagaaggatctaatgccaggcatgctgaagagttaaaagaagttgatgtcttggatgagacaccaaacggcaataaaagttttgcaagtgacaatgagcctgttgatgctgaagacaaatttcaagttgaaaatgaggcagctttaaatgaaaagattaatgagatggagacgagaattgagaaacttaaagcagagctgagagaagtagctgccctggaaatttctctctatttctgttgttccagagcatgggagctcagcacataagctgcatacacctgctcgacgtctttctagactctatatacatgcttgcaagcattgggaacaaaacaagcgagccacaattgctaaaaacacagtgtctgggcttatatttagcttgcaaaatcttgcagtaatgatgtttcaaggttaaccttctggttatcaaacaccatagtgctgagggagatcatctctcaagcatttggcaattcacgcaactcaagcccacttgcatggctctccgagttaaatggcagtaacaaaaggagtga

SEQ ID NO: 12258 - DNA, 486 bp, Gossypium hirsutum
  Clone ID: GOSHI-09MAY01-C77196_1
tccacgcgtccgcccacgcgtccgcccacgcgtccgcccacgcgtccgatgtggcttagtggtgcggaagctctgggaactgatgcagttcctgggtttttacccactgaggacattgtagaaaagaaagatgatgaagaattggcagtttctgctgatgaagatcagaacttatgtgcattatgtggtgaacccttcgatgatttttatagtgatgaaacagaggagtggatgtataggggggctgtctacatgaatgcacccagtgggtcagttgaaggcattgatagttcgcagttaggtcccatagtgcatgctaaatgcaggccagtctctgtgggtcgccccccctgaagattttgtacggtatgatgggatgttattttattttttgcctccaaattgcattgccattccaatattatctttaatagaccattcatgttatttcatcatcttattcaattccattcagtctgaaaagca

SEQ ID NO: 12259 - DNA, 793 bp, Gossypium hirsutum
  unsure (1)..(793): unsure at all n locations
  Clone ID: LIB3828-003-Q1-K6-H12
gttatatcccacacattgtgtcggttggaagccctgcaccgagttcaagtagggttaccattgcaagtaggtccnnnnnnnnnnnnnnnnnnnnnnnnnnnnnnnnnnnnnnnnnnnnnnnnnnnnnnnnnnnnnnnnnnnnnnnnnnnnnnnnnnnnnnnnnnnnnnnnnnnnnnnnnnnnnnnnnnnnnnnnnnnnnnnnnnnnnnnnnnnnnnnnnnnnngnnnnnnnngnnnnngnnnagagtgnnnnncagaggnnnnggagntnttttgttactggnaanaattcctgctaaacaggaaggatttggtcttcaacagctttccttaaagaattttcgccttcaagtttgtttaatgccgtgaagctgaggagagatggccctctctgtctcatgacagagcataaggaggcaatttggagcacttatgttgcaactacaaagcccgacacttctatcttgaataggcttattgatgctggaatgtcaccaagggtcgaggaatctatgtctgttgttaataatgagatattacggcgacacttcttggagctcacgaccaactttttggcaccttttggaccatattttagggctactactccttctgaaggttcgtcaccatacgctgacccccctccattacctccatttaatgctgatgattttcttatgagcttatcagcaagaggggtggngaaagtttctctcgaagcgaatgagatctaactggctggaacctgtataggcgttttcttaaaggacccaactttttgccatggttttcaa

SEQ ID NO: 12260 - DNA, 356 bp, Gossypium hirsutum
  Clone ID: LIB3584-002-P1-K1-C7
cccacacattgtgtcggttggaagccctgcaccgagttcaagtagggttaccattgcaaggaggtccactggaagaattcctgctaaacaggaaggatttggtcttcaacagctttccttaaagaagttctctccttcaagtttgtttaatgctgtgaagctgaggagagatggccctctctgtctcatgacagagcataaggaggcaatttggagcacttatgttgcaactacaaagcccgacacttctatcttgaataggcttattgatgctggaatgtcaccaagggtcgaggaatctatgtctgttgttaataatgagatatcaccgcggcacttcttggagctcacaatca

SEQ ID NO: 12261 - DNA, 942 bp, Gossypium hirsutum
  Clone ID: GOSHI-09MAY01-C70566_1
ttctctctttttcttggtttttctttccacctgtttcttacttatcaaaaacaaaaatttataaagaacaaaacaagaaatcacctccttttagagctttgaaagatgattttttggtagcaaacagattgtaaatacccaaaaagaaaaataaaaagggaagaaatgagtggggataggttcaaaaactgttttcttccgacgccggcgggttcttcatcaacggcgatcaagcttttgatgattacagttccattgattcttgtttcgttcgtcattttccttttggttccgaggaattcaaggtattgggtcttctgtttctccttctggaaatagcagtactgggaatttcggtgcagttagtgaaagaagtatcaacggcggcggaagcggtggctgtgtcgggtgaggcggcgcttaatcggtcatctaataagtcacttgatgttgaagctcaagtcatggaaattcacgaatttgatgaaacaaaggaagatagcttaaatatcaccaccaacgagctaaacaacttaaacatttccgtcaccggtgtcccgaacgctacgatatccctgaacgagtcgatatctcttcctttaaaacgaaaccgacgagtccgaaccaaattggataagctcgaagcaagactgcaacgagctcgagccgcgatcaaagacgctaaaaactcgagtcaattactggatcccgagtacgttccgataggtcccatgtattgggatgcttaggcctttcacaggagttatatggaaatggagaaacaattcaaggtgtttgtatataaaagaggggagcccccggtgtttcatgatggtccttgcagagcatatattcaatggaaggaaacttcatctaccaaatggatgttcacacgaagtttcgaactaacgatcccgaaaagctcatgcttttaccttcgtc

SEQ ID NO: 12262 - DNA, 621 bp, Gossypium hirsutum
  Clone ID: GOSHI-09MAY01-C70536_1
cccacgcgtccggttttaagtaagtaagatgataatggaggagcactggaaactggtttatgtgattgggattttggctttaggatttgcagtgaaaagcaatgctgatggttcaatctcatgtgggtttccagccatatataactttggggattcaaattcagacactggtggaatctcagcgaccttaaatgaaattctaccaccaaatggtgaaaccttctttggacatcccgccggcagagcctccgatggccgactcattatagatttcatagctgagggtattaagttaccatatcttagtgcatatatggactcaattgggacaaatttcaggcatggtgctaattttgcaaccggtggttcatcagttagaccacctggttttagtccattcaatcttgggattcagatttcacaattcattcaattcaaagctcgtaccactactctctataatcagctcagcctcaatagaagaatccctttatccattagcaatctaccaaggcctgcagaattctcacaagctttatacacatttgatattggacaaaatgatcttggtcatggtttccaaaccatgtcggagaaacaagttcgagattcaattcccgg

SEQ ID NO: 12263 - DNA, 787 bp, Gossypium hirsutum
  Clone ID: GOSHI-09MAY01-C70496_1
cccagcgtccggttgctgtttactgaagaaaaatctctaattacccaaaatggagcctgagacagttgctgtagcagaggtgggtcagaagagaagtagaaaaggagggttgaaacaagggaaggctaacggaggtggcgaccatggcggtgatcaatcggagcatgagatgcatatatggactgaaagagaaaggaggaagaagatgaggaatatgttctctagccttcatgctttgcttcctcaacttcctgctaaggcagacaagtctaccattgttgatgaagcagtaacatacataaaaaaccttcaacagactctccaaacacttgagaaacaaaagcttgagaaattaaggaattcagcaacggttgatgacgatcaatcatccataatcacgtcgcaggtgcaacctcctgaatcaagggaagcattcttcactgataatcagggaccaacaaataactatccggtgaccatagacatgtctcagacatttccagcccaagcttcaccagcttgctttcagacatggttttcatccaatgtagtcattactatgtgtggggatgatgcacaaatcaatgtctgttccccaaggaagccagggacattcgccactatcttgtacatactagaagagcatcaattggaggtggtttcggctcacattttctcagatcaatatcgtaccatgtacatgatccatgttcatgctggtggagcatctgaacaatttccggagttactgtcgatagaagagacatttaagctggctgcatgagag

SEQ ID NO: 12264 - DNA, 493 bp, Gossypium hirsutum
  Clone ID: LIB3582-019-P1-K1-B2
gataaattcatcctaatccccctatttttgggctcttttaccaattcttttcctggtgaattggttagggaattttgttgctgtttactgaagaaaaaatctctaattacccaaaaatggagcttgagaaagtttccgtagcagaggtgggtgagaagagaagtagaaaaggagggttgaaacaagggaaggctaacggaggtgtcgaccatggcgctgatcaatcggagcatgagatgcatatatggactgaaagagaaaggaggaagaagatgaggaatatgttctctagtcttcatgctttgctacctcaacttcctgcgaaggtaattaaaatatatataatatgaaaatagtttaagatcatcggcaggaaaaataagagattatttgctttccatgatatctatatccaattccaaccttcatcacaagtttgaaagtgtgcttcaatgaaaaaaaaataggttttcttgatttttacacatgcatg

SEQ ID NO: 12265 - DNA, 607 bp, Gossypium hirsutum
  Clone ID: GOSHI-09MAY01-C70436_1
gaatttaaagataaacggaaagagaaggagaaggagagaaaggagaaggaaagagaacgggagagggaaaaaggtaaagaccgaagtaaaaaagatgaaacagatagtgagaatttagatatatctgacagctacggccataaagaggagaagaaaaaggagaaggaaaaagacaggaaacaccgtaaacgacatgctgctgatgatgggagttctgacaaggatgatagagaggagtcaaagaagtctcgtagacatggtagcgaccgtaagaaatctagaaagcatgctcactcacccgattctgacagtgaaagccgacatagaaaacacaagagagatcaccgtgatggctcacgccgaaacagtggttacgaggagctggaagatggcgaactcggtgaggatggtgaaatccagtagtgtttcctattctcatccaaaaagctaagtaaacaaagttgggaaataaactagtacttaaaatgattttactgctacattgttgtattttgtaaaccaagaaatctacaactctaatcactttttaactttttagccttttctacacaggcaaaaatataaaaaagaatttcaccaagttgtg

SEQ ID NO: 12266 - DNA, 954 bp, Gossypium hirsutum
  Clone ID: GOSHI-09MAY01-C70756_1
tatttctttttttttttttgaaaaacctcgagcaagaatcacagataaagaagatggaaggcatggagatgaaggaggtaaagttcgagaataaggatctgaagcacctaggcttcgtgagggtggttgctatccacgccttggtttgcgtgtcgaacctctacgagttcgctaaacagaactccggtccgttgagatccaccgtcgaaggccccgttacgaccgtcgttggtcccgtctacgagaaattcaaggatgttgctgatcatcttcttcgatttcttgataagaaggtagatgaggctttacacaaaattgataatcaccttccggccaaagctaagcaagcaatcccccgcgcccgcccccgcgtccgcaagacagcacaacatgcttggaaactagtcgacgaggcacgaaccaacggaccacgaggagcgttgcactacgccacagccgagtacaagcacctcatggtcataaactcaactaagttatgggtcaagctgaatcacaactcggctttccactcggtggctgagtgggttactccaacagcagctaattgggccggtaagtacaacaaattaattaacgatatgagtggcaaaggttatattgtttttggttatctgccattgatacctgttgatgaatttggtgaggcaattaaggtagctaaagcaaaggaaaaagaacatttaaatgatcataaatcagattctagttctggctcagattagggacttcacttttttttttggttttgtaaatagaaaatctaaagtaattgtgttggtgagaggcatattgtggaaaatgtcaagttgccactgtaaattgggtgtgtctgcttgtatatatatatgataatgtttaataaatataaaagtaaatattgtaaatacaatatgaatgcgtaaagacggtatgtttatggcaatatgatgtttt

SEQ ID NO: 12267 - DNA, 415 bp, Gossypium hirsutum
  Clone ID: uC-gsflnu33B114b09b1
cccacgcgtccgcccacgcgtccgtttaggttttgttcgaagttatttaaattttaggaggtaaagttcgagaacaaggatctgaagcacctaggcttcgtaagggtggttgcgatccacgccttggtttgcgtgtcgaatctttacgagtacgctaaacagaactccggtccgttgagatccaccgtcgaaggcgccgttacgaccgttgttggtcccgtctacgagaaattcaaggatgttcctgatcatcttcttcaatttcttgataagaaggtagatgaggctttacacaaaattgatgatcaccttccagccaaagcttagcatgcaattaaccaagcccaatacttggttcacaagacagcccaacatgcttggaaactagtcgacgaggcacgtactaacggaccac

SEQ ID NO: 12268 - DNA, 512 bp, Gossypium hirsutum
  Clone ID: GOSHI-09MAY01-C70766_1
acgcggacgcgtgggcttcccctgacgctttctccatgcgaacttaggaaagtaaagcagcaacatgaaccaaaaaacattgctagaccgatcggacgcctcctggttcattgcgtttccgttttccaaacccgacggtagagatgcaaagaccaaatcttcacgctggtccaaggtcagttcagaatcgtcatcatctccgaccaactatcccgatttttcagctctccctttcgacatattaacgaaaatcgcggcgccgtttaatttcccgaatcttctagcggcgtctctggtgtgtaggtcgtggggggacgcgcttcgggctttgagggaagccatggtactactgcgtcaggggaagcagttcaagcacggtcgaggcggtgttggacgcaatttggagaaagctctcgtctcttttctgaaaggctctgcgcgtggctccacgcttgccatggccgatgcggggcttgtttcctgggaaaggggttagaaggatgaggctatcg

SEQ ID NO: 12269 - DNA, 702 bp, Gossypium hirsutum
  Clone ID: LIB3582-031-P1-K1-F5
ggttaagctcttcccccttgcaatccaaccataaaagatttctttttaaacttttatcacacttcttagttgggcgtttgtcagttccccacagatttgagtgatccaagcagtaaaatcaagttcttttttaaagcaatggaatccatctgcatatcgctaaaggctactgcaaccgccagtccggttaatatcagccaaggtcgtagtaatggaggcactgttttctggggtgagactattagaggaggttgggattttggaacacagttatggaagagtttgagagctgaaaatggtgtcaaaaaagctaaaccgggcgttgcttactctattatcaccccagaaattaacaaggagacaatgaaatttgagccaccaaagtttgaggctccacaagcagacccaaagaatgtggcttccatcatactgggcggcggtgctgggacgcgcctcttccctcttactagccaaagagccaagccagccgttccaattggagggtgttacaggctgattgatattccaatgagcaactgtatcaacagtgggataaagaagatatttatcttaactcagtttaactccttctccctcaatcgtcacttagctcgtacttacaactttgggaatggtgtaaattttggagatggtttggttgaggttctggcggccactcaaacaccaggagaagctgggaag

SEQ ID NO: 12270 - DNA, 608 bp, Gossypium hirsutum
  unsure (1)..(608): unsure at all n locations
  Clone ID: AI727392.1
cagtttccaactttgtttttttttttgacttaggaagagtttaaagtcgtcgcagccttttaatctgtctttgatcattgttcttaatactagttgcatattgtggccatggaatcttgggaccactaacaaagtaatttgctttttgtctgattttatttcattgtggactaagagtctattttttagccgagcaatggaatccatctgcatatcgctaaaggctactgcaaccgccagtccggttaatatcagccaaggtcgtagtaatggaggcactgttttctggggtgagactattaaaggaggttgggattttggaacacagttatggaagagtttgagagctgaaaatggtgtcaaaaaagctaaaccgggcgttgcttactctattatcaccccagaaattaacaaggagacaatgaaatttgagccaccaaagtttgaggctccacaagcagacccaaagaatgtggcttccatcatactgggcggcggtgctgggacgcgcctcttccctcttactanccaaagagccaagccagccgttccaattggaaggtgttacaggctgattgatattccaatgagcaactgtatcaacagtt

SEQ ID NO: 12271 - DNA, 509 bp, Gossypium hirsutum
  Clone ID: GOSHI-09MAY01-C71966_1
gggaggctaacttttcagataaaggggaacttgccaagttttgaacaggactaagaagaggccacttcaacaatgtttaacccatcaaattattagagaataaagggtatatacaggttgatgagggttagtgccatttctaggtgagatgactgaaatgaaacatccagtaactatttatgtacaaagtcagcaaaagaaagcttgctttttgggtgtaaattagatgattcagttgctgatttcgaagtatcttggatcttctggataatggtaattccaccttcaacttgccctcatcagcatctgaatggcgttgagggaacacaaccctcaagtcattgtataaatagaatctccgatccccatccttttcaatgctagtcttttgaggaactgacccaggatcagatttacatctcagaaatgacttggaaccttttttgggagaagggcatagaaatctgagatgaagagcatatcgaagtgaaccaacacggacgcgtggg

SEQ ID NO: 12272 - DNA, 449 bp, Gossypium hirsutum
  Clone ID: GOSHI-09MAY01-C71886_1
cgacaccaaagaatttgacatggatgtcatcattgagacaaaccgcacaacagccaggattttccctgctgtgctggatgtggagaatccagagttcaagagaaggttggacaaaatggttgagatcaatgaacagttgcttgctgttggggagacctctgatattccattggtgaagaacttgaagaggattccattaattgcagcattggcttcagagctcctagctacgtatctgatgccgccgatcgaatctggatctgttgattttgctgaatttgaaccacaacttgtgtactagaatgtttttctttttgtaggatttccattttttgatgtggtatatttcagctttagtcatgctgcctgtcaagttatatgatctcaagttttagcaaatgaaactgaaacaattttaatgccgaatgacacccttatatttgttttgt

SEQ ID NO: 12273 - DNA, 738 bp, Gossypium hirsutum
  Clone ID: GOSHI-09MAY01-C71416_1
caagcaagcaggagcttttacagaacaaggcaaccccgtacccttcccagaaaaaaggtggggtttatctgcagctgatgattggagatggttcttcaccactacctttaaataggaggagattaactaatattgattccatggaggctgcatcagctaaagctaaacttgctgctgcaaaagagaaatttggacgagaaattcatgtcttcgaaactgaaggaccatcgccaatacaaaatgaagtgcccagcactgaggagtcggatgacgtctatgagttcacagcagaagattatcatcgagtaatggcaactaaaaaggaagataactacttaaagacacgaaaaattcgagaagcagaggaggcagcccgcagatcaagagtaacaaaggctgtgataagggtccgctttcctgataaccacacattagaggtcacatttcatccatcagaaacaattcagtgcttgtatgaccttatcatgagagtgatttctcgaccggatctaccgttctatttatatactactcctcccaagaagcaaataaaggacatgacacaagatattttctctactggtttcattccgggtgcaattgtgtatttttcatatgatctcccaaaaggtgccgatgccacagctgccaattcagcagccttccttctagacgaagtcatgtctttgaaaggtttggaggtcatactggtgctgacaggcaaaggcagttcaatcc

SEQ ID NO: 12274 - DNA, 617 bp, Gossypium hirsutum
  Clone ID: GOSHI-09MAY01-C71196_1
caccctcggtgctgacggcgcctccactctcatttccctcccaaccaaactgaggaaagacaaattcacaaccaacacactgtccagataaacccaaactcttcctcttcctctgtaattctctgtaccttctctccttccatggcttcctccatcttaatttcctccaagttctctccctttcattttccctctcccaaatcctcccttttcctccctgctcccacttccctccacttcccttcttccaacccaccccgtttcccttcttttccttccaaatcattacccaaggccaagtctcttctcatttcctcttctttagcccctactccccccactcccctccgccgtcctctttacattcccaaccatattccagaccccaactacgtgcgcatcttcgacaccactctccgcgatggcgaacaatctcctggcgccaccttgacttccaaggagaagcttgatattgctcgtcagctagccaagcttggcgtcgatataatagaagctgggtttcccgctgcttccaaggacgattttgaagctgttacggccattgctaaagaggttggaaatgcggaggatgagaacgggtttctgcctgtcgttgt

SEQ ID NO: 12275 - DNA, 810 bp, Gossypium hirsutum
  Clone ID: GOSHI-09MAY01-C71346_1
gaaatttgttttattttcccaacttacgcaggattcgagtaggcaagatttgtcgtctttcaagctttcttcagctttatacaactggcagattgggctccaatcttcaccgctaccaacctataatcagttttagtatttctgttaccatggaagacggcaaatcctcaagccaatctgccggaaaaccaattcgatgcaaagctgcaatttgtcgcgaagcaggggagcctctagtgatagaggaaatcatggtggctcctccgtgtccctacgaagttcgaatccgaattatttgcacctcgctctgttacagcgacattacattttggaaattgacggtgcctcctgcttgtgtccccagaattcttggtcacgaggccgtcggggtggtggagagtgtgggtgagaatgtaaacgaggtagcaccaggagatgttgtcattccaacttttttgtcagaatgtggagagtgtgaagattgctgttcaaaaaggagtaatttatgttcaaaattcccattcaagatccatccttggatgcctagatatgagaacagcagattcactgaccttaagggagaggtcttatatcatttcctattcgtctccagtttctccgagtacacggttgtggatattaaccatgtagtcaagattgatcccgcaatccctccaaacagggcatgcctctttggctgttgtatagctacaggggttggtgctgcttgcaaagtggcaaatgttgaggcaggatcaactgttgttatttttgggctgggatcgattgggttagcggttgcaagggagc

SEQ ID NO: 12276 - DNA, 605 bp, Gossypium hirsutum
  unsure (1)..(605): unsure at all n locations
  Clone ID: LIB3584-022-P1-K1-C3
gtaaaccgttcacaagctgatattaaaaaaaatgtcgacatgattgcttctaggcggaaggagcgcgagttctttgcctctagtcctgattatggacatttagctagcaaaatgggctcagaatatcttgcaaaagttctctcaaagcacttggaatctgtaattcgagctcgccttcctggcattacttctttaattaacaaaagcatcgaagaacttgaagcagagttgtcccatcttggtagatctgttgctgttgatgctggggcccaattatacaccatcttagagttatgtcgagcatttgatcgaatattcaaggagcatttggatggcgggcggccaggtggagatcgcatttatggagtttttgaccatcagctgccagctgctttaaggaagcttccatntgaccgtcatttgtcacttgcaaacataaggaaagtggtcttagaagcagatggttaccaaccctaattaattgctcctgagcaaggtattgaccgtttattggtgggggcccttaattactttagaggccccaccaagggcttttgtaaaaatctgtgtacattttttttaaaaaaagtttggaaaaagggaaa

SEQ ID NO: 12277 - DNA, 499 bp, Gossypium hirsutum
  Clone ID: LIB3585-062-P1-K2-E8
ggcgggcggccaggtggagatcgcatttatggagtttttgaccatcagctgccagctgctttgagggagcttccatttgaccgtcatttgtcactgcaaaacataaggaaagtggtctcagaggcagatgggtaccaacctcatttaattgctcctgagcaaggttatcgacgtctcattgatggtgcacttaattacttcagaggcccagcagaggcttctgtagatgctgttcactttcttttaaaagagcttgtaagaaggtcaattgcagaaactcaggagttgaaacgctttccaactctccaagctgaaattgcagcggctgcaagtgaagcattggagaggtttcgtgaagagagtaagaagacaactttgcggatggtggacatggagtcatcatacttgacagtggatttctttcggaagctcccccaagaagtggagaaaggtggaaacccaactttctcatctgttgatagatacgctgaaagtcact

SEQ ID NO: 12278 - DNA, 645 bp, Gossypium hirsutum
  Clone ID: GOSHI-09MAY01-C71226_1
taaaactgaactttctcttccctttccaatagggaatacattacttagtcggagggggcggttgcagtagccacttccccaagagaattaattcaaggaaaggatattcttcctttttgtttattgatagagttccgccgcgtcttcttcaacgctccatgaacgataatctagaacagatgttgatccaggacgaaaatttaacggaccggtcgccatttcttaaactcaggcgatggcagtggtggcttttggtggcaatcaacattttgttccttattgcaggccaagctgctgcagttcttcttgggagattttattatgatcagggtggaaatagtacatggatggcaacttttgtgcaaacggctggcttcccaatcctttgcatccctttaatttttcttcatccatctcagaaactggaaacgtcaacttcttcaacctatccttccatcaagattgttgctttgctctattttgttctcggattactcgtagcaggtgacaatatgttgtactctgttgggctgttgtacctctcagcctctacttattccctcatttgtgccacccaattagctttcaatgcagttttttcgtatttgcttaattcacagaagttgactgctttaattctcaact

SEQ ID NO: 12279 - DNA, 626 bp, Gossypium hirsutum
  Clone ID: GOSHI-09MAY01-C72886_1
gacttttgttgtttcaaagctttgggtttatattctgggttgcttggtttttaatattttgcggggatttggttgattgagagagttgggtatttagcagaatggagaatcaagcaaagaaggtgctgctcacttcaaatggagatgacatgtcggtgaacattgctttgcatttagccaaacgtggttgcaggttggttttgatgggaaatgaatggtgcctgaggagtgtgagagagaagttaatgggttcaacagatggtaatgtggtcccaatggaggtggttggattggatctggaggcggaaagtgagggcgcttttgatgacgctgtagataaagcttggaatgtgttcggatcctttagatgctcttctcaattgctatgcttaccaagggaagatgcaagaccatcttgcaattaggtgaagaagagtttagaaggatcataaaagtaaacttcatggctgtattgtttctacaaaaagctgttgccaaacgaatgcgagaccataaaacaggtggttccattgtattcatgaccacaatactcggtgctgaaagaggacttcatcaagagctgctgcatatgttcgtgtttggccgcagtgcacaattagctaaat

SEQ ID NO: 12280 - DNA, 563 bp, Gossypium hirsutum
  Clone ID: GOSHI-09MAY01-C72526_1
cttgctcttatagttgtccttgctttagcgtttggtcatgatacttgggctggtttcttcagtgacagtgcttcaatcattaaagactttgctacaatgaccccatttcttgcaatctccatagcagttgattcatttcaaagtgtcttatcaggggtggcaagaggtattggttggcagcacatggttgtagttgttaacttggcatcttattatgttgttggcatgccgattgcagctattgctggtttcaagtttaagctgtatgctaaaggtctatggtggggctttatatgtggattgctaatccaagctgccattctactggtgataacatttcataggagatggtcaaagattgatatttcagcagaaagagatgaggaaaactctgttgattaatgcagagaagaaccaggcaacagtatggcttgcttcgctcttctactcttcattgttcttaagctaatcaaataagttgctcaagagatggacataattttgcgtgtaagttatgatttaatatctctactttaatttaatcaaaatttaatttttgtact

SEQ ID NO: 12281 - DNA, 691 bp, Gossypium hirsutum
  Clone ID: GOSHI-09MAY01-C72766_1
gttccttcttttttgacctatattttccccagcttcaaacagacatttttaaaaaaaatcccaaaaaggaatcgaaaagaaaaaaattgaaaaaatgggttcggttccatcagaactgagcttggattttagacccaaatttatacccaaaacgatcagtaattttctcgaggaaatttcattgatgggaagcgtttccgataaggtttcaaagcttgattcttttgttaaaagattagaagaagaaatgagaaagatcgatggttttaaacgtgaacttcctctttctatgcttcttttgaatgatgcgattttagctttgaaagaggaatcaacgcaatgtattagaagaagaaatgttgaacctgttttagaagaatttattccattgaagaacaatcgaaaggagaataataatcacagtgatgatgaagaagaagatgattctaagaaaaattggatgagttctgttcagctttggaacactgacgatgatgatcatagttccattgatgataaattagatactaagagaaaccatggggatccatttaaaaacaggggataagtcagaggttttatgccattcacggcaaattttgagttttgctgtgaagaaacaacagaaaagggagataccaattcatggactaacgattctcactccgggaatcaagattccgacagtggc

SEQ ID NO: 12282 - DNA, 368 bp, Gossypium hirsutum
  Clone ID: GOSHI-09MAY01-C72646_1
ctataatagatggtttatgtggcctgccaaataaaatcagagaggtactgaagcttgaccaggaaatgaaggatcttgcaaagctattgattgctgaacagtcgcttcttgtcttcgggagaggatacaattatgcaactgctttggaaggtgctctaaaagtgaaggaagttgcacttatgcatagtgaggggatacttgctggtgaaatgaagcatggtcccttgggcattggttgatgaaaatcttcctattgttgtgattgctacccgtgatgcttgcttcagtaagcagcagtcagttattcagcagctacgtgcccggaaaggacacttgatagtaatgtgtgcaaaaggagatgctgcatc

SEQ ID NO: 12283 - DNA, 961 bp, Gossypium hirsutum
  Clone ID: GOSHI-09MAY01-C72666_1
gtcgaatgatgctgactcttaaacctgaatgagttgtcaagaagaaggaagttatgtttccactagtgtggaattggggtatgacttccataggtctgaactacatgcctatcagaaagctctaggggcattgcatgcttctgggcctttgacttgggatgaagaagaaaagaatatctcatggccaatgttggaggcatccataccttgcttctaaagccatgattggttgagtttgtcatctctagcagttgaccaaggggcaacagccatggtttattcctaaacaaactcttatgccctgctgttgaaaggtagcaaagttgaggtattgactgaggagattccaaccggtgcttggcattctgttgagattatctctggtgatggccatacatgtatggcgtgaaatgcagttggtctcggtttctgaacactgaagaggcatcagctatggggagagcccctagtaaagcgacaggccttgttgccctcctataaatgggaacactaattgggtttatggtggtgctgtataggtgttggacaagttttctgttaggattcttggatcaagtagcaaactaagcacatcaatctcgactgcctgttttacaatcttgggaagatggcaataggattctggttggaaggtaaatccttttgattcttgcttctcgaaggatagttttaatatttctcttcattagatgtaattgattcttgccttaattattgttttctacctcatgattatcaaatcccactgggccactgaggaggaaaagatctttacttggcttctcggatgtggtgcgcaaaagaagagggtgcttgaggaaggtagtaatggtgttcaaaggatagtacttcggcttcctttgtgtacttgcgtttgtttccccaaagaatatgcttcgtgaaagatgtatgcccttcttcctttaatagaattgatgat

SEQ ID NO: 12284 - DNA, 582 bp, Gossypium hirsutum
  Clone ID: GOSHI-09MAY01-C72126_1
gttcagatgccacgtggaatcaaatttgccagtgcgatatcagagtcgggtgagattaaggtcgaaggacaggtgaaggatgggattccccatctgacaaaggtagggtcattcgaagtggatgtaagcttggagggtagcattatcctttgcagacaggttgatcagcctggcttgattggtaaggtgggaagtattttggggcaggagaatgtgaatgtgagtttcatgagcgttgggaggattgcgccgaggaagcaagcagtgatggccataggggtcgatgatcagcccagcaaaggatctttacagaggatcggcgaggttcctgccattgaagagtttgttttcctcaagttgtagggtgactgtaccatttaccatatccttttcttgggttacaaccctgtagtactaaaattttttgaaaatctgtcattgagtgtgttctgtctcggataagaaagaataatttcgttgaacttgagtgattcagattgtgattaatatatattttcggatgaacttaagtgattcagattgtgatcaaatatgtatttttgatgaacttttaagtgaccc

SEQ ID NO: 12285 - DNA, 584 bp, Gossypium hirsutum
  Clone ID: GOSHI-09MAY01-C72246_1
ctactcgtccggaaaatttgagagaaatggaggtggagagagtgcaagagattgctaatttctcgaaagaaacaatcccggaagaattcattagaacaacgtacgagcagccagcactgactacggttcaggggacggtgctagaggtcccggttatcgatctaagcgaccccgatgaagagaaggttgtacgaaccattgtggacgcgagcagtaattggggaatgttccaagttgtgaaccatggcattccccatgaaaccgtaaggaagctgaaagaggtcggaaaggctttcttcgagctcccaccacaggaaaaggaagcttacgccaagtccccgggatctcaatccattgaaggctatggaacgaagcttcaaagagaagttgaagggaagaaagcttgggttgatcatctcttccataagatctggcctccttctgaaattaactatcaattttggcctaaaaacccaccttcttacagaaagaataacgaggaatacgcaaagcacatgccatgggggttcgacaagctatttagatgtctgtcattagggttagggctggaagggaatgagatg

SEQ ID NO: 12286 - DNA, 330 bp, Gossypium hirsutum
  Clone ID: uC-gsflmaxxa040a04b1
tttcactcgtccggaaaatttgagagaaatggaggtggagagagtgcaagagattgctaatttctcgaaagaaacaatcccggaagaattcattagaacaacgcacgagcagccagcactgactacggttcaggggacggtgctagaggtcccggttatcgatctaagcgaccccgatgaagagaaggttgtactaaccattgtggacccgagcagtaattggggaatgttgcttgatctgcactttggatttgtctccttgggcactaaggcgacctatagaagcctgtagggcatcctttcacctttatcccatgtaaaggtatttct

SEQ ID NO: 12287 - DNA, 627 bp, Gossypium hirsutum
  Clone ID: GOSHI-09MAY01-C73956_1
acgcgatcgtcttttataagcagaaagctaaaaaacaacgctgttagaatttctttttcatagtaaatatgtcagcccgaagcactgctggtcaggtcattcgttgcaaagctgcggtggcatgggaggccgggagggcactgacgattgaagaagtggaggtggcaccaccgcaagcaatggaggttcgtctgaagatcctcttcacctctctctgccacactgatgtttacttttgggaagccaagggccaaactccagtctttcctcgtatatttggtcatgaagctgggggggttgttgagagtttgggtgagggtgtgacagaccttaagcccggggaccatgtgcttccggtcttcaccggggaatgcggcgactgtcgtcactgcaagtccgaggaaagcaacatgtgtgacctgctaaggatcaacactgatcgaggggtgatgcttagtgatggcaagactaggttctccattaatggaaaacccatctaccattttggtggcacatccaccttcagtgaatacactgttgtgcatgttggttgtgttgctaaagtcaatcccgccgctcctcttgacaaaatttttgttctcagctgtggaatctctacaggtcttg

SEQ ID NO: 12288 - DNA, 494 bp, Gossypium hirsutum
  Clone ID: LIB3583-010-P1-K1-B2
cccacgcgtccgcccacgcgtccggtttatgtgcaactgtatatgtttatttattttaaaaaaattggaatactttgcgactgtaactagctgcggtggcatgggaggccgggagggcactgacgattgaagaagtggaggtggcaccaccgcaagcaatggaggttcgtctgaagatcctcttcacctctctctgccacactgatgtttacttttgggaagccaagggccaaactccagtctttcctcgtatatttggtcatgaagctgggggggttgttgagagtttgggtgagggtgtgacagaccttaagcccggggaccatgtgcttccggtcttcaccggggaatgcggcgactgtcgtcactgcaagtccgaggaaagcaacatgtgtgacctgctaaggatcaacactgatcgaggggtgatgcttagtgatggcaagactaggttctccattaatggaaaacccatctaccattttgttggcaca

SEQ ID NO: 12289 - DNA, 249 bp, Gossypium hirsutum
  Clone ID: GOSHI-09MAY01-C73976_1
attcaccagcctccaaattgtattttaattttcccttggaatgttcaatgaccataaagcattttaaaatactttgtaatcctcaccaaaagaggatctgtaagtagagtctcgtaagtagtcagtattaagagcccaatatccactcttaacagagtattccccagaaccctcatgtttccaaaccaacctatcctcctgaccactttcagaaatgggtgcagcaagcatacggtccgctgtactctc

SEQ ID NO: 12290 - DNA, 543 bp, Gossypium hirsutum
  Clone ID: LIB3583-010-P1-K1-C11
gtcatttgggaatgggggtccgaaccctcagctttctggtcctgggagtggccagcgtggaggaatcgattcaggggctgaatctgatccactttcgaatgtgggtactgggatggggtttaatgcctcatcgtcatttgtgccatcgaacatggcaaaccctgggtcgtctggtcaagttcaaagtcagcagtattctaacctttctggtaaccatattttaccagatcaacaacagccccaacaaccggagtcacagcagttccaacatggtcaacaagggatgcaacaggtctctgcccctcacaacacccaacaaggacagcagcagcagcagcagcagcagcagcagcaacagtttcaatctattagaggagggatggctggtgttggggctgtcaaattggagccacaactgactaatgatcagcacagccagccacagcagttgcaaacgctgagaaatcttgctcctgtgaaattggaaccacaacaaatcccgccttcaagaactttggcacaggtaaaaatggaacctcaaca

SEQ ID NO: 12291 - DNA, 534 bp, Gossypium hirsutum
  Clone ID: LIB3582-006-P1-K1-D8
cgatccactttcaaatgtgggtactggaatggggtttaatgccccatcgtcatttgtgccatcgaacatggcaaaccctgtgtcgtctggtcaagttcaaggtcagcagtattctaacctttctggtaaccatattttaccagatcaacaacagccccaacaaccggagtcacagcagttccaacatggtcaacaagggatgcaacaggtctctgcccctcacaacacccaacaaggacagctgcagcagcagcaacagtttcaatctattagaggagggatggctggtgttggggctgtcaaattggagccacaactgactaatgatcagcacagccagccacagcagttgcaatcgctgagaaatcttgctcctgtgaaattggaaccacaacaaatcccgccttcaagaactttggcacaggtaaaaatggaacctcaacattcagatcagtcgtttttgcatcagcagcaacaacagcagcagcaacagcagcagcagttgctccaaatgtcacgacagcccccacaaac

SEQ ID NO: 12292 - DNA, 510 bp, Gossypium hirsutum
  Clone ID: GOSHI-09MAY01-C73686_1
cttatatgatcagtctcatctttaaccagatttttaagttgtctgcaacaacatctatcataaattcacacattcgagagatggagaagctagtttcaagctggtgcaaaaacaaacctttgcctgaatcttatatcttcccaccagaaacaagacccggcaatctcgttgttcctacctgcaattccattccagtcatcgatctcagtaaggctgagggtcaaaatcgaacccatactgttcaacagattttgaaggccggccaagagtatggatttttccaggttgttaaccatggagttcctgaaagtctgatgaatgaaagcatggatgtgttcaaggagttctttgagatgccttgggaggacaaagccatgctctattccgaggatcccaaaaatagttgcaggctttccacaagcagtgtaaactatgcccgggaaaagattcaccattggcgtgataatttgcgacacccttgtcatccattacaaagttgcatcaagcatt

SEQ ID NO: 12293 - DNA, 622 bp, Gossypium hirsutum
  Clone ID: GOSHI-09MAY01-C73606_2
ctttgatctttcccttacccgtgtaaactacaaaccctattttttatccctttcccttcccctttccctttgcttttggttttgaaaaaacccaattcttatattcattattctgttcttaattttggttttgatttttctatgttctttcttcaatacattacagaagcatttggtcgtctcgtctactcgtctctccaagtccaaactgttgttggtaacttggtatggagagtggagactggagaatcggagatggctctttggggtttgggctaaggtgagtggccatgcagtgctttaaacatgctttcacagtttcactcgcacccgaaacccctctcttgattttttagactctgcaaattttgaaggacctgcctctgggctctgttcttaaatcctagtctaaagacatgcaagcaagaatgcagatttttattgaattttaattgaactgatcattaaaatcctaattatcccaatgttccctatctcctctagtggaacctgcccttttgttttattgtgtttctgtagattttgtttcagagaagagatgattttttttactgttacggagaataacgggaatagcagcccgttattgccgcaattggtt

SEQ ID NO: 12294 - DNA, 561 bp, Gossypium hirsutum
  Clone ID: GOSHI-09MAY01-C73606_1
cccacgcgtccggtatcctctttactcccttttcacacgcgccgttttcatcggtttaccttggaacccatacgatcccttccccttgccctttccctttcaggctccctttggttttgaaaaaaacccaatttttatattcattattctgttcttaattgcggttctcattttgctatgttctttcttcaatacatcatagaagcatttggtcatctcgtctacttgtctctccaacctattgttggtaactcggtatggagagcggagagtggagaatcggagatggctctttagggcttggcctaaggtgaatcgccatgctttaaacatgctttcacagtttcactcgcacccgaaacccctctcttgcttttttagactctctgcaaattttgagactctctgagttaaaggagcctttgttcctgactggtgaagggccataagaggttgctagttacaaacctacacgaaatttatgggtttaggcatttcatgggagcagccgaagatagtgaaccacccttgaaacgtgtgaaagggcccttgggagaatcc

SEQ ID NO: 12295 - DNA, 573 bp, Gossypium hirsutum
  unsure (1)..(573): unsure at all n locations
  Clone ID: uC-gsflnu33B126b06b1
tccactcgtccgcccacgcgtccgaatttctataagtcctttcccatctgcaaactggaagcagaaaaagggaaaataatcaaatattattagtaaaatcgccaattttgtcacagttctccattctgcagtctctatccatagctttcggtgttaaaggagtctttaatcctgactggtgaagggccataagaggaaatttatgggttcaggcatttcatgggagtagccgaagatagtgaaccacccttgaaacgtgtgaaagggcccttggaagaatccaagagcttgccggaggatcattcaaccacaaaatctgtttcttgctctttgggagatcagatggctaggcctctaacctcccaaggggatggggaaacaattggttcacacggtgttataagaaaagcagaatttattaaaattataactagggcattgtactcgcttggttatgacaaaagtggtgcccttctagaggaggaatncggaataccattgcattctctcgtggctaatctatctcatgggcacgtgaccaatgggaaatgggatgatgtgtggccacattgc

SEQ ID NO: 12296 - DNA, 818 bp, Gossypium hirsutum
  Clone ID: GOSHI-09MAY01-C73156_1
gtagatacgctggtgaagaaagcctatacagttggcagcaaatcatagagtatgagggcaagtcactgttgaacttcaagcaaaataggaggtcaagtgcccgaaatgaacctcagacggatgcgataggctaccctaatgctttagatcatcagttgcagttaccagttgctgttccaactgagcaagtgcactcaggcccacaagctggaggatttaatgataatcagtctaccagatacccgggacaatcagagcttgtgaattcgaattctcgtagtcaatttgacagcacgcaatttttgcaatatgatcagctggttaacaattcagagcaaccacaaagctcaaggactaataataatgctgttgggctggctcttggtcctccacagtcatctaccttgggattccacaatgctatttcttcaatgcagccatcaaatcttaatccctttgacgattggtcgaacaatagagataagggagtcgaggacttgttttctgaggaggagattcgcctcagaagtcatgaaatgctcgagaatgaagatatgcagcatctcctccgcctcttcagcatgggaggtcaccatgctactgtgacagaggatggtgggtttggattcccaaattacatgccatccccaatggtaaacttcaatagacgaagattcgttcacgtcctggcaaagctgttgtcgggtggcttaaagaatcaaggggccgcgatgagatggggggtcttcctcccgtaccggactgtaagctttgcttgaagagacgggcacacggtagtcgagttaagaagacgaaga

SEQ ID NO: 12297 - DNA, 934 bp, Gossypium hirsutum
  Clone ID: GOSHI-09MAY01-C73356_1
attattatcatatatgaagagtttttatttttggggggcttagtcgagattggatcggtagaaaagtcgtttactcaacactcttactgtatcgaaggcaacttgtattacgttatctttcaattccagctcagttcttacgaacaaaaaggttataaaaatgtcaaggcctctgcactaggtgcacctgcaatacgggtcacaagcagcagcaatgatcttttggactcccaagtgaaagaacaaacagaaaaggaagaattggatagaaaccaatcttcccacaggtttcctttttggtcacttttttcagataattctcctcttactaaatacgatgccactgacaatggttttgcatctgatcctttcactgttggaaccccaagaagtcgccataggttaacaatgctacttttgaagtcaagtttagttgtgattgtgattcttgctcttaccggttcattttggtggacactttccatttcaacatcatccagaggtcatatatttcatagttctaggagactccaagagcagcttgtttctgatttgtgggatataggggagctttcttttggtacttcaaggatgaaagaaatagaattttgtcctggagagttggagaactatattccctgctttaatgtttcggagaatcttgattcgggtttttcggatggcaatgagtatgatcgagtatgcagacaaaggtctagacaaaattgtctagttcttccacctatgaactataaaattcctcttaggtggccaactgggagagatatcatttgggttgcaaatgttaaaatcactggtcaagaggtgtttacttcaggcaagttaaccaagaggatgatgatgtttggaggagaacagatttccttccgttcagcatcactcatgtttgatggtgtggaagactattcccatc

SEQ ID NO: 12298 - DNA, 473 bp, Gossypium hirsutum
  Clone ID: GOSHI-09MAY01-C68986_1
acagtatccttagcaaaagggttccactaccaaatggaggttccttggtgattgaacaaacagaggccttagtctcaattgatgtgaatggaggacatgggatgtttggtcatggaacatcacaggaaaaagccactttggatgtcaatcttgctgctgcaaaacaaattgctagggagttacggcttagggatattggtggcattattgtagtggattttattgatatggcagatgactcaaacaagagattagtatatgaagaagttaagaaagcagttgagagagaccgatcaatggtgaaagtctctgaattatcgaaacatgggctcatggaaataacaagaaagagggttcggcctagcgtcacatttatggttagtgaaccatgcacttgttgtcatggtacggggagggttgaagctttggagacctcctttcaaaaattgaacaagaaattggtcgattacttg

SEQ ID NO: 12299 - DNA, 442 bp, Gossypium hirsutum
  Clone ID: GOSHI-09MAY01-C68976_1
tgacgaactaatgtgtgctcttctaccagattccccttctgccacagccagcagaacaaaaagtggtcctatatggatcactaacggggatcctctacaacatcctgttgggtctgcgctttcagctgttctccacagtgattacatgcgtgcatcagacaatgaaatactaaggtgtggtgatgattcattggaaccatctgatctgagacagttcgcacaatcacaggctgattatgtgctgggtgatcaccccatggacataagctacctagtggggtatggtggtaaatacccaccatttgtacatcacagaggtgcttcgaccccagttgatgcaaccactggttgctctgaagggttcaaatggcttagctcaaagaaacctaaccctaatgtagcaattggagcccttgtagggggaccgttcaaaaatgaatta

SEQ ID NO: 12300 - DNA, 552 bp, Gossypium hirsutum
  Clone ID: GOSHI-09MAY01-C68556_1
ctcattttcacattatttcccacaccaaaaatggctcagaaagtggtattgaaagttctaaccatgaccgacgaaaagaccaagcaaaaatccatagaagctgctgcagatatcttcggggttgattcaatcgctgcggatctaaaggatcagaagctgacggtgataggacaaatggatgcagtggcggtggtgaagaaactgaagaaagtggcaaaagtggatataatatcaataggacctgctaaagaagagaagaaggaaggaaaaaaggaagaaaagaaagaggaaaagaaacaggagaagaaagaagagaagaaggaagagaagaaagaggaaaagaaagaagaaaagaaggaagaaaagaaataaatttaaaaaataaaatgaaaaaaccccaaaccatcttaaaggtttctcaacaaatctctgcttgtagtgttacagtgtatgctctgggttttctcttttcttttttggtggaaataaaggttttttttagtgattgtctgaaaaaaatgagaggggcaattagcaatgtgaaaagggttt

SEQ ID NO: 12301 - DNA, 586 bp, Gossypium hirsutum
  Clone ID: GOSHI-09MAY01-C68506_1
ggtagttggaaaaacaagctatgctggcaacttctcaggctatgatgaatttgttcccatggttgataaagctgttgattctagttggaagaaacaaacctccctcttgaggccttctgcttccaaaggtacattagcagctcctgaaactcccaaggcccaggaaggaattcgagcttggattttgctgatgctcatggcttttttcatgacactttatactctcttccactcagtggcactgaatataaccagaaagctacctaactcagtttctggtcattgtcaaaatgttactgaacctaaacctaatgcaactcaaaaggaagaatgtcgcgccccttctccaacagctcttcagactcaggcagatcttctatcttctgttattgagaggttgggtgagcttgaacagaaagttggtacactacaagcgaagccatctaagatgccttatgagaaagaggagttgttgaattctgctgtatgtcgtgttgaaactctaaaagcagagctcattgctgccaagaaagctcttcacaaactttgatgaagcaaaaagagctgtttgcatccctaaacagtc

SEQ ID NO: 12302 - DNA, 1087 bp, Gossypium hirsutum
  Clone ID: GOSHI-09MAY01-C68536_1
cggacgcgtgggcggacgcgtggggaaatcatatgcgtctattgtgaagtttatgaaggagaatggagttcctttatccacccgtacgcattcccttgtgaagtctgcagttaagagccatgaccaaccaggaactgtggcaccacctatttctccggccccagtgtctgatgcacagatatccaacaacagtattacagaaaatgggaccaatcaagatgtggaagctgagggcccctccatttatgtcaaaggtctgcccctgcatgccacacctagcatgctggagaacgagtttaagaagtttggacctattaagaacggtggtattcaagttcgaagtcagaagggattctgttttggttttgtggagtttgaacttgcaagttctgctcaaagtgccatagaggcttcacctataaatattggtgggcgtaatgcaattgttgaagaaaagcggtctacctctcgagggaacaaaggacggtcttctggttcaggggctggatacagaaatgatggagcaagagggggggtctacggtggtggtggtggcaggggctacagccggggtgagtttggaaacaggagcaacaaccgaggagggtattccaaccgcagaggtgatggatatcaaaggggtgacatggggagtaatggcggcagccgcatgaaccgctctggtggacttgctgttaatgcagcagccaagaacatggcaccaagggtacctgcccctgcttgaagacattaatttggaaattggttgggagtgatcaaagataagttttttggtgtgtagtgtagtgatttattgacattgttgcaatatcatttagaagaaagcgttgaaagcttagcagaggaaatttggctgtgagattaatttagggttttcgcttcctcattaagcccattttgtcttttgacaatgtaatactgcaaggttttgggtggtcgtggattgtagatccaattcttgtttgttcaccatacaattttagtgtttttaggcttctggatagggagcattctattttgggaaaatgtacctttatcaaggttttttgccttttgttgtagtctc

SEQ ID NO: 12303 - DNA, 695 bp, Gossypium hirsutum
  Clone ID: GOSHI-09MAY01-C68456_1
tctacaacctcctccatgataccaaacagctatcgaaagcgtcagcgcgtgcctcaccgccacacggccgccacgcgcctctcctccaccgccactgtcgtcaattctttctcagacaaaacggtctccgaatcctcccaaaagctccaccgcacctcctccgccgcatccaccatcaccacctctcccaatgccgttacttcctccttcaatgatccctacaccgctgacgtcttactccgcctcttcgttgatcgttccccattcgattccgacgccccatccgactcttcccgccaatccgacatccagatctatctccactccgccgtcatccgccgcgccaaatatttcgcggcgattttatccgactgttggcaacaccgaacgaacgccgacgccaagagcaacaatggcgccgagggttccaggagcaatgataacaataataacctagttcatttaaaccttgccgttgtcgatgatccgaactctatatccatccatttaaccgtcctccaactgctttacacgagcgatttcgcgaccgtcatcgactcagcttccaccgcactcgagatcctccccgtggctctcgaattactcttcgaggattgcgtgaaatcatgcttgagattcctggaagccgtgccgtggagcgaggaggaggagaagagagtgctgagtttgatccc

SEQ ID NO: 12304 - DNA, 575 bp, Gossypium hirsutum
  Clone ID: GOSHI-09MAY01-C68656_1
attagtttctcttcttctttgtactttttttttggtttctttctttggttttatttttggcccgatctgtctgttgttttaattgatccttctttttcagatttcactttttgtttattgatttaatcaaatttccatatcttactgttactgatgctttactgttacttttgttagttttacttctttcatggatgatttgatctggtcaatctgagatctgaaagtttctaatttatttttattgctgttgttttgcttttacttctttttggttttttgctttcggaaattataaaaaaaaatagattttacttgtttatctgatttggtgttgcattagatatggttatttatccattttttaatcaagtgtgatttgttttagcatcttaagggagctcaagtaagttactaaaagcaataactagaacgggaattgctttttgcttccaaatgagctgatgtggtgatggaagctatagattttctgggtatcattagttttaagtttaaggagatttgttttagtggtttttggcctgttaaacatgattttcatagaattatatttg

SEQ ID NO: 12305 - DNA, 549 bp, Gossypium hirsutum
  Clone ID: GOSHI-09MAY01-C68666_1
tatcttcattgctgatcatcccgttgagcttgaatcccctaagcctgatcaactctcccctgaaacccccgctgatcacattttcaggtctaaattgcctgatattcctatctcaaaccacctccctctccacacttactgctttgaaaatctcccctctctctccgataaaccatgtttgatctccggctcttctgggaaaatctattccttcagcgaaactcatttgattgcgcaaaagacagccgctggtctatccaacttaggcattcaaaagggagatgccatcatgattctcctccacaactgtgccgaattcgtcttcgccttcatgggagcttccatgataggagccgtttctaccaccgccaacccgttttacacctccaaagaaatcttcaagcaattcatagctgctcgagccaaactcatcatcactcaatcccaatacgttgacaagcttaaagacaccaataacaacaacgacggcgtcgaaaacttccccaaaataggtgaagatttcaaggtgatcaccatcgacgacccccc

SEQ ID NO: 12306 - DNA, 862 bp, Gossypium hirsutum
  Clone ID: GOSHI-09MAY01-C68106_1
cccgggtcgaccacgcttcgcacttccaccactagatcacaagaataataatgggttttccatcaattttaagtcggattgccatctccaggaacctgctttcctctaaacccaccaatccttccatcttattgtcctctcgttggttttcgaatctcgttgctaacaacaccgacaaggcggagagcagcctaccggcgacttcggctgcttatcatgtcagctctggtgggtatatgcgagggaccgtcttctgggaacccgatacccccctcactattgaagaatttcatatgcctcgtcctaaagctggagaagttcttattaaaaccaaggcctgcggagtatgccactctgatcttcatgttataaaaggcgaaataccattttctagtccttgtgttatcgggcacgaggtaactggggaaatcgttgaacatgggccacttaccgatcgcaaaatcatcgaaagatttccaattggatctcaagtggtgggagcttttatcatgccttgtggtaactgtttcttctgttctaagggccatgatgatttatgtgaagacttctttgcctataatcgggcgaaggggaccctttatgatggggaaacacggcttttcctccgcaacagtggaaaaccggtatacatgtatagcatgggaggccttgctgaatactgtgtcattccagcactgggtttagctgttttgccacaatcattgccatacactgagtctgcaattttaggatgtgctgtatttactgcttatggtgccatgagacatgcggctgaggtctgccctgggattccattgctgtgattggagtcggagtgtttgttcaagttgtttgcagatag

SEQ ID NO: 12307 - DNA, 828 bp, Gossypium hirsutum
  Clone ID: GOSHI-09MAY01-C68036_1
cacctacactgtttaacgccaagacacaggaaagcaacaccttttcttcagatccttctgaaaatcacgcaatcatgtcacgtggaaaataaccccaaaagatccaaaaacccaatattcctttttcattgttcttcccattttcagtttctcaaatgcaaaaaaatgttaaagactgtaattttcttttttatactaaactggttttaacctttaagctcatcaatggccgcatcttcacttttcgaaatgcaacaccggttctctgaaccagtaaagaattggtctaactccaccggaaaactctctcattggcctttaaaagattcttttgaatactacgccgttttagctcaccgggatcgtctcctacgtggccgtaaactctccggtccttcgacaaccctttcttgcgctgttggcaacttcactttccaaatcaactctttgggatttttacattatacaacagttcaattaggcaccccaggggtgaaattcatggtggcacttgacactggaagtgatcttttctgggttccttgtgattgtaccaaatgtgctccaactgaaggcactgtctatgcttctgatttcgagcttagtatatatgacccgaaaggatcatcgaccagcaagaaggtcacctgcagcagcagcttgtgcgcacaacgtaaccaatgtctcggaacattcagtaattgtccttacatggtatcttacatgtcagctcagacttctacttccgggattctagtggaggatgttcttcacttaacaaccgaagacggtcacccagattctgttgaggcatatgtcacatttggg

SEQ ID NO: 12308 - DNA, 605 bp, Gossypium hirsutum
  Clone ID: GOSHI-09MAY01-C68376_1
gaaatggagagtgagctcaataacttaattaagttatgggtcttaacaacattttcattgtcttattcttatcatatttcagcaaagatatcaaagggcttcccaaggcttgtttcaatcttccctgtcatctttctattgtcaattctcccctttaacattcatggtttccatcttggagcagcccatgtgtttgtcttttcatggatggccaatttcaagcttcttttatttgcctttgatcgaggtcccctttcaccccctcctgcaaaccttattcttttcatcctcgctgcttgttcacccttcaaaatcaaagaaaactcagtcaaggttctgaagggtgaaaccccatttcagggaaatcaaccaagagtagttcccagtttgatcctagaggctgtaaataaagcttcgttgctgacattacttttttattcctataactttaagcaatactttcataaacatgtcctgttgatcctttacttcttccatacttttctttcaattcagtttttgttggctgtggctgcaatcccagctcaaatctgtcttcctggtgtggaactcgaaccacagttcaatgcaccacttcgagccat

SEQ ID NO: 12309 - DNA, 624 bp, Gossypium hirsutum
  Clone ID: GOSHI-09MAY01-C69866_1
ctcaaggaagatgagaacaatcttgaggccttactccttcgaggtcaagcatactactatttagcagatcatgatgttgctcaaaggcattaccagaaaggtctccgccttgatccagagcacagtgaactgaagaaagcatattttgggttgaaaaatttactgaagaagactaaaagtgcggaggataatgtaaacaagggtaagctgcgcctcgcagtcgaggactataaaggtgcacttgcattggatcccgatcatcttgctcataatgtgcatcttcaccttggtttatgtaaggtcttggttaagcttggcagagggaaagatgcttcaagtagttgctccgaggcacttaacattgatggggaactccttgaagctttagtacagaggggtgaggctaaacttttaacagaagattgggaaggtgctgtggatgatctgaaatcagcggctcaaaaatcacctcaggacatgaatatccgtgaagcacttatgagagctgagaaagctttgaagatgagcaaacgtaaagactggtacaagattttaggggtttcaaagacttcttcagttgccgaaataaaacgtgcatacaaaaagcttgctttgcaatggcac

SEQ ID NO: 12310 - DNA, 533 bp, Gossypium hirsutum
  Clone ID: LIB3584-042-P1-K1-A4
ctattgttcattatctgagtgggcctataagagttgtagacaagaatgagacacctgccatgccaggtgatcttcttgcagtggaaatatgtaacctgggtcctttaccgggtgatgaatggggttatacagcaacttttgacagagaaaatggaggagggtttttgacggaccattttccatgtgcaacaaaagctatttggtattttgaaggggtgagatttccggggttgactcatccgggaataattggaacggcaccatcaatggaacttctgaatatatggaatgaaagagaaagagaagtagaagaaaatggccacaagtccctaaaactatgtgaagttttgcattcacgaccattggcaaaccttccttcaaccaaaggctgccatttggggaagataaaaaaggggactgctgaatgggaaaagattgctaaggaggctgcgaggactattccaggaagagaaaatggtggaaattgtgacataaaaaaccttagtagaggttctaaaatatattttcccgtg

SEQ ID NO: 12311 - DNA, 487 bp, Gossypium hirsutum
  Clone ID: LIB3584-048-P1-K2-C2
ctgcaattagtaggccatgatatgcttacttagatgcaattttcaaccagagagtgataatatcataatgtactgtaatgatgacaatgtgtagataaaaaaggggactgctgaatgggaaaagattgctaaggaggctgcgaggactattccaggaagagaaaatggtggaaattgtgacataaaaaaccttagtagaggttctaaaatatatcttcccgtgtttgttgaaggagctaaccttagcactggtgacatgcatttctctcaaggtgatggtgaagtctcattctgtggagcaattgagatgagtggttttcttgagcttaagtgtgaaattataagaggtggaatgaaagagtaccttactccaatggggccaacccctcttcatgtaaatccgatctttgagatcggaccagtggaaccgagattctcggaatggttggtttttgagggaataagcgtggatgagagtggaaggcaa

SEQ ID NO: 12312 - DNA, 922 bp, Gossypium hirsutum
  Clone ID: GOSHI-09MAY01-C69456_1
tcttttgtgtgtgtgtgttattttcacagcaattttctcttattttctttgaatgaaggatctatctgaacttattaaatctctgcaaatgtgaataaactatattctctctctgatccaatcatttttctcatcttttttttggtaaaaatcgtgttataaaagcttctttgattcgctcctttattacttgcataaaaaggacgttgacgcaggttgacgtgaatgtaactaagaaacgtgagcttccggcgggattggatcgggttttttagtgtctcttcgatctctagtgaagcgagagaaatgaaggcgtcagggcttggttgggctgtcctgttggtgctattggggcttgtggttaatggaaaagctgagatttacatagtgactgtagaaggtgagcctattattagctacaaaggtggtgaaaatggctttgaagctaccgctgtagagtcagatgagaagcttgacactactagtgaattggtaacgtcctatgctagtcatcttgaaaagaaaatgatatgctacttggtatgctgtttgagcatgggagttacaagaaactctacagttataaacacctgataaacggcttttcagttcacctttccccccaacaggcagaaactctaaaacgtgctcctggtgtaaagtctgtggagagagactggaaggtgaggaaacttacaacacacactccacaatttctgggcctcccaactggtgtatggcctgcaggaggtggctttgacagggctggagaagacatttgtgatacgatttgtagactcaggaatttatccacatcatccaagctttgcagcccatcacgatgacccatatggacctgttccaaagtacagaggaaaatgcgaaattgaccctgataccaagagggacttctgtaatggca

SEQ ID NO: 12313 - DNA, 580 bp, Gossypium hirsutum
  Clone ID: GOSHI-09MAY01-C69686_1
cacttgtgggattcatggcgggtgcagcagtcattgcggcatcacagcagctaaaggggttgcttggaatagttcatttcactggcaagatgcaatttgttcctgttatgacctctggttttgaccacaaagatgagtggtcctggcaaactattgtaatggggttgggcttcctgttgtctctgttgacaacaagacaaattaccattaaaaaaccgaagcttttctgggtatcagcagctgccccattaacttccgtgattctctcaacgatcttagttttctgcattaaatcaaaagctcatggaatctcatatattgcacacttgccaaagggtctgaatccaccttcgttgaacatgctgtactttaatggccaatatctggctttgactatcaagactggccttatcactgggatcctggccctcactgaacggattgcagtggggaggacatttgcttctctacagaactaccaagttgatggaaacaaagaaatgatggccatcggtctcatgaacatggctggttcttgtacttcatgttatgttacaacaggatccttttctcggtctgt

SEQ ID NO: 12314 - DNA, 435 bp, Gossypium hirsutum
  Clone ID: GOSHI-09MAY01-C69666_2
ccggtaaatcgctcggactgaaagggatgctatgaacacacataggacagtgatgaacaccacaaactagaaacttcacctgtggtgattgaaaaggcggattattgataccgtgcatctttttcatcttgccaggcacgtttttaaaatatatattttaaagggcttttttgaggcaggatcttacgccaagacatttgcagttttgtccggcgttcacagtttggttgtttgctttttgaagaggcttcggggaaaagatgatgttattaatgccggtgtagccggatgctgcactggacttgctctaagtttcccaggtgcacctcaggcacttctacagagctgtcttaactttggggcattctcatttatcattgaagggcttaacaagcaagaaccagcattggcacattcatttctgcgagaaacaag

SEQ ID NO: 12315 - DNA, 854 bp, Gossypium hirsutum
  Clone ID: GOSHI-09MAY01-C69666_1
aaaaagaagataggtacgtcgagaaggggaaaaggaactcatagtagtttttggacaaaaatggctacttcggattctccaaacacttcagctgagtctgatattgaaacaaaccctaatcctaattcttcaaaagccataatcccaacaccatccaattccaattcccctgccgtatgcctcttccaattcgcaggagactccgccgccggtgccttcatgggctccatctttggctacgggtcaggattgattaaaaagaaaggctttaaaggatcctttgtggaggcaggatcttacgccaagacatttgcagttttgtccggcgttcacagtttggttgtttgctttttgaagaggcttcggggaaaagatgatgttattaatgccggtgtagccggatgctgcactggacttgctctaagtttcccaggtgcacctcaggcacttctacagagctgtctcacctttggggcattctcatttatcatcgaagggcttaacaagcagcagccagcattggcacattcattttctgcgagaaacaagagtgcacaccacaagggacctcgtcctttagcactacccctttctatccctattccggatgagctgaaaggagctttttcttcgttctgcaagtccttggtaaaaccaaataaaggtaggtttcctacaggtaactaaggagtaggtgggccatttttcatttttccctgttgtttgtagaattttgcaagtgttgagaatgtagactgaaagttttgtctgagatttgaagctttttacaagcagaaagatgaaattgctttctttcttgtgttgattcaattatattatctgtctggttcagt

SEQ ID NO: 12316 - DNA, 211 bp, Gossypium hirsutum
  Clone ID: uC-gsflnu33B089a11b1
cctgattatcgctcggactgaaagggatgctatgaacacacagaggacagagatggacagcacaaactagaaacttcacctgtggtgattgaaaaggcggagcatagaaaccgtggatctgaggcaactggcaaggaaagagttaagcgcaagactaaacacgaggctggtaagagaaagcataaacggtcccggaggcttatagtcactt

SEQ ID NO: 12317 - DNA, 923 bp, Gossypium hirsutum
  Clone ID: GOSHI-09MAY01-C69156_1
caacaaatggacgttctgggaaggttgaggcatcccaatctggttagcttgaaagcttactattttgccagggaagagaagctgttggtctacgactacatgcccaatggtagcttgttctggctacttcatgggaaccgaggacctgggagaacaccattggactggactacaaggctcaaaatagcagccggagcagctcgtggcttggcttttattcactacacatgcaaggctcttaaactcacccatggtaacatcaaatccacgaatgtcctccttgataaatcaggggatgcacgcgtgtcagacttcgggctcaccatcttcccttcgcccaccaacaatgccccaagatcagacggctgccgtgcaccggaattatcatctgatggtgcggaaacccacccagaaatccgatgtgtactcctttggtgtgttgctacttgagatactgacagggaagtgcccttctgtagtggataatggtggggcagcagtgtatggatatggggggcccctggacttgcccagatgggtacagtcggtggtgagggaagaatggacggcggaggttttcgatttagagctaatgagatacaaggacatcgaggaggaaatggttgggctattgcagatcgcaatggcttgtacttccgcatcacctgatcaacggcctaaaataagccacgtcgtgaagatgattgacgagattcgtggggtagaagtgtcaccgagtcatgatcaagcacttgactcggtatccgactcaccttgcttgtctgaagacacatgcggcggagctgttagccagtgattgttgcaagtttcccatcggttaggtaaaaaagaaaaagaaggcattgaggttgatgtaaaatcaggtttttgccctttgaaacttaatgttagttttgtgctaa

SEQ ID NO: 12318 - DNA, 379 bp, Gossypium hirsutum
  Clone ID: GOSHI-09MAY01-C64996_1
gaagcattttataactgtccaaaacctgtcttttctttttcttttttttttgtcaagttcaaaatgtgtagggttaattcgacaagtatagcatttcttagtgttttgctgttttgtttttcgagctttgaggtgacgtatagtgctagggaaggcaaacagtggaggaagcagagcatagctggtggtttccgccgtctaatggcgaagggaggaagctctgacgtcgtagccgacgccactaccacctttaatgtgttggactacggtgccaaaggtgatggacgcacagatgactccaaggcattcgaagcagcatgggctgatgcttgtaaagttgaggcatcaacagggatggttccatcgggttcaatattcc

SEQ ID NO: 12319 - DNA, 955 bp, Gossypium hirsutum
  Clone ID: GOSHI-09MAY01-C64516_1
gtttgcttttatctccttaacttcagtcttcagcttcgacacagaaacaatggtttattccaaggatcagctgcttgctcgtttaaaggagcttcaaattgatttttcccagtatgaacatcctgttgttttgactgtcgaagctcaggcaaaatatgttgggaatgtgggaggtgcactgagcaaaaatctgttcttgaaggacaagaaacataggtactatgttgtctctgcccttgcagatacgaaagtagatatgaaagttttatctcagaggcttggtttagggaaaggtggtctaagaatggctgcagaagaggcactggttgagatacttaaggttccacttggatgtgttactccatttgccgtggtaaatgaatctgcaagtcatgtctcgctattgttggatcaaggattcaaaactcaagagtgttgcttcttccacccactttccaatgacatgtcaatctctcttaacgccctcggtctggacaagtttcttaaatcgattgggagagacccatcttacgttgacctggaggctaaccctcctgtagggaaagaccaacctcccgatctagctgcttttgttccatcgggtgccccagttctgcctgatcttcccgtgaaagcacctacacaagattctaccggaaaacatgttagtgctgctagtaattctgcagcagttgcagccaaagctgttaagccatctggtgctgtgcaaaatgttaaggagaaatctgtcaatggtgttcgaccatcgattccttccacagatgctgggaagtttgtggaagagcttctggatagaacatctaccttactgctatcagaaatttccgaagattccatcaagcgacatggtggacaattaggagcctgagtagcgaataatattagaaaatgtcttaaaagagatctaaagaatctcgctacaatagtcaagaac

SEQ ID NO: 12320 - DNA, 534 bp, Gossypium hirsutum
  Clone ID: LIB3583-007-P1-K1-D2
tatttatcctaaaaaactgttgtagctgacctttgtgtgtgtatgtgtgcacacatgaagaacgctgggcctatgtgaaaagtaataaataatctatgaatactgcaaaaagtttagcatttaaagatatatctagtgctaatgatcattagtttaaaattctagcatgattcctttacatcttacatgcaggtgctgccccatccactacctttctcttttctctttgttacaatgtatgtttggtaggatataaagatttgcttgcttttcttggctgtgcttttcagagtatttctagctttaattttcagttttgtcatttttttgaagacatgtctcactattgttggatcaaggattcaaagctcaagagtattgctttttccacccactttccaatgacatgtcaatctgtaagttgggaaaaagaatgtacaagatatgctcacatactcctctcttgaattcacagtaacactttattttgtcatgtacaatgcaattagtggtggctttcctatatctggaaca

SEQ ID NO: 12321 - DNA, 577 bp, Gossypium hirsutum
  Clone ID: LIB3828-009-Q1-K6-D3
cttggggagggaggggggtgctagactatggacttctttagttatttgcactgtgaatggatgcaaatattataatccttctagttatatggcgttggctcagcatatttctctgtttgtatcggactgtggctgaatttaatgaatttatatcaattctacaacctactgaaagaaaatgagactgatagcatcaatggggttcataatcataatcatggccttgctttagttatggtggttatgcttttgtaccctcttctttagtgactggtacgtggattgggatcttgcaggagcttcaaatagaattttcccagtatgaacatcccgttgttttgacagttgaagctcaggcaaaatatgttgggaatttgggaggtgcattgagcaaaaatttgttcttgaaggacaagaaacataggtactatgttgtctctgctcttgcagatacaaaagtagatttgaaagttttatctcagaggcttggtttagggaaaggtggtctaagaatggctgcagaagaggcactggttgagatacttaaggttccacttggatgtgttgctccatttgc

SEQ ID NO: 12322 - DNA, 407 bp, Gossypium hirsutum
  Clone ID: LIB3272-006-P1-K1-G6
gcagatctgtagttgctttgcttttatcgttcacttcagcttcgactcaaaggcgtgactcaccaatacattggctttctccaaggaccagctgcttgatcgtttaaaggagctttcaaatagaattttcccagtatgaacatcccgttgttttgacagttgagctcaggcaaaatatgttgggaatttgggaggtgcattgagcaaaaaatttgttcttgaaggacaagaaacataggtactatgttgtctctgctcttgcagatacaaaagtagatttgaaagttttatctcagaggcttggtttagggaaaggtggtctaagaatggctgcagaagaggcactggttgagatacttaaggttccacttggatgtgttactccatttgccgtggtaaatgaatct

SEQ ID NO: 12323 - DNA, 304 bp, Gossypium hirsutum
  Clone ID: uC-gsflnu33B011a12b1
tccacgcgtccgcccacgcgtccggatgatacccgtgcctacttgatccgtaataccatgagcataggagccatcatacggttgacctgaaggctaacccttcggtaggaaatgaccaggctcccgacctagctgcttttgttccatcagatgccccaattgtggcagatcttgctgctcaagcacctacacaagattctaccggaaaacatgttagtgctgctagtaattctgcagcagttgcagccaaagctattaagccatctggtaatgcgcataatgttaagggagaagccagtcaata

SEQ ID NO: 12324 - DNA, 569 bp, Gossypium hirsutum
  Clone ID: GOSHI-09MAY01-C64496_2
ttaaagggtcagggcaaaaaggatttccctttgacacaaaatggtgttgggaaaaaggttttgggtgatattgagatacttcatacagatactctaattaaggaggttgaaaaagttttcagtgcaaaccatcccgatcctgtggagattgagaaagcaaagaaagtgttgaatgaacatgagcaagccctagttgatgcaattgctagactcgaagatgcttccgatggtgaaagtgcttaaaagcagatggggagcatccgtatctctcaaggacaatcaatggatcgaccaaggccatggagaaaactgcagtttgacgataatgatatatgccattttagccatagcatattttatgcattcagcagcagaagctttttttgtaccttgttttatgatactcttatatcagctaggctaaaatgcctttttttcttttggtacataatctttttaggcagaaggttcatcggatttagtctcatttgtaacttgacttttagcttgaaaaatgctttgtataaaatttttttaaatgctagtgaatgataatattctgaccttgt

SEQ ID NO: 12325 - DNA, 1074 bp, Gossypium hirsutum
  Clone ID: GOSHI-09MAY01-C64496_1
attcagtagcttcattatccatgggtgcaccatctcctgcattgcatccatggatgcaaccatcttcatcagcctcaagacgaggtcctatgccaggagcaaatagcaagaagtcaaaatctttgatgcagcatccttccagaggccttcctggaaagccccaggctcctaatcgtacctcaacaggagcagcggccgcccagcgtccggctggagctgcaccatgcgatccattaattggaaggaaagtttggaccaggtggcccgaagacaaccatttctatgaggctgttataacagactataacgcagctgaggggcggcatgctttggtttatgatattaatacggcagatgaaacctgggaatgggtcaatctcaaagagatatctcctgaagacattaaatgggaaggtgaagatcctggaatatcccgtagaggtggtcgcccaggacaaggccatggggttaagaagtccatgtctcgtggtggcggggttgccggagcaggaagaggtagggggagtctaaagggtcaggccaaaaaggattttccttcgaagcaaaatggtgttggaaaaaaggttttgggtgatattgagatacttcatacagatactctaattaaggaggtggaaaaagtgtttggcgctagccatcctgatcccatagagattgagaaagcaaagaaagtgctgaaagaacatgaacaagccctagttgatgcaattgcgaggcttgaagaggcatctgatgatgaaagcgatggagagcatcgattctcacaaggtcaatcaatggatcaagaaagagcatggagaaaacggcaatacgatgagatgggtgaaggtaggatgattgaagggtccgatggcaataaatgactcggccgatgagagatagtcagcaaagcaagaattgggaggggttaacgacttgtgattttagccgcagcttttgtatatccagtagcagtagcaacaacaacagctgtagcagtcgcctccactttcagtgcttgcatcttgttttatccttttgaccttctaccaagctaaggtaaatgacctatct

SEQ ID NO: 12326 - DNA, 559 bp, Gossypium hirsutum
  unsure (1)..(559): unsure at all n locations
  Clone ID: LIB3825-027-Q6-K6-G8
ntgaggaacaanagaacttttcaaggttaatgctgatgacatgatcctgaggataagagaatggagagcagcaggtgggatgcagcctggaatgctcagtacaagtcagcctattcatgatcctgntacctagtccttcagtatcaggaatcacgcaagnaaacagnaaaacatcacaatctgtagcttcattatctatggttgcaccatctcctgcactgcatccatctatgcaaccatcttcatcagccctgagacgaggtcctccctcaggtgcaaagagcaagaagtcaaaatcatcgacgcagtacacttccacaggtcttcctggcagaccccaggcttctaaccgcatgtcttctggggcctttgcaacaaatgaacctgctgaagcagcaccatatgatccattaatcggaaggaaagtttggacaaggtggcctgaagacaaccatttctatgaggctgttattacagactataaccgacttgaggggcggcatgctttggtttatgacattaatacagcagatgaaacttgggaatgggtcaatctcaa

SEQ ID NO: 12327 - DNA, 1644 bp, Gossypium hirsutum
  Clone ID: GOSHI-09MAY01-C64736_1
ctatgttctttgctaatttgcttctacttccttcttcttctctttctcgtgaaccaaacagaaatttcctaaggaaaaaaaattcaaaagctgatgttaatttatgaataaatgttgaggatctgaattttaaaccaagcgagggagtgaaagagagacgagagaaggatttgaggaattgttagatacactagaagagattggagggaagttttttgctggttctgataactaatcgtgaagatttctttttattttgttgaagtttttcagaacctatgcatttggaagatagaagagctacttcggggagaaatttcaactgaattcatctgcaaataagcagatcaattgctgacatattcaaacattagaaccttcataacaatcacaagagagtttcggaggaataggctgcaaatgtcactattttgttgaaaatttgaagtagatttgtgtttatagactagaagcagcaaagttgtaacggctaagcctgagtaattcaggtgtggtggagaaaacgatggagaaggacgcagtaaggatcaataacagtggtattggtaatagcaccaactacagcagagatagaaacggaggcgcaggagacggcggattgttaagatccagctcggatccggccaagcaaacggcgtcgtcttctgatttcgttttgcagtggggaaatcggaagcgtctgaggtgtatgaagatacaagtcaaagacgatcagtccggcccggttaatcgaacaacggttcgagtcgaccgccgagtcgtgagggccgacagagactcttcgaatcaaccaagcaataataatcacgggaatggatattttaacctccgtcaacgacctgcttctcctcaagctccgccatctcagcgcgttctcaggaaccctgcgtccgccagtgctatgagaggccaaaacaacggtggtgtaagggaatttgcttcgccagataggggtgcgcacgataagagagttggtggtaacaaccataacaataacaaccaccaccaccaccatcaccaccatcaccacaacaacaaatctgcggcatcttcggatatgacccatgacagcaaaaaaggaggctcatcttcaggaagcggtgaggcagctccacccatcgtttggccaccaaaatttgtgattgctttaactaataaagagaaagaagaagatttcatggccattaaaggatctaagctgccgcagagacccaaaaaacgagcgaaatttattcaacgtaccctcaacctggtaagtccgggggcatggctatgcgatttaacacttgaacgatacgaggtcagggagaagaagatctcaaagaagggaccaagaggtttgaaggctatgggtaatagtaatatggaatcggactccgaataaaaagcagccttttttgagcttaggtgttgaaaggcagtttgggggtcattttgttaaagatgggagaagaaattgaagtgggtgtaaatgaggcccttaatgagaaaggaataaattaagccaaactttttttcatcttttatttttggtataggatttcaaatttcttctgaatttctcatataattcaatttgttaattaaaagattattagatttggtaaaaaaccccttttggtt

SEQ ID NO: 12328 - DNA, 1002 bp, Gossypium hirsutum
  Clone ID: GOSHI-09MAY01-C64606_1
cccacgctttcgatttagggggattgggagagtgcaaccttctgaaaaaaaaaactcagttcgccctggtgcaatgacagtcttcccatcggctactcattttatgaattttaagatgccgtcctgtatttacatacaaatgctccaatgatgtcttaggtcggccatcgaaaacaatatggggttacagtgacacgacacgttgcgatcaaccttaatgtgggataagattaatttggacaaaacaaagtgggggtctctcttcttatcctcttgtggttgttttgaggtcaacctctttatcaatttaaatatgcctttcttgttccattggagagtgtgagttctacacgttttcaaagggccaaatggaagctgggaaaccccatgctgtctgtattcctctaccagctcaagggcacattaaccctatcttattatttgccaaactcctccacttccatggcttccatatcactttcatccataccgagttcaactactatcgcttgattcagtcgagaggactcgactcgctcaggggctcacccgatttccggttcgaaacgataaccgatggtttgccatcgaccaacatgcgggggatacaagatttacccgacttgtgctcgatgttgctggttcatggttacgttcgtttcgagagctcataatgaaacttatgctagatcaagatgtccctcggttacttgcatatatcgaatggggtgatgagctcacttggaagttgctgaagaattggcatcctgagataggtcttttcatcctaatgctgggcatgtggggtaccttcattttgaaacctaagaacgtgatacttccattgaagataagtgagttgataatggtatctgagacgagatgattgataccacctgaagggtagataaagatatccacttattcacccaacctgtgaatctgtaatacactgcatcgtacatgcaggaagttatctgactacaccttagatgacaaagt

SEQ ID NO: 12329 - DNA, 682 bp, Gossypium hirsutum
  Clone ID: GOSHI-09MAY01-C64396_1
cccactcgttcgcccacgcgtccgcccacgtccccactttctttaagccttcaccagtgtttaggtttaaaatttgcagattttgaactaaaaggattttgattgttccttaaagttttcaccttgtttagatgtaaacaaactgacatgtttttggcaataaaggtccagtctttttagtcccacaaagaagattgctgttctttttaatgttttgttgaagaaaataggaaaaaaaaaaggacaaagaaaaagaaaagagctggctttcggactttggggtgttgatagtttggttgaagaaagtgaaaacactgaagcagaaagctttttactttggggaatttttcccttgttgaatttgggtattgaaagttttcaagttatagtacaaggcttgagatttttgcttttagctctttggccaatgcaaactttatgttcttgtgaaaacgggatagaggtcagaacgatgatggaaaacaaaaggagcccttgctctgttgatcatagcagtttcactcctttggcgtcgaagcgacagaagtccgacttattgatctcgacaaaggataggaaagataaggtcggtgaacgcattgtcactctgcagcagctagtttcgccatacgggaagacagatacagcttctgtcctcctgcaggcaatggagtacatacag

SEQ ID NO: 12330 - DNA, 582 bp, Gossypium hirsutum
  Clone ID: GOSHI-09MAY01-C64356_1
gttctagatcgcgagcggccgctcgcgatctagagtagatcccatccaacctcatggttgacacaaaataattacattccaaagtttttcctttttctttctgaatgttcggcaccgtgaaagtttctgtttcgagcttggcttgatactttacggcgtcgggatcgttcaaaatccaaccttgacgttgtttaaattagggtttcatcgaagcgaatggagctttagttttcccttttgtttctgagaaatttgaagtgaatcaggacgtggattagccagcagtatcagatgtgaagctcctgtatcgcgggaaattttgaagctcagttcttttggaataaattagactcaataagaaaatttaccaaaaacaggaaaatggcaactccagttgagcctcctaacggtattcattaccaaggaaaacattactattcgatgtggcaaacgacgttcgaaatcgacaccaaatatgtgccgatcaagcctattggaagaggggcgtatgggattcgcttgctcttctgtgattcgcgtaaccaatgaaaaagttgccattaaaaagataaacaacgcctt

SEQ ID NO: 12331 - DNA, 464 bp, Gossypium hirsutum
  Clone ID: GOSHI-09MAY01-C65936_1
cgcctgcaccaccgctcctgtaattggccgggatcgacccacgcgttcgcttgcttatcatacatccatccgatcatccgcctcggaggcttctaattccatgggtatttgggggatttttcacgagcattgtctggttgtatatgattgcgaatgagcttgttgctctgttggtagcatttggtgtgatatttggaattaatccttccattcttggagtaactattctggcttggggcaattcaatgggtgatttggtgtcaaatgttgcactggcaatgaatggtggtgatagtgtgcagattgcaatgtctggctgctatgcgggtcctatgttcaacacacttgttggtctgggcatctcattgctgcttggagcttcatcaaagagtccttcctcatacttagttcctcaagatagcaccttggtttacaccatgggctttctcatgtctggactaatc

SEQ ID NO: 12332 - DNA, 542 bp, Gossypium hirsutum
  Clone ID: GOSHI-09MAY01-C65406_1
ctacatattaggagcatggcaacgaagtggtttcggcaaaggggatagcatagctttagagataaccaaacacggcgccgattgtaacatcatcccgtcgttgaacttcgaaacccatcacgccggcgaagtggggaacgtcggtgaatctgaaaagatcaagtcttttcagccctgccctcctcgttacgttgattacacgccttgccaagatcaaaagcgtgccatgactttccccagggacaacatgatctatcgggagaggcattgtccccgggaggaagagaaggtgcattgtcttgtcccggcacctaaaggatacgtgacccgcgtttccttggcctaagagtagggactatgtgccttatgctaatgctccctataaggccttgacggtagagaaggctattcagaactggatccaatatgagggtaatgtattcaggttccctggtggaggaacgcagttcccacaaggtgcggataagtatattgatcagcttgctgctgtgatcccgattacgaacgggacttgtaggact

SEQ ID NO: 12333 - DNA, 416 bp, Gossypium hirsutum
  Clone ID: LIB3272-022-P1-K1-C2
tttctctcttagttttctctcttgtcccatttgagaattcttaaggaattctatttgtttgtaatactttggagatagtaaagttatcatctggtgttagtgcccgaggacgtaggtataatttaccgaacctcgttaaatctcttgtgttctttcttgtcctatttttctttcaatatttgagggtataatagtagtatttaattgtgctattaaattactatagaagggatattctgtctaaggaaagacttggtatttaagagatccatgtgatccacctctcttccctgggaattgaactttgtgtgattttttagtacaataatttacacgcttccgaccctattggaacaacagtcaatacactgtctcgtatggatgaagcattctaagctttcaaaacatcaacaact

SEQ ID NO: 12334 - DNA, 409 bp, Gossypium hirsutum
  Clone ID: LIB3272-051-P1-K1-G7
gttttctctcttctcccatttgagaattcttaaggaattctatttgtttgtaatattttggagatagtaaagttatcatctggtgttagtgcccgaggacgtaggtataatttaccgaacctcgttaaaactcttgtgttcttttttgtcctatttttctttcaatatttgagggtataatagtagtatttaattgtgctattaaattactatagaagggatattctgactaaggaaagacttggtatttaagagatcattgtgatccacctctcttccctgggaattgaactttgtgtgattttttagtacaataatttacacgcttccgaccctattggaacaacaaatgagaccatggtcagtacaatcaacatttgcagatattgagaggaaaattgaaaaggta

SEQ ID NO: 12335 - DNA, 801 bp, Gossypium hirsutum
  Clone ID: GOSHI-09MAY01-C65686_1
ctttgcgaagctatgccctcaccattgctctactccactgctcttatcaactgtcattaaagaactcttattttgtttatcttcttcatcacatttggccaccattttactgctttgtgttcatggagtttcatagattcttattttatgcttcaattattctttcaatttcagtttatttgtttccgataatggcgaattcaatggggatcaactatgggcaaatggcggacaatcttccgtcaccggaagatgtggttccgattgttaaatccatcggagcgaccaaagttaagctctacgacgcagatcccaaagtactcatagctttcgccaacactggcgtcgaattcattgtcggcttaggcaacgaggtctgggacaagatgcgagatccgcccaaagcccaagcttgggtgaaacaaaacgttcaatcccacttaccggcgaccaaaatcacctgcatcttcgtcggaaacgaagtcctcactttcaacgacacttctctttccaacagcctcttgccggcgatgcaaagcgttcacacagcgttggtcaatctcggcctcgacaaacaagtgaccgtcacgacggcacattccttatccatactcgaaacctcatacccaccatcgtccggagcattccgtgaagatctggttgactgtttaagcgaaacgttgagctttcatcaaaaaactggttcaccatttttgatcaatgcgtatcctttcttcgcttataaaggaaatcccaaacaagtccaattggattttgttctttttcaaccgaaccaggggg

SEQ ID NO: 12336 - DNA, 555 bp, Gossypium hirsutum
  Clone ID: GOSHI-09MAY01-C65346_1
tgacagtattgcctctcaatttggaggttggacccataagcatgatgaagtggcaactattcatgcagattgaccaatcattccaaattcatcgtagttatggcagcatggttgaaggcgaggctgatgaacttaagagggtcttcctggaaggaaatccgtacttgctagtgatcacaatggtcgtttctgtgcttcattctgtgtttgacttcttggcttttaagaatgatatccagttttggaacaaaaataagtctatggaaggattgtctgcaaagtctgttgtggtgagctttttgtgtcagcttatagttttcctctatctactcgataatgagacctcatggatgatactggcaagttctggaattggttgttgcatcgagttttggaagatagggaaagcaatgcacatagaggtcgatagaaccggaaagatacctatgttgaggttccgagatcgtgattcatatgcaagcaataaaactaaggaatatgatgatatagcaatgaagtatttgtcctacgtgctcttcctccttgttgcaggct

SEQ ID NO: 12337 - DNA, 737 bp, Gossypium hirsutum
  Clone ID: GOSHI-09MAY01-C65206_1
aaatactgtattttcgccgtggaaatggactgagatttcctctgctgaaacccaaaggaacaaaaatgtattccgatcccaaacctagttttagtttccttatcctcctctttctttgtttacaacctctcatcttctcactatctaccgatgcctcacctccgcctactgtctgcatcgtcggcagcggcatcggcggttcctccgtcgcccacttcctacgccactactttcatccctccccttcccaacccagacctcctaacatcaagatcttcgagcgtagctacgtcgtcggtggtcgcatggccactgtctccattggcggtgaaacttttgaggctggtgcttcaattcttcaccccaagaactaccacgctcttaactactcgaatcttcttgggttgaaggtcaaaccgccgcctgcctcggaggatgatgattcgatgtcgcttgggatctgggatgggaagaaatttgatttcaaaacccttcaagtggattccaagtttccattgttgcagaagattgtttcctatgttaattcttttcgcatctttttccgctatggcttctctcttctaaagatgggcagcttcgttgagagtactgtggatagcttcttgaagtactatgaaagccctgaatgaagaccatctttgaaacagtggatgagatgcttaaatgggctggtttatataatctcacaactcaaactctgcaaatgaactcattgg

SEQ ID NO: 12338 - DNA, 484 bp, Gossypium hirsutum
  Clone ID: GOSHI-09MAY01-C66976_1
gaaataagtgtccattgggtgatcaagatgaagtagagttggacgatgtctggtttgcctatccttcccgtccgaaccatatggtactcaagggaataacacttaaactgcaaccaggatcaaaagttgctcttgttggccctagtggtggaggaaaaagcacgatcgcaaacttgatcgaaagattttatgatccaattaagggaaagattctattgaatggggttcctttgctagaaatatcacatgaacatcttcatagaaagatcagcattgtaagccaggaacctgtccttttcaactgctcaatagagaaaaacatagcttacggatgcgaaggccgagtcaatattaccgatattgaaaacgcagcaaaaatggccaatgcacatgaattcatatcgaagttcccagacaagtatcaaactcatgtcggagagcgcggagtacgactttctggtggacagaagcagagggtagcgat

SEQ ID NO: 12339 - DNA, 368 bp, Gossypium hirsutum
  Clone ID: GOSHI-09MAY01-C66886_1
gcggtgttgatcaagctgagaaggaaatggctggatacgctaagcttatgatcgagacaggggtggttgctggtttagcccttgggtcccgacccatggtggcaaatggtcagaaagtttgtggcatgaacaaagatggtttcatggcatgccagccgagcgtgactgccgggaaccccagccctccgccgccatcggcctcatgttgcatggctttaaacgaagcccacctcacatgcctttgtttcttcaagaattccaagttgatgaatgattatggaatccatttcaatcgagctgaggacctgcccctgcaatgcaatttgaccaaatctttcaattgctagatgtgggattaaaatgaaaaa

SEQ ID NO: 12340 - DNA, 477 bp, Gossypium hirsutum
  Clone ID: uC-gsflnu33B112b09b1
gtgtttttgaagacaatccacagctgagcttcatttatcttcctctcctctaatcaaacggcaagattataatagcaaccaactttggcgcaatggtgattgcttctagattgccagcaaattgttcaggtttgctttatcctagttatcataagctatctgttcagcttaacaggtaccaaagaactagatttgattgttataatcctaatcaacaattttatggaaaggggcttaagatctttgtttgtgtttctggttgagcaacctagtcaactgaaatacatagaatggccgagctttgaagcacgctgaagactgctattttaactcttgttcttgtagccgggctcattgttgcactgtcatcagttgactccatcctctgctatattttagctttgttgcttaggaaaactccatcataattgaactacaccctgaaaagaacaccttagatgtatatatatatgcata

SEQ ID NO: 12341 - DNA, 387 bp, Gossypium hirsutum
  Clone ID: LIB3272-033-P1-K1-H3
acgcgtccgctttgcgactgggtgtttgaagacattccacagctgagcttaattgatctgggtatcctgtaatgaaacggcgagattataatggcaaccaacttttgcgcaatggtgattggttctagattgccagcaaattgttcaaggttgctttatcctaagtatcataagctatctgttcaacttaacaggtaccaaagaactagatttgattgttatgatcctaatcaacaattttatggaaagctttgtacaggaagttctcttaagaagcctgatacgagcaggcatgtcgtgtctgtaggaagtaaccgggatcaattgaggttcgatgatgaattacccgaggaacctttctggcttagtctgggtagagaaaccata

SEQ ID NO: 12342 - DNA, 742 bp, Gossypium hirsutum
  Clone ID: GOSHI-09MAY01-C66576_1
aagaaagatagagagagaaggtcatgcatctctcctgatataggagcctcagccttcaacctttgaacctaccctttctgcttttcttattaatatactcctctatttatgtggtgactcaagggccaaagggttgttgctttaccatggctgttcaagcacctttgtatgctgaaaatatgtgcggtgttcaggattggatggtaaaccctgcacctgctctaattccttcctcgtatttcactcttcaagacccttctcgatatacgcttccttttcatctgcaacaaaacgctcacaatttggctgttgcttcttcttcttcctcttccgcatctgatgcttttggctctgtggctctttcacaatcgttggacgctcaactggagatgcaaagacaggagcttgattgcgttcttcgattgcagaatgagaggctaagatctgctttacgtgagcaaagaaaacgacaatcggccatcctgctaaaatgtatggaatcaaaggccatgcatttgataaggcaaaaggaagaagacttggctcgagcaacaaagaaaacaatggagttcgaagcctcactaagaaaagcggaaatggagagtcattcgtggcaaaaccttgctaaagcaaaggaagcgatgatcatggatctcaacaacacactggaacaagcgagggagagcctagtctgggtcagcaatgcaccagaggatgcagaatcacttttcagagatcaaca

SEQ ID NO: 12343 - DNA, 449 bp, Gossypium hirsutum
  Clone ID: GOSHI-09MAY01-C66696_1
tagatgtttgccccttttcaatctgccgttcactcaccaccaatccaccattgaaatgggtagatggtagctcacaatgaaatcattctatttccctattctaaaccttgccttaataggtcagattttagccttgaaaacctatttcaagcttcgatttcaacgaagaagatacggcttccgatggcttctttgaagggaccaaacgggcccaccggggtgatggcgcccgtggaaccggcgaaggaggcccccgtgggcctgccccggaggtaccaccggtcctggaggctgttgaaagttgctgcggcccaaaggatgatgctggggtcttctagaaattttacatttggggccaatttgtgttaggcgttatttgggctttggtttagttgttgagttgttataaaatggactgtgaacacttattattgaatttttattttgtt

SEQ ID NO: 12344 - DNA, 641 bp, Gossypium hirsutum
  Clone ID: GOSHI-09MAY01-C66176_1
gaaaactccttcatttggttgtttcttgaaggaataatcatttgtggactaataaaacatctgattttgaggtggaaacaataaagttggttgctttttgagttcgtatgaggtgggtttgaatttggatttagtgtttggattgaaggaaaatgataagagtttcaattttcctttcttttttcccttttcaatttaaaattctgggtttggtttcaaatggtcaatttccttagctcaatctcagtctgcaactccgttgtccgggcgtcggtcatggcaaatgccgtgaattcaaatgattttctgatgtactccaaatcatcatcggcaaggaaacaaaaggtgtccaccaattcaccaaggtgcttaaaaattccttcttgtgaaagatcaagatctgctgccattgatgtatttcatcttaattgctgtgattgctgcttgcggattcttgttgctccccactataaactgtatgtccttgcaactcattgaattgatcggagctgccttttatttgtttaaagaagaaatagtgagaactccaatgatctatgcatctataggacttggtttttcttgcgctgccctagctacttggattttgcttctctgtacaaataggaaatgcagggacc

SEQ ID NO: 12345 - DNA, 552 bp, Gossypium hirsutum
  Clone ID: GOSHI-09MAY01-C66396_1
cccacgcgtccgcccacgcgtccggaaaagttcaaggaaatttgttctacagttctgggggaatgacttcgacgactccaacgaacagatcctctgccgatgacatcaccaacaccactcccttcctctcatcaacaaccaccgtgtctcgttccgactccgccacgcgtccatcagtgcgtcgtcagagccttcgtgaagcggctcggttcatgcgccgagccacaagccgaagaacgatgcgcgagccatctatgcttgttcgagagaccgccgccgagcagctggaggaacgccagagcgattgggcttattcgaaacccgtggtgattctcgatgtcatctggaattttgctttcgttgcggtggcagctggggtcttgttcttgagccgtgatgagaaccccgagatgccgttgaggctttggataattgggtatgcttttcagtgtttgttgcatatggtttgggtttgtgtggagtacaagcggcgtaagaggcggcagagcatggagtatagtcgatttaatgcaggggaggattgtgttttga

SEQ ID NO: 12346 - DNA, 440 bp, Gossypium hirsutum
  Clone ID: GOSHI-09MAY01-C66326_1
gtgtatattgagtgggatgctgttgagttgccctcccaattcatggagaattggtgttaccacagggatacattgatgagcattgcaaagcattatgaaacaggagagagtctccctgaagaggtatatttgaagcttcttgctgcaaggactttccgtgctggttctctaagtcttcgtcagcttcgatttgctagtgtggatttggaactgcatacaaaatacatcccagatgggtcagaatctgtttttgatgttgatcagagagtttccaaaaaaacacatgtgatccctccattgccagaagataggtttctctgcgggttcaatcatatatttgctggtgggtatgctgctggatactacagttacaagtgggcagaagttttgtctgcagatgctttctcagcatttgaggatgtaggactggacaacaccta

SEQ ID NO: 12347 - DNA, 747 bp, Gossypium hirsutum
  Clone ID: GOSHI-09MAY01-C66216_1
cttaacatttcctctccacggaaccagctgcagcactaatcgcagacatggaaacagaaggggagcaactctgcgaagctgcacgaaacggcgacggcgcccaagcgaaagctctggtagagtcaggagccgacgtctccttcttcgacagcgatggactcacgccgctcatgcacgccgccaagctcggccataccgatttagtcaaagctctccttgaggctggcgcaccgtggaacgctctttctccttctaaccaatccgctggtgactttgccatggactccggtcaccaggaagcctatgaagcccttctcaatgctggaattcaggctgaattgattttgggaaccattgcaaggaaaacaaaaaagaatggtgattttgaaggggattacttggaagatagggttacttttagcgaggataagttgatggactctgatagcaaggctgtgatgatggcttgggagaaacccttgatggaagctcatgctaaagctgtttgctctggaggtggtaacgttctaaatgttggatttggaatgggtcttgtggatactgctattcaacagtatggtccagccacgcacacaatcattgaggctcatccggaggtctatgcacgcatgcttcgcactggttgggacaagaaggataatgtgaaaataatatttgggcgttggcaagatgttctttcaaaacttgaatcttatgatggtattttcttcgacacctatggagaat

SEQ ID NO: 12348 - DNA, 505 bp, Gossypium hirsutum
  Clone ID: GOSHI-09MAY01-C67996_1
gttttgatgattccggtatgccggaggttcctgctaagtggcgtggtgagtgtgaatcggctcctgattttaatcccaagttttgcaacaggaaactcattggagctcgaagcttttcaaaaggttaccgtatggcatccggcggtggtgggatttacaaaaaaccgggagagatccagtccccgcgtgataaagatggtcacggtacacacactgctagcaccgccgctggatctcacgtggcaaacgctagtctcctcggatacgctagcggaacggctcgtgggatggcgactcacgcccgcgtcgccacctacaaggtttgttgggaaacgggttgtttcggatccgacattctggccggtatggaacgggcaatcgaagacggcgtcgacgtcctctcgttgtcactcggtggcggatcggcgccgtatttccgttccaccaattgccattggggcatttacctgctaatgggtaatggcttttctcgatcttctagttt

SEQ ID NO: 12349 - DNA, 659 bp, Gossypium hirsutum
  Clone ID: GOSHI-09MAY01-C67506_1
gaaaccgattcagttggtgaacgagaatagatggagaaggattctggcagtaatttagaagtgaccggtgagaggaaatccgaggtggacgttgcggatgacctgttcaatgcgtacatgaatttggaaaatctcgagacattgaactcttctggtactgaggacagggatatggatagcaaagcaagtggcacaaagacatatggaggcgaaagtagtgacaatgaagtcgatagtagagtacataaacatccaatcaatatacagggaatgagttctggtgtttcaagtgagaagagggaaggtgtcaagaggagggctgctggagatattgcaccgactgttcggcactacagaagtgtttcaatggacagttacatgggaagtctgcagtttgatgaggatccaccaaaaattcctccttcaggaaatcatggcaatcatcactctcctggtagctcaggcgatgcaaattcaagtaaattcaactttgagcttgggagtagtgagttcaatgaatctgagcttaaaaagatcatggaaaatgagaagctggctgagatggcatctgtagatccaaaacgcgtcaaaagggatttggctaatcgtcaatcagctgctcgttccaagccgcgggagatgcagtacatcgcagaact

SEQ ID NO: 12350 - DNA, 551 bp, Gossypium hirsutum
  Clone ID: GOSHI-09MAY01-C67726_1
ctctctttctatttttcttctctctttttttttaccctatttgatagggttttcatgtccttctagctccaatccatctcatgcattcgtgtcttccagctacatacgttgacgttttagccttctcccttgtcgggtctctcttttttctctctttggagggtttttgggcggctaacggtgcagatttcaccttccggggtttttttgagctgtacccatgtcaaagctcttttcttttagtggaactgatgatttttgccctggggggtcgatctacacaaaccccaaggaatcaagtctctttttgtcccttggacgtcatgtggatgtatattttccctctcgcaagaggtcccgcatcagtgcgccttttgttttctctggagagaggtctgagaagaacaaatcatcaattgaggttctccctgatgaatgcttattcgaaattttgagacgattaccagggggacaagagaggagttcctgcgcttgtgtcttcaggcgttggcttacaattgtaagcaacatccgcagcaatgaaatcagtg

SEQ ID NO: 12351 - DNA, 655 bp, Gossypium hirsutum
  Clone ID: GOSHI-09MAY01-C67676_1
gggaagcaacaaccgttgaaaagatcagttagtgctgggctttacatgagcccggggagcccatctgggtccgatttgagcgattccagcgtccccgttttatcatcttcacacgtgtacaagcccatcccgaggaccggcggagtcagcgttgacgtcaatgttatgccattacctggggtcgaagcggcggcgtcttcttctaacgatccaccgacttcactgagtttgtctttacctggggctgaatcgtatgagttgtcagtttcaaccctcccagttaccgagtctactcagacgaggaacgaagcaaaaaatgatggaaagggaggcgaggtgatggggttcagtgcggagtttatggcggtgatgcaagaaatgataagaatggaggtgagagattacatggttcagatgcaacagcaaaacggtggcgtttcgagaggagagggaatggggatgtgtttggatgcggggtttaggaatgttttgtctatgagtcgagttggggttaataagattgactaaactccatattgtgaaaaaaaaaacccaaaaaaagaatggtcttttattttgttttggttttccccccttaataattgttattaatgtacagagaatgagaaagagatgggtttaaagagaagttgag

SEQ ID NO: 12352 - DNA, 392 bp, Gossypium hirsutum
  Clone ID: GOSHI-09MAY01-C67076_1
tgcactggtgctaaaagtgaacagcagtctaaactggctgcaagggagggtgccggagttattcagaagcttgggtttcctgctaagtttaaggacttcaaaatccagaacattggtgggtcctgtgatggtaaatttcccatcagacttgaaggccttgcatactcccatggtgctttttcaagttatgaaccagaactgtttccaggtctgatttatcgaatgaaacaaccgaagattgggcttcttatttttgtgtcagggaagattgtgatcactggagcgaaggtgagagatgaaacatacacagcctttgagaatatatatccccgcctgacggagttcaggaagaaccaacaatgatataccacccgtgaaatcgactgtgagtc

SEQ ID NO: 12353 - DNA, 1047 bp, Gossypium hirsutum
  Clone ID: GOSHI-09MAY01-C67226_1
ttcttctctccctctcttgttcatttaacatggccaacaacacacagatcctcaacctaatctccatggccttactcctttttgttagcaacagtgaagggtactcagcagctgaagaagaagctgacagaatctcagcacttccaggccaacccaaagtctcttttccacaattctctggctatgttactgttaaccaagtagctggtcgagccctcttttactggctcactgagtctcccaattccccttcctctaagcctcttgtcatctggcttaatggaggtcctggttgctcctcagtggcatatggtgcatcagaagagattgggccattcagaattaacaagtcagcctcagggttgtatctcaacaagttctcttggaacaatgtggctaacctcttgttcttggagactcctgctggtgtaggcttctcttacaccaatcgcagttccgatttgttggataccggcgaccgtcgaactgctatggactctttggaattcttgatcagatggctcgaccggttcccacgatataagaatcgtgaggtatacatcaccggagagagctatgccggccattatgtgcctcagttggctagacagatcatggtttacaacaagaaatccaagcacccaataaatctaaaaggaataatggtgggaaatgcagtgacagacaactattatgataaccttgggacagtgacatactggtggagccatgccatgatttctgataaaacgtatcagcaactcatcaacacatgcgatttccgacggcagatagagtcgaacgaatgcgaatcgttgtattcttatgccatggatcaagaatttggaaacattgatcagtacaacatatatgctcccccttgcaataactcagatggcagccgttttaccaggcataatatgcgattgccttatcgaccacattcgattttcaggcagttatcaggctatgatccatgcactgaaaagtatgctgatatttactacaacaggccagatgtgcagaaggcactccatgccaacacaa

SEQ ID NO: 12354 - DNA, 531 bp, Gossypium hirsutum
  Clone ID: GOSHI-09MAY01-C60836_1
atggctgtgtctgcagcgctcttgtctactgcggctctcggtgcccgctccttttcgtttccggaaacatggcctccggtgtggctgtctctgatggtgtcatcaaggtgttcaacgacatgaaggtgcgtaagtcttcaacgccagaggaggtgaagaagcgcaagaaggcggtgctcttctgcctgagtgaggacaagaagaacatcatcctggaggagggcaaggagatcttggtgggcgatgtgggccagactgtcgacgacccctatgccacctttgtcaagatgctgccagacaaggactgccgctacgccctctatgatgcaacctatgagaccaaggagagcaagaaggaggacctggtgtttatcttctgggcccctgagtgtgcgccccttaagagcaaaatgatctatgccagttccaaggatgccatcaagaagaagctgacaaggatcaaacctgaattggcaggcaaccggttccaggaagtcaaaggaccgttgacccttggagagaaattggggg

SEQ ID NO: 12355 - DNA, 711 bp, Gossypium hirsutum
  Clone ID: GOSHI-09MAY01-C60456_1
caagtcccaacttggacctaaggggcagtctggtatctacgcgcgtaatataagaccaaatgaaatgaccgagatctcgttattcgatccttccttccgacgaagcattgtctaaacaaatcacaagaacacttggcgagatatggcagcgagcagtgcaaccggagcctccccggaggcgcctaagatagtgtggaacgagacccaaaggaggttcgagactgaagacaacaaagcctacatagaatacgtgttaagacatgatggcaaagtgaatggacatcatccacacttttgggtccccttcttcccaagcgaaggcatggatgggctctcatctctgtgttgctgccttccatcatggcaactctcactctttgtctattatcccctcatgctcttatgtctccgacacttttcttctacggaacccgtcttggaacagtctattgtactcagaagacctgagatccaatatctagataccttcatctctttgttgttgtgattatgctgaaagatgatctaccatatgcatcaacatctccctttgatcgtggcgtatactctactttcaaccaaatgataatttggtgtactcttgcaagtaatatatttcgctaacactttgttggtatgcaatagcttttgcatttgatattgacaccgttcgagtttggtaactttagtgaaatctctactgcctatctg

SEQ ID NO: 12356 - DNA, 601 bp, Gossypium hirsutum
  Clone ID: GOSHI-09MAY01-C60416_1
caaaaatcaatggtactcagcttgctgctattctgccacttgctgtggtgcataccttgggcaacctctttacgaatgtgagtctcggaaaagtggctgtttcgttcactcacacgattaaagctatggagccatttttctctgttgtgctttctgcaatgtttctaggagagttgccaactctttgggtagttgcttcccttgtaccaattgttggaggagttgcacttgcatccgtcactgaggcctctttcaattgggctggattctggactgcaatggcttcgaatttgacaaaccagtctcgtaatgttctcagcaaaaaagtcatggttaataaagaggagtcgatggacaacattaccctcttctcaataataacagttatgtctcttatcttgctagcccctgtggctatcttcacggagggtgtcaagtttacccctgcctatttgcaatctgctggcttgaatgttaaagaagttgttgtaagatctctactcgctgctctttgcttccatgcctatcagcaggtttcgatatgatattgcaagggtatcccctgttactcattccgtaggcatctgtgtgaaagggtggg

SEQ ID NO: 12357 - DNA, 391 bp, Gossypium hirsutum
  Clone ID: GOSHI-09MAY01-C60166_1
atgcaaacatggagagaatcatgaaagctcaagccctaagagacaactcaacaatgggttacatggcagcaaagaaacacctggagataaaccctgaccattccattattgagaccttaaggcaaaaggcagaggctgataagaacgacaagtctgtgaaggatctggtcatcttgctttacgaaactgcactcctgtcttctggcttcagtctggaagatccccagacacatgccaacaggatctacaggatgatcaaacttggtctggctatcgatgaagatgatcctactgctgatgataccagtgcagctgtgactgaagaaatgccgcccctcgaaggagatgacgacacatctcgcatggaagaaggagactaacctccggctga

SEQ ID NO: 12358 - DNA, 819 bp, Gossypium hirsutum
  Clone ID: GOSHI-09MAY01-C60246_1
ccccgcgtccgccccgcgtccgcccacgcgtccgtattttcatttcagtgaaggacaagaaaaaaattttaaaaaaaaaaagaaccctctgcagccatggctgagcatcaccagcaattgcgccgaactgatgacatgaagaatttcttccatgaaaatggaccctcaacatcaaaagttcttatggttgccaccctccttcctgttggtggcatcctcctcttgcttgctggtttgagccttattggatccctcataggtcttgctattgccgccccacttttccttattttcagccctgttttggtacctgctgcttttctcattgcgggttccatagccggattcttgacctccggagcatttgggatcactggactgtcatcgctgtcgtggattgctacttatattcgtggaagcaggggctctatgtctcaggggctagacccagtgaagtggcccttgccggacacggcagtgagtatggagcagaagatccagaataggagccaaggaggaggaaggatctctgagggaggcagagaacaggaaggtggcaagagtaagacacaagaaggtggcaagagtaagacacaagaaggtggcaagagtaagacacaagaaggtggaaacaagactgtgggttgaagtttcctattgtagcagtcggctgatatgctagaaagtaatctatcaattttgttgctctgttctgcttctatgcttatgtccttgtgctgctctatgtggttgtatattgtaacttgtaagcagctctctgtattcaaataaattcctggtcatttgcttttcgttttc

SEQ ID NO: 12359 - DNA, 630 bp, Gossypium hirsutum
  Clone ID: GOSHI-09MAY01-C61946_2
cggggatttttccagtccaaattttggtaaagataacaaagtgagtgggaggtaggcaattggtagggattcatatacagggggggtgggcccatgaaggtggtttaataaccaagctattgtaatggatccaatcatagacatgcccacaaccattgccacagttggtaaaatcgagttgtaatttatttaagttgaaatctttgataaatcggataatcgtggcgtggtgttattttgaaaacaattatcattttgaaaacacgtcctaagtctagcccatttattaacaaacggattcttcttttttttgtttttttaatcccagaaaaataattaagatggccttattacaactcaaaaccaaacaataatattaataagataaaacctataaggaaataaatcggctacttattgcaattaaaagaaacagaaacagcagtgcggccatctccgagtccctcgcagctccaaaccatgtaagcttagggattacctgttacgggttgaagttgaaacgtttccaaaatcaatcgcctacgataaccaccacctgattggcgtctggagttcatccaagctccgagcacttttagccgacacccaacccaaacgagcacgccatac

SEQ ID NO: 12360 - DNA, 808 bp, Gossypium hirsutum
  Clone ID: GOSHI-09MAY01-C61946_1
tttagcaattttacagactagggtattttggtaattttactgatagagagtattttggtaattttgtaaaccgatggtattttagtaattttgtaaatcgagggtaaatcagtaattctgtaaatcaagggtaacacaataattctataaattgagggtagaacggtaattctataaatcaagggtaagtcagtgattctataaatcgagggtactttggtaacctcgcgtccggagggtatttcagtaatttggtaaacctaagtattctaagcagggataacaatacgaatgggcctaaagcccattctcggcccaaatgggcccacacgctcgtgtggccctttcagcccagatctagccacagatatgagattcacctagcctagtccaatatttactacacaatcaaacaacttatccaattgggcccctaggcccattgggcccacatggcccctttcggcctatcgcggcccgaagtagccatcctacagctagagtagtgagaaatacacacctgataggagactagagttaatccacgctccgagcactcttagccgacgcccaacccaaacgagcacgccatacagcgaaagggatcagccaagaaaggtacctctactctcctcatgttctctctatttaaagccagcttcgcatcccctcttatgttagcttcctgatgtgggatccctccatcatcagagtttaaattcaacaccaactcttgccgccccctgttagcaaaataaatgctccttgcttgccatgggattcgaacccatgcctcccctcagatgct

SEQ ID NO: 12361 - DNA, 441 bp, Gossypium hirsutum
  Clone ID: uC-gsronu33B050g07b1
tccacgcgtccgttcgctgtatggcgtgctcgtttgggttgggcgtcgtctaagagtgctcggagtgtggattaactccagtctcctatcaggtggtggttatcgtaggcgattgattttggaaacgtttcaacttcaacccgtaacaggaattaatatttagatctattttctacgcacgtttaagttggattcacaacggatatggggtaggaaggtatttggaacgttcttcaatgagtagatctcttgtgaggattaaaggctaccgatcgaggagtgtgtgaaaagcttggatcatcggagtgaataaatctagtcatcaacttcggcaaaggtgtgaacccaagggccattgtggatggtggccgaatgtgagaaatcgcataggagatctcgtcaaggaatatcgcaaatcaggtgagccttgatgtggggact

SEQ ID NO: 12362 - DNA, 377 bp, Gossypium hirsutum
  Clone ID: LIB3196-034-P1-M1-F4
attgccacccgtgcacccagtccgctcagccagcccagtccgtccagtcctcaccgcctgccggcctgcccaccccccaccgcagccatggacgccatcaagaagaagatgcagatgctgaagctggacaaggagaacgccatcgaccgcgccgagcaggccgaagccgacaagaaacaagctgaggaccgctgcaagcagctggaggaggagcagcaggccctccagaagaagctgaaggggacagaggatgaggtggaaaagtattctgaatccgtgaaggaggcccaggagaaactggagcaggccgagaagaaggccactgatgctgaggcagatgtggcctctctgaaccgccgcattcagctggttgagga

SEQ ID NO: 12363 - DNA, 336 bp, Gossypium hirsutum
  Clone ID: LIB3196-034-P1-M1-F10
attttcacccgggcgcacagtccgctcagccagcccagtccgtccagtccttaccgcctgtcggcctgtccaccccccaccgcagtcatggacgcccttataagaagatcagatttttactttcaagggggaaagcctttttcgcgccgagcaggccgaagccgacaagaaacaagctgaggaccgctgcaagcagctggaggaggagcagcaggccctccagaagaagctgaaggggacagaggatgaggtggaaaagtattctgaatccgtgaaggaggcccaggagaaactggagcaggccgagaagaaggccactgatgctgaggcagatgt

SEQ ID NO: 12364 - DNA, 487 bp, Gossypium hirsutum
  Clone ID: GOSHI-09MAY01-C61926_1
gtaaaaaatgagtaggaaggaaatggcgtggtggttgaggttggcagtgttgatgatggttggaagccattgggcatgggggcagtgcgagacgagtatccccaagctcatatcccaatgcgggcaatacgtagaaggatcagggccggaaacgactccatccaaggcttgctgtgatgtgataacaagtctggatattccatgcatgtgcaagtacgtgacaccagatgttgagaagcttgtgaacatggaaaaagttgtgtttgttgctaaatcctgtggattgacacttcaacccggaatgaaatgcggaagcttcgtggttccgccatctgtttgaggagaagagctgctgagatgatgatgatgatttcagaatctgagaatctgagagatgtcaactttatgtattaaataattattaataagatttgtggttattttccatttcttactatacccttctactctgcttggactctctctc

SEQ ID NO: 12365 - DNA, 554 bp, Gossypium hirsutum
  Clone ID: GOSHI-09MAY01-C61466_1
ttagtaatttcaactcggtaagtgttctgcagtatctgttatgcaaatttcatcctttttatatgttttaatgcactaagtatcttaatagttttccttaccatcaaacataatctacactacccattttcataatttatcatgatcaagcatgccctcagccgttccacagccataccataagatcatttacacaaaataggtatattgctatacatgccatacttaaatttacaagccatttaccaaaagtcttccggatagtgtgactgagccttcgacctatcccgactcctgagctggcttgtccaaaactacaatgagtaagaaggagggagtaagcataaatgcttagtaagttcatatgcaaataataagtaacataacaaacagttataccaatcaacattagcatacatcactaaaacacatatcacatttctgatcatctttcatcatcttattaccttatagtggttgtatcaatactcaacccgagggttaaatacatacctgtccaaaataaccatttcacatcactcaccaatacaaac

SEQ ID NO: 12366 - DNA, 388 bp, Gossypium hirsutum
  Clone ID: uC-gsronu33B110d07b1
tgtagtcaaacaactaagaaataaaagtgttgcacttgtgaaagtgttgtggctaaagcatggggtagaagagactacatgggaacctgaagaaactatgagaaaccaatacccacacctgtttaccgttttggacaagccagctcaggagtcgggatacgtcgaaggctcagtcacactatccggaagacttttggtaaatggcttgtaaatttaagtatggcatgtatagcaatatacctattttgtgtaaatgatcttatggtatggttgtggaatggttgaggaaatgcttgataatgataaattatgaaaatggttagtgtccaaaaaaaataaaaattaaaaaaaaataaaaaattttaattctctttttctttttttcttt

SEQ ID NO: 12367 - DNA, 613 bp, Gossypium hirsutum
  Clone ID: GOSHI-09MAY01-C61186_2
aggcaggaggcttaatggaggagaatgcatacccctacactggggaacgcaaagaatgcaagttcaaccctgagaaagtagctgttgaagttgtgaatttcactaacatccccatcgatgaaaatcaaatcgccgcaaatttagtccttcgtggccctttagccgttgggttgaatgctatcttcatgcaaacctacataggaggggtgtcatgcccaataatatgtgggaagaggtggatcaaccatggagtattactagtgggttatggggcaaaagggttttcaattctaagacttgggaatcaaccctattggatcataaagaactcatggggcaaacggtggggagaacatggctattatcgcctttgtcgaggtcattccatgtgtggaatcaacacaatggtctcagcggtggcaacccaagtctactgaaattatcgttttcattttgtttagtataggaattttcaattatatttcctagtgataaaaagtaacatttctaaattaaattaatcaacatatatgtattttctattgaagaactgattatgaagaaagtgacatatatgtaaattgatcaatatgatattaaagaaatgattatg

SEQ ID NO: 12368 - DNA, 1792 bp, Gossypium hirsutum
  Clone ID: GOSHI-09MAY01-C61186_1
ggtgctaacacgcccgcgtgcggaaaccctaaaaacaacaaaaatggaaccaggagggcaaagcttagctctaaccaccaccaccatagccattcaaatcttaaccttcagcctaatcttttcgttcagcttcgctctcctcaaaaccccacaagaaccaaccatacaccaagtcactgaaaattcagatatcccaactctgaagaccaaattctcgagaaaccacgtccacaaacagttccgagttttcatggaaacgtacggaaaaaactattcgaccagggaggagtacatgcaccgcctcaggatctttgcgaagaacttggtgagggctgctgagcaccagctgcttgatcctatggctgtgcatggtgtgactcagttctctgatctatctgaggaggagtttgagagtctttacactggtttcaagggccccaatgtggcggcaccattattgagggatggtgttggtggtgaagcagaggcgttggaggttgatgggttgcctgagagctttgattggagagagaaaggagctgtaacagaggttaagatgcagggtacttgtggatcatgttgggcatttagcaccacaggagctattgaaggagccaactttattgcaacagggaagcttctaaatctaagtgaacaacagcttgtagattgtgatcacatggtagttaatttcatcctctatatatggtctctctcaattattgttcatattgcatgctccggtttttaatcattgtccacaaagcttttgttaacctttctttgatctgcttcctttcgatgccatttcgtgaagtgcgatataaaggataagaatgcgtgcgacaacggttgcggtggaggcctaatgacgaatgcctacaagtatttgatcgaggcaggaggcttaatggaggagaatgcatacccctacactggggaacgcaacgaatgcaagttcaacccagagaaagtagctgttgaagttgtgaatttcactaacatccccatcgatgaaaatcaaatcgccgcaaatttagtacttcgtggccctttagccggtgagttaacttcctccaaaaatcaatggaagtaatatgctataattatacatgatgttagatgaagttcttttctaatataggtatgaaacaggagttcatatagcataggttgcatatatcttatgtatattccgagtttcgacacccttgttcggtttatatccttttttagaagattcttaaaggatctcttcttatacataactaacacactcgtacgtatatttgtatttgatactcgtgtttgatattttgtacattacagttgggttgaatgctatcttcatgcaaacctacataggaggggtgtcatgcccaataatatgtgggaagaggtggataaaccatggagtattactagtgggttatggggcaaaagggttttcaattctaagacttgggaatcaaccctattggatcataaagaactcatggggcaaacggtggggagaacatggctattatcgcctttgtcgaggtcattccatgtgtggaatcaacacaatggtctcagcggtggcaacccaagtctactgaaattatcgttttcattttgtttagtataggaattttcaattatatttcctagtgataaaaagtaacatttctaaattaaattaatcaacatatatgtattttctacttgaagaactgattatgaagaaagtgacatatatgtaaattgatcaatatgatattaaagaaatgattatgaaaatggtttacct

SEQ ID NO: 12369 - DNA, 535 bp, Gossypium hirsutum
  Clone ID: GOSHI-09MAY01-C61156_1
ctttgttccttcatccttctgatacatcgggaacggttcttgtttctcatcgtttgaccggtgttgaaaatgacactgtctggagtcgctcgcttcggattgctttgctcgcgaagaacaagctcggattcattgatggtgtttgccttcgttcggtttatcccgaatctctccgtgctcaatgggatcggtgtaatgcttttgtgctttcctggattctcaacactgtcagtccagatttgtcggcgggactcgtctttgcttctgatgctgctgctgtttggaaagatctcaaggatcgttttagcaaagtggacggttcttgtattttctttctccataggtctattgcgcatctcactcaaggtgatgcttctgttttttcttatttcacacagttaaagttgctttgggatgaatacactgctcttgtttctttttccgactgtgcatgtgaggttgcccagcaaaattcgaatcatcttcttcagcagcgattattccagtttctgatgggtctcaatgagacctatgc

SEQ ID NO: 12370 - DNA, 611 bp, Gossypium hirsutum
  Clone ID: GOSHI-09MAY01-C61146_1
aaaaaagacttcttttttttctttttcattgtacaacgaccaattttaaaaaccataggatttgatttttttttattcatgaaaactatctataaaattaattatatagaatagtttcgactttctcacctgataatgagagaacgaaatccggataaataccaatacctattactggtagaaagatagagatcgaaacaaataactctcgtggtccagaatcaaaaaaataagaacttggagcattaaatagcttgtatccatagaacatttgacgtgacatagataatgaataaataggagttaatatcattcccattgccctttacgaaagtaattagtatttttggcattaaaaaatatttttggctggtaattattccaaaaaagactatcaattctgcaacaaaaccactcatgcccggtaatgcaagagaagccatggataagatactgaacatcgtaaatattttgggaatcgaaacggccattccgcccatttcgtcgagataaacaagacgcattctatcataactcgttcctgccaagaaaaaaagtgcagcaccgataaagccatgagatattatttgtaaaatagctccgtgagtccc

SEQ ID NO: 12371 - DNA, 526 bp, Gossypium hirsutum
  Clone ID: GOSHI-09MAY01-C61316_1
atggatttgatggcgtgatgtctcacagaaagttctcggctcccagacatgggtcgctcggcttcctgcctcggaagcgcagcagcaggcatcgcgggaaggttaagagcttccctaaagatgatccgtctaagccggtccacctcacagccttcctgggatacaaggctggcatgacccacatcgtgcgggaagtcgacaggccaggatctaaggtgaacaagaaggaggtggtggaggctgtaaccattgtggagacgccacccatggtggttgtgggcattgtgggctacgtggaaacccctcgaggcctccggaccttcaagactgtcttcgctgagcacatcagtgatgaatgcaagaggcgtttctataagaactggcgtgggtcgaggccctgcgccccctccaagtactgcaagaaatggcaggatgaggatggcaagaagcagctggagaaggacttcagcagcatgaagaagtactgccaagtcatccgtgtcattgcccacacccagatgcgcct

SEQ ID NO: 12372 - DNA, 588 bp, Gossypium hirsutum
  Clone ID: GOSHI-09MAY01-C61326_1
attttaaggaagagaactgcagaatggttaagaaggatgcatgcattattgagagcacaagcacgtgctcgtgctggccgggcccaaatttccgagtcttcccaatcaagctgcaaatcgtctcacttccatcatccggatccagcaacccctgaaaaatttgaacatgttattcgatccaagggtacaaaatatgaacaatcatcaatgttgaagagaaatggatcgaagtcaagtggaaggactgttgataatcaagagaaattacactcaggttggtatcgccgtgttgatgagcaaacatgggtgcattcaacaagaattggtcctaatgatgatgaaaagaatgacaaaatccttgaagttgacactgggaaaccaaatttcatctctaaacggagaaacctctttcattcaacacatctttctctgaattctgatttatatagctgtagtttcactaattcgagagactcacaccaaacagctcctagtccttcatctggtgaagttcagtctttaactccattgatgctgtctcactctgaagcaatacaggaaagccctttctgcgatgctgttgatgat

SEQ ID NO: 12373 - DNA, 583 bp, Gossypium hirsutum
  Clone ID: GOSHI-09MAY01-C61286_1
atcctcaaatggatggcttgctaaaactttgtttcttccctttctgctgcaactgttggtgttactgccaattgagacggcagaagctaatgtaaaaccaaatgggtgctacagaatgagactactgatggagcgtcgccatggctcaggaatgcagcaaatccgaggccaagacctggtgggtgcatgttcaggccgtggatatgtgaacagggagaacatccgccaacagctcggatgcgttgttgtaggaaccgatgtgttgaccttaactctgatgatgctcactgtggcttatgtgcgcttagatgtccatttacttggcaatgctgcaggggggtttgtattaatacgaatattagtcctctgaattgtggtcgctgtggaaaccgatgcccatttagggttccatgctcgtttgggatgtgtggatatgcacagcctcgtccattccctcctcgcccaccaagaccattccctcctcacccgccgcgaccgatccctcctcatccaccacgaccattccctcctcctcatcctcatcgccctcagccaacaccatgccctcctacgcagccaggga

SEQ ID NO: 12374 - DNA, 361 bp, Gossypium hirsutum
  unsure (1)..(361): unsure at all n locations
  Clone ID: LIB3196-025-P1-M1-D6
gcaatcctcaaatggagtggcttgctaaaactttgtttcttccctttctgctgcaactgttggtgttactgccaattgagacggcagaagctaatgtaaaaccaaaatgggtgctacagaatgagactactgatggagcgtcgccatggctcaagaatgcagcaaattcgaggccaagacctcgggggtgcatgttcaagccgcggatatgtgaacacagagaacattcccaacacctctcatacgcttttgtatgagcccatatgtgtacacctacactctgaagacgctcactggggcttatgcgcgcttagatgtccatttacttggcaatgctgcaggggggtntgtattaatacca

SEQ ID NO: 12375 - DNA, 383 bp, Gossypium hirsutum
  Clone ID: GOSHI-09MAY01-C62976_1
cccacgcgtccgcttaaacccttcctttcattccttctacctcctcttcattattatctttcctttaagctttggcaattaatttctttgctttcaaagagatgtgtggtggtgctatcatttctgaattcatcacccggaaaggcgcccatggcgtcactgcttctgacatctggcccaattcccctttcgtcaaaaatggctttagctctgactcaactcaatccttccatgatgactcactcgccctctgtaaaaggaaccgaccccaatcctcagatggggtgcatgtggagaagaaagtgaaaaggcagagaaaaaacctatacaggggcatacgccagcgtccatggggcaaatgggcggcggagatccgtgacccg

SEQ ID NO: 12376 - DNA, 867 bp, Gossypium hirsutum
  Clone ID: GOSHI-09MAY01-C62806_1
aagcattcattaatggccgctctctgcaactgaaaacttgaacaattctcttttaaaggtctggtctcagctcaaacactttgagtgggaagtaaaaggatgttgacagctgattcgggttctgtgttaaggttagtggagatagaaggaagaggaagggctctcgttgcatcgcaaccattgaaggcggggcaaatcgttctccaggattctcctatcgttgtttactccgcttttccgttggttaaacctcaatcttcggcatcttattgtgataattgctttaggatactctcctcatcggcaaatgtagtgccgtgtccattatgttctcatcatctcttttgcggtccaaattgcctaaccgcggcaacagcttcctctcattcaccttgggtctgccaggcttttagtcgtcttcgggattgcccttctctttttttctcaacctctcgaacagcaagtgcaagctcggtttcttatagctgcatataatctacccttgtttccccttcggatttccaggttttgctttctcttcaaggtcaatattccccttccgatgctcctgctgccgaattcctacattccctcattttgtcggtctgtcctccgccttcgttaccgatccctatcgaactcacagctgctttattggcaaaagataagctcaatgcttttggcttgatggaacctttctctctacaacaagacggagagaggtccgtccgtgcttaccggatctatcccaaagcatctttcttcaaccatgattggcttccaaatgcttgcagattcgattacctcgactcagcttcgggccagaacaccgacatgattgttaggatgattcatgatgtccctgta

SEQ ID NO: 12377 - DNA, 417 bp, Gossypium hirsutum
  Clone ID: GOSHI-09MAY01-C62486_1
cggacgcgtgggttggaaatttttcttcttctatcattcttttacatttcatttgcattcagatccgattcttaaacgcatgcccatttaaacccctctttgatttcatcctcattccgatacaaaaacccaagggcttgctctggtttttaggcctctcaattcttcgtatagtcgatctaagtcatagagggagcttaagtgggatttgatgtgccaggcaaggtggaagcaagttcattggaggtttcaagggaacataacacttggagcgtttgtgatagatttgcctacattgcaggatgcagagagtggagcagaagtcagtccttttttattcaattgatccaatatttgcttcagaagattgggtgacgatcctcgtgaggttggaaaatggattttgagactgatgca

SEQ ID NO: 12378 - DNA, 417 bp, Gossypium hirsutum
  Clone ID: GOSHI-09MAY01-C62416_1
atgcagcagcggctgatcaatgacctgactgcgcagagggggcgcctgcagactgaatctggtgaattttcacgccagctcgatgaaaaggatgctctggtgtctcagttatcaaggggcaaacaagcctttactcaacagattgaagaactaaagaggcaacttgaagaggagataaaagccaagaacgccctggcgcatgccctgcagtcttcccgccacgactgtgacctgctgcgggaacagtatgaggaggagcaggaatccaaggctgagctgcagagggcgctgtccaaggccaacaccgaagttgcccagtggaggaccaaatatgagacggacgccatccagcgcacagaggagctggaggaggcaaagaagaagctggcccagcggctccaggctgctgaggaacat

SEQ ID NO: 12379 - DNA, 434 bp, Gossypium hirsutum
  Clone ID: uC-gsronu33B099e02b1
caaaatcctattctctcttgattttccctcaaccgatcctaacatccctctcttaagcaccgatttgcctctatcaatgttgacgaacagattcgggcttcgagagacgataatcttagccgtgaaattccttctcaactctaatttcaaccaaacagatgggatccccagtatttccgtaaggaggagccagctggaggtggtggcgcacatggggcgtacagaggggacgaagaaaaccgtgcgtaggagctgcggcgtggggaagcctagggttccagaagtttcaatttgtccgggccatttaggtcgctttaagattgggcctttttttaaaataagtttaaagtttgggcttcaatttgtatgtgggttaaatgtaaatttggtattatgcccaaagcttggctttttgtaatgttggactttggacc

SEQ ID NO: 12380 - DNA, 265 bp, Gossypium hirsutum
  Clone ID: LIB3196-042-P1-M1-F11
tcaaaaccctagcctgtgttgattttccctcaaccgatcctaacatccctctcttaagcaccgatttgcctctatcaatgttgacgaacagattcgggcttcgagagacgataatcttagccgtgaaattccttctcaactctaatttcaaccaaacagatgggatccccagtatttccgtaagtttgttaatcggttgcaggaggagccagctggaggtggtggcgcacatggggcgtacagaggggacgaagaaaccgtgcgt

SEQ ID NO: 12381 - DNA, 362 bp, Gossypium hirsutum
  Clone ID: GOSHI-09MAY01-C62266_1
acgtgcaccatcatatctcatttaattcggctctcttgttcacatagtgaacacttagtaccactcatgcgacctagccgatttgtctcgtacctctcttgactacatggtgtccttcactcggaatcacgcatgcgacctaactacattgatctctcacgtagctctcttgtctacatgggatacatccagtctcacacatgtgacctagctactacatagtatctcgtagctttcttgtacacatgatgtgcactcagcaccatacatgtgacctagctatgctccctctattttattcgatctttccgaatgttcaaccaggatctctctctctattacttacttcgattcttccgata

SEQ ID NO: 12382 - DNA, 558 bp, Gossypium hirsutum
  Clone ID: GOSHI-09MAY01-C63716_1
gtaccttttcacatcaacgtgtaaatccgaagctaaaactgagctccaaaatcgcatgggaggtttagctttctgttttttttcctgggaaatccatttggacttcaattgagctttcaattacccgttgaactctaactatcgctacagcgtcctttcatggcttctcttgtttcaatttttgttctgctttttacctgttcgttctccaatttctcagccgaaagccggaaggagttgaaggacaaggaggatattcatttgagacatttggttcaatccaatgtaattgacccttcacgagtgatgcaactttcatggcggccaagggtctttcaatatagtggctttctaatggacgaggagtgcgacctccttatttctttgggccatggagcaaaagaaggaattttggggatcaatgatgatcgagctattcttgagacacgcaggcagcttgcaagttcagaaactttgctgaatacaaatgataaagttcttgcaatgattgaggaaagaatttcagcttggactttccttcctaaagagaatagtaat

SEQ ID NO: 12383 - DNA, 1037 bp, Gossypium hirsutum
  Clone ID: GOSHI-09MAY01-C63736_1
tttttgttctcgccggaaaaaaggggtgtggttttctccggctaagaaaaccatactacgttgaatcaacaatcaactgttcatcttcttccgatcaaaagcctgtaaatttgagctttggaatcaacgaaacaaggaaccaaacaaagaagagacaagctaaggaacatcatgggagagagatcatgtttggattcatgttgttgggtgaccggttacctctgcaccacttggtggttgcttttgtttttgtaccactgttgcttgccgttcacggtgggtcatgaggtgccagaactaatgccggcggcgaggcttaaacgtgaagggttgaaggggattcacccggtggttttagtaccggggattgtcacaggtgggcttgagttgtgggaaggtaagccttgtgctgatggtttgtttcgtaaacgactttggggtgggggtggctttactcaattactgaggaggccattgtgttggttagagcacttgtctttgcacaatgaaacaggcctcgacccacccggaatacgggttcgtccagttccaggactgtttggggcggactattcagctccgggatactttgtgtgggacgttctcgttaaaaatttggcaaaaatcggctacgaggggaagaatttgcatatggctgcttatgattggagactctctttccagaatacagaggttcgggaccgtgctcttagtaggctaaagaggtaaaattgagttaatgtatcgagccaacggcaataaaaaagtggtagttgtgcctcattccatgggagttgcctattttcttcacttccttaaatgggtcgaaacgccacctccgatgggaggcggtggtggccccggttggtgcgctgaacatatcaaggcaattgtgaacatcggcccgtcatttcttggtgttccaaaggctgttagcaatatactctctgccgagggcaaagacgttgcttatttcagagcaatggcaccgggagttttggattcgggtactttagggcttcgagcattagagcatg

SEQ ID NO: 12384 - DNA, 424 bp, Gossypium hirsutum
  Clone ID: GOSHI-09MAY01-C63006_1
atcagatttgggtggggaattaatgctaatagttaaattaaaagtagattgtttccatttctctgtaggatgttgttgataaatgcttttgtataatcacctatttccttggaaacacctatttactaaaagagacaaagtaaaaatatatttatactttatgaattgttttcagtgactaatttctttgtaaaacttaaatatttttaagtttgtaggtttaaactgttaacttaccggtgtatttaggcaatttaatttgggttatgtatctagatgtagaaaaacttactgcattttgcccagtatctaatttacactaatacatttatgctgaaacctgtaccgtaaaacatttttaaataggtatattgagatcttcacacgtagcaggagggaaatcaaaggtattttattatccacc

SEQ ID NO: 12385 - DNA, 942 bp, Gossypium hirsutum
  Clone ID: GOSHI-09MAY01-C18976_1
gagggggggggcggtcgatatctagctagtgcctccggctgcctgaatgttgcccactcattccaaaaccccttcaacaatggcgattacgaagcaacatttgatcccgcttttcgctatctcatttctcttgttttcccagctccattgctcaacaacttcagcccaggctcccgctcagtctcccgcaccacctggtccaccagacgtcaccaaaatcctgcaaaaagccggccaatactccgtcttcgttcgtcttctcaaatccacccaagtctccgaccgtctcattggcgagctcaaagacacagatgatgggaagaccatttttgcccccactgataaggctttctccgccctcaaatctggtgccttgaattcactcaacgatgaacaaagggttcagctggtgctatttcacgtcatcccaagttatatcccattttcccaattccaaacagttagcaaccctatgagaacacaagccggagatagcggcgacggtgagtttcctctcaacgtcccctcttcgggaaacacagtggttctaaagacagggctgacgaaaaccagtgttagtgataccatttataccgatggtcagctggctgtttatcgagtcgatcaggtgcttcaacctttgcaagtcttcgctgctaggtcttcagctctggcaccggcaccgggaatgtctaggaaggctgctgacgttgatgggaaatccaaagcttcgagccttgccatgcaaaacttagctttgtttgtagttagtgttatagcttttgcactttctttgtgacaataaaagggttttgataggatttcgtgatggaaaattcggggacctcttattgcccatgggtctcttctctccatgggctattgaagatgtgatttgggcgtgcaaggtttcttggttcttttggggaatcataattctta

SEQ ID NO: 12386 - DNA, 516 bp, Gossypium hirsutum
  Clone ID: GOSHI-09MAY01-C18966_2
cggaaaaaaaactctctgaaatggcgatgaaaattttcagcgttttcttctttgctctcctcttcctcgcatctcctttccttcaagttgctaggtgtcaatcagaagcagaggcagatgttgcagaagctgttgaaggaggtgatctcggtattgttggggaggatgttcaggattttggtgatcctaattacagttcagctcctgaagttaaaactgtttgcgttttccccaaaaatagtgccaaattggttctggctggagaacagactgagctcctcgttgggatggaaaatattggggagtcacctgtgaatgtcattgctatcaaagccagtgttcatcttccttttgatcatcgtatgcttgttcaaaatcttacagcagtggctttcaacaatgctactgtacccccttcagttcaagctactttcccttacgtatttgcttgtagcaagttcttacagcctggaactttgatcttgtgggttcgattatctatgatattgatcagca

SEQ ID NO: 12387 - DNA, 1138 bp, Gossypium hirsutum
  Clone ID: GOSHI-09MAY01-C18966_1
tctgtaaaccacggccctctataatactcttacacacatagaatctcacttttttgttttctggacttctttgacgaaaataggaactcttagaaatggcgatgaaaagcttcagcgttttcttcttcgttctactcctcctcgcttctcctattctccaagttgctaggtgtcaatctgaagcggaggcggatgttgcagaagctgttgaaggaggtgaactcgggattgttggtgaggaagctcaggatttcggttctgggaattttgactcggctccaggagttgaaactctctgtcttttccctaaaaacagtgccaaattggtatcagccggagaagagactgaactccttgttggggtggaaaatgttggtgagtcacctgtgaatgtcattgcaatcacagccagtgttcatctcccttttgatcatcgtatgcttgttcaaaatctatcagcacaggcctttaacaatgcatccgtacccccttcaaagcaagctactttcccttacatatttgcggttagcaagtacttgcagcctggaacttttgatcttgtgggcaacattttctatgagattgaccagcacccataccaaagtacattctataatggtaccattgaagttgttgaagctggtggcttcctcagtgtcgagtctgttttccttgttaccctcgggattgcactgcttgttctcttcggtttatggcttcacggtcaatttcagcgtatctccaagaaaactaagagagctccaaaggtggaagtcggaaccaggactactgatacctcattggacgagtggcttcagggaactgcttacactcagtcagcttccaaatcgaagaaaaagaagtagatggggcagtgcttgcaggctaattgcaaactcatttcttggcattttggaaagttttaagtgagggcacaaatagtttgagaattaggcccagggaaaatggcatacctttgctattgtagcatgtgaaagatttaaaaaaaaaaaaaaccttcagatttaattttcacgaggattccgaaattgagcctttttgaagcaaaactaacttgtgtattagaagtggtaggaacctgggaattttgctaatggtcaatttctggttttggtcc

SEQ ID NO: 12388 - DNA, 357 bp, Gossypium hirsutum
  Clone ID: LIB3196-013-P1-M1-D11
atagaatctcacttttttgttttctggacttctttgacgaaaataggaactcttagaaatggcgatgaaaagcttcagcgttttcttcttcgttctactcctcctcgcttctcctattctccaagaagctgttgaagaaggtgaacttgggattgttggtgaggaagctcaggatttcggttctgggaattttgactcggctccaggagttgaaactctctgtcttttccctaaaaacagtgccaaatttatatcagccggagaagagactgaactccttgttggggtggaaaatgttggtgagtcacctgtgaatgtcattgcaatcacagccagtgttcatcttccttttgatca

SEQ ID NO: 12389 - DNA, 990 bp, Gossypium hirsutum
  Clone ID: GOSHI-09MAY01-C18856_1
ggggattctggtaaaggaggggaccctactctatgggcagatcttctgaagtattttggtgaacttggggaagattgctctaaagaagtgaaagaagtattgacatatattgagagggatgacatcttgcctcccattattgttctccagacactttccaggaacccatgtctcacattatctgttattaaggattacattgcccgaaaacttgaacaagagtcaaagctgattgaagaggacagacgagctatagagaagtatcaggaagacacaatggcaatgagaaaagaaattcaggaccttaggacaaacgccaggatatttcagctgagcaagtgcactgcttgcacttttacccttgacctacctgctgtgcacttcatgtgtatgcactcatttcatcagcgttgccttggtgataatgaaaaggaatgccctgagtgtgctccagagtacagatctgtaatggaaatgaaaagaagcttggaacagaattcaaaagatcaagatcaattcttccaacaagtcaagagctcaaaggatggattttccgtgattgctgaatattttggaaagggggtcggtcgcgtggcgagtaatggttccacaggaactgctagatcagacagcgtctcttccagcagtggcttctgattttcttgattgttgtaatttgtaagtgttcttccttaagcatgtctcttcttttccattgaagtgcaaggtcaatattgtgcagaatcacaaagactagaggtaaaataatctatgtgggatcatggctttgtttggggcactagcccatgtgaccgattgctccttttccaaattggactggttcagataatgagactgcattgtcggtcctgtagagagtaaattataagaaggatacaacctccgtgatatttcaaaatggaatactcatttgttgtttccactcagaaggtacaacatcacatctatacgcatttcacgattgtagca

SEQ ID NO: 12390 - DNA, 423 bp, Gossypium hirsutum
  Clone ID: GOSHI-09MAY01-C18596_1
atttcttcaatggcttctctttcaggcttatgttcttcttttccatcggtgaagcctaataacagaatcggcggtgaactcagtccggttcgcaaagactcactcgcagtgtcgactcgttctaactcgagctttaaacactctgttgctcgtgaagtatctgctgatttgtcgaaaacgaatgatgtcgcgggtttgaagcaggctaagcaaggtggactcgagaaagatcctaaagcgctttggaggagatacgttgattggttgtaccagcataaggagctcgggttgtacctcgatgtgagtaggatcgggttctcggatgagttcgtttccgaaatggagccccggtttcaagccgcgtttaaggctatggaggaactggaaagaggcgccatcgccaatcctgatgaaggacggatg

SEQ ID NO: 12391 - DNA, 864 bp, Gossypium hirsutum
  Clone ID: GOSHI-09MAY01-C18516_1
ctcctcagtactttgaaagaaaattttgtgccacaagttcttatccagaagatatttactcaaacattttcgtacatcaatgtacaattgtttaatagcctcctcctacgccgtgagtgttgtacgtttagcaacggagaatatgtcaaggctgggttagccgagttagagctctggtgctgccaagcgaaagaagagttcgctgggtcgtcgtgggatgaacttaagcacattaggcaggctgttggtttcttggttatacatcagaagtacagaatttcatatgatgacattgcaaatgatctctgccctattcttagtgtccagcagttgtacagaatatgtaccctgtactgggacgacaactacaatactcgaagtgttgctccaaatgttatttccagcatgagggtactaatgacagaggattccaatgatgctgctagcagttcctttttattggacgacaattccagcatccccttctctgtcgatgacctttccaattcgcttcaagagaaagacttcttggaagtcaaaccaccagaggaacttcttgagaatccacccttccaatttttacccgagtaaggcctagggagcttagatgcatgcttcccgtcgttatcgagtcaaggtcaccaatgtggacttagatacccttgccgattcattggttgttgtaaattcaattcatttcccccccttcatatatatatatatgatatatatatatttgcatacatcgatccccgattgtgatatgtttctattggtttattattttttgccaattcaaattgtaaaagctgacgttgagtctgggcacgtatttgtttgattgatctgggccctttttatttt

SEQ ID NO: 12392 - DNA, 482 bp, Gossypium hirsutum
  Clone ID: GOSHI-09MAY01-C18496_1
ggtgaccaaggaaaagttaacttgccaatagtacctgtgaagccacctgctcctgttacacatcggaaagcattatcaaattctcatcaggcccagcagattatttctttaaatccgttacctctcaagaaacatggttgtgatcgagccccgatacaggtttgctcagaggaggagtttctgagagatgtaatgcagtttctgatttttcgaggacatactcggcttgttcctcaaggggggttagctgagtttcctgatgccattctgaatgcgaagcgtcttgacctttttaacttgtatagagaggtggtgtcaagaggaggctttaatgtcgggaatggcataaattggaaaggacaagtattttcgaagatgcgcaatcacacattgacgaatagaatgactggagtgggccacactctgaaaagacattacgagacttaccttttagagtatgaattggctcacgaccatttgga

SEQ ID NO: 12393 - DNA, 414 bp, Gossypium hirsutum
  unsure (1)..(414): unsure at all n locations
  Clone ID: LIB3135-029-Q1-K1-C12
gttttccactctatgcttttgtctaatgttgcttgttgtttgttcctagggagtgggcaacactctgaaaagacattatgagacttaccttttagagtatgaattggctcatgatgatgtcgatggggaatgctgtttgttgtgtcacagtagtgcagcaggtgactgggtaaactgtggagtttgtgatgagtgggcacactttggctgtgataggcggcagggtcttggagcctttaaggattatgcaaaaacagatgggctggagtacgtttgtccacactgtagcatctcaaatttcaagaagaaaccccacanaactgtgaatggttattgacaaacctttgactcactttagattccattctacacaacttagaaatatctctcttttagtttcacttttcaatcttt

SEQ ID NO: 12394 - DNA, 863 bp, Gossypium hirsutum
  Clone ID: GOSHI-09MAY01-C18446_1
acagactttaagcagtaccaagttttgaagcagaacccagggtggtggactcaccaaaggcatgatggcaaattgtggaacttgaacaactatcgaactgatgttatccaagctcttggaggtgttgagggaattctagaacataccttgtttaaaggaacatactttccaacttgggagggtctgttttgggaaaaggcttctggcttcgaggagtcaatgaagtataagaagctcactaatgctcagagatctggtcttaaccagattcctaaccgtaggtttactctttggtggtcacctacaatcaatcgggctaatgtttacgtgggttttcaagtgcaactagatctaactggaattttcatgcatgggaagattccaaccttgaaaatatctttgattcagattttccgtgcccatctgtggcaaaaaattcatgagagtgtggttatggatctttgccaagtcttagatcaggagttggatgctttagaaattgaaactgttcagaaggagacaatccatccaaggaagagttacaagatgaacagctcttgtgcggatattcttctctttgcagctcataggtggcctatgtcaaagcctagtcttgtggcagagtccaaggacatgtttgatcaaaaagcaagcaataaatattggatagatgtacagctccggtggggtgattatgactcgcatgatattgagcgttacactcgagccaaatttatggactatacaacagataacatgtctatttatccatctcccactggggtaatgattggccttgatctggcttacaacttgcattctgcatttggtaattggttccctggttcaaagccactgctcgc

SEQ ID NO: 12395 - DNA, 656 bp, Gossypium hirsutum
  Clone ID: GOSHI-09MAY01-C18436_1
ggaaaaacccaaagaaagtaaagcaattgcagacggagtttgtgaaatttgtatcttgtggggcacattgcacagctgctattgcagaacctcgtgaaaatgatgggactatctcaaaaaggagactctggatttggggacaaaatcagggatcaaatttacctcgtttattttggggtgcattcactcctaacatggtatcgtcttgaattcctgatgtcttcaccccaagagacgttgctgttattgttttgttgctctttgtttttgaacctttctttaattcttcaaggtcctgtttatgaagtttgaggcttttatttatttaaaatttacgtttcctgtcacggactaggaaaaggaaacttcatgctaatcacttttagacattttggttctctgggaccagtttttattcagaaccaaatgcgaggttcctgctatctccttcataaatgagtgaactgaagatagctttgcttcaataagtcgtgacctaacttttaggatactttgcagtatcatttgcttctaatattatctgtgttcttttatctatattgacatgttatctagctggcagagaaaatagcggacctttccagtcgattttcaagcctggccagttgtccttgaatctgtctattacccaacca

SEQ ID NO: 12396 - DNA, 870 bp, Gossypium hirsutum
  Clone ID: GOSHI-09MAY01-C18116_1
tccacgcgtccgcccacgcgtccgaaaaagcacaggccacatagaacaatgcacaaagcttcaaaggttggcttgcacgcttagcactcacagcatttcacggtttacaccatttttctctttcagatttgctttaattttaccttcactttagacccataaaagaagaaaaggaaaacaggacggagacatcgaaagaacccatcgttggtgctgcagaaatctcaaaagggcatggcctcaaccgagagttccagatcttcaactgctggctctcccgattcatacataggcagcttgataagcttgacgtccaagtctgaaatcagatatgaaggtgttctgtttaatatcaacactgaagaatccagcatcggcttgagaaatgtaaggtcatttggaacggaagggcggaaaaaagatggtccacaagtgccagcaagtgataaaatttatgaatatatactgttccgtggaagtgacatcaaggacttgcaggttaaatcttcaccaccaccagttcagactccggcacctatacacaatgatcctgctattatacagtctcactatccccaatcagcaattgcatccaccagcttgccttcttctggttcaggatctatgcaagatatgggttcccaaacttcatctataggactgacaaggccaccatttcaaggcaatcttccattatatcaacctggtggaaatttaggtccatggggttcaccagctgctccaaccacaaatagtgggctctccataccgatgtactggcagggttactatgggtccgcaaatggtcttcctccacagcagcaacctttgctccaacccccacctggcttgtcaatgccatcttccatg

SEQ ID NO: 12397 - DNA, 931 bp, Gossypium hirsutum
  Clone ID: GOSHI-09MAY01-C18136_1
gtccactgcaagctcggctctcgattcccccaaaatccagctcttcctttcgtgaatcaaagattctcaaagatgactcaagatgtggagatgaaagagcaaccagctccgtccaattccgttccttcctcttctcctttcactttgcaccatttgaaggaaattgcgtctctgattgagaccggtgcttatgaccgtgaagctcgccgtattttgagggctatacgacttacaatggctttaagacggaagttgaaggcatccgtgctttcctctttcctcagtttcgctcttacccctggatccgaggccttcactcgtctttcttcttatcttcctaagggagatgagaatgagatggaagtcgacactgcaacctccacagctcaacctcctgctaagcattccttgccagagctagaaatctactgctatttgcttgtcctgatatttctgattgatcaaaagaaatatgatgcccccgcggccggttcctctgcaagcatttctcggctgaagaatttgaacaggaggactctcgatgttctagctgctaggctgtacttctattactctctttgctatgagctcacgggtgctcttgctgaaattaggggtaaccttctagccctgcaccggattgcaacattgcgccatgacgagctgggtcaggagactcttctcaacctgctacttcgcaattacctccattacaatttgtatgaccaagctgagaaactgagatcaaaggcacctagatttgaagctcactcaaaccagcagttttgctcgctacctctcttacttggggaagattaggacaatccaatttggagtacactgatgccaaagagtgtcttcttacaagctgctcggaaagcccctattgcagtctctggttttcgggttcaatgcaacaaatgggcaatca

SEQ ID NO: 12398 - DNA, 443 bp, Gossypium hirsutum
  Clone ID: LIB3197-054-Q1-M1-B6
cccacgcgtccggtccactgcaagctcggctctcgattcccccaaaatccagctcttcctttcgtgaatcaaagattctcaaagatgactcaagatgtggagatgaaagagcaaccagctccgtccaattccgttccttcctcttctccatccactttgcaccatttgaaggaaattgcgtctctgattgagaccggtgcttatgaccgagaagctcgccgtattttgagggctatacgacttacaatggctttaagacggaagttgaaggcatccgtgctttcctctttccttagtttcgctcttacccctggatccgaggccttcactcgtctttcttcttatcttcctaaggtaatcttttgatggaacatcgtaatattcaattattaatgtggaagtgttttcccccttgggtgaagtgattgccattccatcctctt

SEQ ID NO: 12399 - DNA, 802 bp, Gossypium hirsutum
  Clone ID: GOSHI-09MAY01-C18086_1
cccacgcgtccgcggacgcgtgggccgtcgcgggggctcaacaatcacttttctctctctaaatcttgtacggtttacgaagcgaggaagtaaccggcggcagagatcagtggcggagctgagctgagtcgtcagtggaagagatagttcaggcaatgggaagtttgcgtggcatttcgattgccatttttgtagttcaagctctgttagcttcagtagctttggtttcagctcaaggatctgctactccttctcgttggcagactttaagcggggaagcacccgttgtcatagctcgtggtggattttcaggaatattttcagactccagttttggagcttatagtttggctttagtaacgggtccttctgatgtgatcttgtggtgtgatgtgcaattaacaaaagatggagccgggatttgctttcctgatcttaagctagataacaattctaacattgcaactgttttcagtgataagccggtgacttaccttgttaatggggtctctaccaagggacttttttccattgattatactctcaacgatttatgaagtgtatatttatatcaatgaatttatactgtgaatatataatttgatgtggataatttcccaattattaacgtttaatattcctatcttaattgaactctataaatttggtttataatttaattttgtttattattcattcaaaatatttcataggagttagatatttacaatttaaattatattttatgtttaatattattaatatgtggtatttatatgcttatatgtctatgttttgatat

SEQ ID NO: 12400 - DNA, 445 bp, Gossypium hirsutum
  Clone ID: LIB3197-052-Q1-M1-F5
atctgctactccttctcgttggcagactttaagcggggaagcacccgttgtcatagctcgtggtggattttcaggaatattttcagactccagttttggagcttatagtttggctttagtaacgggtccttctgatgtgatcttgtggtgtgatgtgcaattaacaaaagatggagccgggatttgctttcctgatcttaagctagataataattctaacattgcaactgtttttacagataagccgaagacttaccttgttaatggggtctctaccaagggacttttttccattgattatactctcaacgatcttggaagtgtttatttaagtcaaggtatctactctcggacgaataagtttgatggaaataattacccaattatgaccgttcaggatacctatactcaactgaaaccgcttggattttggtgaatattcaac

SEQ ID NO: 12401 - DNA, 1255 bp, Gossypium hirsutum
  Clone ID: GOSHI-09MAY01-C18076_1
gtttatgatatacaagagaagtccctttggttcaaagacaagcttccatgcttctctgagttttgtttttttctttattatcggaagtgaatagcggttcatcatctccgatggagaaatcaaccaccttcctcattagaagatctatctacactttccttcaatactatcactacttcactgcaactgctgcaatccttgctttgccatactccctttcggttcttgtttcgcagttctttgtcccctcttctcctctgttaccatcaatccacaatcaccttaaagccattttcatggcggccgagtttcctccctcctcggacttcttcagggttctcagtttcaagatttcccagaccatttcttcatcaatctttgctcttcctttcaccctttctttcttcctcgtagccaaagcttccatcattcacctcctcaaccaccaccatactccaacctccccaccttcattatcttcggttttatctctttacaagcctctcttatccactttcatatgcaatttcttcgtgcttttatctgcaaattcaacagctttctgccttttgttctttgggttccatttgtttaatgggtttggattctcatcgtctcccaattggctcatcttcatgtcagctgctggtgctgttctttattccgtaattattgccaatgcacttataatttgtaacttagctttggtttcttcagggatggagaaatcaggtgggtattcagcaattttaagagcttgtgttttaataaagggaagggcttcaactgctttagcattggcagtgccttggaatctggcgttggcagccattgaagctctcttccattaccgcgttgtgagagcctatcatagtggtgatttcaacagtttctcaattgctttagaagtggtcttaattgcttacttatactccaatgtcgttgttcttgatactgttgtgagttccatgctcttcaaaagctgcaaaacaggttgtttgatggatgaggaaagaagggattgttacaggattgaaattgtagcagagaaagatggaaatgcttatgtgaagttgacgaatattgaacaacttccatagaaaaaaaaaaaacagccatcaaattgtatggtcttgaatttctgcatatgtaaattcatttcatactgtaattccaagattcattttctgagaaaaccaggcgatttctgagggataagtgatcaaaacatatgggatatagttcaagaatcaag

SEQ ID NO: 12402 - DNA, 412 bp, Gossypium hirsutum
  unsure (1)..(412): unsure at all n locations
  Clone ID: LIB3083-072-Q1-L1-A7
caagagaagtccctttggaacacaacacaagctgacatgcttttatgaaatacggttcttttcttattctaatatcttaaatcagccgtgaaggaatggcgggcatcatctccgatggtgaaatcaaccaccttcctgattagaagatctatctacacttttcttcaatactatcactacttcactgcaactgatgcaatccttgctttgacatactccctttcacatcttgcttcgcagatctttgtcccctcttctcctctgttaccatcaatccacaatcatctcanagccattttcatggcggccgagtttcctccctcctcggacttcttcacggttctcagtttcaagaatttccacaccatgtcttcatcaatctgtgctcttcctttcaccctttctttcttcc

SEQ ID NO: 12403 - DNA, 425 bp, Gossypium hirsutum
  Clone ID: GOSHI-09MAY01-C18006_2
ctgggacataaacccagaagttcgtcctcccttcactgacattgtgaagatgcttgagattgctgaaacggatatactgacaaccgtgcgtaaagcccggttcaggtgttgcatgactcaaccaatgacaattgactgatccagaatggaagagtggagaacagacgacaataaacggaaagatgcaagggaagcagtaagaaattaaatataattcatgtatgtatcagtattttacatttatttatttttcaccctttacgtaatattttccagatagaaggtaactactgggttcagaatgctggattttggtgtgaacttgtacttggactagtggtgatggtagttgtagaagtaaggggaccattgatgtggtttccttatgtatctatatttatatatgtgggactgccatatctctt

SEQ ID NO: 12404 - DNA, 1306 bp, Gossypium hirsutum
  Clone ID: GOSHI-09MAY01-C18006_1
gaaaacagtagtgtgggctctaatgattctctgacccacattttaagccaccctggtttaaaacctgtgaaacgtagcaattactctgtctctgtggggcagagtgtgtttcgtcctggtaaggttggccatgcacttaatgatgatgcattagcacaagcattgatggatcgcaggtatcagactgaggtattacagaattatgatgagtgggctattgatttaagaaagcttaatatgggtacagcttttgctcaaggtgcttttgggaagttatacagaggtacatataatggtgaggatgttgcgattaagatattggaaaggccagaaaatagccctgagaaggcacaagttatggaacagcagtttcagcaggaacttatgatgcttgcaacactaaagcatcctaatattgtgcgatttattggggcttgtcgtaagccaatggtttggtgtattgtcacggagtatgctaagggaggctcagttcgacagtttctaacaaggaggcagaaccgtgctgtgccattgaagttggccgtcaagcaggcattggatgttgctagagggatggcctatgtgcatggacttgggtttattcaccgggatttgaagtcagataaccttctgattgctgctgatagatcaataaagattgcagattttggagtcgcacgtattgaggtgcagactgagggcatgactccagagactgggacgtaccgttggatggcgccagagatgatacaacataggccctacacacaaaaagtagacgtgtatagttttggaattgtcctttgggagctcataactggcatgcttcctttccagaacatgactgcagtgcaggcggcatttgctgtggtgaacaagggtgtaagaccggtcattccaaatgattgtctccctgtgctaagtgagatcatgatccgttgctgggacactaacccagaagttcgtcctcccttcactgagattgtaaagatgcttgagaatgcggaaactgagatactgacaactgttcgggaaggctcggtttaggtgttgcatgactcaaccaatgacaatcgactgatcctgaatggaatagcgaagaacagaaaggaaagaggatataatgaaaatgaaaagagcaagcagcagtaagaatttaaatataagttgatgtatgtatcagtatttctcttttggatttgcttttccccttttttattttctgagataggagaaggtaacaattaaaactgctggtgtttggatttggtgtgaactgtacttggactattggtggtcgtacttc

SEQ ID NO: 12405 - DNA, 315 bp, Gossypium hirsutum
  Clone ID: uC-gsronu33B061c12b1
cttggattgtggtggggtatggacagcttggtgatgagtgggctattgattgaagaaagcttaatatgggtacaggttttgctcaaggtgcttttgggaagctatacagaggtacatataatggcgaggatgttgtgattaatatattgcaaaggccaaaaacaaaacatgtgaaggctcaagttaaggaataagcccttcagtaggaacttattaagattgcatgtctaatgcatactaccattgtgcgatttaatggtgttgggtgtaatgacctggttgcatttatgttcatgtgaatgaatgaaattattt

SEQ ID NO: 12406 - DNA, 673 bp, Gossypium hirsutum
  Clone ID: GOSHI-09MAY01-C18246_1
gaaaccttcgccgcttcttctttctctcttttattgttgtccgttgacaccgcaaatagaagagaagagtaatggccggcaaaggagaaggtccagcgattgggattgatctcggaacaacttattcttgcgttggcgtttggcaacatgatcgtgttgagatcatcgccaacgatcaaggtaacaggaccacgccgtcttatgttggctttactgataccgagcgtttgatcggtgacgcggcaaagaaccaggtcgccatgaaccccttgaacaccgtatttgatgcaaagaggttgattggtcgtagattcagcgatgccgctgttcagagtgatattaaattgtggccattcaaggtcataccaggatctggtgataaaccgatgattgtagtttcttacaaaggtgaggagaagcaatttgccgctgaggagatctcgtctatggtcctcataaagatgcgtgagattgccgaggcttaccttggctttacggttaagaatgccgtggttactgtccctgcatactttaatgactctcagcgtcaggctacaaaggatgctggtgtcattgctggtcttaatgtcatgcgtattattaatgagcccactgctgctgccattgcttacggtcttgacaaaaaggctaccagcgttggtgaaaagaatgt

SEQ ID NO: 12407 - DNA, 429 bp, Gossypium hirsutum
  Clone ID: GOSHI-09MAY01-C19976_1
cagcattgaaggcaaattcgtacctacaaagaaacgtggtgggctagccgtacaggcaactgaactaaaatgtgggggtatagtggtggcatgcgcatgtgatcatcgagtagctgatgcgtacacagccaacatgtttcttgtgtcatgggcggagatagctcagtcgaaaccggcttcgatggtgccaagctttcgtcgatcgctgttgaatccgagacgaccagggcgtgctgacccgtcgctggacgagatgtatgtgccaataccctcattgccacctccagaagaaaaccatgaacctactgatcatctcataagtcgcatttattacgttagtagtgaccaaatcattgagcttcagtcacttgcctcttccgatggggacaaaaggtccaagctcgagtcattcagtgcgtttttgtggaa

SEQ ID NO: 12408 - DNA, 621 bp, Gossypium hirsutum
  Clone ID: GOSHI-09MAY01-C19846_1
gcaatttgcaccaagcaatcagtggttcatccggaccgtgaatagagtttttgagcatgcgggagatctggtcaatattaaggtagcacatagtttgatgcggttgattgctgagggattcggagaggatgatgataatgcagatagtaaattgagatcatctgctgtggagtcatatttgcgcattcttggtgagccaaagttgccatctgttttccttcaggtaatctgttgggtattgggggaatatggaacagctgacggaatgttctctgcttctgacattactgggaagctgtgtgatgtggcagaggcttattctaatgatgagactgttaaggcatatgcaactacagctctcatgaaaatatatgcgtttgaaatagcagctcgtaggaaagtagatatgctgcctgagtgccaatctttaatggaagagttattggcttctcactcaacagatttacagcaacgtgcctatgaactgcaagcagtgattgggcttgatgctcatgctgttgagtgtattatgccatcagatgcaagttgtgaagatattgaggttgatagagacctttctttccttaatgattatatccaagaagcaatagaaaaaggtgc

SEQ ID NO: 12409 - DNA, 437 bp, Gossypium hirsutum
  Clone ID: GOSHI-09MAY01-C19816_1
gttctcttcctatctggcatggtggccatgatcatgatgagaacattgtacaaagatatcgcaaactataatcagttggaaactcaagacgaggcacaagaagaaacggggtgggaacttgttcacggggatgtctgtaggcccccaatcaattatggtttactctgtgtttatgttggcacaggtgtccagattttcgcaatgtcgcttgtgacgatgatatttgcgttgctgggctttttgtctccttccaatcgtggagggcttatgacagctatggttcttttgtgggttttcatgggaatatttgccggttactcttcatcacgtctatataagatgttcaagggcacagagtggaagagaattactttgaaaaactgcatttatgtttccgggtatcttattcgccaatcttctttgtactgaatgcacta

SEQ ID NO: 12410 - DNA, 898 bp, Gossypium hirsutum
  Clone ID: GOSHI-09MAY01-C19576_1
aaaaggtctcaaatttgggacactaggccggtttcaaaagctgccagttgacagacaagtaagatggtgctccaaaagttatgttgtgaatagaagcagcaaatatcaacagtgccgcacatggatgaaatattatatcagggcctttaagaccagattcaagggaaccaccaatatgcatgaaggttgctgcatctaaattcaatataaagttaatgtggctgttgaatagaacctcccagaacgagaagtacgccctcgttagcttccgaaatgcccaatatatcggccaaaggaattgacaatgttcatctttagagcaatgtcgagtgcatcggagagtgccctatcaccatagagttcaaaaacaccaaagtttacataatttccagcaagacctcttgccagaatagttagtgaaatccatattcccttgtacttgaaggcatatatatcagcaggattaggaagagataaaatccttgtcccatatgccacaattagtttactgacttcacggaaaagaagaatcccattaggagaagatgagtcaaatgtcaagcgttgtgctttgttcaagacaaactcagccatgaattttaacaacggagtggtaacctctggtgcgtcagtccagtgagtaatgcctttcaagataagtggcatgtgcgcagggtatagccagtcgaatagaagaccatatgttctacgactgtttgtggccattgcaattcctctaagatccctcattaatccaattaaagcatacttaaccgcatcagtacgaaataccgcatcgggtgttgactccaggctgacaaagacttgcagaagtggttccattgaagacttgaatttgatagggcttgccttcataaaaatcaaccacccaatggtg

SEQ ID NO: 12411 - DNA, 485 bp, Gossypium hirsutum
  Clone ID: GOSHI-09MAY01-C19756_3
ctggctcctacttgatcaacacatggtctgatatggctggttgtctagaccctacaattccaccatccattgatcggacccttcttttcgcccgataccccccacatccctgtgtttcaccacattgaatattaaccaccaccggcaatgaagatttcacccgtgtccaccggttctgaaagcacagaagccttcattttcaaattgaccctggatcaactcaatgcactcaaagcaaagtgctaggaagatggtaacgctgtttactattatgtcatacccaatgtcttcaggtaaccgtgtggggacccagtctgcaaggcacgtggactcgtagacgatcaagggactatactgtacacttgccaccgagggaagggcatggcatgacctgccacttccacctggatactgtggcaatgtgttatgcactgactccccagaagctgcgcttagtgatctactgttaaagctaacatggtacc

SEQ ID NO: 12412 - DNA, 1052 bp, Gossypium hirsutum
  Clone ID: GOSHI-09MAY01-C19756_1
tttcctaaccgttgattattccggtggcatctccacgtatccactcttggttttgcaggtcacatatttcaaatgtggtggagcatcactaggtgttggcatgcaacatcatgcagcagatggatattctggtctccacttcatcaacacatggtctgatatggctcgtggtcttgaccttacaattccaccattcattgatcggacccttcttcgtgcccgggaccccccacaacctgtgttccaccacgtcgaatatcaaccaccaccggcaatgaagattccaccccagtccaccggtcctgaaagcacagcaatctccattttcaaattgacccgggatcaactcaatgcactcaaagcaaagtgcaaggaagatggtaacgatgttaactatagttcatacgagatgttgtcaggtcatgtgtggagatcagtctgcaaggcacgtggacttgaagatgatcaagggactaaactgtacattgccactgatggaagggcaaggttgcgccccccactcccacctggttactttgggaatgtgatcttcactgctaccccaatagcagtggcaggggatctactgtcaaagccaacatggtacgctgcgagccgtattcatgatgcattggttcggatggatgatgaatatctaaggtcagcccttgattacctggaacttcagccagatttgtctgcacttgtacgtggtgctcatactttcaggtgtccgaaccttgggattactagctgggttaggctaccaatccatgatgcagatttcgggtggggcaggcccatatttatgggccctggtggaattccttatgaagggttatctttcgtaataccaagtccaaacaatgatgggagcttatcagttgccatctccttgcaaaccgaacacatgaaagtgtttgagaagctcttttatgacatttaaaggaagaagaaacctcgtatacagtccatgtagtccttaaacgttcctttgtcccaatttttggaatacctggttatgttataaagtctcacatttcacttgaaat

SEQ ID NO: 12413 - DNA, 424 bp, Gossypium hirsutum
  Clone ID: LIB3120-020-Q1-K1-A10
cccacgcgtccgcccacgcgttcgcccacgcgtccgcccacgcgtccggttgtcaggtcatgtgtggagatcagtctgcaaggcacgtggacttgaagatgatcaagggactaaactgtacattgccactgatggaagggcaaggttgcgccccccactcccacctggttactttgggaatgtgatcttcactgctaccccaatagcagtggcaggggatctactgtcaaagccaacatggtacgctgcgagccgtattcatgatgcattggttcggatggatgatgaatatctaaggtcagcccttgattacctggaatttcagccagatttgtctgcacttgtacgtggtgctcatacttttaggtgtccgaaccttgggattactaacttggttaggctaccaatccatgatgcagatttc

SEQ ID NO: 12414 - DNA, 699 bp, Gossypium hirsutum
  Clone ID: GOSHI-09MAY01-C19706_1
aacagaatagcaggagataaaaaaaaactatgtatggtataagcgagtgccgtgtggaaaaagagggaatttggaatcgcaaatcggtagttaaagagaagaaaaataggacaaaagcttcgaagaagaaacaatgggacggtggtggagtaagtatgcggtggcgttcatggcgttggccctcttctctatctccgccacagcgaggccctgcaagaccttcctcgtttcctcctattccatctctttccataaccctaatgacccttcctccgctgtctcctcccgatttgtcaccgtcttcactgagatcggtcaatggaaccccttatccatgcctgttgatcccaagccctcctacgccttcagctccctccgtgatcgtagtagggacattctcagcgtcgtcgtcgctctcctcttcggcgtcggctgtggctctctcactgccgccgccatctacttggtctggattatcttcacggcccgttgcgagtaccatgaggatgataagtctgacgaagaatttagccctaaaaagatggggtatgttaacattcctgcgaatcctgctgttaacgttaaggaagccctttgatcaaataccatagttgttattaattatttaaataaattctcggtttgattgttcagtacttcggtaaatcatgtctatgtctgtctatgacttttcatttt

SEQ ID NO: 12415 - DNA, 413 bp, Gossypium hirsutum
  Clone ID: GOSHI-09MAY01-C19696_1
gtaagtactttgatttcttaaatctgtttttcaaaggcttttgaacaataatacaatccctttcgcggcatgttgaaactggccattaccatgaaactccatacacatcaaaataactaatttctttcgcaataattaattaaaaaaaacagaaactggaaattatatttaataagttcaaatattaattttctcattcatattcagctccttcttcttcattctcctcttcttcaatcaactgttgcatcttgattctggtgatactctgataccaaatcatctcatattactctctgcttcggtaaattccatttcatccatgccttcccctttataccaattcaagaaagccttccttccaaacataactgtaaattggtcccttacgcccctaaacatctcttggattg

SEQ ID NO: 12416 - DNA, 758 bp, Gossypium hirsutum
  Clone ID: GOSHI-09MAY01-C19616_1
caggaaactgctactcttgctgacatgaatatatttcctggagataggctttgggtgaaagattctgaaattcatgaagatagagatatcgctgatgagctttctgaccagaaaatgaatgttgaaaatattgaagaaggatttcggggaacattattgacggcttatatttcatctcaagttgtttagatgaagtgtgctttatgttttttgcctacaagatctaaatttttgtagatattgatggtgcaagaaggaatcgtggaatgttttgatttgcatgttagtagatagtaggaaatgttgctgctcggaggaattatattacgtgatgtgatgtctcatccccagcccagttttgtgccttgtaatccagaaaaccttaggacctagacaaccatggcagtgtggtgaccgcggaaacagtgatagaagaaagcaagaaagttgaaacttttattattatataaactaagtagagatggatatatatgaattgtgagtttgattggagcaatatttcctttgcgtgaactggattgggctggagtgagatgtaaggttatggatggttttaagtggtgatggtggtaagacttattttgcttgtacaaatatgagttcactgtaatatgctatgaattgaaggtatcaacattcatatgatggatggatgctaattgcttattagtaaatcaatgtgatggatggtcgcccccctggtttccgttcttcaaaagaaaaaaattattggtttc

SEQ ID NO: 12417 - DNA, 570 bp, Gossypium hirsutum
  Clone ID: GOSHI-09MAY01-C19046_1
cccagtccaatgacatgttttggggcggaacccttttattaccaacgccaacaaagctttgctctttctccatctatctaagaacacgctactctgcatcatacaccgacgaaaagaaaaaatatgggttttgagaagggagcttcattgttggaagatttgatagaaaaagctggaggctgtgctgtgatggatgggggttttgctactcagcttgagagtcatggtgcttccattaatgacccactttggagcgctctttgcttgatcaaagaccctcaccttatcaagcaggttcatcttgagtatttggaggctggtgcagatatcttggttacttcatcttaccaggctaccattcctggattcctttcccggggactatcccttgaagaaggggagtcattactaaagaagagtgtccaattggcagtggaagcccgtgataagttttgggatcgtgtcggatgtgttcctgggaatagctacaaccgagctttggtagcagcctcaattggaagttatggagcatatctggctgatggatcggaatacagtgggtgctatggt

SEQ ID NO: 12418 - DNA, 690 bp, Gossypium hirsutum
  Clone ID: GOSHI-09MAY01-C19066_1
ccggacatcaacaaggtgttcattaaacatggtaaagcaagcaagtttgatgaggctgatggttataagaccggagaggaatgggttctagatacggaaggtgtcaatctcttggctgtcatgtgccatgaagatgttgatgcaaggagaacaacaagcaatcacttgattgaagtgattgaagttctgggaattgaagcagttcggcggtccttgttggatgaattgcgggttgtgatatcatttgacgggtcttatgtgaattatcgacatctagctatcctctgcgatacaatgacatatcgtggtcacttgatggccatcactcgtcatggcatcaaccggaatgatacgggacctatgatgaggtgctcatttgaagaaactgtagatatcctccttgatgctgctgtttatgctgagtcagattatttgaggggtgtgacagagaatataatgctgggtcagcttgcaccaattggtacaggagagtgtgccttgtatctcaatgatgagatgttgaagaatgccattgaacttcagctacctagttacatggaaggtctggaatttggcatgacacctgctcgatctccagtatcaggaactccatatcatgagggcatgatgtctccaaattacttgctgagcccaaatctccgtctctctcccctttcggatgctcagttt

SEQ ID NO: 12419 - DNA, 725 bp, Gossypium hirsutum
  Clone ID: GOSHI-09MAY01-C19036_1
ctcataacggtcgaattgcatctttgattttcgttaaagactgtaagtcagggtcgccaatcgaagactcgcaacaaatcgacaaaattgaagcacgtttaaggaatgttttgaaaggagataacgatattcgtagcgcgaaaaccacggtttctatggccgtaactcataccgaaagaaggttgcatcaaatgatgttcgcagatcgtgattacgaacggaaaccgattttggaacataagtcggagttgtcggctgtcaccgtgcaaaactgggtggaaaggggttattctgttgtgaatgttcaatgcaaggaccgaactaaactcctgtttgatgttgtttgcacattgacagatatgcaatatgttgtgtttcatgccactatcaaaacatcaggcgataaagcatatttggaattttatattatgcacagagacggaatactggttagttcagaacccgaacgacatcgtttaatccaatgtttacaagctgcagtcgaaagaagagcatccgagggtgtaaggctcgagttatgcacatcggatagacaatgtttattagccgacgtaactagaacgttcagagaaaatggtcttaacgtgacgagagctgagatatcaaccacgagcgatgtagctctaaatgttttttatgtaaccgacgcaacgggaaacctagccgatcccaaaaccatcgaagcagtacgacaaaagatcggg

SEQ ID NO: 12420 - DNA, 304 bp, Gossypium hirsutum
  Clone ID: LIB3048-023-Q1-L1-D5
aaaattgaagcacgtttaaggaatgttttgaaaggagatgacgatattcgtagcgcgaaaaccacggtttctatggccgtaactcataccgaaagaaggttgcatcaaatgatgttcgcagatcgtgattactaacggaaaccgattttggaacataagtcggagttctcagctgtcaccgtgcaaaactgtgtagaaaggggttattctgttgtgtatgctcaatacagggtccgaactcaatttcaactttatgatgtttgcatatttccagactttagcatttttcacaatcctatcattt

SEQ ID NO: 12421 - DNA, 476 bp, Gossypium hirsutum
  Clone ID: GOSHI-09MAY01-C19026_1
cccacgcgtccggcatatcctcaagccagactcgacgcttgctactgcaagcaatgcagaggatggtgagccaggacctgttgctgcaattcggttgccaatgcttcgaatttgcaattttaaagggggaactcctgagcaagtccaggcgtacttttccatattggtatgtgttcttccgaatgaccaacgaagatcgtggtgcaacccggaactagaaatagttaaggtggttgccgatcaggtgggccgctgcaatctctcatgccgcagttctcgaagaatctcaactcatgagggataaactagccgagcaaaatcgggcgttgcagctttcaagacagaatgctatgagagcaagccatgctagaaatgcatttcaaaaggtaatgagtgatggaatgaggaggcctatgcattcaattttaggcttgcttttaaacgttgcaggatggaaacttgaatgacgatcaacg

SEQ ID NO: 12422 - DNA, 758 bp, Gossypium hirsutum
  Clone ID: GOSHI-09MAY01-C19386_1
acgctttcccactatctgaactgaaaccgtgtgggaaaagcctgagagaggagaaaaaaatcaaaaggcaaaagcaactgaaatgagcggagcctcgacggcggcgtatttagctcgaagagcggcgcaaaaggagagggttcggatcctctaccgccgtgccctgaaagacacactcaactgggccgtccatcgccacctcttctatcaagatgcttctgaccttcgcgagaaattcgaagccaacaagcatgtggaagatcttgatacaatcgacaaaatgatagatgcaggtgaagcaacttataataagtggcggcatcccgatccttatatcgttccttgggctcctggtggttccaagtttactcgaaaccctgtcccaccttctgggatcgagatcgtgtatgattatggtcgagaagaaaatgactaagacatccatcttttcaacttccccagaaataaagttgatgcaggtctaaaggatcgttgagtgtgtaacgagtggtctaggacagcaactaatttgcattacctcaattgaaacgagataaggcttttaataacatttatggtgattctccattgtgcttattgttgtgtgcctggtgttttgtataataaaagatcattggtctgattgaaggtacaaaatgcttgcttacatggcatggaactacaacgatcttgaatctttcttgtcataaactatatttctcttaatttagatgctgtttttttttttattttttaac

SEQ ID NO: 12423 - DNA, 433 bp, Gossypium hirsutum
  Clone ID: uC-gsronu33B062g11b1
ttttaaagcaaaagcagccgaaatgagcggagcggctactgtagcgtatttagctcgaatagcagctcacaaagagagggttcggattctctaccgccgtgccctcaaagataccctcaattgggccgtccatcgccacctcttctatcaagatgcctctgatcttcgcgaaaaatccgaagccaacaagcatgtggaagatcttgacacaatcgacaaaatgatagctgcaggtgaagcaacctataataagtggcggcatcctgatccttatattgttccttgggctcctggtggttccaagttcactcgaaaccctgtcccgccatctgggattgagatcttatatgatcatggcaaagatgctccccgcttttcccttgttctttctctatcccccccctaccttgctttgatactttttcgtagcttt

SEQ ID NO: 12424 - DNA, 607 bp, Gossypium hirsutum
  Clone ID: GOSHI-09MAY01-C19376_1
gaaacatggtgcaaaaactagaagctatcaagggcggtggaggatcaattaaggtgggactggggagtaagggaacaatcagttcccttatgacacgggaactggactccgttaaaccggtacctaaaacaccggtgtctttcagacacaaatctcagacaattcctacatcagttgcctgtcccactcctaaaagattacagctagggagatctttggatggagcaagcaccagtggcaatgacaacaattacataagttacaaacaccaccaaacttcccagaagacaaaaagcttgtccaaaagcacccaccagattccaatgcttggttttgagaatatagctttagatagaactcctagcagacagaaaagtgacaaaaaagtatctaacattgttgaagttgtggacataaagtgtgggaaatatcctgatagagcatggtcaaaccctgtaacaaatcgactcaagaagcttgggttctctaaactttcccaaagcatttctagacctgcaacttgttcacatcagacttcaggttcctataactgagacctgaaatcccaagtgacctgttgtctgaaatttccaccatagaacatatg

SEQ ID NO: 12425 - DNA, 369 bp, Gossypium hirsutum
  Clone ID: GOSHI-09MAY01-C19366_1
cttggaacgcctgcggcgaaacaccgcatgggttaccggggacgccacttgattcatgtatccgaaagatgtacgctcaattccagcgcttggatgtggatcctactggttcaacgctcgggatcatgaaagctaagcctgagcatgctacaagaggtcatgcacttgtcgagccagcgagtgatgccctgaccggtcaatggcttcagatacgcaagatgatagtatccacctatggatgaacgtgcgtggctctgtacaccatctcactttacttagctgatgccaagtacggtggcggtgccaacacggtgcatggcagccatggcattgcccagcttgctcatctcaaagttcgatcccgacttg

SEQ ID NO: 12426 - DNA, 657 bp, Gossypium hirsutum
  Clone ID: GOSHI-09MAY01-C19246_1
gaacagattttgacataaaagaaggtccaaaccctacaaaaatggcggagaaattggctcctgaaaaacgacacagttttctccacaacggtgaaaaggtatttgaatgggatcaaaccttggaagaggtgaatatttacataaacttaccgccgaatgttcactccaaacagttttactgtaagattcagtccaaacatgtcgaagttggcatcaaaggcaaccctccttatctcaatcatgatttgttctccccagtgaagacggattcatctttttggacgctagaggatgatataatgcacataactttgcaaaaaagggacaagggtcagacatggtcgtcaccgatactaggtcagggtcagctggaccccgatgccacttgatctcgagcagaagcggctcatgcttcagagggtcctgggagagaaccccggtttcgatttctcccaagctcagttcacgggaagctgtcctgatccagggacttttatgggcggcatcagttcggattgacagtcatcatatattaatgctggtttgatcacttccattgtcctgttattaagtaaataaactatctaatgtgctttctcttgcttgtcgtaaggctttgaattaacttattgactcggccatcaatttgtgatatag

SEQ ID NO: 12427 - DNA, 889 bp, Gossypium hirsutum
  Clone ID: GOSHI-09MAY01-C14966_1
ggcgtggacaaattattcattaaccgaattaaaaaataaaagatctgactaagagaacaaacacaatcaaaaatcaaatacaaaaaattctaattataaaagacaagaaaaacgaatttctaactcaagaaataaatagtagttctaacaaaataaggtatcaggataaaatattagaatcatcaaaaaaattttggcaaatagtaaaaagaagaaatattcgattaatccggaaattctatttttttataaattttttcattgaaaagatatacatggatattcttctatatatcattaatattccaagaaccaatacccaactttttcttgaatcaacaaaaaaaatgattgagaacttcattcacaataatgaagcaaatcaagaaagaattaataaaacaactaaaaatacaactcattttatttcaactataaaaacctcactttcttcactttctaatattagtattagaaataaaaatgaaaaagctttttgtgacttatcctccctctcacaagcatatgtattttacaaattatcacaaacccaagttattagtttttataaattcaaacctatccttcaatatcatggaacatctctttttcttaaaaatgaaataaaagattattttgaagaacggggagtatctcattccagattaagacatcattatgggttaagacagaaaattgtttggcattctggaatgaatgaatggaaaaactggttaaggagtcgttatcaatacgatttagttcagaatagatggctaaaattaggaccaggacaatggcgaaatagagtcaatcaacactatctggctcaaaataaacatttaacaaaatgggattcagatgaaaaaaaaaaaaaaagggcgggcgc

SEQ ID NO: 12428 - DNA, 843 bp, Gossypium hirsutum
  Clone ID: GOSHI-09MAY01-C14916_1
cccacttgttcggagttattccctcaatgaatatcactttcaggacctccattgaagcttcaagaagtggttagaggtgtaagacccatgcctcttccagaaatggcaaatctactcaacagtttccggttaatgatttgtcctgggcttgatccaaatcctaataatctagttgcaagcactaccttctactcggagagtacgcatgccatgctatgtttgatcagaattgaaacagatcctgcagacagaacccagttgcgaatgacacttgcttcaggcgatcctacattaacattcgagttgaaggaattcatcaaggaacaattgattagcattcctactgcttctcctcagtcaccagcaccagcaccagcaccagcaccacctcccgcagtttaagcgaccccacaaataccaccgaatgatcctgcagctctactagctggtttgctgccgtgaaaatggaagatttgttcagttttacacttagaaaccttggtttttatactctgccggccacccatttggcatttatccctcacacatatggaaaatttcatgatgcaagggcttgccggatcacggaggagcttaattatgtttgtcggcttagtgaaagaagggttggtcgggtattttgttattctttctgcacatccatggtgagagtatttttttttccaattttttttaatccgttttcctatttcttctcagcataccagattgggtttctctatctagtacggtgtcgttttacgtgtatgatatggcatgaagtaggatcagttgtaacaatgtaatggtttgttaaacccggtatatttttgaatctataat

SEQ ID NO: 12429 - DNA, 396 bp, Gossypium hirsutum
  Clone ID: LIB3189-047-P1-K1-H7
caaggaacaattgattaccattcctactgctcctcctcagtcaccagcacctgcaccacctcccggagctcaagcgaccccacaaatacgaccgaatgatcctgcagctctactagctggtttgctgtcgtgaaaatggaagatttgttcagtatacacttagaaaccttggtttttatactctgccggccacccatttggcatttatccctcacacatatggaaaatttcatgatgcaagggcttgccggatcacggaggagcttaattatgtttgtcggcttagtgaaagaagggttggtcgggtattttgttattctttctgcacatccatggtgagagtatttttttttccaattttttttaatcacgttttctatttcttctcagcatacc

SEQ ID NO: 12430 - DNA, 618 bp, Gossypium hirsutum
  Clone ID: GOSHI-09MAY01-C14866_1
tttgagagaagtgagactgatgggggaagctaaaggagtagtgaagcacatattgttggcaaagttcaaagatgaaatcccacctgagaagattgaggaactcataaaaggctatgccaatcttgttaatctcattcaccccatgaaagctttccactgggggaaggatgttagtattgagaacctgcatcaagggttcactcatgtgtttgaatccacatttgaaagcacagaggggattgctgagtatatagctcatcctgctcacgtggagtttgcaaatctgtttctccccagcttggacaaggtcattgtatttgactacaaacccaccgttgtacgttgctaagttacaagcatagttctgtctcaatgtagcttttgtcctgttcatgtctgttgttattttgaataaagtttgacgtcttgtactatgaaatgcatccatccctagtgatcaaggcaaaagttggttggttttatcttctttaggttttacatacaataattccttgttgagattgtgctttgatgtattcttgagctgagttgagactaagcaataagaagcttgagtttgagataaacccaattttttgaaaaaataaaataaaattg

SEQ ID NO: 12431 - DNA, 441 bp, Gossypium hirsutum
  Clone ID: GOSHI-09MAY01-C14546_1
cggacgcgtggggcaaaaccccatcacaaagaatctctctcctttcattcttccaaaaaagaaagtcccaaatttcaaaacagatcctaatagtattagcgatggatcaagaggtggtcggacgccacgcgctgctcttcgacgacgacgccatggccgccttcgttaactctccggaggctctcgttgactggaactccctcgccatcgatcgctatgatgtgcgtcaccttctctctggacctcctccgcctcgaaagagacggcgccacctttcatctccttccgggaccgccgatgataagttggagtccgatctcgatccgtgagcgttatcttcgatttgcctcctccatctccgtcgctgcccgatcggcaagatggagaatataatgaggaacctgcggctgctgggtggtctctataatgctgttttctttt

SEQ ID NO: 12432 - DNA, 844 bp, Gossypium hirsutum
  Clone ID: GOSHI-09MAY01-C14516_1
aagcttataatattaaaaaaaaaagtaatgtgtctatcaaaaaagtaatatgcagtttcatatatatatcccaaaaaagagcttaacagttggcctaacaaagcaacaaacaaaggcaggaatacagcggcacagcaataaaaaggtttaggaagatattatctacttaatatattgagagacccatttgaagccgtcaccatatcccattttgcgaacaatgctgcacataaacacctcaaggggtcgaacggaggagtttgtaagattgaccttgcccttcccagtcgtgaaattggtcagcccaagatgataacgaagctcatcttctgaagctgcgtacggaatgtcaatcttgttgcctagaattagaaaaggaacattggccaatgcttcatctgaaagcagcgcatctaattccctcttcgactctgcaaatctttccttgtcgtatgcatccaccaaatataccactgcatcaaccttagcatagtaatccttccagacacggcgagcgatttggtgaccacccaaatcaaaagctttgaacttgattttgcctatactcaattcctcagatgttgggtgctgggttggttgatgttgaactaatctctcatctttcaacatgtgaagaagagtggtcttgccagcattgtcaagtcctaaaaacaaaatcttggcttctttttgccacaaacccaaagatgcaagaaccccataaaaccaatcaaataaaaacatggcttggtttttttttctttttctcccttgattgcaatgatagatccaaagcgtcgcgtggggaaagggggaaaagaagaaataaatgtgtatatataag

SEQ ID NO: 12433 - DNA, 656 bp, Gossypium hirsutum
  Clone ID: GOSHI-09MAY01-C14496_1
agaaaacatattaacaaatcggagcttatggctcaacgactcatcaaacgatggaactttaatggaaagcgacgcccatacctgttgcagaatatcgcaagaccacaccagatgattagtgtcttccagtttgtacttacacagcgggcaatatgtgtccacacacaacattctcctcgccagattatcgaaatgcggcaccagattattaacaagcctccaaatgtgaattttgattttatcaggaatacttaatgaccacaaatctttgtaaaaatctatgtaaacctcctcaataataggcatgtaagcagtactctgtagatgagctgcaaatagtacccgatacccactcttgactgtatactccccagaaccttcatatttccagaccaccctatcctctggtctacttacagatatgggaatagtaagaattcggtccactgtattctcatcaacgatctttagaagcagcgttctatcccaggaagccaaggatcgttccagatgttaatgcgatcccccttgccaacccgccacaggaccccatctccaatcacttcacgcgcaatacaaatacttctccaggtaaaaaatgggtaagctccaatctttgctgataagacattagacttaagaaaataccgggcttt

SEQ ID NO: 12434 - DNA, 397 bp, Gossypium hirsutum
  unsure (1)..(397): unsure at all n locations
  Clone ID: LIB3146-043-Q1-K1-D10
cttacacagcgggcaatatgtgtccacacacatggttctcctcgccagattaccaaaatgcggcaccagattattaacaagtctccaaatgtgtattttgattttatcgggaatacttaatgaccataaatcattgtaaaaatctgtgtaaatctcatcaatagcaggcatgtaaatagtacgctgtagatgatctacaatcagtacccgatacccactcttgactgtatactccccagagccttcatgtttccagaccaacctatcctctggccgactttcagatatgggaatagcaagaattcggtccactgtactctcatcaacaatctntagaagcagcgctctatcccaggatcttgtttctccttgaccaaattgcccaaatgctacaaaa

SEQ ID NO: 12435 - DNA, 991 bp, Gossypium hirsutum
  Clone ID: GOSHI-09MAY01-C14486_1
ggagaacgaagcatccatatgaatcagattcgtaattacaaacaaaaaagaaagcaattgtacataatttatccacataaccctccgtgaactataagaccagcagtttcaccccaaaggaatagaaacaaagatagaagtagaattgtagacacaacatcaattgaacagcagaataaaaaagtacaacataacaataactgaaggaaaatgtaaccaataatcaaaagcaccattaaaagaacttgttatactggctagtgagagaatccctgagattagaataaaggccaaacagtgagtactgccgaaggttctcaacttcataccatgaattcagggcagaaaggtgcttatctgtcccagaaaatgctagctgtatcccaatactgcaatcaacagaccctccatggtttttgcagttgtttgtattaattgcacaatcttgtttgtttaggcacacaaaatttgatcttcccgaacattgagcacaaccatcccttttccaaaacaagttttgcagcctgcctttcttaaactcaagcaccagagtgaagcttgttacagtgtaggtaccgtttgcaacaaacgcaggcagagaccttgcagcatattttcgaccagcaaacgcaaccatatacccaccaactacgtccggagtaaaagaggaggtgttaatggtgaggagagagatctcatcaactttaggtctaaacagagcgaggcgagagttggcgttcgacagagagagtcggcgatcgcaaggggacaactgaagtgagctgttgaagaagaatgattgtctcgatgcgaacgcgattccaaaagtgaacccatccgaaatctggactttcgtgtccgaacacggtaagtacgcgtggttcgtgtcgtcgcttgactccaccaatagtgatggcgtcgccgccgtcatcagaaaaagaagaaaataaaccgccgatttcgccataatttttagtaatttggtttttgg

SEQ ID NO: 12436 - DNA, 460 bp, Gossypium hirsutum
  Clone ID: GOSHI-09MAY01-C14446_1
atggagatgggggacttcttcgtcggaggttattacggcggcggagctacaggtgatttctcgccggagaagaggatgtccatggtggaggaaaagctgggggagaatttcatcgtcgacgacctcctcgacttctctaacgaagacgccgttatcggcgacggcttgttgttcgataatgtcgcgggtaattccaccgatttgtccaccgtcacttgcaattcctcagcgtccggtggcgaaaatcacttctcttccgctaatttcactcactcctctcagttctccggcgaactcggcgtcccgtacgatgaattggcggaacttgaatggctttcaaattttgttgaagattcattttcaacagtcccgaatttacaaagcaaccaccatatttttgctttacccacacccgaatcctcatcttcctcaacccgatccgattcattacctcggagct

SEQ ID NO: 12437 - DNA, 639 bp, Gossypium hirsutum
  Clone ID: GOSHI-09MAY01-C14476_1
agcaaacaagcgtcaatactgctgtgaagccgcagaggcgtgaagtgaagtgaagtgcattctggctggtcgacaatggggatttcgaggtttgttttactcgtgtttacgatctcaatgctggcatccccggcactctccgatctggttctctccaaagtcgatcgacgtatttatttgacatcccacattgttcgaatttcttcaactttagaggtggagaatgcaggtccagagactgtgtctaaggttttgttggcttttcctgaccttcaagcccaaaacttggcatatttgatggcttccccgcatgaagccaaagcgaaattcaaagtctctgttgtttctttccctattgatgtcgtcaaaccagaagatatgcctcctggtgtaacattctattcggtatcattgccacagggattaaccgtgggcgctagcttcacttttgatgtcttggcttgtatttacccatgccttgcgacctatgcccgagcaaatcggtcaggctgatattcagcttgtactgtaccaggatagtgcatactatctgtctccttatgttgtcaaggtccagtctctaagtcttaagctgcctgattctagaattgaatcctatacaacactggagagcacaaa

SEQ ID NO: 12438 - DNA, 455 bp, Gossypium hirsutum
  Clone ID: GOSHI-09MAY01-C14406_1
gaaaaaagaataaatgtacgtaaatctaaacgcaactgctagttttaatctgactaaagcaaaaatcatcgtctacccgaatgaaccctaaagaaatagctaaagttcatgtcatgaattgagtgtactaagtcactgaatgaattaacaaacaatcaaaacattaatgaaacaaatcataattagaatttcatccactcaaaatatacataactatacggaacagaagacccgattatcagaatgaataaaaggcattcaaactaataccggacgacatcctggaggcagtcgtaaaagtgcgcaagcttaatcttctctcggccagagaagatcgcctccgctgctccaccttgttctccttgagctgccatctcaatcaacatgtaaagcttttttataggcatatcactcagcgcttcagcagcctcactgatatcttcttcagcaaataa

SEQ ID NO: 12439 - DNA, 365 bp, Gossypium hirsutum
  unsure (1)..(365): unsure at all n locations
  Clone ID: LIB3197-028-Q1-M1-G2
cccacgcgtccgagtgaagctgctgaaacgctgaatgagatgcctataaaaaagctttacatgtcgattgagatggcagctcatggagaacaaggtggagcagcggaggcaatcttctctggccgagagaagattaagcttgcgcacttttacgactgcctccaggatgttgtccggtattagtttgaatgccttttattcattctgataatctgctcttctgtttcgtatagttatgtatattatgagtggatgaaattctaattattatttggtttattaatgatttgattgcttgttaatgcattaattgaacttagatcgctcttggngactatggaaggaaacctggatatgagcaattc

SEQ ID NO: 12440 - DNA, 938 bp, Gossypium hirsutum
  Clone ID: GOSHI-09MAY01-C14766_1
tctagatcgcgagcggccgccctcgccctttttttttttttttttttttttattaagctccttgatctctttttttcttcaatatattctgctttagattatgataactctagacttgttgatcgattgtcttctctctttttctttttcatttttccctcccgcgattctttctctcgctgtcagcctctgaattttttgattgagaggaagatagaatgtctggcggaggcacacaaaatagcttgaggaaagcactcggagccatcaaagataccaccaccgcttcattggctaaaggcaatagtgattataaggaattggatattgctatagtaaaggccacaaatcattatgaacgcccagcaagggagaaaaacattagagcaattttcgccgccatttcagctactaggcctcgggctgatgttgcctattgcatccatgctcttgcaaggcgggtatcaaggacacataattgggcggttgcattgaaaactctaatagtcattcatcgtgctctgagggaggtggatcccacatttcatgaagaactcattaattatggcagatgtagaaaccatatgcttaacatgtctcatttcaaggatgattccagtccaaacgcttgggattactctgcctgggttcgcacttatgccttattcttggaggagaggctggaatgttttcgtgtcttgaagtatgatattgagatggaccgcccaagaaccgaagatttagacactgcagagttgctcgagcagctgccagctttgcaacaacttctttttcgtgttcttggctgtctgccacaaggtgcagctgttcataattttgttatccggttggcactttcaatggttgcttccgaaagtatcaaaatttatcaagctataagtgatggtacagtcaatcttgtagacaagttctttgac

SEQ ID NO: 12441 - DNA, 400 bp, Gossypium hirsutum
  Clone ID: uC-gsronu33B172e04b1
tcccacgcgtccggatgttaccatatgcttaacatgtctcatttcaaggatgattccagtccaaacgcttgggattactctgcctgggttcgcacttatgccttattcttggaggagaggctggaatgttttcgtgtcttgaagtaccttgtcacctttaccatatattaagagtattaatgttgttacaactggtactaaaaaaaataagagtaatttgatacgtaatccaaaatacttaaaaatatcgtatgaaacttatagaatccaaatagatgatgttaaaagttatatcatatgataatattgaaatgaatctatcattttctaatgcacaaaaaataatcccaaaaaaaacaatagcactatcaaatttagtttataacatccactcctaaaa

SEQ ID NO: 12442 - DNA, 279 bp, Gossypium hirsutum
  Clone ID: uC-gsflmaxxa092f03b1
ggcggtgcatatggtgcttgaggtgcaaatgagggaggatatggaaatggtggcaaagccggaggtggtgaaggtggtcactattagccttgaaagtaccttgtcacctttaccatatattaagagtattaatgttgttacaactggtactaaaaaaaataagagtaatttgatacgtaatccaaaatacttaaaaatatcgtatgaaacttatagaatccaaatagatgatgttaaaagttatatcatatgataatattgaaatgaatctatcatttt

SEQ ID NO: 12443 - DNA, 990 bp, Gossypium hirsutum
  Clone ID: GOSHI-09MAY01-C14686_1
ctaccttttcatccattatcattcacttcaccattgatgaccagtaccccatgcttgtacagctggacatgcaacaccattagagcacctagtgttatgtacagtgatcgggattccgataacgggatcgattccccacgcgtccggatccacggcgatgatctatggccatgttttggtttttgattttttcaggtgccttggacactccaatgctgaagttgttccacatgaagttttcaataagttacctttacttaggtatttcatctatacccccacgtatcatagtcttcaccacacagagatggagaccaatttttgtctgttcatgccgctgtttgatgcactggggagtacacttaacaccaaatcattggagctacataagaaaattacctcaaattctggaaaaaacgggagggtaccggattttgtgttcctagcacatgtggtggacataatgtcggcaatgcatacaccgtttgcgttaagatcatttgcgtcgaccccatttcgcatgaggatgtttctgctaccgttttggccacttacgtttatcataatgctagtgatgtggggttggtctaagaccttcctcttctctttctacaatcttcgttgccgtttgcaccagacatgggtcgttcctaggttcggctttcagtatttcttaccatttgcaacaaagggcatcaacaagcacatagaggaagccatattaagggcggacagattgggggtcaaggttattagcctcgccgctttaaataagaacgaggctctgaacggaggagggacactgtttgttaacaagcatccagagcttaaagtgagagtggttcatggcaataccttgacggctgcggttatccttaatgaattttccaaggatgttataagaagtgtttctaacaggagccacctcaaagctcggtagagcaaccgctctctacctctgtaggaaaagagtcgggttcttatgttgac

SEQ ID NO: 12444 - DNA, 508 bp, Gossypium hirsutum
  Clone ID: GOSHI-09MAY01-C14646_1
caaaaacaagcccaaaagttcctctctctgcttctcgttctctgaaatttcaaaaaaatcaaaatttttgggcttgaaagttaatctttactgtcatccaaaacagccaaatggtggaagcgcagacatggaccacaagaagaatgagcaatccaaggttggactcaacggctaccgccgaccacgaagttttggatattccagtgactccaacggctgatgtcaggaacagcatctacaacgttggatcccatctctctcctaaccttttaacggcgctgatcattgcttcgtggttcatgtccaacatcggagtcctcatacttaacaagtatctcttaagcttctatggctaccgttacccgatcttcctcaccatgcttcacatgatctcctgtgcttgttacagttacgctgccataaactttctggaaatagttccaaggcaacacattttatcgaggaagcagttcctcaagatctttgctttgagtgtcattttttgttc

SEQ ID NO: 12445 - DNA, 1246 bp, Gossypium hirsutum
  Clone ID: GOSHI-09MAY01-C14196_1
ctggtaacctttttcttctctttctcttatggcggtttttggatttataaaaacatagcgtttaggcttttagattcatttgtgttttggtgctgtggaggtgcatggggtgtaggcaaagttcataatattgatattgggatccttgggggcgttttccatccatttccaccaaaactgcagggagcgttttgcttcaaatgaaaaggccttaatatgcattcttagtattagtattcttcacctgctccttgtactttctcttggattctagtggttttctctttcatatcatttgattgggatcagtgagaaaatggaaggagatatcaaccagaagctgctaacagagactactaagaacgaagaggaagaagtgctatttaaagaaagattatggaccgagatgaagaaattgtggattgtggctggtcctgcaattttcacccggttttcaacctttggtgtcactgtaatcagtcaagcttttgttggtcatcttggtcctactgaacttgctgccttttccctttgtttcactgtccttttgaggtttggcaatggcgttctgcttggtatggccagtgcattggaaacactctgtggtcaagcatttggagcaaaacaataccatatgcttgggatataccttcaaagatcatggatagttttgtttgcaactgccctctgtctccttcctatatatatcttcactaccccaattctgatagctttaggccaggatgaaacgatagcaacggtggcaggatatatcagttattggttcatcgggatcgtgttttcgttcattgtatccttcacttgccagatgttcctgcaagcacagagcaagaatatgattattgcatacttagctgcattctctattggaatccacatctgtctttcatggcttttgactgtgaaactcaagtacggcctctccggggctttactatcaacgattttggcctattggataccaaatataggtcagcttttgtttgttacatgtggaggttgtaaagatacgtggaagggtttctcaatgttagctttcaaagatctaatgcctgttgttaagctatctttgtcatctggtgctatgctttgtcttgagctttggtacaacacaatcttggttcttctaactggaaacttgaaaaatgctcaggttgcaattgatgctcttgccatttgtctcaacattaatggatgggaaatgatgatatcgctagggttcttg

SEQ ID NO: 12446 - DNA, 472 bp, Gossypium hirsutum
  Clone ID: GOSHI-09MAY01-C14066_1
cttttcgcttcaaaaatgtctttatcccttcgttttctcagcgctaaactgttcttatgcctctgtttaacattatttcaacaccatgtcacgtgttctgctttgaatcctactggtctaaccctaagggctgtcctggatgattctccaaactctcctttataccttattgaaaacatgactatagctgaaagaatcgaaagatttatccaagttaccaatgctaaagacaattatttgaatcttaatgcaagggtaggccctgataattctaattctctatctcgagtagtaatggctcgagatggtttattttattcagtatggcttctaataggaagccaaggccaagaagtgaagctgttgatgggcacaggcggtggtcttacatggacgcagtgtcagccttgcctaaattgtttcccacagaatcttccaatttatgattctaggactttcactacttactcca

SEQ ID NO: 12447 - DNA, 554 bp, Gossypium hirsutum
  Clone ID: GOSHI-09MAY01-C14386_1
ccatcgcgtccgcccacgcgtccgggaaagccagccgtggttgaatatggtaacacgggggaagatgttgatccggaaactggtggtcctgcttctgtaccagttccattacctgatatgggcctgccaccttcctttgatggtgataatccagcattcatgtaccggttcttggaacctacttctcagttcttggcgccgccagttttggacactcacggttgggaccatgattgtggctatgatggtgttaatgttgaacatagtctagcaatcgccagccagtttcctgctgcagtttccgttcaactcaccaaggataagaaagagtttaacatccatttggactcttcagtttctgccaagcatggtgaaaatggatcaaccatggctggctttgacatccaaaatgttggaaagcaattagcttacgttttcagaggggagaccaaattcaaaaatctcaaaaggaacaaaacagctgctggcttctctgtcacatttctaggtgagaatgtcgcaactggactcaaacttgaggatcatattgttgt

SEQ ID NO: 12448 - DNA, 792 bp, Gossypium hirsutum
  Clone ID: GOSHI-09MAY01-C14376_1
gagatatatgagcaatgggatgtggcgcctataactatcagccaccctgtggaggatgtgagtttagctacacttccttgagaagcggtgcatttctgggggggctttgctctttcatttgaggcaggccaatcttatcacttgtgttgcagcttgtaggaagcctcctgtgttctgtataatcaccgagtatctggcaggtggctcattaagaaagtattcgcatcagcaggagccatattcaggccctcttcatttagctctaacagtagctcttgatattgcacctgggatgcagtaccttcattcacatggaatacttcacagggatctcatatcagataacttactccttggagaagatatgtgtgtgaaggtggcagattttggtatttcatgcttagaatctcagtgtggtagtgcaaagggatttacaggtacttatcggtggatggcacctgaaatgattaaagagaaacatcatacaaagaaagtagatgtttacagttttggcatagtcctttgggagcttttaacggctttgacaccatttgacaacatgactccagaacaggctgcatttgcagtctgccaaaaggatgcaagaccactggtaccctcctcctgtccgcttgcgtttagtcatcttatcaaccgatgctgtgtcaagcaatcccgagaagcgaccacagtttgaggagatagtttcgattttggaaagttatgcggaattcctcgaagaggatctggaattttttaagacttataaaccttttttaagttgttctattt

SEQ ID NO: 12449 - DNA, 662 bp, Gossypium hirsutum
  Clone ID: GOSHI-09MAY01-C14366_1
ccattcctcgagttcttctttcatttctgattccgttctcaaaaaaccctcgttttccccattctttatatcctatggctccaaaggttggtgagaagaagcccgccgagaaaaagccagcggaaaaggctccggcggagaagaggccaaaggcggagaagaagatctcaaaagaaggcggcgcagataagaagaagaagaaggttaagaagagcgtcgagacttacaagatttacatcttcaaggtattgaaacaggttcatcctgatatcgggatctcgagcaaagcgatggggataatgaacagtttcatcaacgatatctttgagaaattggctcaagaagcatcgagattggctaggtataataagaagccgacgattacatctagggagatccaaaccgccgttcgattggttttgcctggtgaattggctaagcatgccgtttctgaaggaacaaaggcggttactaagttcaccagttcttagatttctttttctttttgttttgagattggattctgattagggtttccgatttgggattttagggttttttaaatgatggtttaataatgttcttgagttgtaggctttcggattcaatgatggttgttttgattatacccaatatagatattgaatgatgtttctttccct

SEQ ID NO: 12450 - DNA, 374 bp, Gossypium hirsutum
  unsure (1)..(374): unsure at all n locations
  Clone ID: LIB3149-055-Q1-K1-C2
ctgattccgttctcacaataccctcgctttcctcattctttatattctattgtctccaaagggtaggcggttacacccgccgagaaagggcgggcggatattgctccggcggagaagaggccaaaggcggagaataagatctcaaaagaaggcggcgcagataagaagaagaaggctaagaagagcgtcgagacttacaagatttacatcttcaaggtattgaaacaggttcatcctgatatcgggatctcgagcagagcgatggggataatgaacagtttcatcaacgatatctntgagaaattggctcaagaagcatcgagattggctaggtataataagaagccgacgatacatctagggagatccaaacc

SEQ ID NO: 12451 - DNA, 678 bp, Gossypium hirsutum
  Clone ID: GOSHI-09MAY01-C14296_1
tgcttgaaaatggcgaaaccatcgagagaagccatttccatggcttcaacctcgccgtcgtctctctctcctccgacggtacccatggagctccacgtatccaaccgtcaaaagctcctcaaatcccttcgccaacacctctccaactcctctcgcccccatcatggcttcgttctcctccagggtggcgaagagcaaacgcgctattgcaccgatcacatcgagctcttcaggcaagagagttacttcgcttacctgtttggtgtgagggagcctggtttctatggtgctattgacattgcaactgggaaatccattctttttgcgcctaggttaccagctaattatgctgtttggttgggggaaataaagccagtttcctactttcaggaaaggtatatggttagcatggtctactacactgatgagattgttcaactcttggttgaccaatacaagggatctggaaaacctttattgttcctcctacgtgggcttaacactgatagcaataatttctcaaaacctgccgagtttgagggaatagaaaattttgagagagatttgacaactctgcatcccgtattgaccgagtgccgagtttgcaagtcagatttggagcttgctcttatccaatttgcaaacaatataagttctgaagctcatgttgaggttata

SEQ ID NO: 12452 - DNA, 475 bp, Gossypium hirsutum
  Clone ID: LIB3582-008-P1-K1-D6
cgaaagtggcgaaaccatccagagaagccatttccatggcttcaacctccgcgctagatgtttctacttcaacggtgcgcgcggcgctccacgtgtccaaccgtcaaaagctcctcaaatcccttcgccaacacctatccaactcctctcgcccccatcatggcttcgttctcctccagggtggcgaagagcaaacgcgctattgcaccgatcacatcgagctcttcaggcaagagagttacttcgcttacctgattggtgtgagggagcctggtttctatggtgctattgacattgcaactgggaaatccattctttttgcgcctaggttaccagctgattatgctgtttggttgggggaaataaagccagttttctactttcaggaaaggtatatggttagcatggtctactacactgatgagagcgttcaactcttggttgaccaatacaagggatctggaaaacctttatt

SEQ ID NO: 12453 - DNA, 646 bp, Gossypium hirsutum
  Clone ID: GOSHI-09MAY01-C14236_1
cccacgcgtccgaaaaaaatgtccaaggaagtgactgaagaagggcagagccgaaaggactatgtagacccaccaccagcacagctggtggacattaacgagctcaagctctggtcattttacagagctctcatcgccgagttcatagccacactcctttttctctacgtcacaatagccaccgtaatcggccacaagaaacaacacgatgcgtgcaatggagttggtcttttaggcattgcatggtctttcggtgggatgatctttatcctcgtttattgcaccgccggtatctcaggtggtcacattaaccccgccgtgactttcgggttgtttttagcccgtaaagtgtcactaataagagctgttacttacatggtagctcaatgcctgggtgctatatgtggtggtgggctaggcaaagcttttatgaaccatgaatacaccaccctcggcggtggtgctaacaccgtggctacaggctataacaagggaaccgctttgggagctgagattattggtactttcatgcttgtttacactgtgttttcagctactgatcctaagagaaatgcccgtgattcccatgtccctgtgttggctccacttcctatagggtttgcaagtgtcatggttcatttggcta

SEQ ID NO: 12454 - DNA, 1191 bp, Gossypium hirsutum
  Clone ID: GOSHI-09MAY01-C15986_2
caagaagaaggtgaagaaaacaaatgtcccggtggcagagttggtctacggtgcaatgttgtctggtgaccttcaaaaagcagtcgagaaggagtttcgcccgcccgtccgagaccgggtgatggaagaaacaaaggataaaaagaatgctgtagaggcctatgtttatgacatgaggaataagctttgtgataaataccatgattttgtcactgcttcggataaggaagagttaatggctaagcttcaggagacagaggattggttatacgaagatggagaggatgaaactaaaggtgtttatattgccaagcttgaagagcttaagaagcaaggtgatcctattgaagaacgttacaaagagtattctgagaggggaactatcattgatcagcttgcttactgcattaacagttacagggaggccgccatgtcaaacgataccaaatttgatcacattgaacttgccgaaaagcagaaggttttgaatgagtgtgttgaagctgaggcctggctcagagagaaaaaacagcagcaggatcaacttcccaagtatgccacacctgttctcttgtcagctgatgtgaggaagaaggctgaagcacttgacaggttttgcaggccaataatgatgaaacctaaaccggctaaaccagccacgcctgaagcaccggcaaccccaccacatcctggaagtgaggctcaaccacagggtgcaaacagcccgaaagcaagccctaaccgcaatggtgaccccagtgaaaatgtgccggcaggaagtggtgaggcacctccagcatccgtagaaccaatggaaactgacaaagcggagactacgagtgccgcataaaagattagcagggtgagtcattttatgattttatatatatgcggccagaagttagttgttatgtataagcagttacaagcactattttctaaggagcctgagatgagatacccaactctatcttttggtaggctgataagaaaaggctgtgttgttttcgatttttaaaaagccttctctttgcagtgtctgctgagatttgtccccccccctcctcattattattaggagtgagttattagaatttggggggttcccaaggtggtttttttagtgggaggctgaaatttactctttaaaggtttttggaaggtttttaatcttttcacgtgacccctttc

SEQ ID NO: 12455 - DNA, 1093 bp, Gossypium hirsutum
  Clone ID: GOSHI-09MAY01-C15986_1
attaagggtcgaccgacgcgtgcgcccacgcgtccgcccacgcgtccggtttatgacatgaggaataagcttagtgataaatatcgtgatgttggtacggccccgggggcggacgcgtgggcggctaagcttcaggaaacagaggattggctatatgaagacggtgaggatgaaataaagggtgtttatgttgccaagcttgaagagcttaagaagcaaggggatcctatagaagaacgttacaaagagtatatggagaggggaactgtcattgatcaacttgcttactgtattaacagttacagggaggcagcaatgtcaaatgatcccaaatttgatcacattgaacttgctgaaaagcaaaaggtcttgaatgagtgtgtagaagccgaggcctggttgagagagaaaaagcagcagcaggatctacttcccaaatatgccactccagttctcttgtcagctgatgtgagaaagaaggctgaagcactagataggttttgcaggccaataatgacgaaacctaaaccaactaagccagcctcgcctgaaacacgagctaacccaccacctcagggggagggtcagtcccaaggagcggatgccaatgcaagccctaaccacaacaatgtgcctggtgaaaatgcaacggcaggcagtggtgaggcagctcctgcttctgcagaaccaatggaaactgacaaatctgaaactgcttcgactactgcataattcagtagcttggtggtctgttgatgatatatgtggccaaaatttccgttcctatgtacaaccgctattttcggaaccactattttaagaaaggcttgggttcggctgtgttattcgggtcataatttttagattgtaaaagccatctttttgcattgccttccgagatttgtctctattgaagaccgagggtttttcacaagacgttttaacacggaaaatataactgctattgtgaattccttgctaacctgtttttttgttagtgggaggctaaaaatttacacttcaaaatggtgcgactgataaatgtctacgtcgtgttgggatcactgaaattatcttttgggtatcgtccgac

SEQ ID NO: 12456 - DNA, 517 bp, Gossypium hirsutum
  Clone ID: LIB3584-018-P1-K1-G7
agaatttgcatgggattgtgtccgttgagtcagcaacactcttggaagaggaagaagttgaagttccagtttcaaaagagcctgaaaaagacaattcaaagatggagactgatgaatcacctagtggtactgctgctcccagtgccaatgagacagatgtcaacatgcaagatgctaagggtacagcagatgctgcaggggctgaaaatggtgttgctgagtctggtgacaagcctgtgaaaatggaaactgatactaaagttgaggctcccaagaagaaggtatagaaaacaaacgtaccagtggcagagctagtctatggtgcaatgttgcctgcagatgttcaaaaggcagtagagaaggagtttgaaatggctttgcaagacagggttatggaagaaaccaaggataaaaagaatgctgttgaggcctatgtttatgacatgaggaataagcttagtgataaatatcgtgattttgttactgctccggagaaagaagagtttactgctaagct

SEQ ID NO: 12457 - DNA, 605 bp, Gossypium hirsutum
  Clone ID: GOSHI-09MAY01-C15956_1
cggacgtgtgcaaaataagggaaatttagggttttatttgaattaggggaaaatggcgatgaggaaagtttacagcgagataaaagggatgaaattgaaggaagttcctggctacttcaagccgatgctatctatgggttacttgaagaaatctgttcagaggggtttggacaattaccatgctaagtacattgagactgattctatcgaacctctctaccatgtctgtttcggtgggatgatcttttcttaccttgttgctcttcccaacgagcgtcgccacctcgagcacaagcagcatgctgagcaacacggtcatcattaatcccatctagctttaaagatggttcggatcgttgttgtgcccttctcggttttatccagtaacaattcgatttgcttaatgctttttggttgtaatttgtgaacaatgtaggcagaggaagatgctgtcttgatcaaatgcaaaaataaaagagtacattttctttaaaataagtgaaagactattagactaccatggaaacccaatatgctgtttggtatggtatgtgttgctggtttctgttgatttgattaataagggtttgtttcatttttatttt

SEQ ID NO: 12458 - DNA, 450 bp, Gossypium hirsutum
  Clone ID: uC-gsflnu33B143h05b1
ctacgcgtccggaaattgaaagaagttcccggggacttcaagccgatgctttctgtggggtttgtgaagaaatctattcagaggggtttagacaattaccatgctaagtacattgagactgattccatcgaacctctttaccatatctgtttcggtgggatgatcttttcttatctcgtcgctcttcccaatgagcgtcgtcacctcgagcacaagcggcatgccgagcaacatggtcatcattaatcccattcagcttaaagatgggccgggttgggcttttctcgggttatggggtgaccatttggttgttattattttgtgaacattgtaggcaggatgatactgtcttgatcaatgcattgcagcattaagtaagaaaataaagatatcttttttgcttgtttttattaagctagaaaattaaggtatccttctgcttgtttttcc

SEQ ID NO: 12459 - DNA, 644 bp, Gossypium hirsutum
  Clone ID: GOSHI-09MAY01-C15926_2
attttctctgcttcatctaccactctcataaaagccaaaaaggggcgaagcatagagatatagataaagaaaacaaattttaatttgggttttgtttaattttttaataaattacaattttaatcaatagaaaagagagaaagaaacatttattttcgtttttgtgtgtgtttttgttaaatctccttgcttgcccgtcgtgtccctcttgagtcggtaaaattgtcaaaaagcatggctctttctggggttaaaaatgatagaggggaattgaggattcttgagaatttggatgagctaaggactgatttagctgactatattgctgagttatcagaagctgcagtgaaggagagaggtgtgtttgccatagcactgtctggtggttctctcattggcttaatggggaaactgtgtgaagcaccttataacaagactgtagactgggctaaatggtacatattttgggcagatgaacgcgttgttgcgaaaaaccactcagacagcaattataagcttgcaaaggatggcattctttccaaggtgccgattgttcccagccatgttcattctatcaatgattcggtttcagcagaggaggctgctgacgaatacatgtttgttattcggcagctagttaaaac

SEQ ID NO: 12460 - DNA, 827 bp, Gossypium hirsutum
  Clone ID: GOSHI-09MAY01-C15926_1
ccttcttcacctattccttgctttcgtgctaccatcttcttttttctttagttggtaaaatcgtcaaaagcatggctctttctgaggttaacaatgatagaggagaattgaggattctcgaaaatttggatgaactaaggacggatttggctgactatattgctgagttatcagaggctgctgtgaaggagcgaggcgtttttgccattgcattgtctggaggttctctcattgacttaatgggaaaactttgcgaagccccttataacaagacggtagactgggctaaatggtatatattttgggcggatgaacgtgtcgtagcaaaaaaccattctgatagtaattataagcttgcaaaagatggccttctttcaaaggtgcccattgttcctagccatgttcattctatcaatgattcagtttctgcagaggaagctgctgatgagtacatgtttgttatccggcagctggtgaaaacacgaatggttagtgtttccgacattagtgactgccccaagtttgaccttatccttcttggcatgggacccgatggtcacattgcctcgctattccctaatcatgcagcgctcgatgagactgacgaatgggtaactttcatcaccgattcccccaaacctccacctgagaggataacattcactttgcccgtcatcaattcagcatccaacgttgcaatggtcgtgacaggtgagagcaaagcagatgctgagcatttggcaattgacaacgtcgaacccaactgcccgtcacttgctgcacggttagtccaaccaacaaaagggaagttggtatgggttttggac

SEQ ID NO: 12461 - DNA, 632 bp, Gossypium hirsutum
  Clone ID: GOSHI-09MAY01-C15886_1
aaagaaactctgaaagccaaagggagggcgagagtagtggaaatagaaaggaaaaatgagcttaaaacatcaccataactccaactccgcagcagctgctcaatctctctcttttgatgacattgccgacttcttctctcttccccttgacgacgccgcttccactcttggcgtttgcacctctgttctcaagaaaatctgccgtgaaaatggtctcgacagatggcctcaccgcaagtttttagctggaaagagcgtcgaagaaatcaagaggcatgcagctagagaaagaagaagggaaatcgctgagctttcaaaggctcatcggcagagctctcaacctcaaccccaaaacaatgaacaacccaaattacaaggtggctcagcattaccgaacttacagcagcaagggataagaaacatacaaacagcgcaggccctgaattttagccatcaaagcttgatgacgggagcggcaatgtcagatgaatttaagtttggattcccatccgatggcttatcggtcactacaaacaaatggtggggcagtagcaagtctgactgtaatgaagtcagtgatgctgatggagctgaaactgagggagaagacaagcttcaaactattggagagc

SEQ ID NO: 12462 - DNA, 390 bp, Gossypium hirsutum
  Clone ID: LIB3165-034-P1-K4-G2
ccttttgggccgaggggtgggaatatagaagggaaatgtgccctaaaaacatcacaatacttccggctccgaaacagtgggggaatctttttctttggatgacattgccgacttcttctttcttcccctggacgacgccgcttccactctgggcgtttgcacctctgttctcaagaaaatctgccgtgaaaatggtctcgacagatggccttaccgcaagtttttagctggaaagagcgtcgaagaaatcaagaggcatgcatctagagaaagaagaagggaaatcgctgagctttcaaaggctcatcggcagagctctcaacctcaaccccaaaacaatgaacaacccaaattacaaggtggctcagcattaccgaacttacagcagca

SEQ ID NO: 12463 - DNA, 838 bp, Gossypium hirsutum
  Clone ID: GOSHI-09MAY01-C15816_1
gctttggcgcagccattttcgatctacctttcttctgatcgatcagtcaaaacatactcataaacaccataaagaacctcttcattgtcctcttcttcctttcatgaaactgtaagttaaataaaatcgaatcctcatggccctttcaatggcggtttcacggcttaggaacccagttctctcaagagccctcccatctctgttgagagctcgttttctatcttccttcgcctcacccacaccactttctcgcagttcaaatgtggaaaggcctttcaaggactgggatggatcttgcttaagaggtccaatgctttgtccaccataattggagtatacggtaattcatcaaagctcaagttgcagattggagttcgtcatttctcttcttcagaccttccggagcatacagtgctggggatgcctgctttgtctccaacaatgagccaaggtaacattgcaaaatggaagaagaaagaaggagataagattgaacctggtgatatactgtgtgaaatagagacagataaagcgacacttgagtttgaatgtcttgaagaagggtttttggccaagatactagtacctgaaggttcaaaagatgtgccctgtggggcaacccattgcatgtatggttgaggatgaagaaaatatcacgaagatcccttctacacttggggctggattcgatgttgaagaaaaaacagctcatcacgatgtcagaaactccgaaaaggaagatgaacccagttctactaacattaaagcatccgatcttcctccacacattgttattggaatgccagcactctctccccccaatgaatccgggtaactt

SEQ ID NO: 12464 - DNA, 486 bp, Gossypium hirsutum
  Clone ID: GOSHI-09MAY01-C15836_2
attgagctcatgtagctcgataatatcttgagccaagcttgagctttaaaaaatgatattcaattgggcttgatttgagtatcgagccccaagtttttaatcaagctcaagcttgccagtatttgtgctcgactcgattacacacctaataattagaaacttcgattggtagatagacatttttagaatcaggaatgccaatcaattaccttgtgcattcttgtagtccatgcttgctccacagtccatgagggcaaacgctatatcggttcgattgaataatgtcgccagatgcagtacagataatccttgcttgtcacggtaatttgcatctacaccctcacgtagaagccttttgactgacacttttcccaagagtagaggctcctcttcaatcaccaaatctagttcggttttcaatcatggtctggtgaccagctcgtgccggcatgtcctgcagatcgcacgtagttctcgtagttctag

SEQ ID NO: 12465 - DNA, 750 bp, Gossypium hirsutum
  Clone ID: GOSHI-09MAY01-C15836_1
ctaaaatcaatagaagcacctaaaaagaattcagcatctttatctgttttttgccgccggagtgagaaaaagggagatcggaaatgtcatcggagccgccaccttttcaggaagcacctcgctgcgacgtctgcaaatgcagcttcaacactttcaggcgccggcaccattgccgatgttgtggaaggacattatgccatgaacattcatctgatcaaatgcctttacctcaatttggcatactttcgtctgttcgagtttgtgcagattgttccaataactcttcaggatctgcaaaagctgaccctcagcctcctctaggcggagttggttctgctactgacgaagtcgctagattaaacattaacgcagatgtgggtgcacaaactgaagcaactgcaaagcaacagcctgttgtaagcattccaaaatgcaagtgtggaatgcctttgtgtatttgtgaaagtccagcaccgaaaacagatgcagttccacttacgatgaaaaaccctccatcctcagtggcttcgtcaaatccaaaaccaaaaaagactgacactgttcccaagagtagaggctccacttcaaactgtgaatctagttcgggtttcaatcctggtctggcgaccaatggtactgctgcagatgaatctcatacggattatgatgtcaatggagagggtttaagagaagctattaagaatggtgatacagctgcagtcaaaaggcttctaagtgagggtgtacatg

SEQ ID NO: 12466 - DNA, 430 bp, Gossypium hirsutum
  Clone ID: LIB3272-022-P1-K1-H4
ggcttctacgtgagggtgtagatgcaaattaccgtgacaagcaaggattatgtgtactgcatctggcgacattattcaatcgaaccgatatagtgtttgccctcatggactgtggagcaagcatggactacaagaatgcacaaggagaaacaccaatggattgtgcaccagtcactttgcaatacaagatgcaaacgaagctgaaagagggccgagcagcgtgaaatcaactagacaagagaatccgaaaccgatttcatacttcgacaaccgacatgctcgatctcgagttgtcagctttaacgagaaattattttatataatgcttgatcctgtcagcttagtgctggtactgttttgtattatagctggtagacaaaccgtcaaacagacttcaggacatagagtctcaatcaaaaatttttttttt

SEQ ID NO: 12467 - DNA, 685 bp, Gossypium hirsutum
  Clone ID: GOSHI-09MAY01-C15556_1
tttatatggagtggttctaaggtacatcatcatcatctgggtgaactccgataatctcatcccaatttcctccccagcatcactctgttttgtttcttggtcagtttccgttattaaacaatggaaaagattcagcacagccatgtccaagcgcgaggattaaagcttcacgtagcccaaagtggaacaggtcctaaggtggtgcttttcctgcatggcttcccggagatttggtattcatggaggcaccagatgattgctgtggctaatgctggtttccgagcaattgcttttgatttcaggggctacggactctccgaccacccaccggagcccgaaaaagctagtttcaaggaccttgtcgacgatgttgttgcccttcttgatttgttgggaatcaataaggtttttcttgttgggaaggattttggagcagtgcctgcatttatggtagctgttatccaccctgaaagggtgttaggtgtcataacactaggcattcctttccttatacctggtcctcttggtatccaacttgatctcctccccaaaggcttctacatattaagatgggcagaaccaggaagagctgaagcggatttcggccgatttgatgttaagaccgttgtaagaaacatttacattctcttctgcagaagtgagctacaagtagctggtgaaaacg

SEQ ID NO: 12468 - DNA, 632 bp, Gossypium hirsutum
  unsure (1)..(632): unsure at all n locations
  Clone ID: LIB3828-022-Q1-K6-A2
ctccgataatctcatcccaatttcctccccagcatcactctgttttgtttcttggtcagtttccgttattaaacaatgngaaaagattcagcacagccatgtccaagcgcgaggattaaagcttcacgtagcccaaagtggaacaggtttgaagtatactatataatataagattggttgatgttggttccattggaattaatgggataattaatggtgttgtgcaggtcctaaggtggtgcttttcctgcatggcttcccggagatttggtattcatggaggcaccagatgattgctgtggctaatgctggtttccgagcaattgcttttgatttcaggggctacggactctccgaccacccaccggagcccgaaaaagctagtttcaaggaccttgtcgacgatgttgttgcccttcttgatttgttgggaatcaataaggtttttcttgttgggaaggattttggagcagtgcctgcatttatggtagctgttatccaccctgaaagggtgttaggtgtcataacactaggcattcctttccttatacctggtcctgttggtatccaatttgatctcctccccaaaggcttctacatattaagatgggcagaaccaggaagagctgaag

SEQ ID NO: 12469 - DNA, 520 bp, Gossypium hirsutum
  unsure (1)..(520): unsure at all n locations
  Clone ID: LIB3584-010-P1-K1-G10
ccggttcgacccacgctnctcgataatctctcccaattcctgggggaggggggggggggtgtgtttcttggtcagtttccgttattaaacaatnggaaaagattcagcacagccatgtccaagcgcgaggattaaagcttcacgtagcccaaagtggaacaggtcctaaggtggtgcttttcctgcatggcttcccggggaggggggggggatggtttttttatatgattgctgtggctaatgctggtttccgagcaattgcttttgatttcaggggctacggactctccgaccacccaccggagcccgaaaagctagtttcaaggaccttgtcgacgatgttgttgcccttcttgatttgttgggaatcaataaggtttttcttgttgggaaggattttggagcagtgcctgcatttatggtagctgttatccaccctgaaagggtgttaggtgtcataacactaggcattcctttccttatacctggtcctgttggtatccaatttgatctcctcccc

SEQ ID NO: 12470 - DNA, 800 bp, Gossypium hirsutum
  Clone ID: GOSHI-09MAY01-C15566_2
caccggtcaataccatcacccatgaactcttgagcttcatcgccggcgataatgggaagtctagaaaggattaaaacttcagcatcccaccagaccagcagcgtcttatcttcgccggaaaacagctcgaggacggccgtaccttggccgattacaacattcagatggaatccaccctccaccttgtcttacgtcttcaagggggaatgcagatctcagtgttggtgctaccacaaacttacaggatgtcgaaaatgatatttttcccaataagaacgagtttgacgatggtgatattgatgatgagattgatccgacattgaaggaaaaaattgatagggaggtggaagattttgcccgtagattgaattcagattggccggaaagaatgcaagaaattctctctttaggccaagaaaagaaaccagtgcatttgtcacttaatggcaagggttcataaggagatatgcagatccggagcagaggtgattcacaatgaaggtatgcctgaaaatttttgatgagatgctttgcaggtggatgaaagatggcttctagaagggcattgtggatcctttgtgagtttttaatttcctttttaaagtttatttttctttgttgtgcttagtcaggctgcaattttgattctgagtgcaacttctttttactgtattttattcatatcatctttgtgtatattctcgtgttataatattactttaggtattatatattttattatagttttgagacattaataattggtattatatagattttgataaaaaaaaaaaaaaaag

SEQ ID NO: 12471 - DNA, 1165 bp, Gossypium hirsutum
  Clone ID: GOSHI-09MAY01-C15566_1
gttgaacagaaatgcgatgttctgtcccatgatatgtcatgaagtttacaaaaaggctgggatcctccaagaattatgctatatctcttccccagcaagtcaatcctgccatgttaagtctaatcctcgaatttgccggtttcatcaggtgcctggccgctcgaacaaggagcgcaaatcttttgatgagaagtttacccgaatggacacaaagaggctctgtgagttgacatctgctgctgacagccttcagttaaagcctctagttgatcttactagtcgtgcccttgcacgaattattgaagggaaagctcctgaggagatacgtgagatatttcatttgcctgatgatcttactgaggaagaaaagctggagcctctgaaaaatgccaccgatgacccacgcattcgactgttaaatagattgtatgcaaaaaagagaaaggaactaaaagagagggagaaactaaagaacgttgaggttgacgaagagcgtgttgatgatcgttcagttgatgacctcttgtcatttattaatggagatgatggagattctaaagggattaaaacttcaaagagtaaaaagaagaaccgaagaagaaaagatttgcagaagagcacgtctgctcatgaggccactaaaaaccataataaggagtccatggggcccctctctgcctgccgtagtgctgaagttcgtcagattctgcccggtgttggtgctaccccaaacttacaggatgtcgaagatgatatttttcccaataagaacgagtttgacgccggtgatattgatgatgagattgatccgccattgaaggaaaaaattgatagggaggtggaagattttgcccgtagattgaattcagattggccggaaagaatgcaagaaattctctctttgggccaagaaaagaaaccagggcatttgtcccttaatggcaagggttcataaggagatatgcaggtatgctgctctctcttttctttcgtaagttttagggtctatgttacttggatttaggtgtcagatacggatatttgtctgacccaagtatgttaaaaagttttgaagcttttccatgtatttgaagggcccatattcccgcccccattatcgaatatgtcagacagagatacttttagcaaaatgaaacgttggagc

SEQ ID NO: 12472 - DNA, 431 bp, Gossypium hirsutum
  Clone ID: GOSHI-09MAY01-C15456_1
cccacgcgtccgaaaaggttaaacaaccaaattcggccttccgaaagagttaaacccctaaaaacactttcttcttccatctctcttctcccttaaacaacaagcttaaccctagcaacaatggcatccatgctgcaaccccaaatcattcttttgaaagaagggacggacacatcacaggggaaggcgcagctcgtcagcaacataaacgcttgcaccgcagtggctgatgtggttagaacgaccctgggtcccaggggcatggacaagctcatccacgatgacaaaggaaatgtcaccatttccaacgatggcgccaccatcatgaagctcctcgatattgtccatcctgccgccaagatccttggcgatatcgccaagtctcaggactcagaggttggtgatggtactacatctggcgtactgctagc

SEQ ID NO: 12473 - DNA, 1938 bp, Gossypium hirsutum
  Clone ID: GOSHI-09MAY01-C15436_1
gtggaaaaagagaaagtaaaacagtccactcactccataaatctcttctttcttgcgactttctcgaacaagagaggaatctgtgaaatttttataggttttgggtaagatatggcgatgatgttgcagagaaaattgttgaggagaacctttggagaaggcaaagcaatactcaacttcaattctaaccctgtactttctccctgcacttccttctctaccgttacttccgctgccgctacaccattccacaatgcgccacgtcagcttccaccgttcgattaccagccgaaaccgtacaacggaccgtcggccgatcaaatccttgagaagcggaagaagttcttgggcccctctctcttctactactaccaaaagcctttgaatattgttgaaggaaaaatgcaatatttgtatgatgaaaacgggaggagatatttggatgcatttgctggaatcgtaacggtttcgtgtggtcattgccatccggaggttttgaatgcaataacagagcaaaataagctactccagcacgctaccactatttatctccatcatgcaatttctgattttgctgaagctttagcttccaaaatgcctggaaatctcaaggttgtatatttcgtgaattctgggagtgaggcaaatgagttagcaatgctgatggccagactgtactctggtaatcttggtatgatttccttgagaaatgcttatcatggtggaagttctagtactattggactcactgcactgaacacatggaagtacccaataccagagggtgaaatccatcatgttattaatccagatccttttcgtggagtgtttggctctgatgctactcgttatgccaaagatgtacaagatcacattgagtatggtacttcaggaaaagttgctgggttaatagcagaaaccattcagggagttggaggagcagttgaactagccccaggatatctgaaacaggtttatgacattgtacgcaaggctggcggtgtctgcattgccgatgaagtacaaacgggatttggtcgcacaggaagccattattggggttttgagactcaaggtgtcattcctgacatagttaccatggcaaagggtatcggcaatggattaccattaggtgcagtggtcactacaccagaaattgcacatgtgatggctcaaaaaattcagtttaacacttttggaggaaatcctgtatgttctgcaggtggacttgcagtgctcagagttatagacaaggagaagcgtcaagcacattgtgctgatgttggttctcacttgatcggacgcttgagatctttacaggacaaacatgatatcattggagatgtcagaggtagaggcttaatggtgggtgtggaacttgttaccgacaggaaggagaagacaccggccaaggcagaaactgccatcctgttcgagaaaatgagagaactcggagttttacttgggaaaggtgggctgcatggaaatgttttcagaataaagccgccaatgtgtttcaccaaagatgatgccgattatcttgttgatgctttggattatgcaatgtcagagttgtgagcaaaaggggttatctaacttgtggatcctttggcatcaaagttcagcaaaatcttgtgtttaatagtaataataaaagtacattttatttgcatttgtatttgtcaaaaaggatcatcaaaatcccttttataatgtgaaatatgttccactgtgtttgcatttgttgattggattcatcgaaaataagcatagttagaggtgggaaacggcaacgccccctgggtatgggttggagcattgtgagttcaggttcatgaagtatataatcattttaacaagctattctagattttatgaacgggctttttgaatttgttaagttcaggggttttgagttggagtttgggttcattatat

SEQ ID NO: 12474 - DNA, 339 bp, Gossypium hirsutum
  unsure (1)..(339): unsure at all n locations
  Clone ID: LIB3145-019-Q1-K1-F3
cggacgcgtgggcggacgcgtgggcggacgcgtgggcggacgcgtgggcggacgcgtgggccgccaatgtgtttcaccaaagatgatgccgattatcttgttgatgctttggattatgcaatgtcagagttgtgagcaaaaggggttatctaacttgtggatcctttggcatcaaagttcagcaaaatcttgtgtttaatagtaataataaaagtacattttatttgcatttgtatttgtcaaaaaggatcatcaaaatcccttttataatgtgaaatatgttccactgtgtttgcatttgttnaaaaaaaaaaaaaaataaaaaaaaaaaaacataaa

SEQ ID NO: 12475 - DNA, 328 bp, Gossypium hirsutum
  Clone ID: uC-gsronu33B055a08b1
gttatgcgtacgacatggcgacgatgtgaccgaggaaagaggagaggagaacctaggtagagtgcagagcaatgctgaacttaaattctaagcctctactatgtccatgcacttacttctgtaccgcaactgacgctgcctctgcatcattcgacaaagcgcctcgtcagcttcaaccgttggattaccaggcgaaaccgtacaacggaccggcggacgatcaaatacttgagaagcggaagaagatgatgggcccatttctgttatactactaccaaaagactttgaatattgttgaaggaaaaatgcaatatttgtatgatgaaaa

SEQ ID NO: 12476 - DNA, 722 bp, Gossypium hirsutum
  Clone ID: GOSHI-09MAY01-C15796_1
aagaaaatggagcagtggtggtggtatctttggtttacaatcatctctttgtttggtgcaagtttggggaactggattcacaggtggaggaaccctaaatgcaacggcaaactccctccaggttccatgggactcccacttataggagagacccttagtttttttgtcacttccaactccattgacatccatccttttgtcgctcaaagaatgaaaaggtatggttcattgttcaagacgagtttagcagggagaccagtggtggtatcattagatccagatttcaactatttcgtgctgcaacaagaggacaaacttgtcgaactatattacatggattccctggccaagttggttcaccaagacgacatgaaaaacataggtggcgacttccacaagtatttcaagcgcgtcatcctcagtcacttcggacatgagcctctgaaacacaagctcttgtctcagtttgaggatgtcataaaccatgaattgcaggactggagcaagctgcctcaggttgatcttaaacaccaaactgcttctatgttatttaacacggcctcaaagattctgatgagctgtgtaccagaagaaaatttaggtcatgatttgagcgacatcttgcaaggacttatgacatttcccgtatattttcctgggaccgctttctacaaatgtttaaagaagaaagaaaagcattgaagctgacgagtggggtgcta

SEQ ID NO: 12477 - DNA, 416 bp, Gossypium hirsutum
  Clone ID: GOSHI-09MAY01-C15756_1
tcggagcaaaacgaaccaagatggaaggcttaggcgtaaagctcccttcttttccatttctaagccctaatatttcatcatcatcttcttcttcgacttttcggcttggtttccgccgcttatccgcttcgacttcagccgccgttaaagaaggttccggctcattaggccaattaacccgacccgacttccccatactccatcaggaagtaaaccggtcgaagcttgtttattcagataatgcggcaacctcccagaaaccaacggcagtgtctaaatctctgcagaattattatgtagcttacaattcaaatgctcatagaggaatccactacttgagtgccaaggcaactgatgaatatgagttggcacgcaagaatgtggcagcttttattaatgcatcagattctgctgag

SEQ ID NO: 12478 - DNA, 1013 bp, Gossypium hirsutum
  Clone ID: GOSHI-09MAY01-C15766_1
gttgctccttggcctgctcgtttgcaaaccccacccgatcggctgcaaagcatacatatggaatcctacatagctagaaaagaactcttcaaggctgactcaaaatactggaatgaaatattggcaagctatgttcgtgctctacattggaagaagtataaactaagaaatgtaatggacatgagagctggctttggaggatttgctgcagcaatgattgacaatcaactcgatgcttgtgttctaaatgtagtccccggtcgcgggcccggtcccgtgcccggacgcgtgggatcgtcgattaataggggtcatgcatgactggtgtgagtcgtttgatacatacccacggacctatgacttattgcatgcagctggcctcttctcggttgagaggaaaagatgcaatatgtctaccatcatgcttgaaatggaccggatattacgacccggtggacgagtatacatccgcgattctcttgatgttatggatgaacttcaagatatcgcaaaagccatgggttggcatcctactctacgcgatacgtccgagggtcctcatgcaagttacaggatcttggtatgtgacaagcgcctactccgcagttgaaccaacagaactaaagactcgaaggccgaaacctcaccccttccgcaaattgaagacagctaaagcaagccttgcaaatgattgtttccaaataaaatacaagtcgtcaattacaagtgtcttaatatcatccagtcgtcggaccggaggaggatggaggaggacatcagacacattgaggttcttagagaagatctgatttcttcagccaaaatgcagcccggggtggtgttttacagttcctttggaacttaattctaccatatatatatatgcatcttttcttttaaaattgttttctcagggtaggggtaggatcattgttttttaatttattttatttcattggttagatacagtcaaaaaatatttatttgttaagttaaaatcatctttgagttcc

SEQ ID NO: 12479 - DNA, 1123 bp, Gossypium hirsutum
  Clone ID: GOSHI-09MAY01-C15716_1
aaaaatataaaataaaataaaataaaagacgctagggatctcgatctcgatctcgatcccgatcccaatctcattctctccggcgacacctttctctaaccgtttccggtgagatctcgaggttggatccgatctcgacccgattcatagtgtctctttgacctagatccgaaccaccatggctccagtttcggctttggccaaatacaagcttgttttcttgggagatcaatctgtcgggaaaaccagtatcatcactcgctttatgtacgataaattcgataatacttaccaggctaccattggtattgactttctatcgaaaacaatgtacctcgaagatcggacagttcggttgcagctctgggatactgctggacaggaaagattcaggagtcttattccaagttacattagggattcctccgtggcagtcatcgtctatgatgttgccagtaggcagtccttccaaaatactacaaaatggattgaagaggtacgaaccgagcgcggtagtgatgttattattgtgcttgttgggaacaaaactgatcttgtggacaaaaggcaagtctcagttgaggaagccgaagccaaggctcgtgacctcaacgtaatgtttattgaaactagtgccaaggctggcttcaatatcaaggctctttttcggaagatcgcagccgctttacctggaatggaaacactttcatcaacaaaacaagaagacatggtcgacgtcaatcttaagtctacaaacgcaaattcatctcagtcgcagcaagaagccggaggatgtgcctgctgaggatacatacatacattacactcactcacacacatcatttgatccgaggtatgtatggttttctcaacatttagtgttttctgtaaaaaggaaaaaaagaaatctgttctctcccaccccctttttggtagcattgggcatatttggatttgatggaatgttttgaagcataaaagttgcttgagagagaaggttcttaaattttaccaatggtagttaggctcgtcctaacctgtcctatatgtgtacgggtcttgacaattgtgccaaatttgatgttactcgtatatttcagttttgtggctttttactttgttt

SEQ ID NO: 12480 - DNA, 1542 bp, Gossypium hirsutum
  Clone ID: GOSHI-09MAY01-C15736_1
aaacagcaaagcatcgattttcccacgcgcccggttctcagaaaaactaaaaagaaaagaaaagaatttagggcttagggtggcgaatttttagacaatggagagtgcattagcaaacgccttggcggtcgtagaccagaggcaaaaaatcgagcaatacaaacacattttatcaactgttttctcgtcaaacgacatagttcaagccaataaattcattgatcatatgttatcggacgatgtcccgctgatggtttcgaggcagcttttacaaactttcgcacatgaattagagagactgaagccagatgctcaaaaggaaatttcccattatacacttgatcagattcagcctcgtgtcgtttcattcgaagaacaggtattgtttattagagagaaacttgctgagttgtatgaatctgagcagcagtggtcaaaagcagcgcagatgctaagtgggattgatttagattctggaatgagggttattgatgacacattcagattgtcaaaatgtgtccaaattgcccgtctctatcttgaggatgatgatgctgttaatgcagaagcttttattaataaagcttcattcttggttagcaacagtcagcatgaagttttgattttacaatacaaggtatgttatgcaaggattttggatttgaagaggaagttcttggaagcagcattgcgatactatgacatatctcaaattgagaagcgacaaataggagacgaaacaattgacgaggatgctctggagcaagctctatctgctgctgttacatgtacaatattagctggtgcaggtcctcagcgttctcgtgttcttgccacactttacaaagatgaacgttgctccaagctgaagatttatccaatattacaaaaggtttatttggagagaatattaagaaaacctgaaattgatgcattttctgaagaactgaaaccacatcagaaagcactgcttcctgataattatactgtgctggaccgtgccataatagagcataatcttctgagtgctagcaaactgtacacaaatatacgttttgatgagttgggtactttgctgggcattcctcctcataaggctgagaagatagcctcaagaatgatttgtgaagatagaatgaggggatcaatcgaccaggtggaagctgttatacagtttgaagatgacactgaagaactccaacaatgggatcaacagatagttggtgtgtgtcaagctcttaacgatatacttgatagcatggccaagaagggcatggaagttcccatctaatcctgaccagtcggtgcactgttcgagagcaaagaaacttagaagagaatttgccttagccatttcgcccagatgcataaaagaacactgttcaaccattcttgtttattgcatattttagttctcgagatttagttttgtaactgcaatattgtctgttaggcaggaagatatgggattctggatcaaatttaaaatcctgtaattattttcttttaattttttcagtttattaggaaaggtgtttcatt

SEQ ID NO: 12481 - DNA, 431 bp, Gossypium hirsutum
  Clone ID: GOSHI-09MAY01-C15616_1
ctgacgcgtgggttggtagagcacctcgtttacgacgtgcgccaatgtttttcagggaagtctatcatgcaatcaaaagaattgatctttttgagaaatcgatgtcttactccattactttgaaggaacacaacaagagaacaattgcctgtcaaatgggtcggtccgattcgggtgccgtttaggcaagatccgaatcgaacccatcattgatttgagatattgattgggtgaataccccggctattcaatgctaggcataatgagtataaggacctcaaaaatgctcttttcgtcctatgaatcttaagggggttgaagtttcatgtgtggtttttttattaggagggggagactccctttaacttaggttggtctaagccagaagcagacctacgttaagatatcctctcccttttttaaacacttgg

SEQ ID NO: 12482 - DNA, 682 bp, Gossypium hirsutum
  Clone ID: GOSHI-09MAY01-C15166_1
tttgtgctctggccgatgttgttagcatgcgctttatagatgggaatgaagggtcaactggtctaatgggaattgactactctacagctttctggctttacaaagagacgggctatagggcttatcgagttgattacatagaagatctcacaaatccatttgtgtccatgtattttggagcggcgtatttagcttggttatcagagtatgaagggagggaaaggagtctgcaattcatctttcatgcttatatttctggaccaaaaaatgtacatctcgaagaaacgtgtccggagtggctaaagtttgagcaaattttggcccgttatgaacgcacaaaaagccgtgaagggagctgcaacatcatttaacctgatagatatcagtggttcaccatcttttagatggttctcccatgaagttgtgctggatgcacacaatggaaaccattttttaatgctaatttcactgtaagatttgaagaaaaaggggcgtctttttctgtctttttttaggttctttttaagatatctgtgtaaattgaacaagtgtacggctgtctctgtcatgtactaatagaacaaataactagaaagcgtctggtggcttttcacaataccggatgcaatcaaataaataataataatttgaaaaggtttagattatgctattaatccctgca

SEQ ID NO: 12483 - DNA, 645 bp, Gossypium hirsutum
  Clone ID: GOSHI-09MAY01-C15116_1
cttgatctctccttcaatgggttgtcaaggaatattcctaaagagatgggaaattggtcaagtttggagggtctcaatctcaatgacggtgggtttgaagctcaaatccctaaagaactaggcaccctttcttttttgacaactctgaacatatacaacaacagattatcagggcctttccctgatgagattgggaacctttcttctttggcacaattgcttgcatatagcaacaatatcagtggatccttgccaagctctcttgggaacctcaagagactaacaagtttccgagcagggcagaacttgttgactggaggtttaccttcaattataggttcatgtgagagcttggagtatcttggtcttgctcaaaatgcactgaccggcgagctaccgaaagagatcggaaagcttaagaacttgaaagagttaatcctttgggagaatcaactctctgggttaattcctgtggagcttagcaattgtacaaacttgagtattcttgctttgtatgacaacaagtttgttggaagggtgcccaaagagcttgggaaccttataaatctcacaaagttgtacctgtacagaaaccaattgaatggaacaatcccaaagagattgggaatctttcatttgcagaac

SEQ ID NO: 12484 - DNA, 629 bp, Gossypium hirsutum
  Clone ID: GOSHI-09MAY01-C15076_1
acctacgcgtaaccaaaccatccagaaaaagacctaaaacggtatcaatgttagcttgagtctggcttcacttcacactctcactgactaactcccttctctcaaacccaaaacaatcagacagacagcctgtaatggacacaacttcaaattcaaaacacaggccattttcgattaaactatggccccctagtgaaagcactcgactggtacttgtgcaacgcttgacgaacaatctctccagtaattctatttttacccagaagtatggtgctcttaacaaagaagatgccgaggagaatgctaagaaaattgaggatatagctttcaacgtggcaaatgaacagtatgatagggagcctgatggtgatggaggtgctgcagtgcagctttatgccaaggaatgtagcaagcttttgttggaggttcttaaaagagggcctgaggaaaaggagaaggaattggcatctcagaacaatgcttccgctgaaaccttctttgacatatctaaaggccaacgggcttttatcaaggcagaggaggctgagaatcttctaaggcctttgaaagaaccgggaaattcttacaccaagatatgctttagtaatagaagctttggtttaaaagct

SEQ ID NO: 12485 - DNA, 442 bp, Gossypium hirsutum
  Clone ID: LIB3189-051-P1-K1-G11
cggacgcgtgggcggacgcgtgggcggacagcgtgggttctagatcagcgagcggccagccctatgtggaggttatattcattttatacatgtgtactaattactcattaaatattcaaggaaacaaatccagacatgaatttacttacacataatttgcagggacaaccaatccaatccaatccaatgctagtttaccaaagaaaaagtcaacaatcttttgatgtgtttttactttctaacctcgaataaatggctacaatggcccgggattggccttccgtcctaatattatggaatcagaatgtgattagatcatatttagatgcttggtgtttctttaaattttgccccctttcagatgaacccccaccttctttaccaaaaaaaattttattcagatcatccatcatgtcataattgctttcgccatgtagttcca

SEQ ID NO: 12486 - DNA, 427 bp, Gossypium hirsutum
  Clone ID: LIB3189-051-P1-K1-G6
aatgttaattgaatgcagcagatatcaagtcatggatatgagagccatcccatccatgtatactctctactcatcaaatattcaagtaaacaaatccagacatgaatttacttacacataatttgcagggacaaccaatccaatccaatccaatcctagtataccaaagaaaaagtcaacaatcttctcatgtgtttttacttcctaacctcgaataaatggctacaatggcccggcataggccttccgtcctaatattatggaatcagaatgtgattagatcatctttagatgcttgctgcttctttaaatcttgccccctttcagatgaacccccacctttcttaccaaaaatcatttcatccagatcatccatcatgtcatcattgcttccgccatgtgttccatgtcgagtacttgttttcct

SEQ ID NO: 12487 - DNA, 528 bp, Gossypium hirsutum
  Clone ID: GOSHI-09MAY01-C15016_1
ggaaactagaattcatcagtaaggatcattcaaaaaatacaatattttatctcaatgttgaaggagtgggcctccatagcaagcgcaaaagctggagttttgaaagaagggctgcatcgagcacaaggggatcggtacaagaattgcagcaaagcacagcaggatttagctcggcccttaaagaaggcgcagaacgggtggccggtgattgtcgggaaggggttgggaaactcactcagaggttcagaacataagtctctccacctgtgatttatgttttggcctttcttgggcacggaaataaagaaattttgcagtcgagaggcatgtaattcatctcatctctgatcaatatgcattagaatgagtgtaccatgttaatcatttgtcatttaaatgatgtgtaaaagaaaataataagcaatgaaaattgctacttatggatttggtcctaaatagcacccgacaaggttcttgttggacatttaatcatatcttgaaatctttaaaaacataatttgatgaatt

SEQ ID NO: 12488 - DNA, 865 bp, Gossypium hirsutum
  Clone ID: GOSHI-09MAY01-C15296_3
ccataatccctcagctgctatcttattttttcccttccatttttttttttgtaacaattgaatttttggttgagaaaattttagggttagggttttgagagatgggacaacagtcgttgatctacagctttgtggctcgaggcacggtgatcctcgccgagtacaccgagttctccggtaatttcaacaccatcgccgctcaatgtctccagaagctccctgcctccagcaacaggtttacttataattgcgatggccacaccttcaattacctcgttgacaatggattcacctactgtgtattgcaacggaatccgcgggcaggcaaattccaattgcatttctagaaagagttaaggaagacttctcgaaaagatatgggggatggaaggctgctaatgctaaagccaagagtcttaataaaaacgtcgggtccaaattgaaggagcatatgaagtattttgtggaacatcctgaagagatcagcaaacttgccaaagtgaaggcccaagtttctgaagtcaagggtgttatgatggaaaatattgacaaggtcacttgaccgtggtgagaagattgagttgctggtggataaaactgagaaccttcgttcacacgttactcttattcaaactgcatttcattggttgcatttcggggaaagtgtttccttaccaaacttgggttcttttttttctttttcaaaatgatttaattttcctcaatgtaaaattccaattatacctcttatgctgttgcactgtatgatgcattttaagtggatgtacaatgatgctgcattccagcacaagattttaggcagcagggaactaagataaaaagaaagatgtggattgagaacatg

SEQ ID NO: 12489 - DNA, 547 bp, Gossypium hirsutum
  Clone ID: GOSHI-09MAY01-C15296_2
cggacgcgtgggcggacgcgtgggcggacgcgtgggttcagctttgaaatatttcctccacctccactcctctcctatcccattttatttctaaatatgtaactttttaattttaattttaattgcagaaaatatttagtactcacaaaattaactacatttaccgcaatttcagcatttcgtcgttaatcctattttcttgtccgatcccatcccatccacactcttcgctctctttcctttaatctgttttcattttctgtcatttgcaaattgaatttttggttcttgaattctaggtttagggttttgagagatggggcaacagacgttgatctacagctttgtggctcgtggcacggtgatcctcgctgagtataccgagttcaccggtaacttcacaagcattgccggtcaatgtctccagaagctccctacttccaacaacaaatttacctacaattgcgatggccacaccttcaattacctcgttgagaatggattcagtatgaatgtctttttttttttccttttcatcttttggtta

SEQ ID NO: 12490 - DNA, 776 bp, Gossypium hirsutum
  Clone ID: GOSHI-09MAY01-C15296_1
catcgaccctccgaagttctctcgctttcagggttcaacctttgcggatttgaatctttgggggttgtcgtatggttttgagagatggggcaacagtctttgatctacagcttcgtggcgcgtggaactgtgatactcgccgagtacaccgagttcaccggtaatttcaccggtatcgccgctcaatgtctccagaaactccctgcttctaacaacaagttcacctatacctgcgatggccataccttcaattacctcgttgaagatggattcacctactgtgtagttgctgttgaatctgctggcaggcaagttccaattgcatttctggaaagagttaaggaagacttcaacaagagatatggtggaggaaaggctgcaactgctacggccaaaagtctgaatagagaatttgggtccaaattgaaggagcatatgcagtactgtgtggaccatcctgaagaaatcagcaaacttgctaaagtgaaggctcaggtttctgaagtcaagggtgttatgatggaaaacatcgagaaggtccttgaccgtggtgagaagattgagttgctggtggataaaactgagaaccttcgctcacaggcccaagattttaggcagcagggaacaaagatgagaagaaagatgtggcttcagaatatgaagaataaaattgatcgttctgggtatcctgattgccttgattcttatcattgtgctgtctgtctgccatggcttccattggttaaatctgtcttgcatttcctttgttctgcttt

SEQ ID NO: 12491 - DNA, 483 bp, Gossypium hirsutum
  unsure (1)..(483): unsure at all n locations
  Clone ID: uC-gsronu33B050d03b1
tntatttttatgccgactcgagtcgtgtcgcgtgggggggtgttaaatgtttgttggtttcgggttctgatttcggttggagaaaatatttagtactcacaaaattaactacatttaccgcaatttcagcatttcgtcgttaatcctattttcttgtccgatcccatcccatccacactcttcgctctctttcctttaatctgttttcattgntctggcatttgcaaattgaatttttggttcttgaattctaggtttagggttttgagagatggggcaacagacgttgatctacagnttttgtggtttggggtacggtgatcctcgctgagtataccgagttcaccggtaacttcacaagcattgccggtcaatgtcttcagaagcttcctacttgcaaaagcaaatttacctacaattgcgatgggcacacctttattacctcggtgagaatggtttcagtatgaatggcttttttttttc

SEQ ID NO: 12492 - DNA, 536 bp, Gossypium hirsutum
  Clone ID: GOSHI-09MAY01-C15276_1
taacaacccgtttttggtcattttaattagtaatcctttctgtccgttgggtcattttacgtacgggctagtcttttattagaaattcttcctctcagttctttcagggccatttccttcgccctttcttgttagtgttgggcatctccctctcgtcctatggtggtaagttcaccgtcaagtcttggaagttaaggttttgctcaaatcagaacagtggtttcgaaactataaatatgaagtagaaatatttattttatttctatttttaaggtttacaacatgatagaataattgtgtgaaaattttgttaataaattttattgattgagtgctcaatttgactagaaggactaaattgtgataggtgtcaaacttgatttctataagttaaggtgtctaattgctatgaaattttaaattggaggtccttaaatgataattagaccattatacattaggatggacaaaaatagacatgggtagatgtcttctcaatgttttaactaaataaaatattcatctttctaatttca

SEQ ID NO: 12493 - DNA, 580 bp, Gossypium hirsutum
  unsure (1)..(580): unsure at all n locations
  Clone ID: LIB3543-032-Q1-K1-C11
gcaagaattgtttggtccttgntatctgctgttggcatattttgtcttggttctggtgctacaattgttcatggagttcaaaacctatggatagcacatcccccagataatattgagtatgcagctttggtgataggcggctcatttataattgaaggtgcttctcttgttgttgccatacaagctgtcaagaaaggtgcagcaacagaggggatgaaagtgaaggactatgtctggcgtggccatgatcctacatctgttgcagtcatgacagaggtaattctctgtgtacctatttacacttttggttattaaagaactgaacttgttaaatgtgatgttgggatttgagaaattcggatccgtattaaagagttaggatgaaatattcagttgctataacagtaagatgggagatgatattatattttagattagtttatttgccgtgtagagtacttatgcttgaaactgttaaagctatggatagatctattaatttagtgaagagaagagcctgagtttgatcaatgtaccattagctaatttaagtgttcaatttaacatgcctgccccttca

SEQ ID NO: 12494 - DNA, 435 bp, Gossypium hirsutum
  Clone ID: LIB3197-033-Q1-M1-G9
gttggcatattctgtcttggttctggtgctacaattgttcatggagttcaaaacctatggatagcacatcccccggataatattgagtatgcagctttggtgataggcggctcatttataattgaaggtgcttctcttgttgttgccattcaagctgtcaagaaaggtgcagcaacggaggggatgaaagtgaaggactatgtctggcgtggccatgatcctacatctgttgcagtcatgacagaggatggcgctgcagtaactggcctggctatagctgcagcatcactggttgcagtgaagacaactgggaatgccatgtatgatcccataagttccattatagttggcaaccttcttggaatggtcgcaatatttctcatccagcgcaaccggcatgccttgatagggagagcaattgatgaacatgatatg

SEQ ID NO: 12495 - DNA, 1345 bp, Gossypium hirsutum
  Clone ID: GOSHI-09MAY01-C16976_1
aattttgggaagaagaaatcaggctattttggtcccaaaatttgaaaatgtattcggcgtgtgtgttgaatagcaattcagtgccctcactactgaatacctattacaggaggtgagggaatatggctgtaatagttaaactgcagaatcacctaaacggtgaaccaaacgtatgaatcactgtagcgcgcggaataaggcaggaatagcatagcaattccatccaaccaaacatactgttattctctgttgtttttccattctttgatctctgttaatcctctctttcgttttctttattctctctcccttcctttcttgtcctttcgtaacaaaccccaggcactgccgcgccatcaacaccttccggcgtcttacctccgatcaaagcgcagcttccttcccattattcgaaatttgaatcctcaaatctatctcttctatccatagcaccccatttattcgccgactccctctctctctctctctctgtctgtttgaatttcttcctctcattttttctagttttgggtcaccgaatgccaaaaaaaaacacggaaagacgctacactaggttttctttgccgtttctggtttttgtgattttttggaattccctgcttcatcggtgactgatttcagatatatttatttatcactcgaagcaaagcaaaagggaaagtaggtgggtttttaggatatgataaatggttggtcctgctttatgggagattgatttgaggtgtagaagccactgtttctttctacttccgtgggaatgggaaacccgaagtctgacgttcctgtttttatttatttatttaaattttcgtaaccactgcttgatcactgatttcagctttgaatgttaatttcaacaattgtcttcatttttcatctctgctttgttgtctggcatatatagctctgtgggtttgcgggtttttggttcgtttttgtgttcttttgtcgttgccgctggggccttgtgctgagggccgtagtcaatcagcttgggctagtaggcctctgttttgggttgaaattcctatccttgaattgggctgtttggagataggtcaaattggaacagaccgtaatatcagtgatttcaggtatgaatcgttaaatcctcttcttcattggagagtcatttcaggtatgaatctttagttttcctctgttttggccctttcagtctttttttgtttcaaatctatgcttctctacttgtattatgtacacgcctctggacatgtttttttggttttctagattgattggttcccctgatcttgtattatatatattaattcgaaatctgaaactgcttttatgttttttg

SEQ ID NO: 12496 - DNA, 351 bp, Gossypium hirsutum
  unsure (1)..(351): unsure at all n locations
  Clone ID: LIB3197-034-Q1-M1-B1
acgaaatttatttcccctattcttctctgttgtttttccattctttgatctctgttaattcgctctttcgttttctttattctctttcccttcctttcttgtcctttcgtaacaaaccccagacactgccgcgccatcaacaccttccggcgtcttacctccgatcaaagttttgggtgcacagaaagacgctacactaggttttctctgcccgttctggtttttgtgattntttgaatttctctgcttcatcggtgactgatttcagtccagatagcctactggtctcgtggataaaaactgcttctggatatgtagactctctgtcataatactgtttagtagatcgtc

SEQ ID NO: 12497 - DNA, 913 bp, Gossypium hirsutum
  Clone ID: GOSHI-09MAY01-C16796_1
ttgaattcagacctcattggttttcatacttttgattatgctcggcattttctgtcttgctgtagtcgaatgttaggtttagagtatcagtcaaagagaggttatattggactggagtactatggaaggacaattggtataaaaatcatgcctgttggaatccacatggctcagattgagtctgtattgagacttgcggataaggagtggagagtaggggagcttaaacaacaagttgagggaaagactgtattgcttggagtcgatgatatggatgtctttaagggtgtcaacttgaagctgctggcaatggagcagatgctggaacagcacccgaagtggcaggggagagcagttttggtacagatcgcaaacccagccaggggtagagggcaagatcttgaggagattcaggctgaaataacagcaagctgtaagagaatcaatgagacttttgggcagcctggttatgaacccattgtcttcattgataggccggtatccctgtgtgaaagggttgcgtactacactgtagccgagtgcgttgtagtcacagctgtgagggatggaatgaatcttactccttacgagtacattgtgggccggcagggagtgtctgaatcagtgtcttcctcagaatcaagtgggcccaagaagagcatgctagttgtgtcggagttcattggttgctccccttcactcagtggtgcaattcgggtaaatccttggaataccgaatcaactgccgaggcaatgaatgaggcaatctctatggctgatgctgagaagcagctgcgccacgagaagcattataggtacgttagctcacatgatgtggcattctggtcccggagcttcttccaagatatggaaaggacatgtaaagaccacttcaggagacgttgttggggaa

SEQ ID NO: 12498 - DNA, 981 bp, Gossypium hirsutum
  Clone ID: GOSHI-09MAY01-C16646_1
cccacgcgtccgaccggattgaggtggtggacaagtctgccaactattactattacttaaaattcagttcccaagacaatgataaaccctagctagtgagtagccaccaccaagcttaaaaacagacctcacaaaagtcggaattggtttgttggtaggattgattgactactactctgcagatttcgtcccatttgcagagtgaggctgagatttagggtttagcagaagtctgtaaatggaagaaatcacccaaggtgtcaacaacatcaacttggtcgccgattcccacaagaagaatcggattcaagtctcgaataccaagaagcccttgtttttctacgttaatcttgccaagaggtatatgcagcagcacaatgaggtggagttgtctgcccttggcatggctattgcaactgttgtcacaattgcagaaattctgaaaaacaacggtttagctgttgagaagaagatcacaacctcaacagttgacatgaaggaggactcaagagggcgaccagtccaaaaagcaaagattgagatattgttggggaagacagaaaactttgatgaattaatggcagcttctgctgaagaaagagagattgtggatggagaagtgcagggttgaaacttgaagaagtttgtttgttagtttgtggtggtcagttcttattgtcactgtatggttaaatgttaaggcaattttggtttcttacacattgtaggtgttgagttatcttggtttgtttcaaatgttcaatttttttatctgattaatttttggcttccaaaaaaaaaaaaataaaaaaaaattatattttaaacaaatgaattattaacaaaaaattaaaaaataagtcgcccttacaaaaaaataaaaaaaccttgaatggaaaaagaaaaaaaaccattaaggggggggtcttttaaaaaaatcaaaatttttttacccggttttttgaaaagtaaatttttttt

SEQ ID NO: 12499 - DNA, 502 bp, Gossypium hirsutum
  Clone ID: GOSHI-09MAY01-C16166_3
cccacgcgtccgagaaaaacctaaggcagagcaaatttgataaaagaaaaatctaaaaaataccccaaaaaaataggaaaaaaaaagtttacattgagagatggtgagcaaaacagaggagacccaattgaataggcttgaaaaccaggtagataatggaggaggaggtgcttgggagtacctttgccttgtgagaaagctcaaagttaggcgttcagagaaagtcttgaaatatggtttatccatcttaaatgatcccaagaaaagatctgctcttggccctgaagaatggactttgtatgagcaggtagctattgctgctatggattgccaatgtctcaacgttgcaaaggattgtataaaggctttactgaaaaaatttcctgagagcaaaagggttggcaggctggagggcatgttgcttgaagcaaagggatcgtgggctgaagctgaaaaagcttactcaagtcttttagaggacaatccacttgttcaagtaatt

SEQ ID NO: 12500 - DNA, 1144 bp, Gossypium hirsutum
  Clone ID: GOSHI-09MAY01-C16166_1
caggccagtggcgatagactagagaaaaaccaaaggcagagcaaatttgataaaagaaaaatctaaaaaataccccccaaaaaagggaaaaaaaacgtttacattgagagatcggaccggtgtgtccgggcgggacccacccatccggtgagtaaaacagaggagacccaattgaacaggcttgaaaaccaggtagacaatggaggaggaggtgcttgggagtatctttgccttgtcaggaagctcaaagttaggcgttcagagaaagtcttgaagtatggcttatcgatcttaaacgaccccaaaaaacgatctgctcttggccctgaagaatggactctatatgagcagctagctattgctgctatggattgccaatgtctcgatgttgcaaaggattgcataaaggttttgcacaagaaatttccggagagcaaaagggttggcaggctggattgcatgttgcttgaagcaaagggatcctgggctgaggcagaaaaagcttactcaagccttttagaggacaatccacttgatcaagtaatacataagaggaaagtagccatggcaaaggctcaaggaaatatttcaggggctattgagtcgcttaataaatatcttgaaatatttatggcagatcatgatgcttggagagaacttgcagagatatatgtctccctacaaatgtacaaacaagccgctttctgctatgaggagcttattttatctcaaccaacagttcccttgtatcatctggcctatgctgatgtactttacacactcggtggactggaaaaccttcagacctcgaagaaatactatgcatccactattgacttgactgggggcaagaattccagagcacttcttggagtttgcttgtgcacgtcagccatcggacaggtttcaaaaggaaggaacaaggaagacaaggagagtccagagctgcagtctttggcagcaaaagccttggagaaagatacaggcagaaagctgatgataaactaggcttgcttacttctgctttaagaagtttgaaaatttagtgttaaaccctaacgacattgaatcaaagctttttgattattgccccataagggggccaaagataattttcaggaatgttttaatatcttaaaaatgt

SEQ ID NO: 12501 - DNA, 576 bp, Gossypium hirsutum
  Clone ID: LIB3830-002-Q1-N6-E6
aatacatcaagaactcaaggagggtggaaactttatatcataaattagtcttgttttgatagcagtgtactgaataatacatcaagacctctcaaaatagatgacaagaatggcaaaataaagtggaaagcacacatgaatggcttttttttatttgaattcatcgaagactaagacattttgaaatctttagaaccggaaattatcttcaagttcaacacctttttctattctagagtatggggcaataattcaagtgttaaatcttaagactaaattttcaaacttcttaaagcagaagtaagcaaaccgagcttgtctgcggctctttgcttgtattctttctctaacacttttgctgccaaagactggagctctggactctccttgtcttccttgctccttccttttgaaagccgagctatggccgaggtgcacaagcatattccgagaagtgctcgggtgttcttaccccccgtcaaatcaatagtggatgcataatatttcttggcagtttgaatgttttctagtccaccgagtgtgtagagtacatcagcataggtcaaatgatataat

SEQ ID NO: 12502 - DNA, 504 bp, Gossypium hirsutum
  Clone ID: uC-gsronu33B014g05b1
agagagagagagatatggtgagttaaacagaggagacccaattgaacaggcttgaataccaggtagacaatggaggaggaggtgcttgggagtatctttgccttggtaggaagctcaaatgttggcgttcactgaaaggtttgaagtatttgattataggtctttttcgaccactaaaaactttttttgttttccccctttttaaattgtactcctctttgtgctaacaagcctcttgttttttataaaaatctccatggtttcatatttttattttatggtttgttttaattcctttttctttaaaaaatttttttaataaaaaataatgtgtatctttcattctctctttttattaaaagtattactattcttttttctgttttgtataaccttttgtttttattttatttttttttgtagttttttctatttttttcttcttattttaattttttttttctcccttattctatttaatttattttttttcatttttctttt

SEQ ID NO: 12503 - DNA, 470 bp, Gossypium hirsutum
  Clone ID: GOSHI-09MAY01-C16086_1
cggaacccggggcggccccacccgtccgaacaatgcctacaagcttttatatctgctatcttttctaactcaaacccttccttattaatcctactccccatatccagttttgccctacagactttaatcactatagatttaagttaactttgtcgactatggctgctgctacgaagcttcaactgtccttggaggaaagcagaattcgaggttcagatttaggcatgtgtcctgatcgggtgaagcctctggcttgggcacctatgaaaggaaaataccgacgaaattgttgtggttgatgtggacacagcagccgcactcatcatggacatgttttctcttcaataggttgtttttgttttatgccaatcaaacatctttctcttctaggccctttggtgttcttttcaacttttaagacttagggatggttatatgtgattgaaatagaagatgcattgaccattttt

SEQ ID NO: 12504 - DNA, 676 bp, Gossypium hirsutum
  Clone ID: GOSHI-09MAY01-C16046_1
ttattgcttgtttaaattgacatttatacgttaatggctacttgctttttatcatcatattggttaaagcaacagttcatcattgttgtctttctctttaccgtaatatccagcatcagtttaccggtgaatggatgtttcacatcgattttcagcttcggggattccatgtcggataccggcaactcaattgagatttcagttttggaaaccggcaagcttcctgacggtgcttttcctccaaatggccgcaccttcttccaccgtccaactggccgcgcttgcgatggccgcttggttatcgatttccttgctgaagctttgggattgccatttcttccaccatattatcgatataaaaatggaacatcagataaatttgaaagtggtgtgaattttgcagttgggggtgctggtgcactcaattcttcatttcctggaatctataatcccaacaccaacgtatctttagtagatgaagtgaattccttcatacagtttcttaatttacgtacagatttcaaacagctcctacggaactccttgattgtgaatgggagaaattgggggaaatgattacagtcatgcccttcaagcaaaggaaaaagcatggaggatgttcgaaactttgttcttcctattgttgattctataacttcatcaatcaatgagttga

SEQ ID NO: 12505 - DNA, 690 bp, Gossypium hirsutum
  Clone ID: GOSHI-09MAY01-C16026_1
cttctgactcaagagtcactgaacgagtcgagttcgaactcagattacccaaaatggcattcacattgaggagtgtgaaagtaccgcccaactcaacgagtttggaagaagcaaggagccgggtcttcgatttcttcagaaaagcttgtcgatcaatccccactattatggatatctataacctagacgacgtcgtcaccaaatccgagctccgttcttccatctcctccgagatccgtaagaactctcatgttactaaccctaaggtaattgatttgctgctgtttaagggtatggaagagctgaacaacattgttgaacatgcaaagcaacggcaccacattatcgggcagtatgtgctgggtcgtcaagggcttgcacaggatttggacaccaaggatgaaggcacgtctgagttcctcaagaatttctataaaagcaactacttttaaacattccgctttcatggacagcttctagagatttgctttcgagcttttgacttccttataataatgttcctatccgtgcctattggttctgtaattccatcgaatttttctcgtgttggttttcagtaatttggtgaaatgcataagtgaattctggtgaattgctgatcagcatagtgtattatattgccaaatcaaacttggcgtttttttcgttcaaaaaaaaaaaaataaaaag

SEQ ID NO: 12506 - DNA, 756 bp, Gossypium hirsutum
  Clone ID: GOSHI-09MAY01-C16396_1
caaaaaaaaaattgtccagaaaaaagtatcaatttattaaaaaatccagtcatttccaggtgggataaattcttgcttagtgcttacaaagccaaaggcgagtcctagatagtgaatgtagactgttctgaaggggacgagcgagcgctaaaagatgttttatcgttgcaaaatcctcaacgttaacttcccatcatctatgtctctgggaactttcgtcaaacaccttccattttccaaacctaaaacctcacttcctcctcaaagactcaactttaaatctctaaccaccaccactacctgcgtaacacgcagctcttcctattttgaaaccttaaactcccgccaaaaggaccagattcatctctacgtagacgctttacttcaatggaaccagatgaatctcaccgctgtcaatgaagttaatgaagtaatggaaaggcacattgaagattccctagcaattatccctcctatacaaaactcttatatctcaagctgtaacaattcatttgacaaccttaggattgttgatgttggaagtggtgcggggcttcctggcttggttttagctgttgcttgtccagttgggaagtaacattggttgaatctatgaacaagcgatgtcttttcttggaacatgcagtgaatcttatcggtttgtccaatgttcaggttgtgagagaaagagcagaaaaatgggggccggattccaactttaagggagagatttgatgttgcagtggccatggcaac

SEQ ID NO: 12507 - DNA, 906 bp, Gossypium hirsutum
  Clone ID: GOSHI-09MAY01-C16336_1
cccacgcgtccgcccacgcgtacgcatcctcagattctctttcctaccttaaaacctaaactctctttgtctctctgtttctactttcactttgcatttttcttgattccttccttcacgacctcaatctctaggagtgtttgtaataaatggctttggtgacaactgctgaagtctgtgatgcaaatccacagctaattgtgagcggtgaacttcgggcccttcaaccaatattccaaatatatggtcgtcgcccagtattctccggacctatagtcacacttaaagtgtttgaggacaatgtattgatccgtgagttccttgaggagaaaggtaacggcagagttctggttgtagatgggggtggtagtttaaggtgtgccatacttggaggcaaccctgtagttcaagctcaaaacaatgggtgggctggaatagtggttaatggctgcgtaagggatgttgatgagataaacggttgtgacattggggtgagagcgcttcattctcatccaatgaaggccaataagaagggaattggggagaaacatgtccctttaaccattgccgggactagaatctgtgatggggagtggctttatgcggacactgatggtatcctcgtctccaaaactgagttatctgtttgagttcccttttctacctaaagactgaaatctgcaggatgcatggtaagttacgtatgcgtttcagtcattccgtgcctgagttgagattttgaactttggacataatgtgatgtactctattaatgtgtgacgatgaatgtatgctgctgatctctttgtcatattagagtaatgttattttggtgtctttatgagaaggaaaagctacagtctgtaataatatttttggcaaatgagaatggttaatatttgtttc

SEQ ID NO: 12508 - DNA, 422 bp, Gossypium hirsutum
  Clone ID: uC-gsronu33B126c02b1
gattaagtggttgccgaatgtgaaggggacgtatggaaatgtgtacaaataatatttgtatggataattggtttaaaggggtcggcattatacattgttgatatggtgttattaatgtagaacactttagtatagacgtatatacatatggtcacttagaacgtattgagatggccgaataagactaacgatgagtatgctttgattttctataatacttagtaatttgtttaaggtgattaaagatgtgtacgattattttatattgtactaaagagcgtattaatgcatgtttggtacttgagatgaatgtatgctgctgatctctttgtcatattagagtaatgttattttggtgtctttatgagaaggaaaagctacagtctgtaataatatatttggcaaatgagaatggttaataa

SEQ ID NO: 12509 - DNA, 516 bp, Gossypium hirsutum
  Clone ID: GOSHI-09MAY01-C16256_1
cccacgcgtccgccattttccctctcttcaaagatccttgctttcgccctcccaatggggttctttcttttcttcttcctttccctgctgtctttagcttcttcagcttccagagtggatcagaaaaccttcatcgttagagtccaaaacgaagccaagccttccgttttcaccactcacaagcactggtacgagtcttcccttgcctccgttctctccccttccactcccgcccaacttcttcacgtctacgacaccgttttccacggtttctccgctaagctttcccccactgacgccctcaagctccaaacgcttccccatatcctcgccgtcatacccgaacaagtccggcgcctgcacaccacgcgctctcctctcttccttggtctccaaaccactgacagcgccggccttttgaaagaatccgactttgggtcggatcttgtcatcggagtacttgacacgggtgtctggcccgaacgtcaaagcttcaacgaccgtgatttggggcct

SEQ ID NO: 12510 - DNA, 1109 bp, Gossypium hirsutum
  Clone ID: GOSHI-09MAY01-C16276_1
cgccgatggtgcagttgaagatatgaaggagtttctctttggctccctagatatgcctggagtgaacctcgagagaagtctaaaaaattatgagccatctgaagcgtctgtcgacattaattccgtgccaaaggatgtcaagactcagccacttgctgagaagaaagctacaagtaaaaaaccaaccggtcttggtgctcctccccctggccctccatcaactgttgatgcttacgagaagctgctttcatcaattcccgagttcgcaagctttggcaagctcttcaagtcctctgcacctgtggagttgacagaagcagaaacggaatatgcagttaatgttgtcaaacatatttttgacggtcatgttgtgtttcagtacaactgcactaataccattccagagcaattattggagaacgtcactgttattgtggatgcttcagaggctgaggaatttgctgaagtagcttcaaagcctttaagacaacttccatatgattcacccggacagacctttgtggcatttgaaaagccagagggggtctcagctgttggaaagttttcaaatatgctgaggttcattgtaaaagaggttgatccaagtactggcgaggctgaggatgatggagtagaggacgagtaccaactggaggaccttgaacttgttgcagccgattacatgttgaaggtgggtgtctctaatttcaggaatgcatgggaaagcatgggtgcggactgtgagcgtgtagatgaatatggccttggcccaagggaaagcctggctgaagctgttaatgcagtcatcaatcttctaggcatgcaaccttgtgagggcacagaggttgtccctaacaattcaagatcacacacttgtcttctatctggagtatacatcggcaatgtcaaggtgcttgtgcggctgcagtttggacttgacggtccaaaagatgtggcaatgaaactcgctgttagatcagaggatgaagctgctagtgatgcgattcatgagatcgtacctagtggctaagtttgtatccatcggctgttttttgcctccaatctggcttctatatataaattttcttgtgattttatatgatattgga

SEQ ID NO: 12511 - DNA, 405 bp, Gossypium hirsutum
  Clone ID: LIB3147-024-Q1-K1-C3
gacagggctacactctatcttaatacacttggtggtgatggtgcagttgttgaaactgatgaaggtgtaaaggagtttctctttggttcactagatgtccctctggtgaacttggagaacagtttgaaaaattatgatccgtcagaaaaggcatttgacattaattctgtgccaaaggacgtcaagactcagccacttgctgagaagaaagctacaagtaaaaaaccaactggtcttggtgctcctccccctggccctccatcaactgttgatgcttacgagaagctgctttcatcaattcccgagttcgcaagctttggcaagctcttcaagtcctctgcacctgtggagttgacagaagcagaaacggaatatgcaagtaatgtcgtcaaacatatttttgat

SEQ ID NO: 12512 - DNA, 406 bp, Gossypium hirsutum
  unsure (1)..(406): unsure at all n locations
  Clone ID: LIB3146-047-Q1-K1-G12
cccacgcgtccgcaaacacttacatttcatgaggacgaataccaattagaggagctggaagttgttgcggctgattatatgttgaaggtgggtgtctctaatttcaggaatgcatgggaaaccatggatgcggattgtgagcgtgtcgatgaatatggccttggccctagggaaagcctggctgaagctgttaatgcagtcatcaatcttctaggcatgcaaccttgtgagggcacagaggttgtccctaacaattcaagatcacacacttgtcttctatctggagtatacatcggcaatgtcaaggtgcttgtgcggctgccggttggacttgacggtccaaaagatgtggcaatgaaactcgctgntagatcagaggatgaagcttgtagtgatgcgattcatg

SEQ ID NO: 12513 - DNA, 640 bp, Gossypium hirsutum
  Clone ID: GOSHI-09MAY01-C16216_1
agccaactcttgtttttcctctgcatttctttcccttttatttgaagaatgaaatttagagtagccaaaactgacaattacatctccaccccaccaataacatgcaattgaaacctctcaacaccttcaccattacgctcatgttgttcttcactttcttgatcctcttcttttctggtttccttgaattcccttctgtttcctcctctatccaacaaccctttaccactccatccctcaccctttcttccaaccctaacccttttactgatctgctctctgctttcaagacatgggattctcaaatgggttgttcccagttcaagctaaaacgccacgatttgatccgtttgctttctaacagctctgggtctttgcaggaacctgtttctcattcttcctgcaatctgttgaaaatggagcatgttagtgttttggtaaaaggatggacttgggttcctgataatttggataatctgtattcttgtcaatgtgggatgagttgcttgtggactaaatctcccgttcttgctgataaaccggatgcccttttgtttgagaccgctacccctccacttcagaggcacagtggagatccacttcgtgtgtacatggaccttgaggctggcagaaggcgttc

SEQ ID NO: 12514 - DNA, 681 bp, Gossypium hirsutum
  Clone ID: GOSHI-09MAY01-C17986_1
ccccgcgtccgccccgcgtccgccccgcgtccgcttcgtctttgattttcaacaagttacggtcttcaccaaggctcagattttcttttgcagttgctcctttgtgttctcgaagagccaagtttatggcacatactctcgcttccgccaatcttggtcttactcagcccgccaacatcgaaagccccaagatcgcatttgctgcaaaagagatcgatgtgggagaatggaaaggggacatgcttgctgttggtgtcactgagaaagacatgaccaaggatgaaaactccaagtttcaaaactcaattttgaagaacttagacaggctgttaggtggtcttttagctgaggtctcctccgaggaggatttcacagggaaatctggccaatcaacagttcttagacttcctggccttggctcgaaacgggttggtttgattggtcttggacaatcagcttcatcaccatctgctttccgtggactcggcgaggctgttgctgcagcagcaaagactgctcaagccaatagcgtggctgtggtccttgcctcatcagaaggcctctcaaatgagtccaagcttgggtttgcttcagcaatagcatctggaacggtgttgggattacacgaagataatagatacaagtcagagtcaaagaaaccacagcttaaatctttggata

SEQ ID NO: 12515 - DNA, 406 bp, Gossypium hirsutum
  Clone ID: GOSHI-09MAY01-C17886_1
attgagtgtgattccattgcgttggaagacgatagggtagaattcactcactcatcactgatgccagctactgatacaacttcaagaacatattaccattggatcttcacatgaagataatgacacatcctccagaccagtttgtaccggatataggtttggaaggtggggcatatcagcaccctgaacaaacttccaggagagaggagaggaatcttcctaatatatctgtgcccctgccagttaagagagaggagcatataccaagcaaggtagtggaggatctttcgatggaagtagaacaacagtttccaaccaaggcagaggagcagcctcaacatggcttggcagtttcagagggagaatcttcgcagatatcaaatgccattgcttaacatgggttggc

SEQ ID NO: 12516 - DNA, 628 bp, Gossypium hirsutum
  Clone ID: GOSHI-09MAY01-C17556_1
cctttacatcacagtcttcgactgttttgtgctgtacgcgtctttgcagagagcattctgagatatggtttaccaccatctttcttggcctgtgttctatccccatctgtaaagggtgagaagaaagtgcggagcatcctggaagggttatgtgagagggcaaacagtacattctggaagactgaagatgaatgtggagcaatggctggtttaggaggtgacactgacgcccatccctatgtctccttcacgatcaacattgcttgaaactgttgttgatttcttcaagcatattcatcaagacatcaggaatcataataataataacagttaataataataagaaataaggtaaagcgttggagatgcatttgctggctgtatattaggtttgatagatcgattctttagttatttatgggcatactcccctcacctcagcatagcctgcctgccttcctttccaggaaaggttagggaagagaagagaagctccattttaaggatttttgtggaatatggtggatgaacccttgtggagaagctgtctgcaacttttgtattctaaattttcgaagccttttaaaaatttatttattcatatatattattacaagattttgatttc

SEQ ID NO: 12517 - DNA, 396 bp, Gossypium hirsutum
  Clone ID: GOSHI-09MAY01-C17536_1
tgaagatgaaatttccttccatctgcaacaaatcgagaaccaaagggatgtcatggaaactgtcgcttttctgtcacttgaaagccgttccattcataaacaagcctagaaggttgaagcattccacttctgctttatcagacagcactgccaagtttatttctgccttggattgctcttggtctcagtcaagacattgtttcacagtgcccaaagattctgaagaactgttggatatggctatcgaggcactgcggtccaacaggctgttcttcgaaccgggtgacactggtttcattctagaaggcagcccaggttcccattcaagggttgtgtggcattggccatggaaaacaggtggttcccatacatgggattttcgagttttcaatggga

SEQ ID NO: 12518 - DNA, 1209 bp, Gossypium hirsutum
  Clone ID: GOSHI-09MAY01-C17446_1
ctcactttgtttttattcttttatgggagccagagaaaaaaaaatatcccatctttatagtcgctctctttctcccaggttatttcaatctgctacattgggtacccaagcactaaactttctccctgggttcctctttagtaaggaatttggagttggtggtggtaaaaaatggagttttccagggtttctatgattagttgttttgcgttactcttgtgctcctccttggcatatggtgcctctagtcctccagctcctatggcaatgagtcccagcccgacaccgtcaccggcaccagcccctgcaccggaatatgtaaacctaacttatttgctctctgtggctggtccatttcacacattcctcaactaccttgaatccactaaagtcctggatactttccaaaaccaagccaacaacactgaccaaggcattacgattttcgtgccaaaagacagtgccttcaaagctcttaagaagccttcattatctaatctcactaacgaccaacttaaatcactcatccttttccatgccatgcccaaattctactctctcgccgacttcaacaagcttagtaccaaaggccctgttagtaccctcgcaggtagccaatacagtttgaacttcacagacaattccggcactgttcaccttgattcaggatggagcaaaacgaaagtttccagcgctgttcactcaactgaccctgttgccatataccaagtcgataaagtccttcttccagaggctatcttcggaactgacattcctccaatgccaccagctcctgcccctgctcccgatatgagcccagctgcagatgctccatcagcagaaaccaagggaaaaggttcttcatccaaggccgaaccttcaacttcatcatcccataggatcatgaactttgggacatggaatcagctggttttggcattgttcggtgggtgggtgatgttcttctaagttcaaagggactttcatttcgagtctaatttatgttcatgttggagagaaaatcatatttgggtttttcaatttacttttgatttttagaaccattttttcatttatatgttatggagagattattatgtgttgaaaagaatgtgagttcttgttttgcagctactattttttttttttaaattgagcttctcaatttacttgaataaagttagcaaatttcaagttctcaaaaataaa

SEQ ID NO: 12519 - DNA, 586 bp, Gossypium hirsutum
  Clone ID: LIB3543-039-Q1-K1-A6
tttttcttttgttaaagttccattctttaagtctttctaagttctaaagatcctttttctttcaagttatctgagtttttaagttatacccagatctttgcttgacttttttttgttgatgttccttgtttttggttcttgaagaacttggctttaaagtacccagcaaaactatagttgtgttcaagccatttgtagattcaaaagagtaattttgatcgttgttttttttttttattacttgagcgatttggaatttggagttggtggtggtaaaaaatggagttttccagggtttctatgattagttgttttgcatttctcttgtgctcctccttggcatatggtgcctctagtcctccagctcctatggcaatgagtcccagtccgacaccgacaccggcaccagcacctgcaccggaatatgtaaacctaacttatttgctctctgtggctggtccatttcacacattcctcaactaccttgaatccactaaagtcctggatactttccaaaaccaagccaacaacactgaccaaggcattacgattttcgtgccaaaagatagtgccttcaaagctctta

SEQ ID NO: 12520 - DNA, 366 bp, Gossypium hirsutum
  Clone ID: LIB3148-038-Q1-K1-H10
aaaaaaaaaaaaaaaaaaacaaaaacaatgtaacagaatatgaaaaccaaaaaaaataagatatatgagggtgggcacatttaacacattcctaaactaccttgaatccactaaagatcctggatacttttcggggccaagccaacagcactgaccaaggcattacgattttcgcgccaaaagacagtgcctttgaagctcttaagaagccttcattgtctaatcttactcacgaccaacttagatgactcatccttttccatgccatgcccaaattgtactctctcgccgacttccacaagtttagtaccaaaggccctgttagtaccctcgcatgtcgccaatacagtttgaacttcacagaca

SEQ ID NO: 12521 - DNA, 1275 bp, Gossypium hirsutum
  Clone ID: GOSHI-09MAY01-C17406_1
ctttgactgagctgatccaatccagtggtaacgcagacagaaaatggattcaagagaagacgacggcggagagccacttagccggatggcggagtggcgtgatgtgacgcctcttcctcaagacgacggtcctaaccccgtcgtccccatcgcctacaaggaagaattccgtgaaaccatggattacttccgggccatctacaaagccgatgaacgctcccctcgtgccctccgcctgacccgacgagcaatccatctcaatcctggcaattacactgtttggcattttaggcgactcgtgctcgaagcacttaatgccgatttggacgaggaattggattttcttcaacggattgctaattctaactctaagaattatcagttatggcaccatcggcggtgggttgtcgacagattgggagctaatgctagagccaaggagcttaatctcattaagaagatactatcaattgatgccaaaaactatcatgcctggtcacataggcagtgggtgcttcaggcattaggtggctgggaagatgaacttgattattgtcagcaacttctcgaagaagatatctttaataattctgcttggaaccagagatattttgttgtaacaagatctcctttcttgggaggcctgaaagccatgagagcatctgaagtaagatacactgtggaagccattctggccaacccaaacaatgagtgtccatggagatacctccgaggtctttacaaagacgatattaaagctttggttaatgatcctgagatctcatcagtatgtttgaaggttataaacacgaaaaacaactacgtttttgcgctgaaaatgcttctcgatcttctttgtcatggttttcagccatgccatgagttcagagattctgtagtcgctcttcggacttcagacactgacccactagatccggacctgtcaatggcaatttgtgacatcttggaacatgtggattctttgagagcaagctattggatatggcgcaaaaacaagctttctgtagcagccgtatgattacttgattagtggaaatgaggtgaataatgttcaaaccatcttgctaaatttgaaaagttgaaccataaatgttcgggtcggttcggttagaatgttagaaccagccagtagccctactaggtcaaaaactggttcaccctcctaaaagacccgattttatggacctctttttttttcttccaaatattttggattaatgagatgtggaccctttatctccttttttttttggg

SEQ ID NO: 12522 - DNA, 372 bp, Gossypium hirsutum
  Clone ID: GOSHI-09MAY01-C17686_3
ctcactcccactctcactctatttttctctagtaattgctgcaatcggatttgttgaaagatggctgagggttcagctgcagttcccagcactgagttgttggaatggccgaagaaagataagcgtcggttccttcacgccctgtaccgtgttggcgatcttgatcgtaccatcaagttctacactgagtgttttgggatgaaattgttgaggaaaagagatattcctgaagagaaatactccaatgcctttcttgggtttggcccagaggagtctcaatttcgtgttgagttaacttacaattatggagtattatcgtatgatattggaaactggtttttgggcattttgcaattgcaacaacctgatgtc

SEQ ID NO: 12523 - DNA, 478 bp, Gossypium hirsutum
  Clone ID: GOSHI-09MAY01-C17686_2
cacgcgtccgcccacgcgtccgaaaaaagttctcttttccctggcgttagttgaaccacttgagatcttttcacaaatatcaccaaatatgccttcaaagtgcgaaatttgttgtgagctcctcatcgccattttgctccctcctttgggtgtttgcctaaggcacggttgttgcagcgttgagttctgcatctgtctgctgttaacgattctgggttacatccctgggataatctatgccctttacgccattgtttttgtggatcgagacgagtactttgacgagtacaggcgaccactttattattcaagtgcctagtctagtcaagtcttccttaattatgtgatatgaatacgatgatgatgcagcaactccttctgggttttaattttaatttgatgttgagggtgttgctactctcgaactggtctcgatgtactttgtgatattataaattggaatggatccttggtcttt

SEQ ID NO: 12524 - DNA, 482 bp, Gossypium hirsutum
  Clone ID: GOSHI-09MAY01-C17686_1
ggacatccctactaaatcttgcaaagctaggggttccttcacgccgtgtaccgtgttggcgatcttgatcgtaccatcaagttctacactgagtgttttgggatgaaattgttgaggaaaagagatattcctgaagagaaatactccaatgcctttcttgggtttggcccagaggagtctcatttcgttgttgagttaacttacaattatggagtatcatcgtatgatattggaactggttttgggcattttgcaattgcaacacctgatgtctacaaaatggttgacgagtacaggcgaccactttattattcaagtgcctagtctagtcaagtcttccttaattatgtgatatgaatacgatgatgatgcagcaactccttctgggttttaattctaatttgatgttgaggtgttgctactcttgaactgatcttgatgtactttgtgatattataaattggaatggatctttggtcttc

SEQ ID NO: 12525 - DNA, 382 bp, Gossypium hirsutum
  Clone ID: LIB3197-056-Q1-M1-C3
cccactctcactctatttttctctagtaattgctgcaatcggatttgttgaaagatggctgagggttcagctgcagttcccagcactgagttgttggaatggccgaagaaagataagcgtcggttccttcacgccgtgtaccgtgttggcgatcttgatcgtaccatcaagttctacactgagtgttttgggatgaaattgttgaggaaaagagatattcctgaagagaaatactccaatgcctttcttgggtttggcccagaggagtctcatttcgttgttgagttaacttacaattatggagtatcatcgtatgatattggaactggttttgggcattttgcaattgcaacacctgatgtctaacaaatggttgaagaca

SEQ ID NO: 12526 - DNA, 324 bp, Gossypium hirsutum
  Clone ID: LIB3197-056-Q1-M1-C4
accaatctaactctatttttctatagaaattgcggcaatcgcatatggtgacagatgtctcgaggtacatctgaattttacagaaattagtacaaatcacttgatcaaaaagataagcgtcggttccttaacaccgtgtaccgtgttggcgaacttgatcataccatcaagttctacactgagtgttttaggatgaaattgttgaggaaaatagatattcttgaagagaaatactccaattcctccttgataagatctagatgactctcatttcgttgatgagttaacttacaatcatggagtatgatcatatgaatttggaac

SEQ ID NO: 12527 - DNA, 683 bp, Gossypium hirsutum
  Clone ID: GOSHI-09MAY01-C17656_1
aattaagtgacataagtggtctcgtctatagcatctgatgaagcaaaagcctagttctcggtaaagcaagctctcgcctcaggctcagggaaaggaaagaaaggggatccgtgccttttctattctctttctgtggtctgggacgggaaaagaaatgctagaagagttggagcccttcttcttacagtcagctttttagctaagctcttctataagtgagttctctgggcaaggctttctaggctccctcgctccctacgagctcaaaaatgaaggtatccacggaaagaacacaacttcttcggagatagcgaactcttcaaaaccagacgatgagttgtgggtcctgtttatatctgtcttattttggtactttaatctcctgtggtactaatcggtctgctccaccttctctgatgaagcgaaaaatctattgtaaagagttggtggaaatggcacttttctttcttgccttataccactcctgccctggggcaagcttagccatccttgtggcaggagccctacaggtactggaaagctgactactggcagtgaaatgtcatataaagacggctgacatcaaaataacgattggggatttagctatagcagacttctttttttctccttctcccaagctcttccattcttgataggctttccctagctggcactatttt

SEQ ID NO: 12528 - DNA, 464 bp, Gossypium hirsutum
  Clone ID: GOSHI-09MAY01-C17616_2
gttgggtataagaaggccttcacctatacaaatggtggctattcctttggggttgcaacagagggatgtaattgggattgcagagacaggatcaggtaagactgctgcttttggtttggcctatgttagcttatatatctagattacctcctatgagtgaagagaatgaagctgaggggccttatgctgttgtaatggctccgactcgtgaacttgctcaacaaattgaggatgaaaccatgaagtttgcacattatttaggtattaaggttgtttcaattgttggtggtcagtcaatagaggaacaagggtttaggattagacaaggttgtgaggtcgttattgcgacccccggtcgtttgctcgattgtttagagaggcggtatgcggtgttgaatcagtgtaattatgtgggtcttgatgaagctgataggatgatagatatgggttttgaaccccaagtt

SEQ ID NO: 12529 - DNA, 738 bp, Gossypium hirsutum
  Clone ID: GOSHI-09MAY01-C17616_1
aaaagaagaagcagcgaatacttatgatacttttgatatgagggtcgataagcattggtctgataagaagcttgaggaaatgactgaaagagattggaggattttcagggaagattttaatatttcctataaagggtcgaaaataccacgcccaatgaggagttggagtgagagtaaattgactgccgagttattgaaagcagtggaaagagttgggtataagaagccttcacctatacaaatggcggctattcctttggggttgcaacaaagggatgtaattgggattgcagagacaggatcaggtaagactgctgcttttgttttgcctatgttagcttatatatctagattacctcctatgagtgaagagaatgaagctgaggggccttatgctgttgtaatggctccgactcgtgaacttgctcaacaaattgaggatgaaaccatgaagtttgcacattatttaggtattaaggttgtttcaattgttggtggtcagtcaatagaggaacaggggtttaggattagacaagtgtgaggtgtattggacccgtcgttgctcatgttaagagcgtatctgttaatatgtaattgggtcttgagactgatggagataaatgttgaccccaatgtggattgagttgcttccatttaaccgaatgaataaaatttaaaaggtttgcccttattgtggcaactccctgaggtccggatttagaaccgtgcactgcgtag

SEQ ID NO: 12530 - DNA, 1457 bp, Gossypium hirsutum
  Clone ID: GOSHI-09MAY01-C17176_1
ttcttctcgtctccactcttccttgaactcaaaccggtttctttccccttcgaatcccacgccgccccacttccaaacggtagcggttcgaatgccgcaacaagccccgaaaccgcagcagcgacaaccgcaattaccgtcgcatcgaacacggcgccgtcctcgaaactgagccatctgacggaatcgttaaaattagagcaccaattcttgcgtgttccttttgaacatttcaagaaaacaatccgaaccaatcaccgaacagtcgagaaagaagtctctgccgttatttcaagcgtcactgacgtggctgactccgacgaaatatccaaagacgatgccattttgagtctcacttcccttgtttcccgtttgcagggcatcaagcgcaagttggaagaggggagtcatgcagagaacttgcaagctcataggtgccgtgctcgtcttgatcacttagattcagcggatgctgagaacctttctgaatggaataatgtgcgattgaagcgggtccttgtggactacatgtcgcgtatgtcatactatgactctgcaatgaagctggcagaaagcagcaacatacaggaacttgtcgatattgatgttttccaagaagctaagaaggttattgatggccttagaaatcaagaggtgggtcctgcccttgcctggtgtgcagataacaaatcaaggttgaagaaatccaagagcaaattcgagttccagttgagacttcaggaattcgttgaattgggacgagctgagaactacatgcgcgctatttcgtacgctcgaaggtacctttccccatggggagcaactcatttgaaagaattgcaacgagtcatggcacctttgcccgttagaagccacactggatgtgcaaaatacaagatactgttatgaagatgactgcaccaaggaggacccattgtcacaggacagcttccggaagttggccatgcctttgccatattccaagcagcatcactcgaagcttgtttgctacataaccaaagagctgatggatactgaaaacccaccacaagtcttacctaatggctatgtctacagcactaaggctctgaaagaaatggctgagaaaaacaatggtaaaattacatgtccaagaacgggtctggtgtgcagtcattcagatctggttaaagcatatatctcataaatcggcatggctgaagatggtaaataatccattttttatgagaattgttacgtcaagttgttggtaatttcttggacctatctgtaaataggtaacattcagaaaattcagatttaagaactaatgtgcaagttcttcttgcacctcaacttgttaggttttgaagaatttacctcgtgtaaatatgcagaaaacgtctgtttttaaatttacttgtaattgttattaacttgttacccgtttaataattagccaagaataagttataagc

SEQ ID NO: 12531 - DNA, 227 bp, Gossypium hirsutum
  Clone ID: uC-gsronu33B100f06b1
gttgtgacttcatgaattcattgaattggtacgagctgagaactacatgcgcgctatttcgtacgctcgaaggtacctttccccatggggagcaactcatttgaaagaattgcaacgagtcatggcaactttggccgttagaagccacactgaatgtgcaaaatacaaggttttgtttgaacctaagcagaggtacttcctggtggatcagtcttttacaataattt

SEQ ID NO: 12532 - DNA, 529 bp, Gossypium hirsutum
  Clone ID: GOSHI-09MAY01-C17136_1
cctacgcgtccggccgaaaaaaaaaaaaaacagaggttcatgggttctccgacttgcgatcccagtggatatgctgatggaaatttggggaacaatggtgtaaccaacttgagttcccctgcaaggaatggtgattcagggggcagggttcgtgagagaggtgaaaatggtgttgctgacactgaacaaggcaaatgaggattcaccatatagcggggatggttttgttggttgaaaataggccctctgtgggtgatgaggacttggactctgcagcagcaccattgccttcagtatcaaaatctaacattggacacagatggagtgacataacttcgtacggtaccaaaaagaaggttcagtgttggtttcaacatccaaatgggaattgggagctggggagagtaatatcaacttcaggaacggagtctgttatatcacttcctgatgggaaagttttaaaggtgaactctgatagtttgatacctgcaaatcctgatatccttgacggggtggtgatctcatgcaa

SEQ ID NO: 12533 - DNA, 890 bp, Gossypium hirsutum
  Clone ID: GOSHI-09MAY01-C17386_1
ttcctttctttactttctctccactattttctgggaagagaaactttaattcctttttttttaaatctatctgtattgtttgttggtgagtcaaagagagagaagttggtttgtttttgctccactgctgaaggtaagccctttctgatcttccaaactatatcaggtggtatttttccgttctttcagttggaaaaatcagtttttgggtgatgcaattgaaggggaaggtaaccaggattgctgctggaggtaaccgtgcatccgtgattgggggtaactaatgaatttgtattctctaatctttgtaacaattttgcgttctttcgatggcctcaaaatctagtgtcatacattcccctgaaaagctgaggaaaccatttggtagcgaaactggcgaagggaattcttgtcggctgtctcctatacaaatcacaaagacaagctgatttagcgccagttactccaaggatagtgcctaagaaacaaaattcttgttgtaatcaccgagggtatgcagccatcaaaacctcataaattagagtccgttgattccttgacgagaaagtagattcaggtctatcctgagtgggggatcaccagagattctcgttacaagaaaagaagcatcgagctgggattaattcagcttcagaaaatctagtgatgggccaccggcctttgctagactagcgaattgccaaagttgtgataatctgattattatggagtgtaaaacagatttgcagagtgcaagccatgatgtaggatgaggtctgtaacttaagtgtgttcacaacctatagcaagttttagggagcttacgctgcaccaaaaaaggtgttgaccttaattaaattgctgggttatagagtttaatagcaaggttc

SEQ ID NO: 12534 - DNA, 436 bp, Gossypium hirsutum
  Clone ID: LIB3197-041-Q1-M1-H2
gttttgtgatttcctcactgggtcttttttagcatatgggtcttaatgtgaatttttgatccaaaggtgatatttttccgttctttcagttggaaaaatcagtttttgggtgatgaaattgaaggggaaggtaactaggattgctgctggaggtaaccgtgcatccgtgattgggggtaactaatgaatttgtattctctaatctttgtaacaattttgcgttcttttgatggcctcaaaatctagtgtcatacattcccctgaaaagctgaggaaaccatttggtagcgaaactggcgaagggaattcttgtcggctatctcctatacaaatcacaaagacaagtgatttagcgccagttactccaaggatagtgcctaagaaacaaaattctgttgtaatcacggagggtatgcagccatcaaaacctcataaa

SEQ ID NO: 12535 - DNA, 747 bp, Gossypium hirsutum
  Clone ID: GOSHI-09MAY01-C17326_1
gaggaagggtgaatatcattggctgatcgagccacgatagctaatatgtcgcctgatatggagcaaccatgggctttttccctgtagatcatgtaacactgcagtatcttaagctaactggtagaagtgatgagacagtatcaatgatagaagcttatttgcgtgcaaacaagatgtttgtcgactacaatgagcctcaacaagaaagagcatacagttcttttttacagttggacctggctgaagttgaaccctgtatctcagggccgaagcggcctcatgaccgagttcctttgaaagaaatgaaggctgattggcatgcatgtcttgataacaatgttggattcaagggttttgctgtgccaaaggaagagcaggataaagttgctaagttcacattccatggcctgcctgccgaacttagacatggaagtgttgtaattgcggctatcaccagctgtacaaacacatcaaaccctactgtcatgcttggggctgggcttgttgctaagaaggcttatgaactaggtttggaggtcaagccatggattaaaacaagtcttgctcctggatctggagttgttacaaagtatttacttcacagtgggctgcaaaaatacttgaatcaacaaggttttaacattgttggttatggctgcacaacttgtatcggaaattctggagatcttgatgaatcagttgcttcagcaatttcggaaaatgatatcattgctgcagccgttcttt

SEQ ID NO: 12536 - DNA, 399 bp, Gossypium hirsutum
  Clone ID: GOSHI-09MAY01-C17286_1
aaaaagttgagcctgtttgcattcctatcatcacggctgtatatcaaagatctggtggagggcccggcagtgctgcatcaaatgaagaagaggatgattcacatgatgaactctaaaacaaacatcttcgatggctgctgccacggaaaaaagattgatactgttaagtgtttagtgaaatgagataatactgtactaattttggtagaattttaaatgggagaaaaaaaaaaactttcaccatcattcgctttttttatttgggggcgaatatattcattttgaagtatcttttgttgtcattagaaacacacttcgattcacgaatccaacccctcattacttttgttttcaaacttgtatgaaaattcaataaaaagttgcaaattccatcgatgc

SEQ ID NO: 12537 - DNA, 415 bp, Gossypium hirsutum
  unsure (1)..(415): unsure at all n locations
  Clone ID: LIB3147-019-Q1-K1-H4
cccacgcgtccgcccacgcgtccgcccacgcgtccgcccacgcgtccgcccacgcgtccgcggacgcgtgggctaaaacaaacatcttcgatggttgctgccactgaaaaaagattgatactgttaagtgtttagtgaaatgagataatactgtactaattttggtagaattttaaatgggagaaaaaaaacttcgcccatcattcgctttttttatttgggggcgaatatatacattttgaagtatcttttgttgtcattagaacaacacttcgattcacgccnnanaaaaaaaaaaaaaaaaaaaaaaaaaaaaaaaaaaaaaaaaaaaaaaaaaaaaaaaaggggcgcccgttcgcgcccacgcgtncgagcaaagtccacaggagtgctgggttaggagatgacatcagtc

SEQ ID NO: 12538 - DNA, 403 bp, Gossypium hirsutum
  Clone ID: GOSHI-09MAY01-C17226_1
atgggagctccagcccttctcacactcaacccgcagaaaccacccaccttcaccatgtctgacgaggaagttgaacaggtggaggagcagtacgaagaagaagaggaagcccaggaggaagaggaagttcaagaagaggagaaaccaagacccaaactcactgctcctaagattccagaaggggagaaagtggacttcgatgacatccagaagaagcgtcagaacaaagatctaatggagctccaggccctcatcgacagccactttgaagcccggaagaaggaggaggaggagctggtcgccctcaaggagagaattgagatgcgccgtgcggagagagcggagcaacaaaagattcgtgcagagaaagagagggagcgccagaacagactggcggaggaaa

SEQ ID NO: 12539 - DNA, 360 bp, Gossypium hirsutum
  Clone ID: LIB3196-013-P1-M1-A10
atccggacgccagctcctgcaagcgttgctgtccacagggagctccagcccttataacactcaacccgcagaaaccacccacctttaccatgtatgacagaggaagttgaacaggtggaggagcagcccgaagaaaaagaggaagcccaggaggaagctgcataagtccatgaggaagcccatgaggttcatgaaccatatgagaagccaagacccaaactcactgctcctaagatgccagaaggggagaaagtggacttcgatgacattcagaagaagcgccactatcaatgatctaatggagctccaggccctcatggactgccacttttgaagcccggatgaaggatgaggaggtgc

SEQ ID NO: 12540 - DNA, 500 bp, Gossypium hirsutum
  Clone ID: GOSHI-09MAY01-C10946_1
ttcacacctctctttgttgcacctttttttggtcaaaacaacacaaacaacaaattaacaaacccttgttctactactattactacaacaacatcctctgtctacaactcaaaagcaaaagaaagtaaaaaaatggatggaagcagcatagatgagtccgcatctagtgattccatatccgtatccattgccccatcaaatatttcacctttgcctcagctcaccaaatctcctgactccctctaccgcgttgggagtggaaccagcgtgattgtggattctgaatctggggtcgaagccgaatcaagaaagctcccttcttccaagtacaaaggtgtcgttcctcaacccaacggtcgatggggtgctcagatatacgagaagcaccaacgtgtttggcttggcactttcaatgaagaagatgaggcggccaaagcctatgacatagcagctcaaaggtttaggggtcgtgatgctgtcactaacttcaaacaccttca

SEQ ID NO: 12541 - DNA, 1162 bp, Gossypium hirsutum
  Clone ID: GOSHI-09MAY01-C10896_1
cccactcgtccgcccactgctcaaagctttctcagctttttatatattcctccttattttctataaaaatcaaaatggcttctttccttactcaaagtgtcctcaaacttttccttgtcatctctttgtttcaaatctctttggccgttaggaagctgagtgaagtggtgcaagaccagcctcagctcttgacataccacaatggtccccttctttctggcaaaattactatcaatttgatttggtatggcaagttcaagccttccgagagggctattgtctctgattttgtcacctccctttcctccacgcctccatcgcaaagcaaccagccgtcggttgcccaatggtggaaaaccaccgagaaatactaccacctcacctccaagaaatcttccctttccctgtctttgggaaagcagattcttgacgacaagtattcgcttggcaaatcactcaaaaacaaacaaatcgttgagctagcctcaatgggtgaccaaaagaatgctatcaacgttgttttaacagcatctgatgttgctgttgaagggttctgcatgagccgctgtgggactcatggctctgccttgggctccaccgatggtctcgtcaaggccaagaagcactccaagttcgcttacatttgggtgggtaactcccagacccagtgccccggtcaatgtgcctggccgttccaccagccaatctacggaccacaaagcgcgcctttgattgcaccaaacaacaacgtgggtcttgatggcatggttataaacttggctagcctctttgccgggaccgtcacgaaccctttcggaaatggttacttccaaggcccagctgaggcaccattggaggcttcatcggcttgtcctggaatttatggtaaaggggcttatccaggctatgcaggaaacctacttgtagaccctacaactggcgctagctacaatgctcatggtaacaatggaaggaaaaccttgcttcctgctttatatgacccttctacatcatcttgctcaactttggtctacccatttgaagcacccatcaccaaaatcagtgttagccagtacccggtttataaggtaattccttttatttgttgatttattttggataataaaaaatcagcaaactagttcggtttgcttttttcccc

SEQ ID NO: 12542 - DNA, 583 bp, Gossypium hirsutum
  Clone ID: AI054855.1
gaaatcttccctttccctgtctttgggaaagcagattcttgacgacaagtattcgcttggcaaatcactcaaaaacaaacaaatcgttgagctagcttcaatgggtgaccaaaagaatgctatcaacgttgttttaacagcatctgatgttgctgttgaagggttctgcatgagccgctgtgggactcatggctctgccttgggctccaccgatggtctcgtcaaggccaagaagcactccaagttcgcttacatttgggtgggtaacttccatacccagtgccccggtcaatgtgcctggacgtttcactcagccaatctacggaccacaaagcgcgcctttgattgtaccaaacaacaacttgggtattgatggtcaggttataaactatggtagcctctatgtcggaaccgtctcgatcctttttcgaaaaggatacttactaggttcactgtagcatatatgcatgcttattggctggatggaatttttgtatagggttatctaccttgtagtaaccattagtaacctaaatagtgtatttacatctgagtacatcgttgtattcatgtccgtttaaag

SEQ ID NO: 12543 - DNA, 264 bp, Gossypium hirsutum
  unsure (1)..(264): unsure at all n locations
  Clone ID: LIB3149-056-Q1-K1-H8
ggactcaggctctgcctggctccaccgatggtctcgtaggccaaagcactccagttcgcttacattgggtgggtaactcccagacccagtgccccggcaagtgcctggcgttcaccagccaatctcggaccaanacgcccttgatgcaccaaacacacggggtctgaggcatggcataaactgctgcctttgccggccgcacaaccttcgaaatggtcttcaagcaccgagacgtgaggttatcgtgtcgaatatgaagctatc

SEQ ID NO: 12544 - DNA, 939 bp, Gossypium hirsutum
  Clone ID: GOSHI-09MAY01-C10856_1
gaaaaagttcccacgctctggtttcactttttcttctgtcacttttcttgggaaaataatgtctcattcgatgggaaagtgccagaaaattcgtcgaattgtccgcatccgacaaatgctgaagcagtggcgaagaaaagccagcataacggccagcaacaacaccatcggcaacaacaacaacggagatgcgccgtctgatgttcctgctggacacgtggcggtctgtgtgggcacaagtctcaggagatttatcgtacgcgcgacgtacctaaaccacccagtcttcaaaaaactcctcgtacaaaccgaagaagagtatggtttcaaaaacatgggaccattaatcatcccatgcgacgagtcgttcttcgaagagattctccgagtcgtatcccgatctgattcttcatcaaactcgggtcctttctctactttcaaagatcttcagagatgctgccacgtgggcatggaggataaactcgggtttttctgcgagtctcgaccgttgcttcatggggtatccgacaaatccgtttactgatagtatgaagaactcactgctgttggatgacctccctgcgtgattatggggtcctcgagtgatttatgggtaatttctaagtaagcttttctaactaatgggcaaaagaagaaaaagagtaagcttttctaacgccataattatagagtttaattatggagatggcgaagaggtttgtttttgtcttttacttttttaccgcgtcatccccaaccctagtgcagtagtataaatataatggttttattatcatcatctcttaaaagtaaattatttcagttttatatgggtgtgattatatatctccataacttattgaaaccctataaatacaagtatacttgtataagatttgcatatgaaataataatatatatatatatgtgaagttgtcc

SEQ ID NO: 12545 - DNA, 987 bp, Gossypium hirsutum
  Clone ID: GOSHI-09MAY01-C10876_2
cgtgggcggccgcgtggggggagggggagaagggctaattacattgcctgtaaccctactgtgcctctgccgtgaacggagttgctatctcggagtggaaaaaccgtctttgatgcaaggatctcccccacttcatttctttcaagcaggcctgtagttgatctgggaggggggggggcaaaggctgcgtcaaaaagaactgtgacccttgttctttgataatcctgttgaatatttccattagactgaaggattaaccagagtccacagcagaataatcggatctgttcattagtctccttacagaagccccagggcactattgaaaaatatggctactgtcttcctcattttgacgacattgagggcactgatcttccaccacgactcttttatgtctgaggttaacaagggacaaaataaagttccaagagattctacatactgtaattataatttttgaggggatgtataatttccatagtttcctatagaaatttttagttcggcgtgtaaactataactactaggatccaagttagtctcctgtaatagtttataggtgctcctgacttagaaatccgtggacagttcccttttccatacttgaaaattttcatgtgctgtctccgccagtggaatattgcaagattttttttgttacatccaatagaaagcataaacctttctccagaagccctcttggtgtccagacgctctttcaagtaagcgaagtgcccccaagctagcatcgggaatcaagggacgtcagaggcattagtcacattatcacctgaaggttttggtacagttaggttaaatgttttgagtgtggcaagtgaaagggacttattctttttggttagtgtgcatttagtttagcctcaagtgttggcttaaatggatgtgatattcattttgtataggccattgatattggctaatattgatttgtattaaatatagttgatggaaattcttatggcg

SEQ ID NO: 12546 - DNA, 730 bp, Gossypium hirsutum
  Clone ID: GOSHI-09MAY01-C10876_1
cggctaccttggccgaaattctccatgcttgacgaacacattctggaattcctcccaccaattgctatctcggagtgaaaaaccgtctttgatgcaaggatctcccccacttcatttcgtacaagcaggcctgtagttgatctggaagattgatggtcaaaggctgcgtcaaaaagactgtgacccttgttctttgataatcctgttgaatatttccattagactgaaggattaaccagagtccacagcagaataatcggatctgttcattagtctccttacagaagccccagggcactattcgaaaaatatggctactgtcttcctcattttgacgacattgagggcactgatcttccaccacgactcttttatgtctgaggttaacaagggacaaaataaagttccaagagagtctacatactgtaattataatttttgaggggatgtataatttccatagtttcctatagaaatttttagttcggcgtgtaaactataactactaggatccaagttagtctcctgtaatagtttataggtgctcctgacttacaaatccctggacagttcccttctccatacttgaaaatcttcatgtgctgtctccgccagtggaatctgcaagattttttttgctacatccaatcgaaagatcaagaaatacaaaatccggggctagaccgggggaaggccaagctagtagactaaattcaactagtcacccact

SEQ ID NO: 12547 - DNA, 473 bp, Gossypium hirsutum
  Clone ID: GOSHI-09MAY01-C10866_1
cccacgcgtccgcccacgcgtccgtttagaaagagctcttcaacaatggcttcagagagagacactaaaaaaggcacctccgaactcctgtctagcgctaagctggtggcggacgcagcaaaatccacattcaacaaagaaagcgacaaggttgacaagggtaaggttgctggtgcaggtgctgatcttttgggtgccgcccaacactatgggaagctggataaggacaagggtgttggccaatatgtcgaaaaggctgagacttacttgcatcaataccagaccagtcacttagctcccaccaccaaccccgactcccatggagcaggtgccgccgccaaagattctgaaactgctgcagctggtggtggtggtgttggggattacatgaagatggctcaaggtttcttaggcaaataaaattataattaaaacttattaatatttatttacttaagccttgctgtcaatat

SEQ ID NO: 12548 - DNA, 611 bp, Gossypium hirsutum
  Clone ID: GOSHI-09MAY01-C10506_1
ggcatcggtagagtttgtatgtcagaatcctacgatggtggtcataatggggattatgcaaaacctactcaacttcccaacccaaactcaggtatcgacggggttaagttgagcgacggtcgcatcttgcttgcttataatacaatctcaagaggtgtgcttaaagttgcagtgtccacagatgatggtgattcatggaatgaagttttaacactagaagagaatttggaaatggaattctcttatccggctgttattgaggctagcaatggacttgttcacatcacatacacatataataggacccagattaagcatgttatccttcaaccaaattgattctgcactggcctggggttgttgggggactgatgagctgcccagtagatgacgcttcgaattcttctctcgaaagagtggacctcctcaacaatgttcatatcattgctttgcatttgagccttgatgtgaccttgttcttttgctacttgcgagtgagtattaataagattgatgttgttggactcgaatttgattccaagcagcggttatctatgctgtgtaaactctcttgttgaagaacttgaatagaactttgaaagattctttgt

SEQ ID NO: 12549 - DNA, 1077 bp, Gossypium hirsutum
  Clone ID: GOSHI-09MAY01-C10496_1
cccagcgtccgcccagcgtccgcccacgcgtccggcagagggcataagggaaaaggcgacaagggagtagacttgttagatataacaagataacaaaaccttcgagtcaccactcaccacccaccaggcccagctttcttatctttaccggaaaacatcatcatggattccaatccccaatcttgtgaaaaccctgaaatcaaatcaaccgaggtgcaaacccaaaaccaaaatcaagtttctcaatccccatttgctactgcatctctttctttatcttccttgcccccaaccctacctactcagttcttcatccaacccaaaatcttatctttattctctgctcaatgtccctccaaagttaaagttccaactcaagcttcctctctttctcatctctccctttcttcaacttccccttccccttccaaactttccttcaaatccacctttgccaataaccctctccagtcccctctctccttaggtccgggccgccatctcgacccctccaatggcgccgcaattcgtcgagcttccatcgtttggttccgcaacgatttacgggtccacgacaacgagtgtctcaacaccgccaacaatgagtccatgtcggttttgccggtttactgttttgaccctcgagattacgggaaatcctcatctgggttcgacaaaaccggtccttacagagccacattcttgattgaatcggtttcggatctccggaagaatctgcaagcacgagggtcggatcttgtggttcggattgggaagccggagtgtgttttggttgagttagctaaagctatcggggccgacgctgtctatgctcatagagaagtttctcatgatgaggttaaggctgaggaaaagattgagtcggccatgaaagaagagggtgttgaagttaagtacttttggggaagtactttgttccatgttgatgatttgccgtttaaattggaagatatgccttccaattatggtggatttagggataaagttaacggtttggagataaggaagacgattgaatcattggaccaaatgaaagggatgccttctagaggtgat

SEQ ID NO: 12550 - DNA, 647 bp, Gossypium hirsutum
  Clone ID: GOSHI-09MAY01-C10786_1
gcagctcgtcaagcctttgatgctgaaaaactggataacaagaaatttagttctttaggtgaaactgttgtaaagaatgataggcttgttgttcgaattgatggccattactttccatgggatgcagcagcacctattcttttaggaatggttacatttggaagtgaaaaaataattgaacccacaggcatgatacctattgacagactggagaaatccgttgaagggggtccatcaaaagccatagtcacccagagtagaaagtggaggctttggcctttttctttgaaaagatcaagatctaggaaggctgcgcagccgggggcagcagataccggaggctcagatattgggaatgctgctgatgattctcttgctagtgatgatgatgagaattttcttacacccaagccagtgaagaagatgatcagggcaatcaccccaacctctgaacaactagcatcattgaatctaaaagatggaatgaatcagataacctttacattttcgactgctatgttagggaaacagcaggttgatgccagaatctatttgtggcactggaacactcatgtagtaatctcagatgttgatgggacaattacaaaatcagatgtcctaggccagttcatgccgttggttgggat

SEQ ID NO: 12551 - DNA, 401 bp, Gossypium hirsutum
  Clone ID: GOSHI-09MAY01-C10746_1
ctcaactccagctaccgtctcattaggaatccatgcccgggaatctttatcaaatggacccgcgatcggcggctgaaaaggccgtttcagttatcggtttcggattcgacttgtgcagggatgtcaggctatccgcctgcctgcctggcccttccggctccagattgatcgaacttgactcagcagcgactcgggacctggtttttcctgatggagttgttgtaaaagatgtccccaattcgattaaatacgataaaggcgagcgtaccaggtttcggtctgatgttctgtctgttagccagatgtcagagaagttcaatcgggatctatcattatccggcaagattccttccggcctatttcaatgccatgttcgagttcaaaggctgctggcataaaga

SEQ ID NO: 12552 - DNA, 1417 bp, Gossypium hirsutum
  Clone ID: GOSHI-09MAY01-C10776_1
ggcacgcgcccggacggaacttgttggaccgacccacgcgtccgggcgaccgagtgaatgatgctcctgctctgttgatagctgacatcgcgacgagctgtggctgatgcaactgatgcagcaccgagtgcttctgacattgtccttactgaacctgcacttagtgtcatcatcagggctggcttgaccagtcctgccattttccaaaggatgaaaaattacactatgtatgcagtttccatcacgatccgtattgtgttgggattcatgctgttggccctcatctggaaattcgactttccaccattcatggtgcttattattgctatcctcaatgatggtaccattatgacgatatccaaagatagggtcaaaccatcacctctaccagatagctggaagctggcggaaattttcactactggaattgttcttggtagttacttggcagtaatgacggttatattcttttgggctgcatacaagaccaactttttcccgcgtgtatttggggtggcaactcttgagaaaacagctcatgatgacatcaaaaagcttgcctcagctgtatatttgcaagtgagcattataagtcaggccctaatatttgtaactcgatctagaagttggtcctttgttgagcgtccgggtttactactattggcggcctttgtcatagctcagttgattgctactcttattgctgtgtatgccaattggagctttgctgcaattgaagggatcggatggggttgggctggtgtgatctggctttataatattatcttctatatcccacttgatttcatcaagttcttcattcgctatgctttgagtggccgggcgtgggatcttgttattgagcaaaggattgctttcacaaggcaaaaggatttcggaaaagagcaacgtgagcttcaatgggcgcatgcacagagaacattgcatggtttgcaggcacctgataccgccctcgcgtcggagcgaacccatttcacagagctgaaccaaatggctgaggaagccaaaaggagagctgaaattgctaggttgagagaactgcacacactgaaagggcatgtggaatcggtggtgagattgaagaacctggacatagacacaatccagcaagcgtacacggtgtaaggcgggggaatggtattccgaaggaatagtggaaaatgtaatgagagggagcgttttcctgcgagtgaagctctaatatatgtatcttttattaccttaatcccgtccgccattttacaagggaaaggttattgtttatggcattttatgtttatattagtagtaaaaaaccatgtgttttgcttttgttgtagtaaaaaaaaaaccaaactgtgatagtagaactaagctcccatagtagtttttcggacccaaattaactttttcggat

SEQ ID NO: 12553 - DNA, 434 bp, Gossypium hirsutum
  Clone ID: LIB3149-035-Q1-K1-G10
agctgaaccaaatggctgaggaagccaaaaggagagcagaaattgctaggttgagagaactgcatacactgaaagggcatgtggaatcggtggtgagattgaagaacctggacatagacacaatccagcaagcgtacacggtgtaaggtgggggaatggtattccgaaggaatagtggaaaatgtaatgagagggagcgttttcctgagagtgaagctctaatatatgtatcttttattaccttaatcccgtccgccattttacaagggaaaggttattgtttatggcattttatgtttatattagtagtaaaaaaccatatgttttgcttttgttgtagtaaaaaaaaaaccaaaaaaaaaaaaaaaacaaactgtgatagtagaaataagaacccaaattaactttttcggataattccagttttcgagtga

SEQ ID NO: 12554 - DNA, 381 bp, Gossypium hirsutum
  unsure (1)..(381): unsure at all n locations
  Clone ID: LIB3147-055-Q1-K1-F1
gccaaaaggagagctgaaattgctaggttgagagaactgcacacactgaaagggcatgtggaagcggtggtgagattgaagaacctggacatagacacaatccagcaagcgtacacggtgtaaggcggtggaatggtattccgaaggaatagtggaaaatgtaatgagagggagcgttttcctgcgagtgaagctctaatatatgtatcttttattaccttaatcccgtccgccattttacaagggaaaggttattgtttatggcattttatgtttatattagtagtaaaaaaccatgtgttttgcttttgttgtagtaaaaaaaaaaaaaacaaaaactggtatagtaggaataagaacccaaattaactttttcggntt

SEQ ID NO: 12555 - DNA, 811 bp, Gossypium hirsutum
  Clone ID: GOSHI-09MAY01-C10766_1
cggggggccaagccgtccgcccacccgtccgggccaaccaagaaaacccagactcaaaatggcaatgtcgatggcgattgccaccgattgtggaagtagtaggtggagtatggcgtccttgaaatctgctctgccgcggctaacttccacagcttcttccattaagttaccatgtcgccgccgtgctcctccgcctgtcaaatcgcctcagctagttcgctctttcactgctctctaccccgttaaccctctccattccctcggtttctctggcctcaccagctttgagcaaaatttcaccataattgataacggtggccgattctatgcaatgcggcatggcagacgagtgcctaagctcaacagaccacctgaccagcggcgtgcactcctgcgaggcctcacgactcagctccttaaatacggtcggatcaaaaccactcgggctagggcaagcgctgtgaggaagtatgtagacaaaatgatcacgttagcgaaagatggttcgcttcacaaacgaaggcaagctcttggcttcatttatgagaaacagatcgttcacgcgctctttgctgaggtaccggagaggtacggtgagagaaatggtggatatacaagaattattcgaaccttgcctaggcgaggagacaatgcaccaatggcttacatagaacttgtataggtgaggttccttgcatgattctatgaacattgttgcctgttttgatactacattaatgctgctgaacataagtttatcttgtatgaatgctagatggtgtttttgttaaatttcatacgagtttgattt

SEQ ID NO: 12556 - DNA, 883 bp, Gossypium hirsutum
  Clone ID: GOSHI-09MAY01-C10706_2
cttcattgatttctgcttgcagctacgctggtctttttctccttctccggcgacgatctcaattcaccggaagttctcgccctaaggattacctctatcatatccttcgacatcttgtgattcagcatattctaacttgtcgccaccatgaatcccgaatatgattatctgtttaagcttttgcttattggagattctggtgttgggaaatcgtctttacttctggtcaaccaggtttgctgatgattcatatctggatagctacatcagtaccattggtgtcgacttttatatccgcactgtggaacaggatggataaactatcaaacttccaaaatgggacatgttcctccccgctcctgctgtgggacactgctggccaagaacgctttaggacaatcactagtagctattatcgtggggctcacggtatcatagttgtttatgacgtgacagaccaagagagtttcaacaatgtcaagcaatggctaaacgaaattgaccgctatgccagtgacaatgtgaacaaacttttggttgggaacaagtgtgatctaacagcaaacaaagttgtgtcatatgagacagctaaagtaataaaaccgattgcacatacaaacccatcccagatttatacagttttaggtattgaaaaaaagtcctcaacttctcatcacttacgtcttgttttccttctgtacaggcttttgctgatgacattgggattcccttcttggaaacaagtgcaaaggatgccactaatgttgaagaggctttcatggccatggctgcttcaatcaagaataggtatgtataacatatatgtgtgtatatatgcatacgagttatgatatactgctggataactaaaattagattacat

SEQ ID NO: 12557 - DNA, 1088 bp, Gossypium hirsutum
  Clone ID: GOSHI-09MAY01-C10706_1
ctttattatttatgacaacaatacaccaccacggggcttttgcttcttcgaattctcctccatctcacggtaaaaagatctcccttcccctctctttctctccggcggcgatctcaaatcaccggtaaatcgcaccgtaacgcccgattactcgtcacctctgtgatctcctctgacacctcgtggtttcagtttattctaactcgtcgccatcatgaatcccgaatatgattatctgtttaagcttttgcttattggtgattctggtgttgggaaatcatgtctacttttgaggtttgctgatgattcatatctggatagctacatcagtaccattggtgttgactttaaaatccgtactgtggaacaggatggaaaaaccatcaaactccaaatttgggacactgctggccaagaacgctttaggacaatcactagtagctattatcgtggggctcacggtatcatagttgtttatgacgtgacagaccaagagagtttcaacaatgtcaagcaatggctaaacgaaattgaccgctatgccagtgacaatgtgaacaaacttttggttgggaacaagtgtgatctaacagaaaacaaagttgtgtcatatgagacagctaaagcttttgctgatgacattgggattcctttcttggaaacaagtgcaaaggatgccactaatgttgaagaggctttcatggccatggctgcttcaatcaagaataggatggctagccaaccaggcatgaacaatgcgagacctccaacggtgaatatcaaaggacagcctgttaaccagaactctggttgctgctcttcttaaatgaaaatttagttttagttggtccatgtgatgatatttgtccttttgtgttatttgttgcatgtagttgggggaaaaaaaaactagtctgatttttatttcatttgatagtaaaagatggttctacatgatttttatattcttatctttgtttgttatattaaatactcgattctaaatttctattcttttaatttgatttgatttaatgactacattttgtacaaaatatggatatttgtgaaaatcaattcctaccaag

SEQ ID NO: 12558 - DNA, 596 bp, Gossypium hirsutum
  Clone ID: LIB3583-045-P1-K1-F8
ctcacgcttctttttttctacttctccggcgacgatctcaattcaccggaagttctcgccctaaggattacctctatcatatccttcgacatcttgtgattcagcttattctaacttgtcaccaccatgaatcccgaatatgattatctgtttaagcttttgcttattggagattctggtgttgggaaatcgtgtttacttttgaggtttgctgatgattcatatctggagagttatatcagtaccattggtgttgactttaaaatccgcactgtggaacaggatgggaaaactatcaaactccaaatagattatttgatgatttatacagttaaaagctgcatgactgcatctttgttctgaccattgtgggttgctatttgacttttcttgcttgtcactggacagtgggacactgctggccaagaacgttttaggacaataactagcagctattatcgtggggctcatggtatcatagttgtttatgatgtgacagaccaagagagtttcaataatgtcaagcaatggctaaatgaaattgaccgctatgccagtgagaatgtgaacaagcttttagttgggaacaagtgtga

SEQ ID NO: 12559 - DNA, 529 bp, Gossypium hirsutum
  Clone ID: LIB3828-025-Q6-N6-A10
aaaaatcatgtagaaccatcttttactatcaaatgaaataaaaataagactagtttttttttcccccaactacatgcaacaaataacacaaaaggacaaatatcatcacatggaccaactaaaactaaattttcatttaagaagagcagcaaccagagttctggttaacaggctgtcctttgatattcaccggtggaggtctcgcattgttcatgcctggttggctagccatcctgtatacaatcattgcatggattgaaaaataaaatacaataatttaactaaacaaatattaatagtaaaaaaagttataatggtaaaagtactatggagaccctatactaggaatgtaattgcattttgctttactcaaaaactcaaattaatccttttgttaaaaattccaaccatttctattgttaaaaattggcctctatacgctagcatgatgtacatgtggcatgccacgtaccactgtttgattattccatcaaaccatattagtttttaactgtacaaatggatgaaa

SEQ ID NO: 12560 - DNA, 631 bp, Gossypium hirsutum
  Clone ID: GOSHI-09MAY01-C10736_1
atgctattgagcaagaagtgcaccagtagcttctgctaaacaaaatagaggattagcagatgaggatcactgcgtgaacaggaacatattgcctaatcataaatatggttacgtagattgctctgagtctctggctggtattgcaagtgatttgggcagtgaatcagttgatcagggagttggtataaacggcgagactgctggagaaggaatatttggttctgagatggatgttgacccacccaccagtatttgtcaacctgaattaccatcccttagtgtggaaattctagctggtaatgccttgccagggcatggagacagtgcttttattaacaaggtccctaatatggatggttattcacttcccaaagacgatgccttaagagataacgaatgtgaagaagaaatatttaacataaattgtcacgaaagtgcaatggctgttgagccacaaccagatgaggttccccaaacagaacagctttcaaagccatgcacagtgacaaatcaagatcatttgggcagcaagtgtactgaaccttcagtgccatccccatccttgtgctgtactttgaagccgcaagtgcttgatactgctgaaccctcaggtgttctgaatctggatata

SEQ ID NO: 12561 - DNA, 521 bp, Gossypium hirsutum
  Clone ID: GOSHI-09MAY01-C10686_3
cggacgcgtgggcggacgcgtgggcggacgcgtgggcggacgcgtgggcggacgcgtgggctttattccctcgttcattttctttgtcttccttatttgtcgatctcgatcgagggatcgcgttgtccttgatgatcgcttgaagaatcgataagaggggcgtcgattttctgttaattattggtggaaggaaatagaagcttaaataaatttcgcccacttaagtttttttcttttttggcggcggttaacttgttaaggttctgggtaaaaggggatttttcttttcaaaagatcgagttgtttttagttttaatgatgttagccttaactgctgggttttgaagtgctatggaccttgttgttacaccgcaattaagatgacgctttacattggtcgcgaagcttcaaagttatggaagagaatttgttcagagacaactaccgagatcaacctttttcttgataactggaaataccttcttgctggtctcatctttcagtatattcatggtctagct

SEQ ID NO: 12562 - DNA, 665 bp, Gossypium hirsutum
  Clone ID: GOSHI-09MAY01-C10686_2
ccaccccgtccgttttattttggccttggaagcttaataaagcacgttgcgtggttggcagttatggttcaaagtctcttgattgtggcatcccgcaaacattacatggttgatgtagttgtggcatggtacactgttaatttagtggtattcttcatagacaagaaactgccagaattgcctgacagaagcagtggaagctcaccaatgttgctaccattgagccccaaagacaaggatagtaaaaccaaagaagagaaccccaagctcttgaatgggaattctgtagatcctgcagattggaggccgagaactcaagtaaatggcaagattcaggaagatggcaatggaatccatgatactgcaatgaacggagcataggtgatggaaattacatgctgtccctataatggggctgcctgcttgaatcctttatgtttcttccaaggctggtaaatttgaatttgtaatcataagaaaactgaaccttagtgcagttgtaaattgtgcagtcctcctaaagtgtgtttgttaaaaccatcatcagcatcaacatgtatcatggaatttccctattctctctaaacaaatgtcgaattggtgaaatataatttgttggtctccctcaatgccgaaggccattgagataagaagcttttcaattg

SEQ ID NO: 12563 - DNA, 1627 bp, Gossypium hirsutum
  Clone ID: GOSHI-09MAY01-C10686_1
tccgctttctcttccttggttccccatcctcatcctggatcgccagtctttgatccctcgaagaatcgattaatcggcggcggcggcggggtttacacttgtgctggatttgaagttggtttttgttggtggaaaacaaagggagaaacattaataaaatttgctaacttttattcatattttttaaaattttggggaggttaaggtttttgttaaaaaggggatttgcacaaaaattgagcggttttgaattttagagatgttgaccttaaccggtgggctttgaactactatggaactggttgttacatgacatcaagatgacgctttacattggtcgcgaagcttcaaagttgtggaagagaatttgtgcagagacaactacagagatcaaccttcttcttgacaactggaaataccttcttgctggtctcatctttcagtatattcatggtctagctgcccgaggagttcattatttacaccggccagggccaacacttcaggatcttggttttttcattcttccagagcttgggcaagataaaggctatatcagtgagactgtgttcacctgtgtctttttatcatttgtattgtggactttccatccattcatcttcaagagtaaaaagatctacactgttcttgtttggtgcagggtgctagcatttctagttgcttctcagattctccgaatcatcacattctattctactcagcttcctggaccaaattatcattgccgagagggttctaagcttgccagattgccaaaaccagagagtgtgttggaagtcctcttaattaattttcctcgtggtgtaatatatggttgtggtgacttgattttttcatcacacatgatcttcaccttggtctttgtgctcacctatcaaaaatatggcactcgaagcttcataaagcactttgcttggttggtagctattgttcaaagtctcttgattgtggcatcccgcaaacattacacggttgatgtagttgtggcatggtacactgttaatttagtggtattcttcatagacaagaaactgccagaattgcctgacagaagcagtggaagctcaccaatgttgctaccattgagcaccaaagacaaggatagtaagaccaaagaagagaaccacaagctcttgaatgggaattctgtagatcctgcagattggaggccgagaactcaagtaaatggcaagattcaggaagatggaaatggaatccatgatactgcaatgaacggtgcatagatgatggaaattacctgctgtcactgtaatggggctctgctcggatccatatgatcttttgattaaaggcttagcatcttccaatactggtaatttgatttgtattcttaagaaaaacagaaactgagtagtgcacttgtacattgtgctgtccttccctgtctttgcataaaatcatcggccatcatcatgaccagcatcaacatatatcatggaatattccgagttcctattgccagtgcctgtgtcattctctttcccatgtcgaacgctgaaattgtgattgttgtctctcaatgccgaaggccattgagataaaccattttttaaggttttaagtaactattaaatctttatgtttc

SEQ ID NO: 12564 - DNA, 381 bp, Gossypium hirsutum
  Clone ID: LIB3272-043-P1-K1-A10
gaaagagtttctcaaagtcttttttttttttttcaaagaaaagtttccttcatatttatatcgaagctgaagaagccttaattcaacactttattccctcgttcattttctttgtcttccttatttgtcgatctcgatagagggatcgcgttgtctttgatgatcgcttgaagaatcgataagaggggcgtcgattttcagtttattattggtggaaggaaatagaagcttaaataaatttcgcccacttaaatttttttttttttggcggcggttaacttgtttaaggttttgggtaaaaggggattttttttttcaaaagatcgagttgtttttagttttaatgatgtttgccttaactgctgggttttgaagttgctt

SEQ ID NO: 12565 - DNA, 750 bp, Gossypium hirsutum
  Clone ID: GOSHI-09MAY01-C10196_1
ctcatcgcgtccggtccctaattgctttcaggtggcatgtgagtatgccgaaaataatagagaagtctatctccatcctgtcagatgctggactaggaatggccatgttcccccgcggccgccctcgcgctcggcaacccaagatcatcgcttgtgggagactcggtagctacatttgccatggccgttaggttcttaactggtccggctgtcatggctgccgcttcgattgcagtagggttgcgcggcacactcctccgtgtcgccatcgttcaggcggctctgccacaaggaattgtaccatttgtgttcgccaaggaatacaatgtccaccctgcgattcttagcactgcggttatctttgggatgttgatagcattaccaataacgctggtgtactatattcttctaggattgtgagggtactttcatagtaagccagagatatgaacgggagttttccaggggttgatagaattgatcaaaaccggattatgttgttaattaacatgaggatattccgggaaagaagattttagtacaagaaaaagaaattgtcacaagggttccaaaaccattggagctaacctagctaaagatatttgacttagtaatgtgtcctccctgatttaagggatcatgcccccatgagaagccaagtttatccaatttcctagagtaattttgaggagaagaaaagaaggtcaatcctgcataagggagacaacgaagatgaaaatgggggcaaac

SEQ ID NO: 12566 - DNA, 478 bp, Gossypium hirsutum
  Clone ID: LIB3189-036-P1-K1-C7
ggatgttggtcgcagatcaccctcaaaacggggaaaacaaaggcatgacaggcagtggtgacgttaatggagaggactttagctttgctggaagagatggggaagaggagagagaaaaggaaggacccaatggtctcaataagttggggtctagttcaacggccgagttgcaccctaaagccgccggagggccggagtctggcgtaggcaaacaaatgccgccggcgagtgtaatgacccgcttaatcttgatcatggtctggcgcaagcttatacgaaaccccaacacatattccagtctcatcgggctggtttggtccctaattgctttcaggtggcatgtgagtatgccgaaaataatagagaagtctatctccatcctgtcagatgctggactaggaatggccatgtttagcttaagtctgtttatggcactgcaacccaagatcatcgcttgtgggaactctgtagctacatt

SEQ ID NO: 12567 - DNA, 401 bp, Gossypium hirsutum
  unsure (1)..(401): unsure at all n locations
  Clone ID: LIB3166-023-P1-K1-C1
gaacggncggggggagccacgcgttctnccacactttcncccacttttccttttatcccaagaccatcgcttgnggagactgtgtatctacatttgccatcccccctaggctcttaactggtccggctgtcatggctgccgcttctattgcagtagggtttgcgcggcacactcctccgtgtcgccatcgttcatgcggctctgccacaatgaattgtaccattttttttcgccaaggaatacaatgttcaccctgctattcttagcactgtctttatcttttgggatgttgatagcattaccaataacgctggtgtactatattcttctaggattgtgagggaacttccatagtaagccacttttattaacaggagttttctcattgttgatagaattta

SEQ ID NO: 12568 - DNA, 642 bp, Gossypium hirsutum
  Clone ID: GOSHI-09MAY01-C10126_1
ctgaacatgaaaagagaaggggttgctgcttctgtggagtattctccataccccatatacgcggaccaaaggaacaggttcaagcaccacagccttatgcaagacttcgacgacttgttcaaggaaacagaggctatgagaaagagattgcaggttttgaaagataaaaagttgacccttttggctgaagttcggtttttgaaacggaggcacaagttcttgatgcaaaatcgaacttcgaacacaccggcagaacaaagctttgcgcattcacaaaataaggtgatcagaagtaaaccaaatacggtggttttgaaatcgaccggaaaggaacatacttgggggcgcctagctactggtttcgatctgaaccagaaggtaaagaccaaggaaaccactttagctcatccttctcctatgtttgacttaaaccaaaagcaacagaaagttttcagcgaaaagcagagaagttactttgcgaactagtttaccggctctcgactcataccagaaggaaaggccttatagcgaaaaggaggctactgcatggcgccggttttcgatttaaatcagatttcggtgatctattcgtagtttagtatgaatctgctttttataatcttttgcgtaaggggttagttc

SEQ ID NO: 12569 - DNA, 498 bp, Gossypium hirsutum
  unsure (1)..(498): unsure at all n locations
  Clone ID: LIB3584-010-P1-K1-C11
aaaataaacccttttggctgaagttcggtttttgaaacggaggcacaagttcttgatgcaaaatcgaacttcgaacacaccggcagaacaaagctttgcgcattcacttaataaggtgatcagaantaaaccaatggggggggggggattttttttttnaaaggaacatactttggggcgcctagctactggtttcgatttgaaccagaaggtaaagaccaaggaaaccactttagctcatccttctcctatgtttgacttaaaccaaaagcaacagaaagttttcagcgaaaagcaggaagttactttgcgaactagtttaccggctctcgactcataccagaaggaaaggccttatagcgaaaaggaggctactgcatggtgccggttttcgatttaaatcagatttcgacagaggaggaagaactaccagctaataataactcaatgggagtngaggaattgaagagaagttcactcagaataggaagtgatgag

SEQ ID NO: 12570 - DNA, 1349 bp, Gossypium hirsutum
  Clone ID: GOSHI-09MAY01-C10096_1
ataatcttctctttcacttgtaacacgtcttgatctttgaacttctttccttgtttagtgatggaaggtgagttagttttacttggcggtggtggtggtggcggcggcggtggttcttctggggtttctacaaatgaatcagcagtgttgtctaacgtggaggttgtttctgaggcatgttcatatccagctgagagtgagttggagttaggtctggggctgagccttggtggtgctacagggaaaactaagcctgccactgccacttcttcatggggtgagtgtggtagaatcttgactgcaaaggacttcccttctgtggtttctcatagaaccaaaaatggcggaccttcccgttcggcctcccggcccaaaagagctgctgaatctgtctcccatgagggtggatcccctactggtgtcagtggaagcagtcaagttgtgggatggccacccataagagcttataggatgaacagcttggtgaacccaagcaaagtctcaaagagctgatgaaggagacagtggaattggtgaaaaagataaacccaaagatgctttgacgcggccgcttaattacaatggtaacaaaatcagttcaacaactactgttaatgaaaaaggacatcttgggtttgttaaggtgaatatggatggaaccccaataggaaggaaagttgatttgaatgctcattcttgctatcagagtttggctcaagcacttgaggatatgttcctcagatctactaactcagttggtgcagagaaggaacaattaaccaaggcttctaagcttttggatggatcatctgaatttgttttgacttatgaagacaaagagggagactggatgcttgttggagatgtcccatggaggatgtttgtgagctcggtccgaaggctccgaatcatgaggaccgctcgcgcgggtggacttgccccaggattccatgatagcaatgaaaggcaaagaagcaagcccatttaggcacatcaacgccatgagtcatttaaattccttaaagaagactagttctataacagactcctcaggttgaacacagaagctaaagcaaattagagaagttgatgaatattgatatcgcacatgagattggtttctcaccgcttgatagagtcgtcatcctcgaatcatcatatgattctcgttgctgatgttatatttttcgtgggtttgttttggtaggtgaaattcaatctagtttttcgctcttatacagtgccatgatcatatatacattctcacaacctttgactgaatgctgttttggcatactgaaaatatgggactattaagaaatctagagtgtttttgagttttgttgctt

SEQ ID NO: 12571 - DNA, 459 bp, Gossypium hirsutum
  Clone ID: GOSHI-09MAY01-C10086_1
cccacgcgtccgctttagggaagtataatggcttctctgactatggttccaagttcagtggacgaatcccatatggagaaaggtttgcacagactgatggaattgctccagttgggagaggaaggggaccttcttggagatctgaaacgtctgatgattgggatttccctgcgtttaatgcatcaaggaatggacaatttcaatcaagaagagctccagctagcagcggcctggatggtagatcacccaaatcagaacacgagagtgatcagattggtggcaggagaggttgggacaagggtcccgggcctgaaagacttggtgaaggaccttcagctagaagtgtctggcaggcatcgaaggatgaagctaccttggaagcaattcgtgttgctggggaggacaatggagcatctcgaactggacgtgtgcctgaattaaccgctgaagctctaggag

SEQ ID NO: 12572 - DNA, 498 bp, Gossypium hirsutum
  Clone ID: GOSHI-09MAY01-C10056_2
tctcctcactttttgcaacaaaattcacggagagactacaccaacaaatggaggcattgaggatgagactatttttggccatgatggtggtgttgatggccatgtcggcggtccaatatgttgcggcagctgatgcaccggcccctactcctacctcagatgccaccgcattcgtgccgacggcgtttgcttcccttgtcgctcttgcgtttggtctcctcttttaaaatgggtgagttgtattagttgttgatattgcaatattgggggttggggagagttcttttgtcttcttttattctttctctctaaaggccatacaactctttttaatccttagattatgaagatggaaaagagatagagaaaaggtggaggattttttctgttgttgttgggattttacttatgacaaatggtggatattttcattgtttcgattctaatgtatatctgattgttgctgagctaatgaaggtgttgttacttcgttccatt

SEQ ID NO: 12573 - DNA, 575 bp, Gossypium hirsutum
  Clone ID: GOSHI-09MAY01-C10056_1
tcgtcacgcgtccgcgtccgcatattcctcacttttgcaacaaaatccaccaagagactacaccaacaaatggaggcattgaggataagactatttttggctatgatggtggtgttgatggccatctcagcggtccaatatgttgcggcagctgatgcaccggcccctactcctacctcagatgccaccgcattcgtgccgacggcatttgcttcccttgtcgctcttgcgtttggtctcctcttttaaaatggatgaattgtattggttgttgatatttcaatattgggggttatgtagagttcttttgtcttcttttattctttctctctaaaggccatacaattcttatgagtccttcgtttatggagatggaaaaaagatagagaaaaggtggagattttttttctttttctactttaatttttccttatgacaattggttgatgtattcgttgttttgattttaatgtatatttgatgtgatttgtttgttggtgacctaatggaagttttgtttgctgctaattccttaaaaaaaaaaaaaaagggcggtcgagaaaagcaaaattgcc

SEQ ID NO: 12574 - DNA, 161 bp, Gossypium hirsutum
  Clone ID: uC-gsflnu33B006d06b1
taaaatccaccaagagactacaccaacaaatggaggcattgaggataagactatttttggctctgatggtggtgttgatggccatctcactcagcccctatcttctccttgctgatactcccccctcccttcttctaccccctacgccaccctttctcctc

SEQ ID NO: 12575 - DNA, 427 bp, Gossypium hirsutum
  Clone ID: GOSHI-09MAY01-C10076_2
cccacgcgtccgcccacgcgtccgaatggcgagtggtggtaaagtgtctttcaaagtcactcttacatccgatccaaagctccctttcaaagtgtttagcgttcctgaagcagccccgtttacggctgttttgaaattcgcagccgaggaattcaaagtccctccccaaaccagcgctatcatcaccaacgatggtgtgggaatcaatcctcagcaaagtgcaggaaatgtctttctcaaacacggttcggagcttcgcctgattccccgtgacagggtgggagccttttgaatgcttaaaaacttaacgctagtttatcacctccctttattatgggatctattttcttgacatgattgaacctttactgggtaaccatagctgattacatatatttgggagttaaaatgatataatgggtatggt

SEQ ID NO: 12576 - DNA, 626 bp, Gossypium hirsutum
  Clone ID: GOSHI-09MAY01-C10076_1
cacgcgtccgcccactcgttcgcctgattatttttacatattccttgttgtcgtaacaatcacgcgagaatgtaggcagttttaaattttatcaaatatataaatcggatctctctgtcgttgaaaagaaatttcagaaatcttaaacagcgaaggagagaaatggcgagcggagggaaagtgtcttttaaagtcactcttacctctgatcctaagctccctttcaaagtgtttagcgtgcctgaagcagccccttttacagccgtcttgaaattcgcagccgaggaattcaaagtccctcctcaaaccagtgctatcatcaccaatgatggtgtgggaatcaatcctcagcaaagtgcaggaaatgtgttcctcaaacatggatcggaacttcgcctgattccccgtgacagggtgggagccttttgaaataacaaaaacttcatttgttatctctgagtgagaagactggttatgactttgtttggttatggatcctttgttttggtatgtatgtttaaacttttacttgagtgtagaacatgacggatagcaaattcttttttccctaaagaaaatatataagagcaataataaaataaagaccctgaattttgtttgatgca

SEQ ID NO: 12577 - DNA, 336 bp, Gossypium hirsutum
  unsure (1)..(336): unsure at all n locations
  Clone ID: AI725550.1
tgaaattcgcagccgaggaattcaaagtccctcctcaaaccagtgctatcatcaccaatgatggtgtgggaatcaatcctcagcaaagtgcaggaaatgtgttcctcaaacatggatcggaacttcgcctgattccccgtgacagggtgggagccttttgaaataacaaaaacttcatttgttatctctgagtgagaagactggttatgactttgtttggttatggatcctttgttttgctatccgtcatgttctacactcaagtaaatatataagagcaataataaaataaagaccctgaattttgtttgatgcncaaaaaaaaaaaaaaaaaaa

SEQ ID NO: 12578 - DNA, 492 bp, Gossypium hirsutum
  Clone ID: GOSHI-09MAY01-C10356_1
cttgttctcagtcatggagcttagatgcctctattagcacagttaaatgaacatgctaagctgtcaatgctgagaagggcgacttggacattatcaaattcctgggggggcacgccacagcctccatgggagcaggtgacaccagctctacctgcgcttgagcgtcttgttcattcaaatgatgaagaagttctgactgatgcctgtcgggctctctcgtatctgtctgatggtacaaatgacaaaattcaagctgtgattcaagcaggactctgcccacgccttgtcgagctcctgctcaatccatctccttcagtgctcattcctgctcttcgtactgttggaaatattgtgactggagatgatttacagactcagtgtattattgatcatggtgcatcagcatgccttatgaacctattgaccaataattataaaaagagtatcatgaaggaagcatgctggactatctaaaacattacagctggaaac

SEQ ID NO: 12579 - DNA, 457 bp, Gossypium hirsutum
  Clone ID: LIB3584-033-P1-K1-E8
cgttaaccaaatcccccaaatacaagtttgtacttatttctttttcccttttactctcaaaatttgaattcacccaccatagctactccttttctatcgatctgttagggttttggagaaacaaatagattttgaagagaagaagaagaagaagaagaagaagaagaggaagaggaagagaagaggggggaggaggaagaagaagagagtgaagataagggactaaaaaggtcaaaggtataagtagaaaggggcgttctaggaaatctggttgagatttggctgagaagaaagagccagtgacgcctagtagtgataggcctacaagggaaaggaaagtcgtagaaaaggttttgtggtttcttttggaaggcagccagaataggaaaaatggtgcataacacaagataagtggattaatagttcaaatggtgaagctcgagcgcccaatgcaggt

SEQ ID NO: 12580 - DNA, 388 bp, Gossypium hirsutum
  unsure (1)..(388): unsure at all n locations
  Clone ID: LIB3166-024-P1-K1-G6
gggggccccacgctccggcaacccttnccccaacccttcctttctcccttccggacaactaataanaagaagaagattattaggaagaggaagacaaaaggggggaggaggaagaagaagagagtgaagataagggactaaaaaggtcaaaggtataagtagaaaggggcgttctatgaaatctggttgagattaggctgacaagaaagagccagtgacgcctagtagtgataggcctacaagggaaaggaaagtcgtagaaaaggttttgtggtttcttttggaaggcagccagaataggaaaaatggtgcataacacaagataagtggattaatagttcaaatggtgaagctcgagcgcgcagtgcaggtaaaaaaccgttgcttc

SEQ ID NO: 12581 - DNA, 556 bp, Gossypium hirsutum
  Clone ID: GOSHI-09MAY01-C10276_1
tcggccaccccttccgcaatttttaaatttttaacccagaagcagcatggcatatcgaaaatcgccttccccctccaaattggccttcccatggcaatgttgagctcaaagacctccaggttagataccttccaagcacgcctcttgtgcttaaaggcattactctgagcattaatggtggtgaaaagattggtgttgtgggtcggactgggagtggaaagtcaactttaatccaagttttctttagactggttgagccaacaggagggaaaataataattgatggcatagatatctgcatgctgggacttcatgatcttaggtcacgctttgggatcatccctcaagaacctgtcctttttgaaggaactgtgagaagcaacattgatcctataggacagttctctgatgaagagatatggaagagccttgagcgctgccaacttaaagatgcgattgcttcgaaacctgataaactcgattcattagtggcagacaatggagataattggagcgtggggcaaaggcagcttttgtgcttggggagagttatgct

SEQ ID NO: 12582 - DNA, 433 bp, Gossypium hirsutum
  Clone ID: GOSHI-09MAY01-C10266_1
aaaaaaccccaattttttaatccaactttctctctctttcagtgatctatgctttcacaatcaccaaactgggagacaggcagccacctccccaccctcgcccttcacttcttcccctctcttcaataattctctcttttggggtactaaaaagttccatcttgcagaactccaagggataaatattccttttctttcttccccattcttcccctctctatccatccatttcttctctctttttttttttcttcagtttcaaaattaacttctttgagctttggggaataagccaaattctgggtgtgtgttttttttttccttcctggttaacttaagccttagttattgggttatttctagaaggaaaggtggtgtcgctgatcctgagattccctcaagttttagactcatttcggagaccgatctgatc

SEQ ID NO: 12583 - DNA, 392 bp, Gossypium hirsutum
  Clone ID: GOSHI-09MAY01-C11956_1
aaatacccgacgtttgctctacgtcgcctctttgtctaatggtgttttaagcggttttctcatttcaatcctcaatttttttgaacctttctcgtatgattaagacatatatatatatttctttttaatcataaaatcatgcatcatccattattagttatcatcatcttatcgataaacaaataatttaacctttctctctcttgtatttgttttcattgagatgaacaaagcttaaggtttttttttttttaacaaaagtcaaagaaaacccagaaatatatataatttttgtagaaaaagaagcaaaaatttcatatatttctagtctgtgagttgtaatttttttaataaaaatattcaaaaaagttccaaaacaccttttggtcatt

SEQ ID NO: 12584 - DNA, 704 bp, Gossypium hirsutum
  Clone ID: GOSHI-09MAY01-C11886_1
gcggttcttaacctgatagcatcacgtttgtagcaatactatcggcttgtgctcatttaggtttggtcaatgacggagagcggctgttttggttaatgagaaagaagtatgggattgattcgagaatggagcactacgcttgcatggtaaatctttacgagagtgcagggctgatagatgaggctttcaacatgatagtggagagaatggagtttaaggcagggctaactgtgtggggagcaatgctatatgcctgttcggttcatggaaacatacaaataggagatattgcaggtcaaaaacttttcgagctagagccagataaccaacataattttgagttattgatgaagatatatagcgatgcagagagggtgaaggatgtggaaagagttggaaaattgatgttggatagaggattataatatagagttgtctgctagtggtaaatagttaaaggtggaaagctcacctcaagaaacttgattggtgaatcttttatgccagagggccttaaaagcaaatcagtgtggggcttgtggatgtggttacagatattgttttggctacaattatataccaacatttgatttgtacttcctttaataaaaaaaaacatttgatttgtacaataatggtctggaaggttcttaacatagctaacatgcaagtaatggagtatctggctttaactgttacagaat

SEQ ID NO: 12585 - DNA, 1200 bp, Gossypium hirsutum
  Clone ID: GOSHI-09MAY01-C11866_1
ggcttcgactcccaattttgggatcacattctgcctccaagcctccgtttccgtgtctttccattcctctcttactaatctttccttaaaatctgttgagacttctaaacaacagtcatatagaatagctgcaatgtcaaaggcagagagtagtagcagcgaccaagtgaaacttgatatctctttgagccccagagttaactctgtgaagccttcaaagacagtggctataactgatcatgcaactgctcttgcacaagctggtgtccctgtcattcgattggctgctggagagcctgattttgatacaccagccatcatagctgaggctgggataaatgctattcgtgaaggttacacaaggtacactcccaatgcaggtactttggaacttcgtacggcaatctgtcataagctaaaagaggagaatggtatctcttatacacctgatcaaattgtggtcagtaatggtgctaaacagagtatccttcaagcagttcttgcagtttgttctcctggggatgaggttataattcctgctccatattgggtgagttacccggaaatggcgaggctggccgatgcaacacctgttattcttccaacactcatttctgacaattttctattggacccagagctccttgagtctaatatcactgaaaaatcaagattgttgattctatgctccccatcaaatccaactggatctgtttaccctaagaaactgcttgaaaaaattgcagaaattgtagcaaagcatcccaggcttctggtgctatctgatgaaatatacgaacatataatttatgctcccgcagctcacacaagctttgcatcattgccaggcatgtgggagcggactttaacagtcaatggcttttccaaggcttttgcaatgactggatggcgacttggatatattgctggacctaaaaactttattgcccatgttattaaattccaaattcattcgacttcaggaagctataatatagcacaaaaaccaggagtggctgcattaggcttgggttatgctggtgggggagttatttcaccatggtgaaagcctcagggaacgtcaagatttcttggttaaaagctttggagaattggaaagtgtaaagatatctgaacctcagggagctttctatctattcattgatttcatttcttactacggaataaaattgaaggttc

SEQ ID NO: 12586 - DNA, 594 bp, Gossypium hirsutum
  unsure (1)..(594): unsure at all n locations
  Clone ID: uC-gsronu33B012g11b1
ttccaacactcatttctgacaattttctattggacccagagctccttgagtctaatatcactgaaaaatcaagattgttgattctatgctccccatcaaatccaactggatctgtttaccctaagaaactgcttgaaaaaattgcagaaattgtagcaaagcatcccaggcttctggtgctatctgatgaaatatacgaacatataatttatgctcccgcagctcacacaagctttgcatcattgccaggcatgtgggagcggactttaacagtcaatggcttttccaaggcttttgcaatgactggatggcgacttggatatattgctggacctaagaactttattgcagcatgtaataaaatccagagtcagtcgacttcaggagctagtagtatagcacaaaaagcaggagttgctgcattaggcttgggttatgctggggnggaagtagtttccaccatggtgaaagccttcaggaacgtcgagatttcttggtaaaagtttggagaatgaaggtgttagatattgaacctaggagcttctattatcatgattcagtctactacgaanagtgagggttgtaaatgaaatc

SEQ ID NO: 12587 - DNA, 507 bp, Gossypium hirsutum
  Clone ID: GOSHI-09MAY01-C11836_1
cggacgcgtgggttccccttctttttctttgtaatatacccttaaaaagcattactcaatctccatgtgctgacacaaaattcctccaagaaaggacaacaggaagaaaaaaaagagagagagaaaaaattatgcttcctttagtcccttccatatttcttcattttattttcatcttcttcgtggttgtccacggcagcaagaacgattccatttacgagatactaaagcttcatgggcttcccacggggctgcttcccaaggggataacccgatttgaatacgacgatacgggccggttcgaggttcacttggatcaggcctgtaatgccaagtttgaaagcgagtttcattatgacattaacgtgtcggggactttgagttacgggaagatcatggaattgtcagggattttggctcaagatttgttcctttggttcccggttaaagggatttgggtcgatgtccccagctcgggtcttatttattttgacatccttttcgttt

SEQ ID NO: 12588 - DNA, 659 bp, Gossypium hirsutum
  Clone ID: GOSHI-09MAY01-C11556_2
ggaaaacaatctaagatcccaagcaaaacccgatatccttagccttttaaattcattcattcattcattcacttcctctagtttcgtttccgtccaacgtaactaccacgccgaccgtcgtaaccaccgccgtaaattctcccaaaatggcgaaactacccttacagatcctcctcctcttcctcctttccctcatttcctcctccaccgcagagatcaaaaccctaaccatcacctccgactctcgccccatgatcctcttcgagaaattcggcttcacccactccggtcacatcgccatctccgtctcctccgtctcggtcacttcctccgccaatgcccccaatcccgacgcttcccgcctcggcttcttcctcttatccgaggaagctctcctccaagtcctcctcgagattcaacagaatcctcacttttgcgtcctcgattctcgctacatccagcatctcttcaccttcggcgacctctccccacctcccctctcgcgtttcaaccacacttaccctgtttcttcacccaatgaatactctctctttttcgccaattgcgcccccgaaacccgcgtttcgatgaacgtccgaaccgagacctacaatcttgaacgcgacggttccaaagattacctctccgctggtctaacc

SEQ ID NO: 12589 - DNA, 1846 bp, Gossypium hirsutum
  Clone ID: GOSHI-09MAY01-C11556_1
aaatgttagactaaaacagaatgatgggttggtgtatcggtaaatttaagagcccaataaattggaccgactaaagcgacaccgtatttatctttgccttcagagttgagtttctaatgaaggaaaaagaaaacagaggaaggaacgttactaaagtagattcacattattcagatccggaaagcccttacaaaatttcctccctcctttcctttttgccaaccacctccctaaaatgacgaaaacaaccgtaatcctcctcttcttcttcctctccatcgtctcatccaccacggcggagatcaaaactctgaccatcaagtccgactcccgcccgatgatcctcttcgagaaatttggcttcacccacaccggtcacgtcaccatctccgtctcctccgtctccgtctcttcctcttccaacgcccccaacccctccccttccctcctcggtttcttccttctatccgaagaatctctcctccaggtccttctcgagattcaacaaaattcccacttttgcgtcctcaactcccgctacatccaacacctcttcaccttcagcgaactctcaccgcctcccctctcccgcttgaaccgctcttaccccgtttcttcccccaatgaatactctctcttcttctccaactgcgcccccgaaacgcgcgtttctatggacgtcataaccgaaatctacaacctcgaccgcgacggttctaaggattacctctccgccggccagacacagctcccttctctttacaccgtcttctctgtcctctacttgttcttcttagcttattgggtctacgtttgttacaccaacagacgatccgtgcaccggatccatttattgatgtccgggttgctcttattcaaagctttgaatctgatctgcgccgccgaagataagcattacgttaaggttaccggaactcctcatggttgggatgttttgttctacattttccagtttattcgtgtcgttttgttatttactgtcatcgttttgatcggcaccggttggtcgtttttgaaaccctttttgcaagaaagggagaagaaggtcttgatgatcgtgataccgcttcaagttttggctaatattgcgtcggtcgtgatcggtgagactgggccgtttattaaagattgggcgacgtggaatcaggtattcttgctagttgatattatctgctgttgcgccattattttcccaattgtttggtctattcgttcgttgagggaaacttcgaaaactgatgggaaggctgcgaagaatttggcaaagttaactctgtttaggcagttttacatcgtggtgattggatatctatattttacgagaattgtggtgtttgctttgaggacgattgcagcttacaagtatcaatgggtaagcaatgcagcggaggagactgcatcattggcgttctatttgattatctttttcatgtttaggcccgtggagaaaaatgagtactttattcttgaggaagaagatgaagaggctgctgagctggctcttagagatgaagatttcgagctttgagaacctgggggctgttgaggagtgaattggtataaagggttactctggatttttacctttgatcaaattggggtaattttgcaggtttttttgtgtaaactttacagatacaaattgcttcatctggtctgcaacttgctgctgctcgtctccttactgctacagttttgtttaacttgttccatttgttactctatttctgcttaatgaaattgttatcaagctcataatggaagttgcactaaattcaatttaatcttcccaaatgattcactattaggcagtggatttcagatg

SEQ ID NO: 12590 - DNA, 816 bp, Gossypium hirsutum
  Clone ID: GOSHI-09MAY01-C11496_1
atggccaccaattcggtctttcctaaagtatacgttggctgctcaccctccgaagagggatgacggtgatggtaaggcagaggccaagttaggatcaggatgcctgtatgtcaaagttagtatggatggtgctccatacctgaggaaagttgatctcaaaatctatggcagctacaaagatctctcctcggcactcgaaaagatgttcagttgcttcacaatcggtcagtgtggttctcatggagtttctggcggtgatggattgtctgagagccggttaatcgatctcctgcacggttccgagtatgtactcacctatgaagataaagacggtgactggatgctggtgggcgatgttccttgggagatgtttaccgactcgtgtaagagattgaggatcatgaagagtacagaggctatcggcctagctccgagggctatggagaagtgcaaaaaccgtacctagacgattcaatgtcactgtaactactgaaagcataagatggaagtttgctactatatatatttatatatatgtgaatgtcaaaagcctttgactatttatcaaaatccgggtcttctatttgcttctaaagcatgtttctaagcactgaaggctttgctattgttcgtagggcaagataacccaaccaagtactgtatgtctttactttccaggttatatagatttgttgttgtaaaaaaaaaaaaaaaaaaaaaatttttaaaaaaaaaaaaaaaaaaaaaaaaaaaaaaaaaaaaaaaaaaaaaaaaaaaaaaaaaaaaaaaaaaaaaaaaaaaggggcggccgtttta

SEQ ID NO: 12591 - DNA, 1323 bp, Gossypium hirsutum
  Clone ID: GOSHI-09MAY01-C11476_1
ctctctctctctctctctctctcatttaacctttctccgttatattcagataagcggtaattcgccattagcgaaactctctctttcgcttttgtcatgcgtttcttaggaagtttgattctttgaaccctctgcttcttttttttttctttttaaactgtttacctgaagagagagtgggaggtgaaatggcgtcgggattctctgggggtggcccagatttttacggtgggttagccggcagatcggtgggtaacactggtaccatcaacaacaaccaaacgacggcaccgtaccggacacaggtccccggaatgttcatggacacgtcgtctcagatcgtgaaccgagcaacgcctggtttcatcgggaagcgaacactagcggattttcaaacgcaacaagcactaaacaataattccggtcgtctttttctccgttcggttaagcccagaacttaccagcatacttctccgatttctccgttatctccaatcgatttaccgttcaacttgtcgcctgatgttatgagtaatttctcgtctccttcttcttgcatgtcgcagcggtatggtttgccgcttttacagcaactgaggccgcaacaggttcctctcggtatcaacactggggctacaatccaggccgtgaacactgggttatcaggtggtccgtacatgaacccggtttcgacgcgggttgttcagccgcacgacccggaaaagaaaatgatgaatcaacttcaagatctggagaaacagctgttggacgacgataacgacgaaggagacgctgtttctgttattaccaataccaacagtgagtggtctgaaacgatacaaaacttgatcggttcaaccggcagccctaacaacccgattgccccatcacctacatcaaccacttcatcgtgctcgtccacgtcatcgacggcttctccagcttcaccttgttcaaagcagacaatattggatgccgcagctgctatttccgagggaaaaaacgacgtcgttaacgagatcctgacccgattagctcaagctgctaactcaaaaggtagctcagaacagaggttgatggagtgcatgctatcagctcttaaatctagggttaactcggttgaaaacccaccaccggtggccgagttgttcagcaaagaacacgctgcttcaactcagttgctttatgatctgtcttccttgctttaaactcgggttcttggctgctaatcaggcgtatcctccatgccactttagacaaaccaagctgtaataaagttcatggtggtggattttgatttcggggtaggggggcagacatgaa

SEQ ID NO: 12592 - DNA, 551 bp, Gossypium hirsutum
  Clone ID: GOSHI-09MAY01-C11466_2
gtgcaagaatcctttctgtaagatgttttctttcatgtaccaactgagtacgggaggtccgcccgcccctccgagcgcagcaaaatatcagattctgttctttggtacctttttcaagaacccatggcattgtcgaaacacatggaagctgtcttcttcgccgaagccacatcgagggcatctcacgattgtggttattcgcttatttcgtaggttaactagactagagtaggcatatagttccaggatatccgccagactagcagtaggatttttgatggaagtgtgtaaattccatagctttctgtggaattctttaaagctcggtttgtaataaattattaggagacaaaacatcttcttgtaatagtttgtaggcgctccgaacagagaactctccagtcgcctctcctttccaaactctcaaatcttcgctgtccgtttctgcaagtggtatcttcaaaattttctgagctatgtctacttgaaaggttcgatccctggaatccatcaatctgtccatatggaaacattatttcctcttacaattc

SEQ ID NO: 12593 - DNA, 496 bp, Gossypium hirsutum
  unsure (1)..(496): unsure at all n locations
  Clone ID: LIB3585-055-P1-K1-F3
cggaaancccgggccggcccgacccgtccgcgaacgcgtgggcggacgcgtgggtgattacgggagttccatatgacccataaagcgcagggaagtagtcagattctgttctttggtacctttttcaagaacccatggcattgtcgaaacacatggaagctgtcttcttcgccgaagccacatcgagggcatctcacgattgtggttattcgcttatttcgtaggttaactagactagagtaggcatatagttccaggatatccgccagactagcagtaggatttttgatggaagttgtaaattccatagctttctgtggaattctttaagctcggtttgtaataaattattaggagacaaaacatcttcttgtaatagtttgtaggcgctccgaacagagaactctccagtcgcctctcctttccaaactctcaaatcttcgctgtccgtttctgcaagtggtatcttcaaaattatctgagctatgtctacttg

SEQ ID NO: 12594 - DNA, 641 bp, Gossypium hirsutum
  Clone ID: GOSHI-09MAY01-C11416_4
cccacgcgtccgcccacgcgtcccttcttgtgtggtcctggttgagcttgcgtgtcttcagacatcatccttgacacttgacgaggcagtcaagactacaaatcgcagggttaatgctttggagaatgttgtgaagccaagggtggagaataccataagttacatcaagggagagttggatgagcttgaaagggaggatttcttcaggttaaagaagatacaaggttataagaagagggagatagagagacagcttgcagaggccaagctgcttgctgaggaacaggttgctgagaaggcttccttgagaaaaggggtctctataaattcagctcacaatatgctatccgcagccagggagaaggatgaagatattattttctaatgaagagggtagttatggtctttcctaggagctctgggtttctatctggtgcctatttgatggcgggagattcctttaatcatttagtgttgttttgaataaatggaatgtcatgaaatattgagtattattatcaatgagctgatattcatgacgatagacgtgaaacatttcaaagctctcaagtctgttgcttgaatgatcttctatgctttgaatgagctcctagagcttgcatacgtgccatcattgctag

SEQ ID NO: 12595 - DNA, 1125 bp, Gossypium hirsutum
  Clone ID: GOSHI-09MAY01-C11416_2
ctcaaaatcaaaattacaataaaactcgagatacgcacagcgaaattcattcttcgatcttcgaacgccggcggcgaaacaccgctctgtttaccggtgacgtcgttttcttcagatatctgaaagatgtccggtcaatcccagcgcttgaatgtggttccaactgttacaatgcttggaatcatgaaagctcggcttgtgggtgctacaagaggtcatgcacttctcaagaaaaagagtgatgcccttactgtacaatttcgtcagatccttaagaagatagtatctacaaaagaatcaatgggagagattatgaaaacctcttcattttccctaactgaggccaagtatgttgctggtgagaacatcaagcatgttgtccttgagaatgttcaaaatgcttctcttaaagttcggtcccgacaagagaatgttgctggagtgaaacttcccaagtttgagtatttcactgaaggtgagaccaagaatgatctgactggtttggccagaggtgggcaacaggttcaacagtgtcgtgctgcttatgtgaaagcaattgaggttctagttgagcttgcttctcttcagacatcattcttgacactcgacgaggcaatcaagaccacaaatcgcagggttaatgctttggagaatgttgtgaagccaaggttggagaatacgataagttacattaagggagagttggatgagcttgaaagggaggatttcttcaggctaaagaagatccaaggttataagaagagggaaatagagaaacagctagctgccgcaaaggagttcgtcgaggataagtttgctgagaagatatccttgcagaaagggatttcaataaatgcagctcacaatttgctatctgcggccagggagaaggatgaagacattattttttgatgaagaggttagtctgtattttttctggtattcttggtttttctatttgatgtatgttcgacggtgggagattcctttattttcaggtggtgttttgaataaatgttatatgcatgtctctactccacttattttgtgttatggtgaatgatcagacatacaccatttcgaggctccaaaaaaaaaaaaaaaaaattctggtcgacgcagccg

SEQ ID NO: 12596 - DNA, 722 bp, Gossypium hirsutum
  Clone ID: GOSHI-09MAY01-C11416_1
cccatgcgtccgcccacgcgtccgcccaaaaataaaaaaaaattatcgcacagaaaaatttattcatccaagttggaaacgtcggccgcaaatctccgctccgttaccgatatctgaaaaatgtccggccaaagccagcgcttgaatgtggttccaactgttacaatgcttggaatcatgaaagctcggcttgtgggcgcgacaagaggtcacgcacttctcaagaagaagagtgatgccctaaccgtacaatttcgtcagattcttaagaagatagtgtctacgaaagagtcaatgggagagattataaaaacctcctcattttccctaacagaggccaagtatgttgctggtgagaacatcaaacacgtcgtgcttgaaagtgttcaaactgcttctcttaaagttcgatcgcgacaagagaatgttgctggagtgaagcttccaaagtttgagtattttactgaaggtgagaccaaaaatgatttgactggtttggcccgaggtggacaacaggtccaacagtgccgtgctgcttatgtgaaagcaatcgaggttctacttgagcttgcttctcttcagacttcattcttaacactccatgaggcaatcaaaaccacaaatcgtagggttaatgctttacagaatgttgttaacgaacaacgtcggaataaaaaccattcatttacacttaagggagaattgggattaacctcgaaagg

SEQ ID NO: 12597 - DNA, 586 bp, Gossypium hirsutum
  unsure (1)..(586): unsure at all n locations
  Clone ID: LIB3825-031-Q6-K6-B8
gngngnacaaaaaaattaaaaaattcgcacagaaaaattattcatccaagttggaaacgtcggccacaaatctccgctccgtttaccggtgacgacgctctctctaaatatctgaaaaatgtccggccaaagccagcgcttgaatgtggttccaactgttacaatgcttggaatcatgaaagctcggcttgtgggcgctacaagaggtcacgcacttctcaagaagaagagtgatgccctaaccgtacaatttcgtcagattcttaagaagatagtgtctacgaaagagtcaatgggagagattatgaaaacctcctcattttccctaacagaggctaagtatgttgctggtgagaacatcaaacacgtcgtgcttgaaagtgttcaaactgcttctcttaaagttcgatcgcgacaagagaatgttgctggagtgaagcttccaaagtttgagtattttactgaaggtgagaccaaaaatgatttgactggtttggcccgaggtggacaacaggtccaacagtgccgtgctgcttacgtgaaagcaattgaggttctagttgagcttgcttctcttcagacttca

SEQ ID NO: 12598 - DNA, 348 bp, Gossypium hirsutum
  Clone ID: LIB3189-025-P1-K1-E1
attccggtcgaccacgcgtccggagagatcaaaaaaatttaaaaaatttcgcacagaaaaatttattcatccaagttggaaacgtcggcgcacaaatctccgctccgtttaccgatatctgaaaaatgtccggccaaagccagcgcttgaatgtggttccaactgttacaatgcttggaatcatgaaagctcggcttgtgggcgctacaagaggtcacgcacttttcaagaagaagagtgatgccctaaccgtacaatttcgttagattttttaagatgatagtgtctactattatgagtctatggttgtgttttttgaaattcttcttaattttctcttatctatgc

SEQ ID NO: 12599 - DNA, 1357 bp, Gossypium hirsutum
  Clone ID: GOSHI-09MAY01-C11786_1
cccacgcgtccggcgggagggttttgatttttcccttcgtttaatcaaaacttttcttttacctcttcccccccccccccctttctctccaagatggacctccacgtggagccgacgtccgccaccgccgactccatcccgccttctccgccgcacgatcctctcgattccgttcccatcgggtcacctgaagacgatattctgtctccgccgtccgatgatgatattgaccacgatcacggtcacgaaaatgaagatgatcacggccaggaggatcaggttcagaatcatgagatctcctcggcggttgatgtacttactgatgatctcaaaaagaagatcattaagcaggcggaatattattttagcgatgaaaatctgcctactgataattacatgatgggactaattaagaagaacaaagaaggttttgttcctatttcagttatttcttcatttaggaaaacgaaaagactcaccaggaattatacatcaatagttgctgctctcaaagagtcatctttacttgttgtgagttctgatgggaagaaggtaaagcgtcggaatcctcttccgttcattgaagttagggatccaaagttattcaccattttggtagataatcttccagaggatcattcggtagaaaatattaagaggatatttggtgaagtgggaaggataaagaaaatatcagttcgtgatccacatgctgttgaagagacaaagaaaactggtagagccgatatattgatcagtagtaagttacacgcactggtggagtatgagactattgaggctgctgaaaaagctgtggctactttgaacgatgaacatgactggagaaatggcatgcatgttaagcttcttgagcgaaagggtaagcatggacagcgaaagcaagcttggaggggacctgctcatgaaaaaaacatcaatgctcaggtatctgatcaaactggaaccgaggagaaaaatgcttcaagtgagtatcatgaagatataccagatgatgaggatggggagcatttgtccaaagagaaaaatggggttcgacctagaaacagaggacgagggaggagacagaaaaatcgtggtgccaatggacacggccatggaactacatcctcatgccatgccgtagaaccatcgaagccaccaccgggacctagaatgcctgatggaacacggggattcacaatgggacgtggacggtctccaatttctaaaccaagttaatgatgtggtattttgattatcatgcatatggtttcaaaggccaagtgtgaaaaacaaaaacccaaatggatttatctgtgttttataaatggtgatggtgttatcttttcttttgaac

SEQ ID NO: 12600 - DNA, 358 bp, Gossypium hirsutum
  unsure (1)..(358): unsure at all n locations
  Clone ID: LIB3825-024-Q6-K6-C4
tctgttcctctcgattccgttcccagcgggtcacctggcgacgagattctgtatccgctgtctgatgatgatattgaccacgatcacggtcacgaaaatgaagatgatcacggccaggaggatcaggttcagaattatgagatctcgtcggcggttgatgtacttactgatattctcagggggagggagatttttttcttttttgtggggggncagcgnngaaaagcggcccacccgccagcccttgatgggactgattaagaagaacaaagaagggtttgttcctatgtcagttgtttcttcgtttggggaactggantgacttgccagaaattatccatctgtaggtgccggtctc

SEQ ID NO: 12601 - DNA, 853 bp, Gossypium hirsutum
  Clone ID: GOSHI-09MAY01-C11766_1
ccaacctcaaaggtcttgatgaagacgatcaaaagaggtggatgtaacttaccggaagggacctgaacttcacaatcccacccgaagcaagtgaattttgtacctggaggaaccttactagcacggaatttgagcttgatagacccctttcttcttttgaaaactcacccacagccgcatcaaaaaaagttgcttaatggatctggtttaaatttgtcaactcggccatcaaaccatgcaaacggttgtgtcatggatctctctcccgtcagcaacaagaggaagaaagatttgtttctaaatggagacgatgaagactgttgtttgctcattaatcagcataatgatagggtcaatgacacagagatgcacccaatcgaaccgccttggttaaatgagtttagtggagtaatgagaaatgtgtatgggccggttacggctgcaaagactatttatgaggatgaagaaggatacctaattatcatcagcttgccttttgcagaccttaaaagggtgaaagttagttggtggaataatctaacgcatggtgttgtaaagatatcgtctatgaacacagcttgcttgcccttttataagagaaccgttggcactcagcttacagaccattgctggacttgttcttcggagagttataggaaataccttccaaccgatatctgcatattacttgggctatggataaaccgacgtgttaatatgtgccaataactcggttctaaaacaggtttattgctttcacctcgttaagaactgtttgaatattctaaaactttgtggggcattttcttctgatattttatacactattaattatatatgttttgtattatag

SEQ ID NO: 12602 - DNA, 357 bp, Gossypium hirsutum
  Clone ID: LIB3166-043-P1-K1-G4
cccacgcgtccgcccacgcgtccgttcactcgtccgcccacgcgtccggcaaacggtggtgtcatggatctctctcccgtcagcaacaagaggaagaaagatttgtttctaaatggagacgatgaagactgttgtttgctcattaatcagcataatgatagggtcaatgacacagagatgcacccaatcgaaccgccttggttaaatgagtttagtggagtaatgagaaatgtgtatgggccggttacggctgcaaagactatttatgaggatgaagaaggatacctaattatcatcagcttgccttttgcagaccttaaaagggtgaaagttagttggtggaataatctaacgcat

SEQ ID NO: 12603 - DNA, 582 bp, Gossypium hirsutum
  Clone ID: GOSHI-09MAY01-C11736_2
ttcctctgattcaagtgcatgaaacttgggaaatgtggtcttcaattccaaaaagctgttggatttagggtttcaatttaagtacagcttggaagacatgtttgtaggagctgtgagacatgtcaagaaaaagggttaattgcacctccaacaaagattgagaatgcaataaatggtgataccattgcttctattgagacaccaaacagtgttaaatgttagaacaatatctatctataccatggatgtatcaccattgtcatgttaagggctttggtgttaagggcttaatggtttcttggttatacgtggttttgtgttgattgttgcattcttgtctttttgagggtagattttcgcgaggagggttgggagtcttagtggtttgatattaagatgttctcattttaagatttggtattattgttttgggtgtgggactattttgtgggagatgttgcatcttgttaattgtaacattcttcgcttttgcttattgtgtattaattaagcaaaaaaaaaaggataatttgtaccattttagtcgttatcaaagaataaaaattatatgttctttggatt

SEQ ID NO: 12604 - DNA, 1233 bp, Gossypium hirsutum
  Clone ID: GOSHI-09MAY01-C11736_1
cccagccgcccgcttctttgtttttgagctccaaaactgaaaaaactctccattttttatcaaatgttctagacaacgatgggatctgaatctcaagttgtttgtgttactggtgcctctgggttcattggttcatggctggtcatgaggctactcgaacacggttacactgtccgcgccaccgtccgtgatcccgataatcaaaagaaggtaaagcacttgcttgatctaccaaaagccaacacccatttgacattgtggaaagctgatttatctgaagaaggaagctttgatgcagccattaatggctgttgtggtgtcttccatgttgccactccaatggattttgagtccaaggaccctgagaatgaagtgataaagccaacaataaatggagtattggatataatgaaagcatgcatcaaagcaaagacagtaaaaaaattgattttcacatcatcagctggaactgtcaatgttgaagaacaccaaggaactgtttatgatgaaagtaattggagtgatttggactttgtctatgccaagaaaatgactggatggatgtattttgtctccaagacattggctgagcaagctgcctggaagtttgcaaaggagaataacttggatctcatcactataattccaactcttgtcattggtccatttcttatgccttcaatgccacctagtctaattactggcctttcaccccttactgggaatgaagctcattatggtatcattaggcaagggcagtttgtgcacttggatgatctctgcatgtctcacatattcttgtttgaaaaccctaaagctgaaggcagatacatttgctcctcccatgaggccaccattgttgagcttgccaaaatgctaagagaaaaatacccagactacaatattcctactgagttcaaagatgcagatgaaaacttgggaaatgtggtcttcaattccaagaagctgttggatttagggtttcaatttaagtacagcttggaagacatgtttgtcggagctgtggagacatgtcatgaaaaagggttaattgcacctccaacgaagattgagaatgcaataaatggtgatcccattgcttgtattgagacaccaaccagtgtttaatgttagaacaatatctatctataccatggatgtatccccatagtcatgttaagggctttggcgttttttttccgatttaaaataaagatttgcgtttggctctcc

SEQ ID NO: 12605 - DNA, 266 bp, Gossypium hirsutum
  Clone ID: uC-gsflmaxxa069b05b1
cactcttttatcacacaagataaaacagtactttagttttgatctcacaaaactgaaagatctctacattttttatcaaatgttctagacaacgatgggatctgaatctcaagttgtttgtgttactggtgcctctggtttcattggatcatggttccatctttttctctcctcttcttactttcaattctcttatctcttttcttctcttctttcctctttttctttctttctcactttttttatctttctccatccactctctt

SEQ ID NO: 12606 - DNA, 608 bp, Gossypium hirsutum
  Clone ID: GOSHI-09MAY01-C11726_1
ctcgagtcaatagatctgcgagataattctcttctcctcgaatgtgttcgatggtgaacttgtagtaattaaaccactgttgccatcttaataatcgtccttgtttatagtctcctgtaatattgttccttataaaaggtccaaattgtttattatccgttcggacaacaaactccttaggtagtaaatcctgaattttcctatggctttctttacagcgagccattccttttcattactgtgataatttagttcagctcctgtaaatgtacctgaggtatatctacaaagcatttcctgattatcattttttaatgatttagcttttaaaacaccagaccaatattcttggctagcatctgtttcaagtatcattaaatcctcatcctgtggttggtataacgttggaaaatctttcaatttgttttttattttccttatgtaggcggtatcctcttgggtccattgccatacataatcttttttgagtttcttttggagtggcttcctgatttcagccaacttagctatatagcactctgcgtacgtcaagcaacccaaaaatctttgtaattgttttttatcacatattttctctgggaatttat

SEQ ID NO: 12607 - DNA, 1363 bp, Gossypium hirsutum
  Clone ID: GOSHI-09MAY01-C11696_1
gttttatttgcaggaaattggagattgaactgccaggagggagaacacacttcggggaatcatgtggtttgcctttaagcacttattttagtgcagtgaagctgctatggttgatggagaacaaggaagaggttagagctgctattaaaaaaggggatgccttgtttggaactatagacacatggttaatctggaacttaactggcggtgtaaatggtgggatacatgtcactgatgtctctaatgcatcacggacgatgctcatgaatctccaaactctcgattgggataaagcgacgttgaaaactcttggaataccagctgaaattctgccaaaaattgtaagtaatgctgaggtcattggtaaaatcgccaaagggtggcctctttttggtgtcccgattgcaggatgtcttggtgatcaacatgctgcaatggttggtcaagcttgccgtaggggtgaggccaaatgcacttatggaactggtgcctttatcctgctcaacacgggtactgcacccattaagtcaacccacggcctcctaaccacgcttgcattcaagcttggtccaaaagcacagacaaactatgctttagagggctctattgctattgctggagctgcagttcagtggctaagagacagtcttgggataatttcctctgcaagtgagatagaaagcctggcatcaaaggttgattgcacaggtggggtttactttgttcctgcctttaatggtttgttcgctccatggtggcgagatgatgctcgtggaatttgcattggaatcacaaggtttacaagcaagtctcacattgctcgtgcggttcttgaaagcatgtgttttcaagttaaagatgtattggattcaatgcacaaagatgcaggcgagaaaggtgaggtcaagaatggggagggagagtttttgcttagggtggatgggggtgccactgtcaacaacctcctaatgcaaattcaggcggacttgctgggaagttctgtggtcagaccagctgacatagaaacaaccgctctcggagctgcatatgctgctggaatggctgtaggagtgtggaaagaagaggagctttttgctttgggacaaaatatcaaaactgcatccatattctccccaaaatcaagtgtagaatggaggaagaagaaggtggattcttggtgcaaagctgttgaaagaacgtttggcttggctgatcttgaaatgtgatacaacagttattttcggtttcgactccctggtgaccattgtctcggcttttgtagatgttttattttatttttgaatttacagacaaaacccatgcttatattcaactgaataaaatgctgactgtattactctgg

SEQ ID NO: 12608 - DNA, 660 bp, Gossypium hirsutum
  Clone ID: LIB3543-042-Q1-K6-B10
cggccgcgtgggctagtctggggggggggggtcaggttattcgagccgctaaatctgattctcgcctagcaaacaaccatctgcctcctgacatacaaatgcttcgctgtcgtgcttgctacgaagcacttcgtttttcccccaaaattgaagcaatggggaaattgttggtggggggagggagagcatatggtcctttcattgcgttgcatttacgatatgaaaaagacatgcttgcctttagtggttgcacacatggtttatctgatgttgaagctgaagagctgaggacaatcagagaaaacactgcctattggaaaatcaaggacattaatgcaacggaacagagatccagaggatattgccccttaaccccaacagaggttgggatttttctaactggtctgggatacccatcaaacacccctatatacattgctgctggagagatatatgggggtgatactcatatggctgatctacggtctcgctatcccattttaatgagcaaggaaaaattggcttctgttgaggagcttgaaccattcaccaaccatgcatctcaaatggctgcactcgattacattgtatctgtggaaagtgatgtcttcattccatcacactctggaaacatggcaagagcagttgaagggcaccgtc

SEQ ID NO: 12609 - DNA, 388 bp, Gossypium hirsutum
  Clone ID: LIB3166-042-P1-K1-G1
ggaggagagtattgctttttattgtacacaatactacctagtcctctgtttggattagagatcaactcttcgttttgccactttctttctgaatgtgcagagaaaacactgcctattggaaaatcaaggacattaatgcaacggaaccattcaccaaccatgcatctcaaatggctgcactcgattacattgtatctgtggaaagtgatgtcttcattccatcacactctggaaacatggcaagagcagttgaagggcaccgtcgatttctgggacataggaaaaccatctctcctgacaggaaagcactagtccgcctatttgacaaaatcgaaaaggggttattgatggaaggcagaaaggtttccaatcgaatcagtgaaataca

SEQ ID NO: 12610 - DNA, 1096 bp, Gossypium hirsutum
  Clone ID: GOSHI-09MAY01-C11616_1
ctgaatttcataaactttcttaaaagtttcaattctcagtaaaaaaagagaaaagaattgaagggtttttttttttttttgaaaagctttaacaattcatgtacagcaatctccagagcttcaaataactatcagccatgaaaatcccatcttcatttcaatcttttaacctttgaaaaaccctttgcagcattgggaatcaaagcaaaattctgttgtttttgttgacccttttttgttctagaggaagaaaaggaagagaatgaagccaattcgttgtataatcagtttctccttgttgttatgggcaacttggttggtgactgtgggttcagatctaactgctgatagggcagccatggtggcacttcgaaaagctgttggtggacgcacgcttttatggaatctttcgagcagtccatgtacttggactggtgtaaactgttctcagaacagactcgtcgagttaagactccctggaatgggactttcaggtcagcttcctagtggtattggcaacttaacgcagcttcaaactctttctcttcgtttcaatgctctttctgggtctatccctgctgattttgccaagcttacttctcttcgaaacctttacttacaagggaatcgatattctggtgagattcctctgttcttgttctctttgccaaaccttataaggctaaatctcgcaagcaataatttcactggttcgatccctgagagtgttaacaatttgactgcgtggggtacttggtctcgggagaacaatcatctatctgggtcgatccctgatattgaagggccttcacttgtccaattcaatgtttcttttaatcagttaaatggttcaatcccaaaagggttatcaaataagcctcaaagtgcttttctagggaattctttatgtgggaagcctttggttccttgtaatgggactgaaagtagtggcaataaattgtctggtggagcaattgctggtattgtcattggttgtgttcttggtgttttattgattctgattctactgatctgcttatgtagaagaaagagtggtaaaaaaatggaggaaagggatgttgcccctccaaaacag

SEQ ID NO: 12611 - DNA, 627 bp, Gossypium hirsutum
  Clone ID: GOSHI-09MAY01-C11156_1
tgatcttgaagtgcagaaggctgaggcgggtggcaatgatatggagggtttggtcgggttttcagatcggtcaaaggatggcgcgttcctcgaaaatgagagtggttcagagggtctggtggatgaagagctttcaggttttaatttgaagtctgctggattgcttgggagacctcaggggaccataaatattacctcgacatatgagagtagaacacgagatttagaaagttctttggttgcaaggggagacctatggagagtagaggcatcaaatggcagctccacatcagggagtgacaactctttattccttctccagctcggactcagtgctctttgtgagggacacaacacttcttttaccagttcatctatcaaagcaacatttactttggtacggctatgataggaagaacggaatgcattctctttgtccagcaatatggtcaaagcataggaggtggctattaatgtcaatgctctgtcttaatcctttagcttgttcatttgtagatttgcaatttccaaatggacagtttacatatgtatctggtgaagggctgacgacaagtgctttcttacctatttgtggggggcctcctccggccccagggccaatatcca

SEQ ID NO: 12612 - DNA, 292 bp, Gossypium hirsutum
  Clone ID: LIB3166-035-P1-K1-D3
catactctttgtccagcagtatggtcaaagcataggaggtggctattaatgtcgaggctctgtcttaatcctttagctcgtgtaagttggtagtggaagaattcatttatgcagcgagtgtgcttctgtttcaactgtccgaattaccaaaatacctgcgtttaccctagtttttctcgctaagattgctgctttaaattgcacttcatctaaggaatgtactgcctgcacacttcctgcaaactaaagaccctccttttttaaatcaagcactcaagtcttattgtttttc

SEQ ID NO: 12613 - DNA, 699 bp, Gossypium hirsutum
  Clone ID: GOSHI-09MAY01-C11136_1
aggagcttggaatgaagcattcgatgcctcaaaaacaaaggaccatgacttccacctcataaatggtagctctgttaaggtgccttttatgaccagcaaaaagaaacaaactgttagtgcctacgatggtttcaaagttttagggcttccatataaacaaggcaacgataagcgtcgtttctccatgtatttctttcttccagatgcaaaagatggtctgccagctttggtagagaaagtgagttctgagtctggtttcttagaacgccaccttccatatcaaccagttgaagtgggtgaattgaggatcccgagattcaaaatctcatttggacttaaagcttctgaggttctgaaaagattaggacttgtgttacctttctctggtgaaggaggtttgacagagatggtggattcgcctcaaggtcaaaacctatatgtttcaaacatattccacaagtcttttatagaagttaatgaaaaagggactgaagctgctgctgctacttctgctgtcatagcactcaggtctctgcgtattccacaaactatagactttgtggcagaccatccattcctcttcttgatcagggaaaatgcgactggagttgtgctcttcattggccacgtcctcaatcctcttgaaaactgatgagtccgttgtggtcatgaggcaagagaatatgtgttgtattttgc

SEQ ID NO: 12614 - DNA, 427 bp, Gossypium hirsutum
  Clone ID: GOSHI-09MAY01-C11076_2
gcggagaaactcccgggacgacaccacgcctgcgaagaatggctccctcttactcctccacctgcagagaaagtagatcctcctgtgggcactctggatgacctattttggaaaaccaaagcaattcctcgtatctactatttgcctttgtctgatgaacaagttgcagcaaagcaagcagcacatggcagaaacatctagcagtagagatgaggctatagttttatccctggctgctcttctaggttttcgtatcggttggtctgtaccttagattatggcaagaaaactgtcacataattgcatgtttgcaggtctgcaggttttgctttataggaaggaattggtgcagcccgtgcagagggaacttgtccaggatggggtattgggttttcttgccggctacttgggggcttgaggttaagtt

SEQ ID NO: 12615 - DNA, 545 bp, Gossypium hirsutum
  Clone ID: GOSHI-09MAY01-C11076_1
cagttagagaacgtctcctcttccgccgccacctccagagaaaccagatcctcccattggtcactctggatgatctattttggaaaaccaaagcaactcctcggatctactatttgcctttgtcagatgagcaagttgcagccaagcaagcagcacatggcagaaacatcaagctgtagagatcaggctataatttatccctggctgctcttccggttttcttatcggttggtctgtatgttagataatggtaagaaaactgtcacataattgcatgtttgcaggtctgcaggttttgctttattggaaggaatagttccagccatgcaggggggagtccagtgatggctattggttttctgacagctactttgggcttgagttgaattttcatttagcactagaatccttcaaacgttgagctctctttagttatggattgattctcctttgttctaatttggttttcctacagaacagtagcttcaacttttatgaacctgatttggtagaatcttactcactctggatgttgttattttaat

SEQ ID NO: 12616 - DNA, 548 bp, Gossypium hirsutum
  Clone ID: GOSHI-09MAY01-C11026_1
cgccaatgtcaaatttattttcgtgcttgtggttcaatgaagttgatcgatttgcctcacgtgaccaactaagctttgcatatacttatttgaagttgacgagaatgaatccagataaaccattccatctaaatatgtttaaggactgtgagcgcagagcactggcaaaattattcaggcatcggttgttgtcatctcctccacctccgtgaccagtcagattatgctagttttctgggagcataaatgcagtctttgcattgatatccacagcgaaagtgaaacactgggttctctatgaagtaaaaccacgatttttttttcttccgggaatctttttttcatggatttttcaagcttgacaggaattagaagcaaaccagtttcttgggatttctacaagtgcttaaattacagttggcagagtaaagttctgctgaagaaatggagctcttcatccataaaaacctattcaattcctacatgccaggtggaatgatgcttaagtttatagaaggtagtcataacccatgggttgctgaatgatt

SEQ ID NO: 12617 - DNA, 615 bp, Gossypium hirsutum
  Clone ID: GOSHI-09MAY01-C11376_1
attcctctaaaccttcctatattcctattcctattcttatcatcactctctcaatcctttgcttattacaacaaaacctttttcttctttatttttcacctttcagttcaaatcatcaaacccagaaagcgtggctacaacaaactgcaaaaaaaggaaacaattagagaaagaagctatggaagttggcttaaagatgacgatgaaaggaggcggaggagatcatgttggaggttgcgacaaagagaagatggggtttgaagagactgagctgaggctagggttgcctggtggtggtggtggtggtggtgacggtgaagttgtgaggaaaagaggcttctctgaaactgttgatttgaagcttaacctttcctccaagcaagacacctctgggatcgatcccaatgatgagaaagtgaaaggcttgcaccaggagaagaatcttctcctttctgccattgatgctgctaagcctcctgccaaagcgcaagttgtgggatggccaccggtccgatcattccgaaagaacatgttagccaccaccacacagaagagcagcagcgaggagagcggcgaagaggcggcgctggtgaaggtgagcatggacggtgcacc

SEQ ID NO: 12618 - DNA, 335 bp, Gossypium hirsutum
  Clone ID: LIB3147-006-Q1-K1-B2
acccacgcgtacgcctttgcttattacaacaaacctttttcttctttatttttcacctttcagttcaaagcatcaaacccagaaagcgtggctacaacaaactgcaaaaaaaaggaaacaattagagaaagaagctatgggagttggcttaaagatgacgatgaaaggaggcggaggagatcatgttggaagttgcgacaaagagaagatggggtttgaaagatacttgggagggttaaatttggagaatattgatgaatgacatgatgatgaagggttttgtacgataaaatatgtaacattttcagcatatgtattagaataaagttactggt

SEQ ID NO: 12619 - DNA, 284 bp, Gossypium hirsutum
  Clone ID: GOSHI-09MAY01-C11276_1
gcacccttccgtataactaaattgaaataccactacttttctcaacttttttcttcccttagcctccatttctccgagcacattcaagccaccagctgatatgtgaagttggaactgggaatggcggttcgatcggtggaacttcaccgttaccggcgtcgttatcaaagctattgattaagggaggaactgtggtgaatgctcatcggcaggagagagctgatgtttatgtagaggatggtattattgttgctagtaagcctaatatcaaggttggtgatgag

SEQ ID NO: 12620 - DNA, 675 bp, Gossypium hirsutum
  Clone ID: GOSHI-09MAY01-C12996_6
gcggccgcccattagtatagtggctcaacagacatgagcgtcactcggacggcttttgttgaagatacacttgccatacgggccgcgcccacggggtgcgaggttattgttagtggaaagctaagggcacatcgggccaaatccatgaagttcaaagacggatacatgatttcttctggccaccccaggtgaacgagtacattgactctgctgctcgacatgttcttctgagacagggagtactgggcatcaaggtgaagatcatgcttgactgggatccaaagggtaagcaaggcccaacaactccactcccggattttgtcaccatccaccctcccaaggaggatgaagttatcaaggtggaagcacctgtgccgaccgagattgaacttccgccagtggcttaaagccaatgataactgttatgatagtcatctatttgatatttggagcatgttaagtgtcttagattttgtagtttttaagtttggcacctaaaatgaacttatgctggatgcttttttctgaattttccttttgtgtttctcaatttttgttgtaggggaaacctattacttgataattttaaaaaaaaaaaaaaaaaaaaaatacttcttgcggaagtagacctcaagcttcttatactatgtacgtcggcgcgtccccagtacaatg

SEQ ID NO: 12621 - DNA, 996 bp, Gossypium hirsutum
  Clone ID: GOSHI-09MAY01-C12996_5
tagttctagatcgcgagcggccgctgcgatctagacggacgcgtgggagccgtttcacacatctcacttctctgcagtttcactcccttagagagaaaaaaccatggcggccgcagctcaaatcagcaaaaagcgaaagttcgtcgctgacggagtcttcttcgctgaactcaatgaggtcttgactagggaactggccgaagatggatactctggtgtcgaagtcagagttactcccatgcgtactgagatcattatcagagccactcgtacccaaaatgttctgggtgagaaagggaggaggattagggaactgacctctgttgttcaaaagcgattcaagttccctgaaaacagcgtggagctttacgctgcgcgcgtccgcaacagaggcctgtgcgccattgcgcaggccgagtcccttcgctgcaagctcctcggaggtctcgccgtccgcaggggcctgctatggtgtactgagattcatcatggagagtggtgccaagggatgcgaggttattgttagtggaaagctaagagcacagcgtgccaaatctatgaaattcaaggatggatatatgatctcttctggtcatcctgtcaatgagtatattgactctgctgtcagacatgttcttttgagacagggggtgcttggtatcaaggtcaagatcatgcttgactgggatcctaagggtaagcaaggccctactactcccctacccgatctagtcacaatccaccctcccaaggaggatgaagaaatcaggagagtagagcctgagccaactaatattgaggttccagttatggcttaaatactgttttggttgacatctttttgatttttggaagtatgtgagtttcttagttctatgtagctaaaagtttggcctcaaagaccccagcattttgtgggttcttctttttgtactctaatgtttctcctactatagttattacgtaattggtaattttctttcaagtctttctttt

SEQ ID NO: 12622 - DNA, 635 bp, Gossypium hirsutum
  Clone ID: GOSHI-09MAY01-C12996_3
gtatcgcgttcagtagggcctgtatggtgtgcttagatttgtcatggagagcggagccaagggttgcgaggttattgttagtggaagtaagggcacaacgtgccacatccatgaagttcaaagacggatacatgatttcttctggtcacccagtgaacgagtacattgactctgctgttcgacatgttcttctgagacagggagtactgggcatcaaggtgaagatcatgcttgactgggatccaaagggtaagcaaggcccaacaactccactcccggattttgtcaccatccaccctcccaaggaggatgaagttatcaaggtggaagcacctgtgccgaccgagattgaacttccgccagtggcttaaagccaatgataactgttatgatagtcatctatttgatatttggagcatgttaagtgtcttagattttgtagtttttaagtttggcacctaaaatgaacttatgctggatgcttttttctgaattttccttttgtgtttctcaaattttgttatacttaaaacttattacttgataattttattcaaggattttttattcctttttaagatttttgacttcctttttaaaagaaaaaaaaaaaaaaaaaaaaaaaaaaaaaaaat

SEQ ID NO: 12623 - DNA, 1117 bp, Gossypium hirsutum
  Clone ID: GOSHI-09MAY01-C12996_2
cgcaggtaccggtaccccgggcgcgcctcatattcctgcaaattcccttcttttcccctccacccaagcctaaaaaatcatggcgacagctcaaatcagcaaaaaacgaaagttcgtcgctgatggagttttcttcgcggaactcaacgaggtattgaccagggaactggctgaggatggatactctggagtcgaagtcagagttactcctatgcgtaccgagatcatcatcagagccacccgcacccaaaacgttctcggtgaaaaaggtaggaggattagggagcttacctcagtggttcagaagcgattcaagttcccagaaaacagcgtcgagctttacgctgagaaggtcaacaacagaggcctttgcgctattgcccaggccgagtctcttcgctacaagctactcggaggtcttgccgttcgcagggcctgctatggtgtactgagattcatcatggagagtggagccaagggttgcgaggttattgttagtggaaagctaagggcacaacgtgccaaatccatgaagttcaaagacggatacatgatttcttctggtcacccagtgaacgagtacattgactctgctgttcgacatgttcttctgagacagggagtactgggcatcaaggtgaagatcatgcttgactgggatccaaagggtaagcaaggcccaacaactccacttccggattttgtcaccatccaccctcccaaggatgatgaagttatcaaggtggaagcacccgtgccgaccgagattgaacttccgccagtggcttaaagccgatgatgactgttatgatagtcatctatttgatatttggagcatgtcaagtgtcttagattttgtagtttttaagtttggcacctaaaatgaacttatgctggatgctcttttatgaattttcctttggtgtttctcaaattttgttatacttaaaacttattacttgataattttattcaaggattttttattcctttttaagattcatgacatccttttggcttctgcatgtgattatttggttcgtatattatacatgtatatgtaaccacggagtagctattaaaggttttttttgcgatgaaaaaaaaaaaaaaatag

SEQ ID NO: 12624 - DNA, 977 bp, Gossypium hirsutum
  Clone ID: GOSHI-09MAY01-C12996_1
gcttaaattagccaaaaaggggaagattttttcgcggagggattaatattggtggaaacccaagaaggtattgactaagggaactggccgaagatggatactctggtgtcgaagtcagagttactcccatgcgtactgagatcattatcagagccactcgtacccaaaatgttctgggcgagaaagggaggaggattagggaactgacctctgttgttcaaaagcgattcaagttccctgaaaatagcgtggagctttacgctgagaaggtcaataacagaggcctttgtgccattgctcaggctgagtcccttcgctataagctcctcggaggtctcgccgtccgtagggcctgctatggtgtgcttagatttgtcatggagagtggagccaagggttgcgaggttattgttagtggaaagctaagggcacaacgtgccaaatccatgaagttcaaagacggatacatgatttcttctggtcacccagtgaacgagtacattgactctgctgttcgacatgttcttctgagacagggagtactgggcatcaaggtgaagatcatgcttgactgggatccaaagggtaagcaaggcccaacaactccacttccggatcttgtcaccatccaccctcccaaggatgatgaagttatcaaggtggaagcacccgtgccgaccgagattgaacttccgccagtggcttaaagccgatgatgactgttatgatagtcatctatttgatatttggagcatgtcaagtgtcttagattttgtagtttttaagtttggcacctaaaatgaacttatgctggatgctcttttatgaattttcctttggtgtttctcaaattttgttatacttaaaacttattacttgataattttattcaaggattttttattcctttttaaaaaaaaaaaaaaaaaaaaaaaaaaaaaaaaaaaaaaaaaaaaaaaaaatccaaccccaccatt

SEQ ID NO: 12625 - DNA, 687 bp, Gossypium hirsutum
  unsure (1)..(687): unsure at all n locations
  Clone ID: AI725920.1
agtacttaagaaatatccccatccaataggccaagagaagatgaggttagatttgtcatggagaggagaagccaagaggttgggaggatttttataatgaaaaattaagaggaaaaagtgccaaattcttgaagtttaaaaacgggaaaaagattttttttggtcaacccgaggaagagaaaattgatttatgtttttaaaaattttttttgaaaaagggggtaatagggaattaaagataaatataaggntgaactggaatccaaagggtaagaaaggcccaaaaaattaaatccgggattttgttacaattaaccctcccaaggaggatgaagttattaaggtggaagaacctgtgccgaccgagattgaaattccgccagtgggttaaaaccaatgataaatgttatgatagttatttatttgaaatttggagcatgttaagttttttagattttgtagtttttaagtttggcacctaaaatgaaattatggtggatgcttttttttgaattttccttttgtgtttttcaaattttgttataattaaaaattattaattgataattttatttaaggattttttattcctttttaagaattttgaattcctttttaaaaaaaaaaaaaaaaaaaaaaaaaaaaaaaaaaaaaaaaaaaaaaaaaaaaaaaaaaaaaaaaaaaaaa

SEQ ID NO: 12626 - DNA, 359 bp, Gossypium hirsutum
  Clone ID: GOSHI-09MAY01-C12966_1
caagaaaaacaaaccggggtatcaccatttccttgatgtaaacataaatggcactctgtttcaaagaacaagatgcatgatacaactataataattaacatataccatatatgtatatcaaaagaaaggctcgtatacgtaaaagagttcttgaaggaagaactatcaacaacacctttaacagattttaggacaaaaagttcagtttttcccctactttttgctccctcaacgagaagaaaaaacaacatatacgtagataaaaaagcatattttgcatcaaggttccagcttcaaggaaacaacacgtgactgtctgttgcgctttgctaccttaacaaagaatattgaaaggcacg

SEQ ID NO: 12627 - DNA, 432 bp, Gossypium hirsutum
  Clone ID: GOSHI-09MAY01-C12936_1
cggacgcgtgggcttttcttctgcctatctgaggtgaaaaacataccgctcttcctcccaaccaagtctatctttcctgaccgtgcgcagagcttgagctttaaattgtaaaaatggaagatcttataacagaaatccccccaccatctagattctttcaggaagatcttaacaactttatacctccatcaccatctcttgccccgccattccttgtgttttctattcctaagcctgaaaagccccttcgcccatctctcctcattgttgcattatcttcaccatctctgtacatcttccaccatttgtcaccctagacattagtttggaagtcttatcctacctgaggtccctttcttctgccttttttgtcgaaccctctttcagagacaaaacttgcaacatttaatccctgaataatggggatttaat

SEQ ID NO: 12628 - DNA, 1829 bp, Gossypium hirsutum
  Clone ID: GOSHI-09MAY01-C12836_1
ggaagggtccggcccaggcgacgcgtactagctgtacctaaaccaccaatgtttcttaccgaccgacccgaaatcatactacgagttcattcaccgtgactgaccagtctgcagtgcactcaagctttggcctatataaagtattcatatgaacttaaaacaaatcaataacggttgaagagatatggggtggaaaggaattctgggttttgagtatggaattgttcaaggacctttgggaccggatattgctggtccggagctagttgctgctgttgcaaacgctggtggacttggccttcttagagctcctgattgggaatcaccagattatgtgaaagagttgataaggaagactcggaagttaaccgacaaaccctttggggttggtgttgttctggcatttcctcacaaagaaaatgtaaaggctatactagaggagaaggtagcagtgttgcaactgtattggggagaatgctcaaaggagcttgtaatagaagctcataatgctggggtcaaggttgttccccaagttgggagtttggaggaagcaaaaaatgcaattaatgtgggcgtagatgcaatcattgtccaaggccgtgaagcaggagggcatgtaatcggacaggaaggtctaatttccttgttgccacccggcgtccgccgccgcgggggtcacggtattcctgttattgctgctggaggcattgtagatgctcgtggttatgttgctgctttggctcttggtgctaaaggcatttgcatgggtacaaggtttctggcaactcatgaaagctatgcgcaccctacgtacaagcggaaactgattgaatacgataaaaccgagtatacagatgtctttggcagagcaaggtggcctggtgcaccacaccgtgtccttcaaacacccttcttctgtgattggaaatgccttaatgctcaagaaaatgaaactaatcagcctatcattggtcgaacaataatacacggcgtggaaagagaaattcggcgttttgccggtacagttccgaacccaacaacaacaggtgacattgaaagcatggtgatgtacgcaggccaaagtgtaggcctcatcaaggaaattctacctgccggacaagttgtaaagaagctggttgaagcggctcaacttcttatccaccaaacatttaatccggactcgatctaaaattgattatgtgaattttataccttatttgatgaagttgttacacagttttaaaagctatttcattagtattctagttttacacatatgtaatgtgaacttttatccgattcaataacacaaaaaagcaaatctccatagcagaaacttggaagttgatacagttcaagcatttggcatcccttgtttcaactgtgtaacaatcttattaaaattaatgtaagaagagccatcagggcttgtagctatttcagctttcttcttccaatctatggcgttttgccttaaaccttgccccttcatcccttccatcaactccctcacaagactttcaactttctcccttttgacatcactgtcaatctccatcccaatgccccacttggtgcacgagtagaaacaattcatctgttgctctgcaaaaaatggccaacaaatcattggcaccccttcactaacactttccatggtggaattccacccgcaatgcgtcacaaaccctcccactgaagggtcgctcaataccctctcttgtgggcaccaccccacaagcagacccctgccgcttatcgccgccgtgaattccttggataatattctttctccaccgccatcgacaatgtccggcctaataacccac

SEQ ID NO: 12629 - DNA, 394 bp, Gossypium hirsutum
  Clone ID: LIB3147-019-Q1-K1-D1
gaaacttggaagttgatacagttcaagcatttggcatcccttgtttcaactgtgtaacaatcttattaaaattaatgtaagaagagccatcagggcttgtagcttaaaaaaaaaaaaaaaaaaaaaaaaaaaaaaaaaaaaaaaaaaaaaaaaaaaaaaaaaaaaaaaaaaaaaaaaagaaaaaaaaataataaaaaaaaaaataaaaaaaaaacaaatgtcccttaataaaatagaacaaaccaaaattaaagatataaaaactacatggggggctcttttaaattgaccaagactctccaatttatggccgattaataatggtatcagatggaacactaattgaatttgcttgattaataagttaaacgcttcgactttgataaatatgggc

SEQ ID NO: 12630 - DNA, 419 bp, Gossypium hirsutum
  Clone ID: GOSHI-09MAY01-C12546_1
cccacgcttccgggaaagaggcgcgagaacaggagggggattaaggtacagtgctactccatggaagacactgcaaacttttacatgagaccaatcgagggcttaactggggtactcgatatggatacaaaagaagtggtggaggtatcggatacgggtcggtccatccccatacccaaagccaccaacaccgattatcgtttttcggagcagaagctccggcaggatctcaactctataaaccccatatccatggaacagccaaagggtccaagttttggtatccgaggatgaacatttggtgaaatgggcaaaactgggaattccatttgaaacccgatccgagagcaggtgtggtgggttctcgggctaaggtccgggaccttgagagtggggtgttgagggatgtgatgtacaaa

SEQ ID NO: 12631 - DNA, 897 bp, Gossypium hirsutum
  Clone ID: GOSHI-09MAY01-C12496_1
cccacgcgtccggcagataatgtacttgcagaacctgataggagccccaagatatctaatttgaaagatgcgactgttcttgagaagtataatgaaaaaaaatctgctgaaactgaaccagctgatgatgtacatgcagaacctgataagagcctcaagatacaccctcgtgaaaagagcttattgattttagagagaagttgtatcttgctcctctaaccacagttgggaatcttccttttcgtagggtttgcaaaacactgggagcagatgtgacatgcggtgaaatggcaatgtgcaccaaccttttgcagggtcaagcttcagaatgggctctgctgaggcgacattcatccgaggatttgtttggagtccagatatgtggggcatatcctgacactatagcacgtactgttgaacttatagaaaaggagtgtacggtggacttcattgacattaatatggggtgtccaattgatattgctgttgataagggtgctggatcttttcttctcacaaaaccattacgtatgaaaggaatcattcaagcagcttctggcactgtagataaacctataactgttaaggtgagaacaggttattttggaggtaaaaaccgcattgattcgctaattgcagatattggcagttggggtgctactgcattgacaatacatggtcgatcacgtcagcaacactacagtaaacttgctgattgggattatatataccagtgtgctcagaaggccccttgtacattgcaggttttgggtaatggagatattttctcatatttagattggaacaatcgtaaaactgactgctctgagctttctacgtgtatgattgctcgaggggcattgattaagccttggttatttactgaaatcaaggaac

SEQ ID NO: 12632 - DNA, 373 bp, Gossypium hirsutum
  Clone ID: LIB3166-053-P1-K1-B7
ttagaatatacatcttgattggaagctaacagttagtagttgaacttctttttggctagctcttctggtggccctttcttgttttttacatttgttattactataaaagtgctttctgtgcttcatatgtttctccgtggcgcttatcctgtggcaacagggtcaagcttcagaatgggctctgctgaggcgacattcatccgaggatttgtttgcagtccagatatgtggggcatatcctgacactgtagcacgtactgttgaacttatagaaaaggagtgtacggtggacttcattgacattaatatggggtgtccaattgatattgttgttgataagggtgctggatcttttcttctcacaaaaccatta

SEQ ID NO: 12633 - DNA, 532 bp, Gossypium hirsutum
  Clone ID: GOSHI-09MAY01-C12436_1
ccattagcatctacacaattcacatcggcagatgcatcaagcagcagcttgacagtctcaaccgaagaatgtgcaccgccagcaacagcgcaatgaagggcagtagccccatcactgccacaagctctattcgcatcaatcttgccactgccaatgatgtatttcaaaatttcgatgctaccaaacatggcggcgatcatcagaggcgtccgctcttcaaatcccatctttctcaaccctattctccggccataccagaagctcgcctccccgaaatccacacctgtctcttctacttcgcttgtgaaggctactagatcatcagatgcagccaattcgagcaaaattgattgagaaccggctttcggctcctgtaattcaccttccatgatgaaacttgagggcttatgttcactctttgaaccactgcacatcccagaacacggtcaggctataagcagtctcagttgaagaagaagaagagaaaagggttttagttggaaagtaggtgagcagaagagtgagttataat

SEQ ID NO: 12634 - DNA, 337 bp, Gossypium hirsutum
  Clone ID: LIB3165-060-Q1-K1-G5
cctaacctacttccaactaatacccttttctcttcttcttcttcaactgagactgcttatagtggttcaaagagtgaacataagccctcaagtttcatcatggaaggtgaattacaggagccaaaagccggttctcaatcaattttgctcgaattggctgcatctgatgatctagtagccttcaaaagtgaagtagaagagaaaggtttggatttcggggaggcgagcttctggtatggtcggagaatagggttgagaaagatgggatttgaagagaggacgcctttgatgatcgcagccatttttggtagcatcgaaattttgaaatacatcattg

SEQ ID NO: 12635 - DNA, 747 bp, Gossypium hirsutum
  Clone ID: AI055088.1
cttgaacctccaaaatgtgatggttgcaatgctgctgctataagcaatgagcctcctttcatagttccatggccaatggaacctcttttctcagcttctagctctgttcgttgccacgggtttacttcgccagagatacctgataaagctacggtggcttccaagagccatagtgaagccgagaagcgtcggagggatcggattaactcgcagcttacagctttgaggaaattgattcccaagtctaacaaggtgtgtagtttgctccaaagttgccttcttttacattgtcaatgatattcggatcaattcttattggtggttaaattttgagtcttggtcccttcattatgctcaattttttaattgagtccctatattaaattgacataatttgatcctctatttgtataatactggtagttactaaataatccttgattaatatgttctataaagatatcttacttatcatggtaacatggactgtttttagtgagttggtacggctttgtgattagatcttgaacttgacaatgtattcagcatggatattgaaattatttgatccacgcttatgctggatttgatactgttgtaatggaagtgcttaacttgatgtgagttagggtgatacatggggtataatttgtctgattgtgtctgatttgtgagtagatgttagatattggatgctggtttgtatagatatgtatgtggatgttgatagtcgcagagcagtctgag

SEQ ID NO: 12636 - DNA, 393 bp, Gossypium hirsutum
  Clone ID: LIB3166-055-P1-K1-G3
atctccataagaaggccaagatgagcattttggtattgttggtttcttatattatgagctgaaaatggagaattgttacccttttagcttgcttgaacctccaaaatgtgatggttgcaatgctgctgctataagcaatgagcctcctttcatagttccatggccaatggaacctcttttctcagcttctagctctgttcgttgccacgggtttacttcgccagagatacctgataaagctacggtggcttccaagagccatagtgaagccgagaagcgtcggagggatcggattaactcgcagcttacagctttgaggaaattgattcccaagtctaacaagatggacaaggcagccttattaggaagtgcaatagagcaagtcaaggatct

SEQ ID NO: 12637 - DNA, 2064 bp, Gossypium hirsutum
  Clone ID: GOSHI-09MAY01-C12726_1
ggtgctaatcgttatccttttgctgaggacctaggcaaacaagctctcatgattaccgaggtttctggaagaatttcagagctaaaaaccaccatagatgctggattgcttcaacgggacaatctattgcggactattggagatcagtttgagcaatggaaccttaaggtgaaaacagagaaatcaatctatcactctctgaacatgcttagccttgacgtaacaaagaaatgtcttgtggctgagggatggagtcctgtttttgccacaaaacagattcaggaggcactgcagagggctgcatttgattccaactctcaagttggggccattttccaggttttacatacaagagaatcaccacctacctacttccgcaccaataattttacttcggcttttcaggaaattgttgatgcctatggggtggcaaagtttcaggaagcaaatcccggtgtatacactattgttacatttccttttctttttgctgtcatgtttggtgattgggggcatggaatatgcttattacttgcaacattatattttatggtccgggaaaagaaactttctagtcagaagcttggagatatcacagaaatgacttttggtggctcgtatgtgattatgatgatgtcactcttctctatttatacgtggtttggtctataatgaatccttctctgtgcccttggagttatttggtcgctcagcttatgcttgccgcgatctctcttgccgagatgcgactactgttggtttgattaaggttcgcgacacttacccctttggagtggatcctgcatggcatggtagccgtagtgagctgccattcctgaactctctgaagatgaaaatgtcaatccttcttggggtggctcagatgaaccttggaattattttgagttaacttcaatgcaatatttctttcgtaatagtctggaccgctggttccaatttattccccagatgatatttctgaacagtctgtttggctatctatcgttccttgtcattgtgaaatggtgcgctggttcacaagctgatttgtaccacatattgatatacatgttcctgagtcctactgatgagctgggtgaaaatcagctttttcctggccaaaagataactcagcaagtgctgttattgcttgccctggtttctgtgccatggatgctattaccaaagccttttcttctaaagagacaacacgaaaataggcaccaaggccaatcctacgcaccactcgaaagcacagatgaaactctcctttcagtggcaaataatgattcccatggtcatgaccatgaggaatttgagtttagtgaagtctttgtgcatcaactgatccataccatagagtttgtgcttggtgcagtttcaaatacagcttcataccttcgtttatgggccctcagtcttgctcactcagagttgtcagttgtgttctacgagaaggttcttcttcttgcttgggggtataacaatataatcatcctcattgtcggcataatcgtctttattttcgcaactgtcggcgtgttgctaattatggagaccctcagtgctttcctacatgctttgcgacttcactgggttgaattccagaacaaattctacgagggagatggttacaagttctatccattttcattcgcattactcgatgatgaggatgattgatgcgatgcaccgaatcgaatacaaaagaatgtatgttgaatggacttgagcgtggataggtaagaagttatgttgattttttcatttaaacatgacgaaaattgggaatatagatgtaccctatatagttggagttgaggaggcttttattaaagtcgcctaaggacacactgcttctttacccctccagttgataaatagtttgttattggaagcaataaatggcctactgcttgggctggtatttatatgtggtattgtgctttgtatgaaatgatccttgatttaattcatttttctatttaaattttatgaaaatttctagttgctctggttgcatcaactaggtatcatgtctttatgacaaatgatattttatgg

SEQ ID NO: 12638 - DNA, 676 bp, Gossypium hirsutum
  Clone ID: GOSHI-09MAY01-C12686_2
cccagcgtccgcggccgcgtgggtggaaggtcattatgtttttatcaaaatcagatgaggaagccacttccaacaggaaacttgctaaggatttggttgataaatggagtagaccaatctttaataagagcacaaggtttgaggacatgagaaatgttgatgatgatagggttcccttgcgaagaccacctgtcaaaaggcctgcaaatagagctgcagcaatggaatctagagatggtgattttgatttggacatttctcgtgaccaaaagtctagacgatcaacatcagctcaggatgcttcaaggtcggaatcttcttcaaggctgcatgcttcaaggcctgatgcggcgccaatggactttgttgtgcgcccccagtctaagattgatccagatgaaattagggcccgtgcgaaacaagttattcaagatcagcgccgtttaaagatgaataagaagttgcaacagttgaaagcaccaaaaaagaagaatttgcaggcgactaaacttagtgttgagggccgtggtatgctgaagtacctgtaaatgataccctagatgcccaaattggctatggtgtggagcttactttgccgttattagagatgcaaaggccagtataaaaagtgtcttgatgcaaatgtttgtgtattacaattcagctggaataatta

SEQ ID NO: 12639 - DNA, 1421 bp, Gossypium hirsutum
  Clone ID: GOSHI-09MAY01-C12686_1
gaaggatcggaatctgatgcgaagaagagcaagaagaaggagaggaggcacaaggagaaattttctgggggtgtgtactgaaaaaggaactgttaaaaagttggggaagtcagaggaagtgaatgagatgtgggagtgggttaatcctgagaatgatcaagagggtgctaggactatggatgatgatgacttcatagatgacagtggagtcgaccctgcagacaggtatggaagtgacaatgaagcaaggtcgcctggtgcagctcctcaggcagaggaagatgatgaggatccagagattaaggccctcgcgtccgcccgcgcgtccgggaagaagaatgagaaaagtcctgcagaaattgcattgctagttgagagtgtaatggcggagcttgaggtaactgctgaagaagatgcggagcttaatagacaagggaagcctgctattagtaaactcaagaagttgccacttcttactgaggttctctcaaagaagcaacttcaaccggaattcttagatcatggggttttaaccttgttgaaaaattggcttgaaccccttcctgatggaagcttaccaaatataaatatccgtgcagctgttttgcagattttaactgattttccaattgatttagagcagcatgatagaagggagcagctaaagaaaagtggtcttggaaaggtcattatgttcttatcaaaatctgatgaggaaactacgtccaacaggaaacttgctaaggaattggttgataaatggagtagaccaatctttaataagagcactaggtttgaagacatgagaaatgttgaggatgatagagttcccttgcgaaggccatctgtgaaaaggcccacaaatagagctgcatcaatggaatctagagatggtgattttgatttggatatttctcgggaccacaagtctggtagatcatcgtcaggtcaaaatgcttccaggtctgaatcttcttcaaggctacatgcttcaaggccagatgcaacaccaatggattttgttgtgcgtccgcaatctaagattgatccagatgaaattagagctcgagcaaaacaagttgtacaagatcagcgtcgtttaaagatgaataagaagttgcagcagttgaaagccccgaagaagaagcagctgcaggcgtctaaacttagtgttgagggtcgtggtatgcttaagtacctgtaaatgataatccacagtccacataccggaactattagctctctatttcccacaagaaacctcccttgaagcaaatgtttctcgttttccttatccaattgattccgatcattgagaagggattaacggtgggactatcatgatgtttcattaattctgtcttgggaaaataccttcactgcagttcaaataaatatggtataatgtttcaagtgcatgc

SEQ ID NO: 12640 - DNA, 648 bp, Gossypium hirsutum
  unsure (1)..(648): unsure at all n locations
  Clone ID: AW187938.2
taactgtcaaatggcactatccatctcttatttcacatatataccacatctcttcatctggggtggcgtagttttttggtacatattcctcattgcatatggagccatagatccggacatatcgacctttgcataccaggtctttatcgaagcatgtgcaccggcagggtcgtattggcttctgacactcctcgtgntaattgcctcgctgctaccgtacttcacttactcggccatccaaatgcggttcttcccattgtatcatcagatgatacagtggattcgaagtgatggacaaaccaacgaccctgagtattgtcatatggtgcgacagagatcactaagtcacacaacagtaggttatacggcacgtttcgaagcaaaatcgaagagctcgaaagagagagctcgggatcattgatgatcgtcctggctgaaacgcggattcattcatagacgggtgagagaatttaaactgcaacttatcgtattacagtggttatttaaatccttttgtttttatactgaaaaattgctgtatattgctcctgctacaagagttccttttaaatgtacataatacgcagaagatcaagatatataggctctgagttgtatttctgaggccaaaaaaaaaaaaaaaaaaaa

SEQ ID NO: 12641 - DNA, 425 bp, Gossypium hirsutum
  Clone ID: LIB3145-022-Q1-K1-C1
agcatgtgcaccggcagggtcgtttggttttctgacactcctggcgctaatggccgggctggggcggttctctttttcggggatcctaaagcgggggttccccttgtatcatcagatgatacagtggattcgaagtgatggacaaaccaacgaccctgagtattgtcatatggtgcgacagagatcactaagtcacacaacagtaggttatacggcacgtttcgaagcaaaatcgaagagctcgaaagagagagctcgggatcattgatgatcgtcctggctgaaacgcggattcattcatagacgggtgagagaatttaaactgcaacttatcgtattacagtggttatttaaatccttttgtttttatactgaaaaattgctgtatattgctcctgctacaagagttccttttaaatgtacat

SEQ ID NO: 12642 - DNA, 284 bp, Gossypium hirsutum
  Clone ID: LIB3166-055-P1-K1-A2
gacctcacgcggtgagagaatctaaactcggattcattcatacgggtgagagaatttaaactgcaacttggcgtattacggtggttatttaaatagctgtatattgctcctgctacaggagttccttttaaatgtacataatacacataagatcaagatatataggctctgagttgtatttctgaggccatatgacattttgcagctaaacctgtaattttatgaaagatgtaccctttatacagagagagagattcagttcaaaaaaaaaaaaagaatataaa

SEQ ID NO: 12643 - DNA, 992 bp, Gossypium hirsutum
  Clone ID: GOSHI-09MAY01-C12146_1
agagcatgctgcagtgaccattcttgatcgctggaaagtagctatgctaaatcaacaggggaagcagcttcaatctccaaaatttatgaacaactatcttgggattggttgtgatgcaaaggttgctttggatattcacaacttaagagaggagaatcctgagaagttctataatcagtttatgaataaagtgctatatgcaagagaaggtcccacgcgtccggtattatggataggacgtttgcagactttccttggcaagttagagttgaggtggatggcgtcgagatagaggtccctgaggatgcagaaggggtacttgttgcaaacattggaagctacatgggaggtgtagacctttggcagaacgaggatgagacatatgagaattttgatcctcagtctatgcatgataaaatactagaggttgtcagcatatctggaacttggcaccttggaacgctgcaggtggggctgtctcgtgcccgaagacttgcacagggacggtcgattaagatacagctctttgctgcattgcctgttcaaattgatggagaaccttggtctcagcagccttgtacattggccatttcgcatcatggacaggccttcatgttgaagaggacagccgaggaatcgctaggtcatgcagctgccataataactgatgtgctcgagagtgctgaaacaaatcatgtaattaacgcatctcagaagcgagctcttcttcaagaaatggcattaaggctgacttaatggctttcttctatcacggtacttgctggtcagttagtcggtggttctcgttgcaccgaatttttctcaaaaatgtgttattttatatcaatatatgatctttctgctgctttttatcttctttgccaaagctttcttgttgaagcgcgtgtttgtatatgaatctttttaaaacattaataccaaagaatcccttcaaataaaaaaaaaaaaaaaaaaaaaaaaaaaaaaaaaaa

SEQ ID NO: 12644 - DNA, 280 bp, Gossypium hirsutum
  Clone ID: LIB3166-048-P1-K1-G9
cggacgcgtggggtagacctatggcatatcgtggatgatacatatgagaattgtgatcctcattctatgcatgatgaaatactataggttgtaagcatatctggaacttggcaccttgtaacactgcatgtggggcctatttgtgccctaatactttcacatggacagtgctttcaaagacatcttcttgcttgtatttgcctgttcaaattgatggagaaccttggtctcttcatccatgtacattggccatatcacatcacattcaggtcttcattgt

SEQ ID NO: 12645 - DNA, 829 bp, Gossypium hirsutum
  Clone ID: GOSHI-09MAY01-C12166_1
atcttaagcccatctaaagaaatcactcctctcacaaacctcaaacaatggaagtggtgaagaacttggacatccaaagatacatgggaaagtggtacgagatagcttccttcccatctttctttcaacctaagaagggggagaacaccagcgctttttacactctgaaggaagatgggacggtgcatgtgcttaatgagacttttgttaatggcaagaaagattccatagaaggcaccgcctacaaggctgatcccaagagtgacgaagccaagctcaaagtcaaattctacgttcctcctttcttgcctatcattcctgttactggggattactgggttttatacattgatgaggattatcaatatgttcttggtggtggtcctaccaagaagtacctttggatattatgcaggcagaaacatatggatgaagaaatctacaacatgttggagcagaaggctaaagacttggggtatgatgtgagcaaactgcataagacaccacaaagtgattctacaccagaaggagagcatgtcccccaagagaaagggttctggtggataaaatccctgttcgggaagtaggaaaagatgaatcatggtgaagtgtacaaaaataaatatattggcatcaaaatccagtttgtgtctttttttattgaagtcgattctcatcttgtgctagtggtagtgtcctaaagagagacattgttgtatgaatgtaagcttgtgtattgttatatccatacctgaagtacagttttaatggttatggatggtggtggaacatgtgtattgatgaatattgatcctctgccacttttcag

SEQ ID NO: 12646 - DNA, 375 bp, Gossypium hirsutum
  Clone ID: LIB3146-008-Q1-K1-D6
atcttaagcccaacaaaagaaatcactcctctttcaaacctcaaacaatggaagtggtgagagaacttggacatccaaagatacatgggaaagtggtacgagatagcttccttcccatctttctttcaacctaagaagggggagaacaccagcgctttttacactctgaaggaagatgggacggtgcatgtgcttaatgtgacttttgttaatggcaagaaagattctatattatgcttcttcttctttgtttgtttttattattgtcttttctcatcttatattttttttttattttcttattttttcttttttatcttttgttcttgtttttaatttttgtttttatattttattattttttttatttttttt

SEQ ID NO: 12647 - DNA, 229 bp, Gossypium hirsutum
  Clone ID: LIB3146-015-Q1-K1-E9
acgctttgatgcgttttatccagcgcgctcacttcataccccaaagtgattctacaccagagggagagcatgtcccccaagagaaagggttctggtggataaaatccctgttcgggaagtaggaaaagatgaatcatggtgaagcgtacaaaaaataaatatattggcatcaaaatccaatttggggctttttttattgaaagtcgattcttattttttgcttatggga

SEQ ID NO: 12648 - DNA, 1209 bp, Gossypium hirsutum
  Clone ID: GOSHI-09MAY01-C12066_1
gcagacaagaatgatgacgtttatgctcagatcactttgcagcctgaagcagatcaaagtgaacctacaagtcctgatccttgcccagctgaggctccaaagaggacagttcattcgttttgtaagattttaacagcatcggatacgagcactcatggagggttctccgttcttcgaaagcatgctactgagtgcctgcctcctttggatatgaatcaggcaacccctacacaggagttggctgctaaagatcttcatggatatgaatggcggttcaagcatatatttagaggacaaccacggagacatttgcttacaacagggtggagcacctttgtcacttccaagagattggttgcgggagatgcatttgtgtttctcagaggtgataatggagaacttagagttggggctcggcggcttgctcgccaacagaccaccatgccttcatctgtgatttccagccagagcatgcatttaggagtgcttgctactgctgctcatgctgttacaacgcagaccctctttgttgtgtactacaagccaaggacgagccaattcataataggtgttaataagtatttggaggccattaaaaatggattctcggttggtatgcgttttaagatgagatttgagggagaagacactcctgatagaaggttcacgggtaccatagttggggtaggagatttttccccacattggtcggaatctaaatggcgaaccttgaagattcaatgggatgaacctgcaacaatacaaaggccagagagagtttcaccatgggaaatagagccatttgcgccttctgcttccataaatcttgtacaaccagctgtaaagaacaaaaggccacggcctgttgatattccagtttctgaaattactacaaattcagttggttcaaccttctggggtcgtggttcaacccaatctcatgaactaactcaagtaggaagcacacctgaaatccaaagcagtgaaagccaagttatgtggggtatgaggcagaaagaagctgattactgtcgagattataattcgaacgcctggccacattctcctcttgtgaatgtctctttaaacctttttcctaattcagtgagtgacaaaaacagaactgaaaaaccacaaatcactctcactggttatgccttgccttctctatcgaggccaagtaagggcctgatgcatgaccaagttgag

SEQ ID NO: 12649 - DNA, 517 bp, Gossypium hirsutum
  Clone ID: GOSHI-09MAY01-C12356_2
cggacgcgtgggcgtgtcgcgtgggcggacgcgtgggcagctctgaaggctgtgatcaagtgcattgaggagcataatattgaggagcaataccctattgatccacttcagaagcgggttctcctattggagaaggttaaagcagacaagaagggatcaactgaagctgcaaagcctcaaacaaagagagctcgtgccaatggtgcaggatatggtccacgagtcactaatgtagctgctgacaaaccattctattctagaaccactgataggtacccgcagtacgttttggaccgccctcttctttactccggacctgctgacaaccgcggcccctctcttttggttttgccacctacaacttctctccaagtcatggtaactacttcggctaccagtatcaggttccctatcttcactaatttcccaaaaaatggcaaaaaggtgactgtgatcctctcacattaaccattagccttaaccttccatgttgcagtgtacgaatgaatttagtatt

SEQ ID NO: 12650 - DNA, 413 bp, Gossypium hirsutum
  Clone ID: GOSHI-09MAY01-C12356_1
gcgcccacgcgtccgcccacgcgtccgcccacgcgtttcgattctattctagaaccactgataggtgcccggttgtacgtttaggacggaccctatgttcactccggacctgctgacaaccactgcccctctcttcttggttctgccacctacaacttctctccaagtcatggtaactacttcggctaccagtatcaggttccctatcttcactaatttcccaaaaaaatggctaaaagagtgactgtgatcctctcacattaactattagccttaaccttccatgttgcagagtatgaatgaattttgctttaaaaaaccaacataagataaaattgccttgttaattttaatatgttgcacaagaagatattgtgatcctctaatatatgcactgggttgtgatgtatatc

SEQ ID NO: 12651 - DNA, 387 bp, Gossypium hirsutum
  Clone ID: GOSHI-09MAY01-C12336_1
cccacgcgtccggaaaaagagagatagaatggcgtcgggtgccggagactggtcggcggaacagatcgatgattacgagaccttaatttcgacgaccgatgtggagctcttgaagagagcatggcgtaatgagaaagcgtctcctgagatccttcctttcgaggaagctctggttaaaagagctaaagagcagatccagttgatggaggaaacagtagacgactttgcagaaagtggtcatgatcctctcattgcatcactgtatcagatggacctggatagggctcaatttttgctgagatcttatcttcgggttcggctgcagaagattgagaaattcatgtttcatatctggaaaatggatacttataggaaccggctttcaat

SEQ ID NO: 12652 - DNA, 587 bp, Gossypium hirsutum
  Clone ID: GOSHI-09MAY01-C12326_3
ctgagactggccaaatttgaccaattggggctctgaattttagttccttttttttttcccctcttttatacagtcatctgctccaattctgaatacccattgtctagtttgtttaaagatcagatctttgatacatcctcggattttttttgggtcttttttctctatcaaaacagagaagatcgaaagggagaaacatggctccacctacaaggatagggcttgctggtttggctgttatgggccaaaatcttgcacttaacattgctgagaaaggctttcccatttctgtttataacagaactacctctaaagtcgatgagactgttgaaagagctaaaaaggagggagatcttcctgtatatggtttccatgatcctgaatcttttgttcagtcaatccagaaacctagagtggtaatcatgcttgttaaggcaggggcccctgttgaccaaaccattaagactctctctgcatacttggagaaaggtgattgtatcatcgatggtggcaacgagtggtatgaaaacactgagagacgacagaaagagatgtcggcactgggtttgttataccttgggatggga

SEQ ID NO: 12653 - DNA, 749 bp, Gossypium hirsutum
  Clone ID: GOSHI-09MAY01-C12326_1
tacgcctgcagtaccggtcccggaatccctccgctttgatttccttctataaaaaagaagaagaaaaaaacagaggaaagaagggactttttgaggaacaactatggctccacctacaagaataggacttgctggtttggctgttatgggccaaaatcttgctcttaacattgccgagaaaggcttccccatttctgtttacaacagaactacctccaaagtcgatgagactgttgaaagagctaaacaggaaggggatcttcctttatttggtttccatgatcctgaatcttttggtcaagtcgatccagaaacctcgagtgataatcatgcttgttaaggcaggggcccctgttgaccagaccattaaaactctctctgcatacatggagaaaggtgattgtatcattgatgggtggcaacgagtggtaccgagaacaccgagagacggcagaaggagatgtcggcactggggtttgttataccttgggatgggagtttcgggtggtgaacaaggtgcacgaaacggtccctctttgatgcctggaggggtcctttgaagcttacaaatacattgaagacattcttcttagggtcccccctcgtgtctgatagccgacctgtgggactacatgggaaaagtgatcggtattgtcagatgtcactatggattgatattgatagcactgatgctgagcttatgagtctaattgttgaaaatatcatgaaaacatacgtgttctgaagga

SEQ ID NO: 12654 - DNA, 591 bp, Gossypium hirsutum
  Clone ID: LIB3543-032-Q1-K1-C6
cccagcgtccgcccacgcgtccgttttatcatcagtagttttgaatctgttgactttaaaaggtaactacagcacaaccatattcaggcatgtgcattgattattcctttataaaaacactcaactttgtatctaattgatttttaattgtgaagcaaagtggtaaacttttcatgtaagtgttcatagaaggtactagttagcttagttggttaaggatttggcgattgtattatgaacctggaattgttcattaggctaaaaatgatgaaaagggcttctagttttccacctagttgttgatggtttatatgtaaaaagttcttagaagttatttttgtgttttagatatttcttttcccatctcactaattatgtctaaatttatcagggagaaacatggctccacctacaaggatagggcttgctggtttggctgttatgggccaaaatcttgcacttaacattgctgagaaaggctttcccatttctgtttataacagaactacctctaaagtcgatgagactgttgaaagagctaaaaagagggagatcttcctgtatatggattccatgatcctgaatcttttg

SEQ ID NO: 12655 - DNA, 1089 bp, Gossypium hirsutum
  Clone ID: GOSHI-09MAY01-C12296_1
gtttccatcaacaatgggagaaacaaatgagaacataagaattaacagcagcaaagatagggacaatctttctttgcagatggagaaatacccaagggacctgttacaaagattcatgtcaactgaaacccaagcttcaataacaagtgaaagagaagaagatgaagcagaagaagaagcagagctgaatcttgggttatcattaggaggcagatttggggttgataagaatgcaaagaagttgataaggtcatcatccattgctagttcaatgccaacatttagagaagaaggtgccaacaacactccaccaacgattccttacccaacactaattagaacctcttctttgcccaccgagactgaagaagagtggaggaagagaaaaaaattgcaaagtctaagaagaatggaagccaagaggagaagaagtgagaagcaaaggagttcgagagagaaaatggaggtgaatttgttagaggaagacaagcaacctggaagagccaataatgttggggttggaccaccatttggattgcagagtcgggctgcatctgcaaggcagatcacttcacaaggctctataggatcactaggaagaagctcttctagtatgtcagaaatggaaaataaagctcttcaagtcccatgcattgcaggagcaggcagttgtggtgaagcgagaagctccggtagcacccagtccttgcaagatcaaggtagtcaagaggctgcatgttcttcagggaaaaaaaaaagtgaaacctgccatactccggaacttgaggccgaaacactgagtaaaacggttgaaaataaagggaaagaacgagggaatgcgatggaagacatgccttgcgttttcaccaagggagatggtccaaatgggaaaagaatagaaggcattctatataagtatggtaagggagaggaagtgaggataatgtgtgtgtgccatggaaattttctatctccagctgagtttgtcaagcatgcaggtgggggtgatgtcgatcaccctctaagacatatagttgtaaatcctaactatgcttcattttttctaatggactttgatgtcatcccttc

SEQ ID NO: 12656 - DNA, 664 bp, Gossypium hirsutum
  Clone ID: GOSHI-09MAY01-C12276_1
tccgcccacgcgtccgttttttgcaaattttagcttttcttttttcatttttagtttgctgggttttgttctttgagagcaaaatcttctctccttttccctgttttttttcgtctcagtaaatgagaaaggtttatgattgttaagttggtttttctttgcccatcaagctttgattaggttttctttttcttttcgctttatcattctgtttgaaccaaatatatctgtagagttgcttcatgggtgtaatggatctgagagcaaagaaatcatggagtgaagatatgatgagtgagagcagcaagaagttttgtactgattgcaaaaccacaaaaacccctctttggagaggtggccctgctggccccaaggtattttttttatccttccattttcatctctctctcacacacatctttttgaagtttgggtttatttccttttttcttttaaaatcatcagcatgagtccttctctggcaaaagctctcatcttttttcatacatatatttgcttctttttaagttgatgagtcttcatcccgtttgattgttttggttaataataatcatcaccaaatctattactttgctttatttgaaatttattgattgttttgtttttgttttttggggggtaatttagtactgtgcaatgcatg

SEQ ID NO: 12657 - DNA, 394 bp, Gossypium hirsutum
  Clone ID: LIB3189-023-P1-K1-B7
ggttgatggaataattagaaagtgaaatgtggtgtcagatgtatctcatgttgatgtagggatcagtttttaacaataaaattggatggaatttttaacagaaggctcatttgctctttgatttaatgtacaaggactaatttaccctttttttaaatagagggagcaaaatacaatccgactttaatataggggtcttcatggtacttttaccacttatcaaccaaattgccattttattttccactaatgtgcagatattgagggcagtgatctagttgcagctaaagaaaaatggtacacctacagcaccgaacaaaaaccaatcgttgagaaatatatttcatctttcaggtatcgaaagctgactatcttgccgcctcttttggaaaat

SEQ ID NO: 12658 - DNA, 297 bp, Gossypium hirsutum
  Clone ID: LIB3135-032-Q1-K1-D3
tgatgctggccctagcttcatgatgaatcctgatggaccatttagagggtttggtggtccaatgcgcccctttggtcggatgtttggaggactgccttatgatgattggggttatgcacttgggagcgggaggccatcgagagcagattggcggtacaggccatactaaaagatggagcggggacagttaaagcgtcactgttaaaacttaaattatctaaagattatttcgagaatcaattatcaatatcatctattcacagattatgaatcatatagtgtggagccttagatttc

SEQ ID NO: 12659 - DNA, 272 bp, Gossypium hirsutum
  Clone ID: LIB3189-023-P1-K1-B1
tcacgagatttgtggacaacaggtggcaatagattcagcaacacccgttgatgatgctggccctagtttcatgatgaatcctgctggaccatttagaggttttggtggtccaatgcgcccctttggtaggatgtatggaggactgccttatgatgattggggttatgcgatcaaaatacaatccgactttaatataggggtcttcatggtacttttaccacttatcaaccaaattgccattttattttccactaatgtgcagatattggggg

SEQ ID NO: 12660 - DNA, 477 bp, Gossypium hirsutum
  Clone ID: GOSHI-09MAY01-C13906_1
ggcgactgaactggaagagctaataggcttcctctttgccccctctcctcctgtgaagaaggctggtgttgatattgtgcgtgatttaacaggctctgaggacggcttgcactctctttcaaactatgccaacaccgtgcttccatcgttatctaggcttttgagtgatgataaggaagtttcagaaccagctgccgaagctcttgtaaatctgtcccaaaatgcgggactggctgctaagatggttggaatggggttgattaaaatagccttggatatgttgcttaagccaggctctagtattactcgattgctggctatgctcctggtttatctaacacagttggatgatggtatttcttccttgcttcagattggagatgataagatgccaggactttatgtaatgaggctgtaagatcattctgtagatccagtgaaaccagtgatgccccttttgatcatgttggtccatac

SEQ ID NO: 12661 - DNA, 742 bp, Gossypium hirsutum
  Clone ID: GOSHI-09MAY01-C13816_2
cacaattcccgcttaactcctatcttcttcacctttagggttacaacagccgcacaccagcctagcgtttccatcaggaagaaatggcggtccctttgctgtcgaagaagattgtgaagaagcgtgttaagaagttcaagaggccccaaagtgatcgcaagatctccgtcaagacaaactggcgaaggcccaagggtattgactcccgtgttaggaggaagttcaagggatgcactttgatgcccaacatcggttatgggtcagacaagaaaacacgccactatcttcccaatgggtttaagaaattcgtggtgcacaatgtccaagagctagagcttctcatgatgcacaacaggacatactgtgctgagatagcacatgatgtttcaacgaagaagaggaaggaaatcgttgagcgagcggctcagttggatgttgtcgttaccaacaaattggctaggttgcgcagccaggaggacgagtgaaggtcggttcttgaatgttgattttgctctttttagtatgatattctcttgtttaggaagtaagaacttttggtccaatgttaaaattgttatatttgtatctgagtagcgttgtctctttttttttttggttgtgatttgagtataaaaccccatttctaatttaatgtatccttgatgttttgagggatctcttctttgttcatgcttttctacaataatgaaaggtttaagataccggcaaggttgtttgaacc

SEQ ID NO: 12662 - DNA, 657 bp, Gossypium hirsutum
  Clone ID: GOSHI-09MAY01-C13816_1
cgggtgcgaccccacgcgtccgcccacgccgcccgcccgccttcacttccaatttagggtttgcacgagccgtagtgcgccgttcgcatcaggaagaaatggcggtccctttgctgtctaagaagattgtgaagaagcgtgtcaagaagttcaagaggccccaaagtgaccgcaagatctccgtcaagacaaactggcgaaggcctaaaggtattgactcccgtgttaggaggaagttcaagggatgcactttgatgcccaatattggttatgggtccgacaagaagactcgccactatcttcccaatgggtttaagaaatttgtcgtgcataacgtccaagagctggagcttctcatgatgcacaacaggacatactgtgctgagatagctcatgatgtttcaacaaagaagaggaaggaaattgtcgagcgggcagcacagttggatgttgttgtgaccaacaaattggctaggttgcgcagccaggaggatgagtgaacatctctccctgatggtcgattttgctttttggtgtaatatttttatttaccatttaggggttttcttttcctgcaattcggatcaaatgaatttaagttttattttgaccctttttttggtcgttgctattgaatctaaactcgttacccgattc

SEQ ID NO: 12663 - DNA, 520 bp, Gossypium hirsutum
  unsure (1)..(520): unsure at all n locations
  Clone ID: LIB3493-045-P1-M1-B2
acgagccgtagtgcgccgtttgcatcaggaagaaatggcggtccctttgctgtctgagaggattgtgaagaagcgtgtcaagaagttcaagaggccccaaagtgaccgcaagatctcgcaggtttttattttatttttattatttagaaaaaatatatatatattttttctgatctccgctttgttatttactttatttctcaatgatacgttctcttcagtttgtcttatttttaagaacccatttattcaaagcttattaatagttgtaattgggttttactctggttcattgctcttaaaaaaacttaacaacacttgaaaaggtcgcacttcttttattagaatgctctaggctgcatttgggaacttatatttcaaaaacagtgtcatgagacacttaanaatgtaatatttcatggttattcttaaaatcatgtatttgttggatgcctatttagtggtgaatttgaaattcatgtttttatacttttgaactataatcatattgaaccatgac

SEQ ID NO: 12664 - DNA, 434 bp, Gossypium hirsutum
  Clone ID: uC-gsronu33B079b11b1
gccgtatgccagcctagcgtttccataaggaagaaatggcggtccctttgctgtcgaagaagattgtgaagaagcgtgttaagaagttcaagaggccccaaagtgatcgcaagatctccgtcaagacaaactggcgaaggcccaagggtattgactcccgtgttaggaggaagttcaagggatgcactttgatgcccaacatcggttatgggtcagacaagaaaacacgccactatcttcccgatggatttaagaaattcgtggtgcacaatgtccaagagctagagcttctcatgatgcacaacaggacatactgtgctgagatagcacatgatgtttcaacgaagaagaggaaggaaatcgttgagcgagcagctcagttggatgttgtcgttaccaacaaattggctaggctgcgcagccaggagaacgag

SEQ ID NO: 12665 - DNA, 407 bp, Gossypium hirsutum
  Clone ID: LIB3272-009-P1-K1-B11
gccgcacgccagcctagcgtttccataaggaagaaatggcggtccctttgctgtcgaagaagattgtgaagaagcgtgttaagaagttcaagaggccccaaagtgatcgcaagatctccgtcaagacaagaaaacacgccactatcttcccgatggatttaagaaattcgtggtgcacaatgtccaagagctagagcttctcatgatgcacaacaggacatactgtgctgagatagcacatgatgtttcaacgaagaagaggaaggaaatcgttgagcgagcagctcagttggatgttgtcgttaccaacaaattggctaggctgcgcagccaggagaacgagtaaaggtcggttcttgaatgttgattttgctctttttagtatgatattctcttgtttaggaagg

SEQ ID NO: 12666 - DNA, 400 bp, Gossypium hirsutum
  unsure (1)..(400): unsure at all n locations
  Clone ID: LIB3146-046-Q1-K1-E5
cccacgcgtccgcccactcgtccgcccacttcgtccgatctccgtcaagacaaactggcgaaggcccaagggtattgactctcgtgttaggaggaagttcaagggatgcactttgatgcccaacattngttttggctcagacaagaagactcgccactatcttcccaacgggtttaaganntncgtcgtgcacaatgtccaagagctagaacttctcatgatgcacaacaggacatactgtgctgagatagcacatgatgtttcgacgaagaagaggaaggaaattgttgagcgagcggctcatttggatgttgtcgttaccaacaaattggctaagttgcgcagccaggaagacgagtgaaggtcggttcttgaatgttgattttgttctttttaatat

SEQ ID NO: 12667 - DNA, 427 bp, Gossypium hirsutum
  Clone ID: LIB3147-020-Q1-K1-C4
ctcacgcttccggattgtcatgctcagcacggcacgattcgtactaagaaaaaatgacactcagattggtgagtaataagagtgccagctaacgagaatggacactcatctagtcacatagtgaatcacaagatcgtgggtcacgacagactggctatggcatcagagtattgactctggtcttaagacgaacttcagggaatgcactttcatgcccaatattggttatggctccgacaagaccactctccactatcttcccaatgggtttaagaaatttgtcctgcataacgttcaagagctggagcttctcatgatgcacaacaagacatactgtgctgagatagctcatgatgtttcaacaaaaaagaagaaggaaatttgtcagcggtcagcacagtttggatgtttgtgtgaccaacaaatt

SEQ ID NO: 12668 - DNA, 349 bp, Gossypium hirsutum
  Clone ID: LIB3146-047-Q1-K1-H11
cgcgtacgcatacacccacacgtttttccacttttgctttcaatttagggcttgcactagccagaggtgtccgttcttatcacgaataaactgcctaccctttgctttctaataatattgcgaataatcgtgtcaagaagttcatgacgccctaaaattaccgcaagatctccgtcatgacaaactgtctaatgcctaaaggtattgactccctttttattattgaagttcaagggatgcactttgatgcccaatattgtttatgggtccgacaagaatactctccactatcttctcaatcgttttaagaaatttgtcttgcatatcatcctaaagctcgagcttctta

SEQ ID NO: 12669 - DNA, 331 bp, Gossypium hirsutum
  Clone ID: uC-gsronu33B126a03b1
cgtttaccagcctagcgtttccatcacgacagaagggcggttcgaatgctgtcggggattattaccaaaaagcgtgttaagaagttcaagaggccccaaagtgatcgcaagatctctgtcaagacaaactggcgaaggcccaagggtattgacttccgtgttaggaggaagttcaagggatgcactttgatgcccaacatcggttactggtcagacaagaaaacacgccactatcttcccaatgggtttaagaaatttgtggcgcacaatgtccaagagctagagcttttcatgatgcacaacaggacatactgtgctgagatagcacatg

SEQ ID NO: 12670 - DNA, 858 bp, Gossypium hirsutum
  Clone ID: GOSHI-09MAY01-C13596_2
cccacgcgtcgcccacgcgtcgcccacgcgttcggggacgcgtgggtcgcccacgcgtccgcttcgccattgccagcgatcggagactcggagttcaactccaaactatcgccaccgatttccagaggatttataaagtccacgatcggctcttcctcggtctctccggcctcgccaccgatgctcaaaccttgtatcaaaggcttgtctttcggcacaagctgtatcagctaagagaagagagggacatgaaacctgagacttttgctagccttgtttctgcgattctttacgagaaaaggtttggtccatacttctgccaacctgtaattgctggattgggagatgaagacaagcccttcatttgcaccatggattccatcggagccaaggagctggcgaaagattttggtgtagctggcactgcctcggagtctctctatggtgcctgcgagtctatgttcaaggagaacatggaacctgaggaattgtttgaaacggtctcccaagctctccttgcatcagtagatcgtgactgtttgagtgggtggggagggcatgtgtatgttgtaacacctacagaagtaaaggaaaggattttgaaaggaaggatggattgagtgggaccaagtgtttgtaagattcttcatcgctgaactgtggaactttaggttgattagtcgttaggtttgattgaccaagttgtgtacattattggcagcaggggtgaatctctggtgcatgtgatggggtaaaatttgttggatcaatgcatgcattaacccaaagtttaaatgagatgcaggaactgatttattattattattattattattattattgagaaattatcccttt

SEQ ID NO: 12671 - DNA, 986 bp, Gossypium hirsutum
  Clone ID: GOSHI-09MAY01-C13596_1
ggaagctggagtgatctccaagccatctctcttcagtcttttaagctccgcttttgccccaatcaaatcagtttctcccccaaatttactgaaattttatagcaagactccttatttctccgatgtcgatcttcgaatacaacgggagtgccctaatagccatggtaggcaagaactgcttcgccattgccagcgatcggagactcggagttcaactccaaactatcgccaccgatttccagaggatttataaagtccacgatcgcctcttcctcggtctctccggcctcgccaccgatgctcaaaccttgtatcaaaggcttgtctttcggcacaaactgtatcagctaagagaagaaagagacatgaaacctgagacttttgctaaccttgtttctgcgattctttacgagaaaaggtttggtccatacttctgccaacctgtaattgctggattaggagatgaagacaagcccttcatttgcaccatggattccatcggagccaaggagcttgcgaaagattttgttgtagctggcactgcctcggagtctctctatggtgcctgtgaatcaatgttcaaggagggcatggaacctgaggaattgtttgagacggtttcccaagctctcctttcatcagtagatcgcgactgtctgagtggttggggaggacatgtctatgttgtgacgcctacggaagtaaaggaaaggatcttgaagggaaggatggattgaatgccggcaactggttcattcgtaaactccttttaaactatttcagtcaatttgtgtctctagagtgttgctggatttgatgtactctttataaatttgatagaccaagttcgacattattgagagcaatgatggatttgtagtgcatttcgcgagttaaatttgtttttttgtattgtttctttaaagataagatgcatgggatttttagaaaaaaaaaaaaaaaaaaaaaaaaaaaaaaaaaaaaaa

SEQ ID NO: 12672 - DNA, 412 bp, Gossypium hirsutum
  unsure (1)..(412): unsure at all n locations
  Clone ID: LIB3197-030-Q1-M1-B8
gtggagtgatctccaagaaattttgcagtttcttcatttaaagctcacatcacatttgctaaacaaaattttagttagtttatcgcaactaaatttcatttcaaatacccccttgattctccgatgtcgatcttcgagtataatgggagtgccctcgtagccatggtaggtaagaactgcttcgctatcgccagtgatcggagactcggagttcaactccaaacaatcgccaccgatttccagaggatttcaaaaatccacgatcgactctttctcggcctctctggcctcgccaccgatgctcaaaccttgtatcagaggcttgtgtttcggcacaagttatatcagctaagagaagagagggacatgaaacctgagactnttgctagccttgtttctgctattctttacg

SEQ ID NO: 12673 - DNA, 253 bp, Gossypium hirsutum
  unsure (1)..(253): unsure at all n locations
  Clone ID: LIB3828-001-Q1-K6-F1
gtatttttgcagtttcttcatttaaagctcacatcacatttgctaaacaaaattttagttagtttatcgcaactaaatttcatttcaaatacccccttgattctccgatgtcgatcttcgagtataatgggagtgccctcgtagccatggtaggtaagaactgcttnncgctnatnncgccaggtgnatncggnagnacctcggnagtntnncaactccaaacaatcgccaccgatttccagaggatttcaaa

SEQ ID NO: 12674 - DNA, 473 bp, Gossypium hirsutum
  Clone ID: GOSHI-09MAY01-C13576_3
cgcgtccggtctttcgctctttccttcttttaagttcttttgttctttaatttgacctgggttgccgggaaacaaaagggaagaaaaatgtcgagcaccgatgaattcatggatgacatgaatgggaatggggattcatatgggacggtgaaccggaggttcaaagatcgagccgagcaagtggcgaaaacgaaagagattttgtccaaacaagcggttcaaacgaaggaaatgttgtcgaaacaagctgttaagatcgctaaacaagctgaagaacacgagcgctttatcaataaggtgactcatcttttgggggttcttggatttggagggttttgctttctattgggagcaagaccacaagatattccttatgtatattgggtgttctatgttacctttgttcctcttagatggatattctaccgttttaagaaatggcattattatcttctggatttctgcttattatc

SEQ ID NO: 12675 - DNA, 870 bp, Gossypium hirsutum
  Clone ID: GOSHI-09MAY01-C13576_1
gttcgatttataatttgtgtagaattaaacaaccgaaaagaggaaaagatgacgagcagtgatgaacccggggaggacatcattgtgaatggggatacacccgggacggggaaaccgcgattcagaaaagtagcaaaaacgaaggagatgttgtctaaacaagcggttcaaacgaaggagatgttgtcgaaacatgctgttaagatcgctaaacaagctgaagaacacgagcgctttatcaacaaggtgactcatcttttgggggttcttggatttggagggttttgctttctattgggagcaagaccacaagatattccttatgtatattgtgtgttctatgttacctttgttcctcttagatggatatactaccgttttaagaaatggcattattatcttctggatttctgctattatgccaacacaatcttcttggttgaccttcttctgtatccgaagaatgaaaaacttttcatgatttgtttctcatttgccgagggaccgctagcgtgggcgctcattgtttggcgttgtagcttggtttttagttccgtggacaaaattataagcgtccttatacatcttttaccggggatcgtttttttcacaattcgatggtggaatcccgcaacctttgaagccatgcatcccgaaggtactcctcacagattttcatggccttacgtagaagacaaatcttacctatggacttggctgttcggggttcccttagctgcttatactctttggcaaggtctttatttcctcattgtcaacgtgctacgttcgccagaggctgctaagaagatcccgaagtcatgacttcttacagggaactttctaaaaatgcacaaaaaggaaacaaca

SEQ ID NO: 12676 - DNA, 659 bp, Gossypium hirsutum
  unsure (1)..(659): unsure at all n locations
  Clone ID: AI055318.1
gattcgatttataatttgtgtagaattaacaaccgaaaaagaggaaaagatgacgagcagtgatgaacccggggaggacatcattgtgaatggggatacacccgggacggggaaaccgcgattcagaaaagtagcaaaaacgaaggagatgttgtctaaacaagcggttcaaacgaagaagattttgtcgaaacatgctgttaagattgctaaacaagctgaagaacacgaacgatttatcaacaaggtgactcatcttttgggggttcttgtatttggaggggttttgctttctcttgggagcaaggccacaagatattccttatgtgtactgtttgttctatgtcatcttcgttccccttcggtggatatactaccgctntaagaaatggcattactatcttctggatttctgctattatgccaacacaatcttcttgtttgatcttcttctttatccaagtaatgaaaagctnttcttggtttgcttctcatttgccgagggccactagcatgggcactcanttgttggcgttgtagcttggttttagttctgttgaccaaatattagcgtncttatcatcttttactggtatgtntgcgatcttattgcactgcatactctatgcacttgatcagcaagttgtttttggttcatt

SEQ ID NO: 12677 - DNA, 458 bp, Gossypium hirsutum
  Clone ID: GOSHI-09MAY01-C13506_2
cccacgcgtccgcccacgccccccctccattgtgaagtgtaagttcaccagttgttgctagggagaaatcaaaatggggccaggtggaccaggaggacctccgggatggggcggtcctcctcccggaccgggtttttccggtggcatttgtgacttcattggttcttgtttgagctttctgtgttgctgctggctgcttggagactgttttggtggtccaatgggtccaccagggccacctggaccacctggatttggacctccaccaccctagttatatgtctaccatcttcatattccaacacaaaaattggaggcttttctagcttctatctgggtttcaacttagctatctaaaatacatatttatgtaataattgtttgcatttttagtagaatttatgtttattgaaattaatctcaataaattgatctttcaatcttttttctttgctcaa

SEQ ID NO: 12678 - DNA, 652 bp, Gossypium hirsutum
  Clone ID: GOSHI-09MAY01-C13506_1
cccacgcgtccagtttcaagctttcttattaccttccctccattcttctgtaagttcattagttgccgcttgggagaaaatgggaccaggtgggccaggagggccaccggggccaggtggaccaggagggccaggagggcctccggggccaggagggccaggatggggcggtcctccacccggaccaggagggccaccaggatggggcggtcctccacccggaccaggagggccaccgggatgggggggtcctcctcccggaccagggggaccaccggggtggggcggccctccggtcggaccagggttttttggtggcttctgtgatgtaattggtgcttgtgtcaacttcctgtgctgctgctggctgtttcgagattgttttggtggtccaatgggtcctccagggccacctggacctccaccaccatagttacatgctttcttgctccttcataaatagaccttctatctgggtttgaacttagctatctaattacaatatttatgtaagaattgtttgctttttagtagtagaaattaatatgaaggaaatctgttgagtgattatttttctgtctcaaagagcgattcatcgataaatatataaaggcatgatctattgatgtgatgcgttaaagatgggtagatc

SEQ ID NO: 12679 - DNA, 609 bp, Gossypium hirsutum
  unsure (1)..(609): unsure at all n locations
  Clone ID: AI727418.1
accagtttcaagctttcttattaccttccctccattcttctgtaagttcattagttgccgcttgggagaaaatgggaccaggtgggccaggagggccaccggggccaggtggaccaggagggccaggagggcctccggggccaggagggccaggatggggcggtcctccacccggaccangagggccaccangatggggcggtcctccacccggaccangaaggccaccgggatgggggggtcctcctcccngaccncggggacctccggggtggggcgggcgtccggtcgtgccctggttttttgtgttccttctcgtgggttgcgggccgcctgtgtgttctccctgtgcggctgtttggtgttttgtgggtttctccccnntccccccgcgttcttgtcttgtcttccttttctcgcttccttttttttggggtgttgcgttgttcctccgcgtttcggctctctctcttgtggctgcggccggcgctgtggtctgtcgtgccgtccctgtcgngggttgcgcctgtgcgggttgtgcgggttgcgggcgcgctcggcgtgttgttgggcccgggccctgctcctcgcgcgcggccgccggtgcgc

SEQ ID NO: 12680 - DNA, 360 bp, Gossypium hirsutum
  Clone ID: LIB3148-006-Q1-K1-B6
ggcttttattttaatttattcggcttatttatttttttttaaaaaacaaaactactgcgcggccaaataaaaaaaaaaaaaatttgagacttcattggttcttagaaagagctttctgtgttgctgctgactgcttgaaaactgttttggtggcccaatgtatccaccatggccacctggaccacctgaatttcgacctccaccaccctagttatatgtctaccatattcatattccaacacaaatttctggaggcttgtctagcttctatctgggttgcaccttagctatctcaaatacatatttatctaataattgtttgcatttttagcacaatttatgtctattgaaactaatctc

SEQ ID NO: 12681 - DNA, 1263 bp, Gossypium hirsutum
  Clone ID: GOSHI-09MAY01-C13446_1
cggacgcgtgggtccggacgcgtgggaaaaaaaaatcctctctcgtttcttctgaaacggaagagaggaaaagaaatttaaaggaaaaaaaaaatcattgcaatttcctcctccttctctctgtccctgcaacaatcgttcgacgatctataaaccttctctcctcaggattttagggtttttttcattttctactgtaaactccaaaatgcataaactgggcagaggtcatcgggacaaagtccagcagttcatgactataactggagcgagtgaaaaacttgctcttcaagctttgaaggcgagtgattggcatcttgaaggagcttttgattttttctatggccagcagtctcatattaaaagttataccgatactacatatttggaagaactttataaaagatataaagatccttacacagatatgatactgcctgatggtattactcttctatgcaacgacctgcaggtggatccccaagatatcgttatgttagttgtttcatggcacatgaaggcctccaccatgtgtgaatattccaaggaggaatttttcactgggttgcaggcactagggatagattctttggagaagtttcgtgagaggataccatttatgcgttctgagctgaaagatgaacaaaaattccgtgagatatataactttgcatttggctgggcaaaagaaaagggtcagaaatctttggcattggatactgcaatcggtatgtggcagttgctgttcgctgagaagcagtggccattggttgaccattggtgccagtttttacaggctcgacataacaaagcgatctctcgggacacatggtctcaacttttggagtttgctagaacggtagaccctgcactatcgaactacgatgccgaaggtgcatggccctatcttatagatgaattcgtggaatacttgaatgagaatggcatcattcaaagtggacagttcaagtgattggggagccataaatgataaaaaaggactgctcagtgccggccacggttgataatatcgtggaatttttgcaatctatcgttagtgcggtccgtattgtgatgccaatgacggaggtaagtgtttgatctttctgaaaaataagatgcaagatacctggtgtgattttattatatatggacttttagtgacaattggtacacaagtcacattatttttagtttcatgggattgttaatatggtttgtgaattttctttttaaattaatagattgagtttgatttaagac

SEQ ID NO: 12682 - DNA, 352 bp, Gossypium hirsutum
  Clone ID: LIB3083-048-Q1-G1-D5
ctacacatttggaagaccttaataaaagatataaagatccttacacagatatgatactggttgatggtattactcttcaatgcaaccacttgcagttagttgtttcatggcacatgaaggcccccaccatgtgtgaatattccaaggaggaatttttcactgggttgcacgcacaacgtaaacattctttggagaaatttcgtgagaggataccatttatgccttctgagctgaaagatgaacaaaaattccgtgagatatataactttgcatttggctgcgcagcagaaagggtcagacatcttttggaatggatactgcaaatggtatgtgggaatttgctgtccgctga

SEQ ID NO: 12683 - DNA, 678 bp, Gossypium hirsutum
  Clone ID: GOSHI-09MAY01-C13416_1
cttcatcatctatgtttggagtttgaatacaaaaagaaagtaaggttaagccttttcattaatcctcaagcttttatttttgcccataagtctactcccagtttcccttaatcctccatgggcaaaggcggaggttgtgtcccaagcaaaaagagacaaccttcctctgccgaaggctctgccactgccactgccactaccgccaccaacaacgcacccatcgaagccgatgaagaaactcacgaaactgccagtgtagctgtgaatcctacgaatgcgcaatcagttaccgccactttaaaaatctttattgtttactactccatgtatggtcacgtggagaaactggccaagcggatgaagaaaggggtcgacggcgtggaaggggtagaagcggttctttatcgggttcccgagacgctcccggctgatgtgctggaccatatgaaggtgccgtcgaaaaaccccgaggttccagagattaaagcggcggaattggcgcaggcggatggggttctgtttgggtttccgacaaggtttgggtgtatggcggctcaaatgaaggcgtttttcgattccagtggacagttttggaaggagcagactctggccgggaagccagctgggttctttgttatactggaactcaaggaggcggccaaaaggccaccgcttgga

SEQ ID NO: 12684 - DNA, 469 bp, Gossypium hirsutum
  Clone ID: LIB3272-005-P1-K1-A2
acgcccgcaggtaccaggtccgggattcgcgccacgcgtccgacctggccaagcggatgaagaaaggggtcgacggcgtggaaggggtagaagcggttctttatcgggttcccgagacgctcccggctgatgtgctggaccatatgaaggtgccgtcgaaaaaccccgaggttccagagattaaagcggcggaattggcgcaggcggatggggttctgtttgggtttccgacgaggtttgggtgtatggcggctcagatgaaggcgtttttcgattccagtggacagttttggaaggagcagactctggccgggaagccagctgggttctttgttagtactggaactcaaggaggcggccaagaggccaccgcttggacggcaataacgcagttggcacaccatggaatgctgtttgttcctattggctacacttttggagctggtatgttcaagatggattccatacg

SEQ ID NO: 12685 - DNA, 415 bp, Gossypium hirsutum
  Clone ID: uC-gsronu33B164g01b2
gcttgtggtgtcgaaagatcgtattcgtattcggaatcggtgtcggagccgatgaagaaactcacgaaactgccagtgtagctgtgaatcctacgaatgcgcaatcagttaccgccactttaaaaatctttattgtttactactccatgtatggtcacgtggagaaactggccaagcggatgaagaaaggggtcgacggcgtggaaggggtagaagcggttctttatcgggttcccgagacgctcccggctgatgtgctggaccatatgaaggtgccgtcgaaaaaccccgaggttccagagattaaagcggcggaattggcgcaggcggatggggttctgtttgggtttccgacgaggtttgggtgtatggcggctcagatgaaggcgtttttcgattccagtggacagttttg

SEQ ID NO: 12686 - DNA, 464 bp, Gossypium hirsutum
  Clone ID: GOSHI-09MAY01-C13406_1
ctaggattcaaaatccaagatccgacattcttgtatcgcaatctctgtgacggatcaagccaagctgaaaccagcactgccgaagaaacgctactcttcactacagccgtcaacaccatgcggtggccggcggtgaaaagtggggggctgggggtggttgcgatgacatacgtggcggtagactatttacgcatcctatccccaacgtggcacgagcgtcttcaacccgtactctggtctttactcgccctcgtcgccgtcacgcgcgtccccttttaccgtcactggagcgccgagtttcgagctgccatctctttccttgcttcgatgatatttatgctctcagctcttctttttgaagcctgcacagttcgttccgttgccgttgctcttggactcacttggcccaatggtaggcctcctcttcctgatactggtcaatggttgctcctggcactaaatgg

SEQ ID NO: 12687 - DNA, 540 bp, Gossypium hirsutum
  Clone ID: GOSHI-09MAY01-C13746_2
cggacgcgtgggcgcgggttctacaccctgatgtctcggctaatggtcgaaacgacgccgctgccaacgagttcatcaaagtacatgaagcctactctacgctatcggatcctgagaaacgggcggattatgatcgaacgttgttgttcaggccaaggcggtccttttctgtttccatcgaatcgatggccggtcaaacgtcttcagggttttctggttattcgaaacgaacatgggaaaccgatcaatgttggtgatactggagattaactgtgaaatccatagatggattttggtttattttcattctttttggcttctgaggaattactgattttgtgctaatttcgcctgtaaatatagaaatatgttaactgaaaaaggctgttttttttttttgcctgagtttttaaagttttgaatttggtgttgtagaaggatcgactaagatggggtgatcctatggctcatatggtcaaaaaaaaacaacctgagctggttcttaaagaacctagggatgcttataaaatgaaagagtca

SEQ ID NO: 12688 - DNA, 463 bp, Gossypium hirsutum
  Clone ID: LIB3147-052-Q1-K1-D7
ggatgattggttaagatttaaggagatggatccatctgtaagcggacgaggtgctgagcctgtatttcgtgataagacaaaaggggagcgcatatcaaaagaagagtaccttaagtcaaaacgaaaaggagaagaaaagcccaaggagaaagagttggaatggggcaaaggcttagcccaaaaacgtgaagctgagactaggttgcaagatttagaactcgagaagagtaaaccatttgctcgaacaagggatgacccagagctcgacaatatgttgaaggatcgactaagatggggtgatcctatggctcatttggtcaagaaaaaacaacctgagctggttcttaaagacctaggggatgctgagaaaatgaaagagtcagggttcatagttcctcaagatattcccccgcatagttggatagtaagaaaactagatgctgcaccaaatcgttatggtata

SEQ ID NO: 12689 - DNA, 868 bp, Gossypium hirsutum
  Clone ID: GOSHI-09MAY01-C13716_7
ctccaaatgttgctgagaaggcttgcggtgctctctattttcttgctcaaggttacgaggaggtgggcccatcgtctcctttaactccttttttccaggaaattgtgcagtcccttctcactgtcactcatcgagaagatgctggggaatcccggctgaggacggctgcctatgagactttgaatgaagtggtgaggtgttcaacagatgagacagctccattagtgttgcagttggtgcctgtcatcatgatggagcttcataacagtcttgaggggcagaatctgtcatctgatgggagggagaagcaaagtgaattgcaagggcttctttgtgggtgcttacaggtcattatccagaagcttggttcatcagagtcaaccaagtatctgttcttgcagtatgcagatcagataatggggcttttcctaagtgtttttgcttgtaggagtgcgactgtgcacgaggaggccatgcttgcaatcggagcccttgcttatgctactgggccagattttgcgaagtacatgcctgagttctataggtacttggaaatgggtcttcagaatttcgaagagtaccaagtctgtgctgtcacagttggtgtcgtgggtgatattcgcagggcattagaggaaaaagttgttccttactgtgatgggatcatgacacaacttctcaagaatttatcaagcaatcagttgcatcgttctgtgaagcctcccatattttcatgctttggcgacattgcattggcagtaggggagtatttcgaaaagtacttgatgtgggctatgtctgcccttcagagtgctgcagagttgtctacccatacaacaggtgatgatgaattgattgagtacataaa

SEQ ID NO: 12690 - DNA, 825 bp, Gossypium hirsutum
  Clone ID: GOSHI-09MAY01-C13716_6
cccacgccgtccgcggaattctggagggcatattctggtatattccaagggtttaagaactctcctaagacccagcttttgattccatatgcacctcatatcctccagttcttggatggcatatacatggagaaagacatggatgatgtggtcatgaagactgccattggtgtccttggagatctcgctgatacattaggcagtcatgccgcatctctgatacagcaatctgtctcaagcaaagactttttatctgaatgttcgtcttcagaagacgttatgattaaagaatcagctgaatgggctaagttggccattagccgtgccatttctgtttgatgaggttgccattcagcttcagcatgtttattttcttacggaagtccatgcatctgggtgtgttgagttgagggtctgggattgcatgtgtcaagtcatagccgttgtccgacaacagaaattgtccatcttcaagttgtcactaactcttgcatcatcatcatcatcatcatcatcgggtcggattccatcactgatcatggaggaagtcaatggagatggagaagttcgtaaacctctgcttgtcattgggaagagattgctagtcaggtaacccggtgacttgcagtttggataagggctatgtttgaatagaagcatcattttctgccatgggagtggttttctgcggtgaaattgtaggttactcataaaagatgactaatgatgagaatgaaagtgctgcagcagatgaagacatcttatatgcttcgcatcttcatagctttcccatctctgattttggttctgagttttctcactcct

SEQ ID NO: 12691 - DNA, 521 bp, Gossypium hirsutum
  Clone ID: GOSHI-09MAY01-C13716_5
cccacgcgtccgcccacgcgtccgggtgctgtgggtttgtgcaatgctggtaagctgagggttgatggaagagggtgcaaatgcggaagaaattagcaatggagcaatgggaaaaaatcttgaacaaccatgcaaacaagggatgggtaattgtgtgccaaaaccctcctctggttataatagaggatgtgaagaagtcgaaagatgccgacatggtccctaattcaacatccttcatttaccacaatcggaaaatgcacataaaataccacgcacaagattggcttctccctctcatctaatctataataatttacgagcaaaataaaaggaagaattagttgtttcgtatgttgatttgttccttattgttgtgacccacgcatgccagaaacatgtccttgaataaagtattttatttttatttcaaaaaaaaaaaaaacaaaaacaataaaaaaaaaaataaaaaagaagaactaagtagaaaaaattaaaattaaattaaaaaatatatttttttt

SEQ ID NO: 12692 - DNA, 568 bp, Gossypium hirsutum
  Clone ID: GOSHI-09MAY01-C13716_4
catggctcagctgttgattcacccatcatcactcaggcaaattgccaacagatagtcgtagttctgctacagagtatgaaggacactcctaatgttgctgagaaggcctgtggtgctctctattttcttgctcaaggttatgaggaggtgggtccatcatctcctttaactcctttcttccaggaaattgtgcagtctcttctcactgtcactcaccgagaagatgctagggaatctcggttgaggacagctgcgtatgagacattgaatgaagtggtgagatgttctacagatgagacagctccattggtgttgcaattggtgcccgtcattataatggagcttcataacactgttgaggggcagaagctctcatctgatctgtaataagggacgagcaaaataaaaggaagaattagttgtttcgtatgttgatttgttccttattgttgtgacccacgcatgccagaaacatgtcccttgataaagattttatttttatttcttttgggttttttctgcttttgtgcgttctaatgcttttttttttactatatgcaatcattca

SEQ ID NO: 12693 - DNA, 989 bp, Gossypium hirsutum
  Clone ID: GOSHI-09MAY01-C13716_3
atgaagaatgccattggagtccttggtgatctggctgatacattaggaagtcatgctggttctatgatacagcaatctgtctcgagcaaagactttttgaatgaatgcttgtcttcagaagaccttatgattaaagaatctgctgaatgggccaagttggccattagtcgtgccatttctgtttgagggtgttgccattcagcatgtttatttcttttcgaagtccatgcatttgggaatgtctagggtcttgggttgcatgtgtcgtgtcatcaccattgtcagacaacagaagttaccagtctttatgttgtcactaacatttgcatcagcatcatggggtcagattccatttttttttaatcatgggcgaactggatgcagacagtttcagagaagtcaacgaacgcctgcataaagagaatatcttttggtcttgaatgagcggagtagggggagggaatcatgaatttggacttgcataaggagtggagtcaggtagctcgatcacacttacatgtccacaccagcatcagttttgcctttatcgtggttttctcccagtaaatctagtttgatggaatggatgatcgatcatctggttcaaacaacgctgcagcactttaaagaaatctcaactgctgtaaatcaaccattgtcagtccttattccatcacctatcaatccttatttttgaagctcaaatctgcatatttatgaagtaagtacttccggctggcttgtatttaaatctcctctgcttcatttatacattttggttcggggtcgggtcgaggattaaccacattcagcattgcattcattagaattcatttcattcgttagttttacttagtttgggagtcaaaattgttccatctcatgcattcatagaatttttctgtctttgcgtttctttggggtatacatactgtttttcattttggtcttctttttttttttttataaatggatttttggttatcact

SEQ ID NO: 12694 - DNA, 1055 bp, Gossypium hirsutum
  Clone ID: GOSHI-09MAY01-C13716_1
tattatatctaaaaggaaaaacaagatgatgtttatcatgagtaagctattggcttttgaaatattctttggcccggagctagtatagccgaggggtcataagtggattttctcctaatgaaagcttcccaatgtgggccaaaatgggatttccattctccctgtgctgtcacagttggtgtcgtgggtgatatttgcagggcattaaaggaaaaagttgttccttactgtgatgggatcatgacacaacttctcaagaatttatcaagcaatcagttgcatcgttctgtgaagcctcccatattttcatgctttggtgacattgcattggcagtaggagagtatttcgaaaagtacttgatgtgggctatgtctgcccttcagagtgctgcagagttgtctacccatacaacaggtgatgatgaattgattgagtacataaataccctgagaaacggaatcctggaggcatattctgggattttccaagggtttaagaactctcccaaaacccagctgttgattccctatgcacctcacatcctccagttcttggatggcatatacatggagaaagacatggatgatatggtcatgaagactgccattggagtccttggtgatctagctgatacattaggaaatcatgctagttctatgatacagcaatctgtatcaagcaaagactttttgaatgaatgcttgtcttcagaagaccttctggttaaagaatctgctcaatgggccaagttggccattagtcgtgccatttctgtttgagggtgttgccattcggcattttttattttctttcggaaatccatgcaacctggtgtgtttaagtcgaggtctgagattgcatgtgtcaagtcatcgccattgtcaaggcaactgaaagtttctagtcttcacgttgtcactaactcttgcatcatcgtcatggggtcggattcttatgtcattcatgaagtggattgggatggtttcagagaatcaaactttttatctccttggtcaagtcatcccgattgtcgagacaaataaagtcactagtt

SEQ ID NO: 12695 - DNA, 467 bp, Gossypium hirsutum
  Clone ID: LIB3083-030-Q1-L1-D3
gtttattttttttttcttttgtttaaaaaggagtgatacaattatttctacttatttcgcaagtatatagagtagtaattagttgattggattaggtcatataataatacagatatgttataaatatcaaggcttgccaggtttcttcctagggtcgtgctcgtgcttttggttagccccagtatcatcataatcttgcattccacccagcatcatcagcttcctcactgtcctcatttggatcatcatcatctccttcccaccctgttcaactgagtaatctgcagcttgcttcatgccaccatgaagcccttcttcaaccatgccttgagagaaaggcatgaggaggagcagagacaccagaagaaaagtcttgaaccaaggagttcataaatatgcagatttgagcttcaaaaataagttgtgataggtgatggaataaggactgacaatggttgatttgcaac

SEQ ID NO: 12696 - DNA, 465 bp, Gossypium hirsutum
  Clone ID: LIB3189-015-P1-K1-G10
gacccacgcgtccgcttgtcttcagaagaccttatgattaaagaatctgctgaatgggccaagttggccattagtcgtgccatttctgtttgagggtgttgccattcagcatgtttatttcttttcgaagtccatgcatttgggaatgtctagggtcttgggttgcatgtgtcgtgtcatcaccattgtcagacaacagaagttaccagtctttatgttgtcactaacatttgcatcagcatcatggggtcagattccattttttttaatcatgaaggaactggatacagacaattttagtagaacttaacttactcctgtataaagagaatctcttttgttctcgcatgtgcggtttatgtggtggtgttttttttgacgttcttcttattgttgttttatgtattatatttattttctatttatttgtctttatgtttttcttttatttttttttaattcttt

SEQ ID NO: 12697 - DNA, 631 bp, Gossypium hirsutum
  unsure (1)..(631): unsure at all n locations
  Clone ID: AI055404.1
caatactttgccttcttatactggaggagatcagggttttctgaattcttactactctgatttcccaaatgcacatgtttttgaccctaatatacccgacgaggtgctgaaatcccgtcctgctcctgagatggaacgactctctactctatacaatgcagatgttggtctttacatgcttgccaacaagtggatggtagatgagagtgaactncgtgtaattcactatacacttggcccccttaaaccttgggattggtggacatcttggcttttgaaaccggtcgatgtctggcagaatgttagggaacagcttannagaagtcccttctggaactggaagaggcaaaaatccaactgatgactttctagtcaaattccttttcctctccttttctgtgcttcctntnnntggtctatcgtcctttcgtcacacgggggttcaatttggcgaaccttatttgcgatccgatctcacacttttccagtgantaggcccgtgggacaattggctacctaagggtttttaatttatccttagcaggcatcagttcttaacgggacgacaagggccgatattggtgcattcaatttgatgcttatgtggtggggtcctggaatctattaatgg

SEQ ID NO: 12698 - DNA, 589 bp, Gossypium hirsutum
  unsure (1)..(589): unsure at all n locations
  Clone ID: uC-gsronu33B147b02b1
atgattagttaagtcaatactttgccttcttatactggaggagatcagggttttctgaattcttactactctgatttctcaaatgcacatgtttttgaccctaatatacccgaggaggtgctgaaatcccgtcctgctcctgagatggaacgactttctactctatacaatgcagatgttggtctttacatgcttgccaacaagtggatggtagatgagagtgaacttcgtgtaattcactatacacttggcccccttaaaccttgggattggtggacatcttggctcttgaaaccagtcgatgtctggcagaatgttagggaacagcttaaagagtcccttcctggaactgggggaggcaaaaatccaaatgatgagcttctaatcaaattccttttcctcttacctttctgtgctttacttttttggttctatcgntctttcgttcagacagggggttcagtttgcagaacttcattatgcaatcaggtcagacacttctaccacataattaggtcgagtgggacagttgcttacactagtgtttcttcatcttctaccattaacgcanacagtcagttttctaaca

SEQ ID NO: 12699 - DNA, 432 bp, Gossypium hirsutum
  Clone ID: LIB3189-013-P1-K1-F2
gaaattttgtgcaaatttgaagcattctgagaggttgaattcaggagtcatggtagtggaaccatctgaagctgttttcaatgacatgatgagcaaagtcaatactttgccttcttatactggaggagatcagggttttctgaattcttactactctgatttctcaaatgcacatgtttttgaccctaatatacccgaggaggtgctgaaatcccgtcctgctcctgagatggaacgactttctactctatacaatgcagatgttggtctttacatgcttgtcaacaagtgttatttttatgatagtgatctgtgtgtatttacttatcatttttttttctttattcttggattttgtttctttttattctttgatcctttttattttcttatttttttatttcatttttattatgttttatttttattttt

SEQ ID NO: 12700 - DNA, 757 bp, Gossypium hirsutum
  Clone ID: GOSHI-09MAY01-C13146_1
ctgttgttttcttgtttaaccctctgccttgttgtattcttgctctaaccaccactacggaccggtcttgcaagtttttgggcggtggaatgggactattcaaggctgctggcgttgtttacaagccggtcgaggagattgatcttggtcctgacagcaatgagttttatctcctcccccacgttatagctcctcgcatggctggatttcttgtcaaaatatttgcttggttcctggagtcaaggatcattggaacgttattgttgtatatattgaagaggaacaacctaattcacaagcttgtttccaatgcaacgctggaggaggcacctatgtttgttcctttgcatccatttgttgaccttaatgaacaagaagttgaacaaattgactctgatgcatcgccagcagaacgagttcaacgggcaatgaattgtcttcctttgaccttagagaagtcagtagatgattcaaattccagcagcttccgacgctggacaatagcggattattcaagggcctatagttctggagaaataactccccggaaggttgcggagcaatttataaatgccgtgcatgaatcttcccgtgctgctttgccaatgtccttcttcattaactatgatgctgaagatatcctgaaacaagctacagaatcaactcttcggtacgtaagaggggatccgttttcagctctagacggagtcccaattgctttcaaggatggattagattgttctccatttccaacatc

SEQ ID NO: 12701 - DNA, 1556 bp, Gossypium hirsutum
  Clone ID: GOSHI-09MAY01-C13076_1
cgtagaagtggggaaagttctaacagaggtcccactgcttccaaacgcaaaatttttaatttttttctgggaatgtgcagttcaagataagatagctttacacgtttcccaattcagcaatccatttctgcaaccaaaaacacaagacactccatcaatttataaactcgaagcaatttgaagaaaccccatcactcatttcacctccaatcctcttaaaaacagggcattcaatatgcaggagaccaataattctcgagtcaaccaacgaattgcaacaatctcggctcatctcaacccacccagcttttcccacatggagggtagttcgggtttgggtcgagctgactgccgagccaaaggtgggttaactggtttcaaggtggcgattttgggagcggcaggtgggatagggcaaccgttatcattgttgatgaagatgaatcctttggtttctgttcttcatctttatgatgtggttaacactcctggtgttactgctgatattagccacatggatactggagctgtggtacgtggatttctggggcaacagcaattggaggaggctctaacaggaatggaccttgtaattattccagctggagttcctaggaaacctggaatgacaagggatgatcttttcaacatcaatgctggaattgttaagacactgtgcgagggaatagctaagtgctgtcccaatgctattatcaatttgattagtaatcctgttaattccaccgttccgatcgccgcagaagttttcaagaaagctggcacctttgatccaaaccgacttctgggagtcacaatgcttgatgttgtgagagccaatacgtttgtggcggaagtcatgggtcttgatccgcgggaggttgatgttccagttattgggggacatgcagggattactattttacctcttctatcccaggttaagcctccatgctctttcacccaaaaagaaatcgagtatctgacaaaccgcattcagaatggtggtacagaagtcgttgaggcaaaggctggtgctgggtctgcaacattatcgatggcatatgctgcggttcaatttgccgatgcatgtcttcggggcttaagaggtgatgctgacattgttcgatgtgcatttgtggcttctcatgtgactgaattgcccttcttcgcatccaaggtaagactcggtcgttgcggagttgaggaaatataccctcttggcccactaaatgagtatgagagggttggcttggagaaggcaaagaaagaactagaaactagcattgagaagggggttgcctttgtcaagaaatgaataggtactccaatacccccaaatctaccttttctctgataaccaaagtttgtaagaataaggggtaactctcctcttttgttctacataaacccttagccatcgggttcctagatgtgacccaacatggcaaatatggaccatggtaaaagattcatgtaataaatagaggaaatggtttgtaaacttttcatttatttcatttcttattctaatataatcaaacagaataagttaaatc

SEQ ID NO: 12702 - DNA, 408 bp, Gossypium hirsutum
  Clone ID: uC-gsflmaxxa029h10b1
cattaattttcgagtcaaccaacgaattgcaacaatggggggtcatctaaacccacccagctgttgccacatggagggtagttcgggtttgggtcgagctgactgccgagccaaaggtgggttaactggtttcaaggtggcgattttgggagcggcaggtgggatagggcaaccgttatcattgttgatgaagatgaatcctttggtttctgttcttcatctttatgatgtggttaacacttcatggtgttacttgctgatattagcccacatggattacctggagctgtgggtacgtggaattttttgtgggcaacatcctatttgtgaggagtgcttttaaaccaagaatgggaccctttgaaaattaatttccagcgtgggagttaacctaataaaaccttggaa

SEQ ID NO: 12703 - DNA, 644 bp, Gossypium hirsutum
  Clone ID: GOSHI-09MAY01-C13326_1
ccccgcgtccgataccagtagcgccgtttccgtacatttcccctaaaatctccacagacaaaatgcaagaaatgaaggctgagattgcaaccaaaaattcaaagaaggcaaatctattagatcacaattccctcaaacacatcctcgacgaatccgtccctgagatcgttacgagtcgtgggtatgcggaagacgtgaggatgagcaatgtcagattattcattggaacgattatcattgtaatcgctctatttgctcagttttacaaaaagaagttccctggaaaccgtgatttcctcattggttgcattgtattgtatatagttttcaatgtaatactccagctgttcagctacagaaaggaaaagaacgcaattatgtttacttaccctcctcctggatccgtcaccagcaccggattggtggtctcttcaaagttgccaagattctctgatctttatacgcttagcatagcgagtgcagatcccaaatcaatatctgcaggcaaaccagtagagtttaccaaaaatgttacccagtggttcacgaaggatggagtattggtggagggcctattctggaaagatgttggagcactaattgatgattatgcagcagtacctaagaaaaagaagtgatgtaga

SEQ ID NO: 12704 - DNA, 479 bp, Gossypium hirsutum
  Clone ID: LIB3189-007-P1-K1-H10
aaaagaatgaaccaaccctctttcgtaatctgaaatctgacaagaatttggattatagaactgggttttatttgtttaaaaaaaacagtgtggaaagtgagtctttttttattttctttgatcttcttttagtattctgaaacagagatggtaagtggggcaagaaccgaagggcatatctcagcgcgagtgagcaagacaatacaatcaatcaaggaaatagtcggtaatcactcggatgatgatatctacgttgccttgaaagaggccaacatggatcctaatgaaactgcccagaaattgcttcatcaagatacatttcatttagtaaggagaaagagagatcggaagaaagagagcattgggtaccaaggttccatggatccaagaaaattttctgagaatgccggtcaagtgatgaaatttcgtacatacccttgacgtggttctcgaagaggaggctattctcggaatgctct

SEQ ID NO: 12705 - DNA, 480 bp, Gossypium hirsutum
  Clone ID: LIB3189-007-P1-K1-H11
cccacgcgtccgcccacgcgttcgctcaccagtaatttgctaaatgattttttttttaacgtgtgggttcgattatcatcgaagcccgcctcaccatacggtcctttcgaaaccgttatttgcccggattttcgaatctaaatacagatatggttcgtgttgccagaaccatgggacataattcagcgcgagtgagcaagacaatacaatcaatcaaggaaatagtcggtaatcactcggatgatgatatctacgttgccttgaaagaggccaacatggatcctaatgaaactgcccataaattgcttcatcaagatacatttcatttagtaaggagaaagagagatcggaagaaagagagcattgtgtaccaaggttccatggatccaagaaaattttctgagaatgccgtcaagtgatgaaatttctacataccttgaacgtggtttttgagaggaggctattttcggaatgctctgt

SEQ ID NO: 12706 - DNA, 426 bp, Gossypium hirsutum
  unsure (1)..(426): unsure at all n locations
  Clone ID: LIB3493-033-P1-M1-G12
aaaagaatgaaccaaccctctttcgtaatctgaaatctgacaagaatgtggattatagaactgggttttatttgtttaaaaaaaatagtgtggaaagtgagagtctttttttattttctttgatcttnttttattattttggaacagagatggtaagtggtgaatgtatcctgcaggtgtatacaacacagagattgccatatagtctgctggctgagggtatgctgagctattgcttgggcagcctctgtttccttgccatagtggagtggccgggtgggtgaaattattaacgttctaagttctcctacaagagaagtaatttaaggcatgaattctaactactcagagtttagattcctccaaatttaagcttacccatggattatgttttttcataatcgtatgccttcaggtatctgtgga

SEQ ID NO: 12707 - DNA, 1756 bp, Gossypium hirsutum
  Clone ID: GOSHI-09MAY01-C13246_1
ctgttttcttttcctttttttcacaaattatgttctaatgcaaattcaaatggagaatggaataggaaaaatggacatgtataagaaatcttctataaataccaccttctccttcgtttcatttccagactttacctacacattttacaaggcacaggatttctgggatttttctgcaaattggaagaaagataaagatggcaagaacaagaattaccatcttttttatggggctcgtgctttggtgttgcttgacaaaagcggaatacatgaaatataaagatccgaaacatgcggtacatgttcgaacccgggacctgttggatcgaatgacattggaggaaaagatcggacaaatggtccagatcgaacgcagcgttgcttcggccgacgtgatgaacaagtatttcattgggagtgtattgagtggaggagggagtgccccttctccacaagcttctccagaggcttggataaacatgatcaatgactttcagaagggtagtttagcaacccgaatgcagatccccatgatttacgggattgatgctgttcatggcaacaacaatgtttacaaggcaacaatttttcctcacaacattggtctaggtgctaccagggaccctaaactggttaagaaaattggggctgcaacagcacttgaatctagagcaactggcattccatatgttttcgcaccttgtatagcggtttgccgagatccgagatggggccgatgttacgaaagttacagcgaagatccccatcttgttgacgcaatgacagagattgtaccaggattacaaggagacatacctgctaaatcttctaaaggcattccatttgttgctggaaataaaaatgttgcagcttgtgctaagcactacgtaggagatggtggaacaaccaagggcataaatgagaacaacacagtgatcaactggcatgatttgcttagcattcatatgccaggctactacacttcgattatcaaaggtgtttcaacggtcatggtttcgtattctagttggaacggcgttaaaatgcatgctaatcgtgatttagtcactggtttcctcaagaacaaacttcgattcagaggcttcgtcatctcagattgggaaggcattgaccggatcacttatccacctcatgctaactatacctactcgattcaagcagcaatcggatctggcattgacatggtcatggttccatacaactattcctcgttcatccacgggctaactttccttgtcaaaagcaatttcatccccatgagccgcattgatgatgcagtgaagagaattttgagagttaaatttgcaatgggtctatttgagaacccattagcagataacagcttagttgaccaacttggcagtcaggaacatagagagttggctagagaagcagtgagaaaatcacttgttttgctaaagaatgggcactctgccgatcagccattgcttcccttacctaagaagacatcaaaaatacttgttgctggtagtcatgcagacaatttgggttatcaatgtggtggatggactattgagtggcaagggttcagtggcaacgaccttacaaatggtacaacagtcctaaaagccatcaaaaacacagttgattcaagcacgaatgttgtgtatgaggagaatccggatcccaaattcgtcaagtccaacaacttctcctgtgccattgtggtagtaggggagcatccatatgtcgaaacaaaaagtgacagcatgaa

SEQ ID NO: 12708 - DNA, 533 bp, Gossypium hirsutum
  Clone ID: LIB3825-014-Q1-N6-A11
acaatagaatcataggtaattttgcataaatatcttcagagtaccaagaataatttgtcacaaaattataaaacatgttaaaaaaaaaaaaaacaggtagcagacaagctatttgttactttttgtctgccttcatcttggcaacagaatcatcttcatcatccatttaaaaaaaaagtttaacttgtaaaaaagagggtcaaataataacaagttgtagcaattccagccattgaaagaaatatctacttggttttgttactgttgctcctctccgggttttcagagtagttaaactggagccagcttaaaattgaggatagccacgagattgacccaaaaaatttggaaggagcaatgggtttctgccacgtcttttattaataaagacattgaagatgctagttcaccagcacaccaaaaaacttgattgcatcatttcctgtacccattaaccgaagtgcatacactcttaggaaacccatcatagccaaaaggagaaggataagcacccgcttctattatcatctcgg

SEQ ID NO: 12709 - DNA, 451 bp, Gossypium hirsutum
  Clone ID: LIB3189-007-P1-K1-E11
caaaaccaagtagatatttctttcaatggctggaattgctactacttgttattatttgaccctctcttctacaagcactaggaaaacctggttggaattaaagaccaactatggaagagccacacctatccggagaagaaacttaagcattagagctgaagtcaattttgtaaatgctgaagaagccaaaaaacttatagctgttgagggttatgccgttctcgacgtccgcgataaatctcagttcgatcgagctcatatcaaatcatgttatcatgttccccttttcattgaaaacacagacaatgatcctggcacaattgttaagaggactttgcacaataacttttcaggcttattctttgggttgccatttacaaaactcaatcctgaatttgtacagtccgtgaaaagtcagttttcgcccgaatctaaattgttacttgtatgt

SEQ ID NO: 12710 - DNA, 617 bp, Gossypium hirsutum
  Clone ID: GOSHI-09MAY01-C8925_1
cttccgagaacggtcacaaataatcattcaggcaaaagctccattccttttctccaaatggcaacgtttttttaatattaagcactagtttttaaccctttagaagaaagctttcaaatattattcaattgcttgtgcaaactaacaaaagccaaccaataacaaaaagaggaagaaaaccccagctgataaacataaaggagagctgttgtagcggacacctacttcacccagcaatagcagaagcaaggcatattttggccttttaattgattctttatcttggaacttgatgctgaagagaatttagtcaggcaagttagaggtttttgcagaaattttattttctatggattggttgtgctgctttaattcctctcagcatggaggggggcgttcatcatctacttctggcaaggggaaatgccatgagggtataatgcggtttggattcagcctagtaaaagggaaaggaagttatcctatggaggattattatgtcgcttagttcatgcagataataggtcacgagttggggctttttgctatatatgatggtcatatgtgagatagtgatcctgcctacttacaaaagcattttgtttttcaatttccta

SEQ ID NO: 12711 - DNA, 1109 bp, Gossypium hirsutum
  Clone ID: GOSHI-09MAY01-C8855_2
aacccgggcggcccccgcgtcgggttacaagaagaggttcgagaggcaaaaataaaggttttgggaagcctgaagcaggatggtgatgaagatcgctcagaatggaaaaaattagctcaatctctcaagtctgagtaccctaggtacactccattgcttgtaaagatcttggaaagtttgctttcacgaagcaatattggggacaaactcccccgtggggaaaagattataagtgcggcagatgaggtgattgatagtatcggtgcagatgaactggcaaaactcttttcacttaaagctgatcctgaggatgaggattcagaggaaaaataagaagaagatggagacaactcgtgatcgattagcagaagcactgtaccaaaaaggacttgcactggctgagattgaatctataaagggtgagaaaccttcagccttggctgcaagtgaagctgtcagctctgatctccggtcagacttatttgaggaaaactttaaagaactgacaaaatgggtagatgtgaagtcctctaaatatggcaccctctatgtactgcgggagaggcgatttgggaggcttggaactgcactgaaggtactaaatgacatgattcaggatgatggagagccaccaaagaagaaattctacgaaatgaagctgtcattgctggatgagattggatggaatcatttatcaacgtatgaaagacaatggatgcatgtgcggttcccaccaagcttgcccctgttctaaggttggtaaattttatgagacccaatttcaatctgatgaaaaacattgaacattttaaggaattgatgatagcttgtcataataataaaccagggagatgattgtactgtcacccttatctgtcgtactagaaaaacaccatgacgtgtttttcattactagagtgggggatttgtttgaggtcagtgttggtcgcgccactatggatgaacgttatcactgcttaattttatcttagtatgctttgtattagaataagctaaaattaaaaaaaaatcaatgtcatgattttcagtgcataacataatggagagctaactgaatagttgtacatggagcaaccccctggctttga

SEQ ID NO: 12712 - DNA, 1128 bp, Gossypium hirsutum
  Clone ID: GOSHI-09MAY01-C8855_1
aatggaattagcaatagctcagttttggtcaagtggcatgggaagtcacgagacgacaattgtagattttgagatcgtctttcatggaattggagtcaacagatctgctgccgcccgtccgggaagggaacccccctgcgggggggaggctgaagcactattggcctctgaaagacttgcccctactgctactttaaacaagataagagttccatatcgacctactgaggcaaaactttgtactcttccaactaatcgtgacaaattaccatcaggggaaacagatactggcattgacactaacttaccactttaaattggaagatggagcagaagtgaaaccgcatattccattgctcaataatcgtatatatgacacaaaatttgagtcccaattttacatgatttctgacacaaacaagcgtgtatatgcaatgggtgattgttatccagcctcttcacaacttccaaagggtgaatactcactgcgactgtacttaaggcatgacaatgtccagtacttagaaaaaatgaagcaattagttctgtttctggaaaggaatttggaggaaaaggacattattccattgaactttttctctgaaccagatggccccgtgatggggaatggtacctttaaatattctattttggttccagggataaaggaatcattttatttaagtccaccaaacaaagataagcttccaaagtgttcctcacaaggatctgtattgctgggagcaatatcacatgggaagctatcatatgctggagaggggaaaaatccacagaagaatcctgtatcatatcagatatcttatgtggtgccacccagcaagattgatgaagacaaaggcaaaggttcttcttcagctagcactaaacctatggccgaacgtttacaagaagaggttcgagaggcaaaaataaaggtttttggaagcctggagcaagatagtgatgaagatcgctcagaatggaaaaaattagctcaatctctcaagtctgagtaccctaggtacactcatgcttgaaaacttgaaagttgttcacgagcatattgggcaaatcactatatgaagattagtgcgcatagtgtgtggttcatccatgactggaactctt

SEQ ID NO: 12713 - DNA, 410 bp, Gossypium hirsutum
  Clone ID: GOSHI-09MAY01-C8825_1
cctccttctaaaacccattaatggcggcctccaacaaaacccacaattctcacctcatcacatccgtcttcttcttcttcatcttgttaactaattcatcactttcttcggctaggcttctttcagctgcacaacccaccttgaaccttgctcttccttccgacaaaccccatcaggctctgccatgtgaccatatggttccattcaagaacttccatgtcggggttatgaggaggtctccatctcaaaaagctgccggcatgtatggaccctcgttcctctccatgcttcccaagggcggacatgtaccgtcgtctggacctagcagaggaagcaacgacatcaagacctagtttaaccatggcagatcgattcaaaatcaaagcttcggtgtcccacatgctctctct

SEQ ID NO: 12714 - DNA, 682 bp, Gossypium hirsutum
  Clone ID: GOSHI-09MAY01-C8555_1
gcatcctaaagatgactcaccttctttacctgatgagcggaaaccaaggaagaggggaaggaagccagccaatgggagagaagaaccattgaatcatgttgaagcagagcgacagaggcgggaaaaatttaaccagcgattctatgcattaagggctgttgtccctaatatctctaagatggacaaggcttctctgcttggtgatgccattacctatatcaccgacctccagatgaagattagggtcttagaaactgagaaggagatggtaaacaatgggcaaaagcagttgtcaatgcctgacatagatttccagcaaaggcacgaagatgcagttgtgaccatgcgttaccctttggatgctcacccagtctctcaagtcttaaaagctttgaaggaaaatcaaattacagcacgtgaatctgacgtatcaacaacagataatgacaagattgtccacaccttcaccattggagccccaggtggtgctgccgaacaattgaaggaaaaactgttggatgctttatctaagtgaccaattgtaacagttgtgttgataatgtacatctaagcgaatgctgtgcatcaacttgtagaaaaatgggattctgcagcgactaacagattagtggctagtgccctttgtttcaatgaatcatatgtaccttaattctttttaaaa

SEQ ID NO: 12715 - DNA, 614 bp, Gossypium hirsutum
  Clone ID: GOSHI-09MAY01-C8545_1
ggaaacccgggtgcgacgccacagccgtcccgtctctcttctctctttttctcattcagtaaatatgtcaagccacaataatttccccttttcctgttacgatgttgcgattttcgactttttcatattactttttcttcttaattacaattatcacttcctcgccgcttatttaaattccgccttttgtttaccctcttaatttaattcaaacgaacaacgtcccttttctttctaaccgcccttggctcccgttttatcttctctctggggtttttcgtttttcctagttctgctctgctctcttgttcctttttttccctctctttttggtattttggtttgattgaatcgattatgtcgaagaacattctggtgaccggaggagccggttatatagggagccacacagtgttgcagttgcttttaggcggatacaaagtggtcgtcgctgataatctggataattcctccgcggttgctatcaaaagagttgaagaactcgccggtcaattcggcagaaacctttcttttcgccaggtggaccttagggatagatcagtaatccaaaaactctttgctgagacaaagtttgatgctgtgattcactttgc

SEQ ID NO: 12716 - DNA, 649 bp, Gossypium hirsutum
  Clone ID: GOSHI-09MAY01-C8575_1
cccacgcgtccgcccacgcgtccgaaagaagccaccttgtggaaacagcagctgtcgattgagggttttctttggtggaaaaagcaaagccatggcgatgaacggtggtcttagatcggcttcgaagtttctgacttcgtcctctcaatcacttctccacaagtctggcaatagagggtttcattcaactggagtgaagagaatggggggagggcatgggcatgatgaaccgtattacctccatgctaaacatatgtacaacttggataggatgaaaaatcagaagctgacaatgtctcttggagttttgacagccttcagcattggtgtgtttgttcctatctatgctgtcattttccagcagaaaaagactgcatctggttgatttttattttttatgcttgccttcatggcatggtttggctgcctgcaataatggaagcaactgcctttgtgaattgttatcttcggctttttgaactgatgcagtttgatgattatgatgatacttgcaggattttagtatttctgttggcaatcacctgttggtaattatgggaattgattatttgataataataataataaacaatatatttgattttgcatgggaagggaaggtaagggaattgcttttaggcttaatggt

SEQ ID NO: 12717 - DNA, 515 bp, Gossypium hirsutum
  Clone ID: uC-gsflnu33B099a09b1
ttcttcacgcgtccgctcttatccacaagtcaggcaatagagggtttcattcaactggagtgaagaggatgggaggagggcatgggcatgatgaaccatattacctccatgctaagcatatgtacaacttggataggatgaaaaatcagaagctgacaatgtcgcttggagttttgacagccttcagcattggcgtgtttgttcccatctatgctggcattttccagcagaaaaagactgcatctggttgattttttatgcttgcctccatggcggtatggctgcctgcaataacggaagcaactgcctctgggatcttcagcttttgagccgatgtaggttgatgagtatgacgatacttgcaggattttagtatttctgatggcgcttacctgttgattattatgggaatctgttaattggtcatgaatttatcaacaaggcttctgattttgcaaaaaaaaaaaaatgggtgtctcgtcataagatccagcttacgttccctcttttgctac

SEQ ID NO: 12718 - DNA, 148 bp, Gossypium hirsutum
  Clone ID: uC-gsronu33B048d10b1
tcgggatgagggcatgggcatgatgaaccatattacctccatgctaagcatatgtacaacttggataggatgaaaaatcataagctgacatcgattcttcggttgtaaacccatattttatctggtcatccatttttattgcaagatg

SEQ ID NO: 12719 - DNA, 411 bp, Gossypium hirsutum
  Clone ID: LIB3166-002-Q1-K1-E4
cccacgcgtccggttttggttgggttgattatttcctcacttcccttcttttttgtttcatcgtgatcttttcatcaaccccttttgtttgtcatatagattgttgctattcttttaatcttttaaatattttttttccatgaggagagggagaggtgccgcagcggcggctcctgccgccgcggcaaacgccgtagctaggagaccggcactgcaacccggcggatctattaaagagccgagatacagaggtgttagaaaaaggccatggggcagattcgcggccgagattcgagacccctggaagaagaccagggtctggttagggacgttcgactcagccgaagaagccgctcgagcctacgatacggcggcgaggacactccgtggacccaaagctaaaacaaattt

SEQ ID NO: 12720 - DNA, 352 bp, Gossypium hirsutum
  unsure (1)..(352): unsure at all n locations
  Clone ID: LIB3166-058-P1-K1-C1
gccacgcgtccgtgattatttcctttctttccttcttttttggttcatcgtgagcttgtcatcaaccccttttgattgttatatanattgttactattcttttaatcttttaaatattttttttccatgaggagagggagaggtgccgcagctgcaaacgccgtagctaggagaccggcactgcaacccagcggatctattaaagagccgagatacagaggtgttagaaaaaggccatggggcagattcgcggccgagattcgagacccttggaagaagaccagggtctggttagggacgttcgactcggccgaagaagccgctcgagcctacgatacggcggcgaggacgc

SEQ ID NO: 12721 - DNA, 515 bp, Gossypium hirsutum
  Clone ID: GOSHI-09MAY01-C8535_1
gagtggtcgatcagaaagggattttcacagatgtttgtattggatggcctggttcaatgcctgatgatcaagtgtttgagaagtctgctttgttccaaaggggtttgaaggatgtttggattgttgggaattctgggtatcctttaatgggttgggttttggtcccttatacacatcaaaatttgacttgggctcaacatggtttcaatgaaaaaatgggtgcggttcaaaatgttgctaaagaagcatttgctagattaaaagggaggtggtcttgcttacaaaggagaactgaggtgaagcttcaagagttgccaatggtgcttggagcttgctgtgttctgcataatatttgtgagacgaacaatgaagatatggaccccgaattacagtttgagctatttgatgatgagacgatagctgaaaataacttgaggtcttctaatgctgtgcttgctagggataatattgcccataatctgttacaccggtcttggtggaactagtcttctgta

SEQ ID NO: 12722 - DNA, 386 bp, Gossypium hirsutum
  Clone ID: GOSHI-09MAY01-C8715_1
cccacgcgtccggaaggaatctttgctatatctttgtccagttttactgtgcctcgccgaagaaaaagtcaattgaatcctcttactttactcttatgaagagttgagtaaaatttagattattttaccaaacccccaacttccacaacagttttcttcaatcacatctaaatctttttctctttggtgatctaatctttggctgaaaattttgtgaagatgagtgaggttttcgaaggttatgaacgacagtactgcgaacttctctgccaatctttcccgaaaatgcaattctgcttctgctattacagattcagaacagaagatacagatgttttcggagatcaattctgggatcgatgaggctgatgtcctgattcggaaaa

SEQ ID NO: 12723 - DNA, 1174 bp, Gossypium hirsutum
  Clone ID: GOSHI-09MAY01-C8725_1
gtagaatagatacccaaaaatcccctcgcctccccccacgcctccgcccaacacttcaaaccctccacgtttgatccaagcataatattttttatttccattgctttgatttgattcgcgattatgggaatcgaaataagcggcggcacgatcattccaggaggttggggggccgccgccatggctgtcgcggctaagacatgcgacgcatgtaaatcatcggcggcagctatcttttgtcgtactgattgggtctttttatgcttgaattgtgattccaatttccattccggtcacgaaagggtgtctatgtgtgaagtttgcgaacaagctccggcggctgtcacttgtaaagccgacgcggcggctctttgtgtcacttgcgacgccgatatccattcagcgaacccactggctcgccgtcacgaacgtgtacccatcgaacctttctacgactccgctgattccatcgtcaaatcttccccttttagcttccttgtgccgacgacggatcataatggtactaattgtaaacaagaaattgaatctaacaaaggggatttttttttcacagaaatggatcggtttatcgatttcgggtacccgaattcatctcaacatcttcatgatgccgccatggatagcgttgttccagttcaaactccaaaaccagtcattccactgatcaacgatggaagctgtttcgatactttcagctatcaaactcaatcatctcgcacgcgtcccgtttcatcatcgtcgcttgaagtaggaacagttccagatgggaattaccacgcaacacaagtgggtggttcaatcgatcgagaagctagggtttttagggtcatagagaagagaaagaacaggaattccgagaagacaatacgatacgcttcaagaaaggcttacgctgaatcaagaccaagaatcaaaggtcgattcgctaaaagaacagaaacccacaacgatgatgtcgatcacatgttcaataactcgtcttcttttgctgttggtcctgctggtttcatggcggaaacagactatggtgtcgttccatcgttttgaatgttgatgttttatgtttggtttaattctgtaatgtattaaattatttaatccaatttccagcaaagtagaaataaccttatggccattgaaaatcaaggaagat

SEQ ID NO: 12724 - DNA, 492 bp, Gossypium hirsutum
  Clone ID: GOSHI-09MAY01-C8645_3
atgacgtaaaaaacaagaatgaacttcttgtcttgattcggaaatatattgaaggcattgctgttattgatctcaaggatgcatacccgaatgtgatggaggacttgcagggtctgaaagctgcagggcgggggtggctgctatcaaattttgattctcaggaggacattgccttcccaaatgatcccagggtgcctattaaggttgatgatgaccttaaagagctatttcggtctattgaattgccacgagacatgctcgacatcgaaaaagatctccaaaagaacggcatgaaacctgcgtactaccacagcaaaaaggaggcctgctgcacaaagtccaaggcattacctccaaacccaaacccagacagaaaaacaaagagttctccaagaaggccaagcttaccaatgcacatcttccagaacttttccagagtcttaaaaattcttgaagtcagttgcagatcttataagacctcgatgggctgct

SEQ ID NO: 12725 - DNA, 502 bp, Gossypium hirsutum
  unsure (1)..(502): unsure at all n locations
  Clone ID: LIB3543-051-Q6-K6-C4
cggccgcgtgggcggccgcgtgggcgagaggcttcagcacattaacagcattcgaaaagctcctgttggagctcaaatgaagcgtgttattgacattctgtttcagacaaggcaagctttcacaccagagcagatcaatgaagcatgttatgttgatgtgaatgggaacaaagatgtctttgagggcttgaggaaaaacccaaaagtgaactatgatggaaagcgcttctcttacaaggctaagcatgacgttaaaaacaagaatgaacttcttgtcttgattcggaaatatattgaaggcattgctgttattgatctcagggatgcatacccgaatgtgatggaggacttgcagggtctgaaagctgcaggtcagatttggctgctatcaaccttaataggcaccctgggatcattcgggnagggcagctcccacgtgggctcgtctttcggtggggggcgttttgttgttgcgttccctggtccctggtttgtgctcttg

SEQ ID NO: 12726 - DNA, 552 bp, Gossypium hirsutum
  Clone ID: LIB3829-014-Q6-N6-D10
gatcaaaatgaaccaatcggtaagaaaatgaaattactgttattattacaaggagaagtaatcattggatcaaattatgttgctacataccaaaaaaacaagaagaatagctagtttcgtctatgtgtgagaccccgttttccgggttcaagaattcttgagattctggaaaagttcaggaagatgtgcatttgttagcttagccttcttggagaactccttgtttttctgtttaggctttggcttggcggaaattccctgcacttgcgcagcagctcttctttttgccgtgttcgtggcgggtttcattccattcttctgcagatctttctcaatgtcgagcatgtctcgtggcaattcaattgaacgaaataactctttaaggtcatcatctaccttaataggtaccctgggatcattcgggaaggctatgtcttcctgagaatcaaaattcgatagcagccaaatctgacctgcagctttcagagcctgcaagtcttccatcacattcgggtatgcatctttgagatcgataacagcaatgccttctat

SEQ ID NO: 12727 - DNA, 547 bp, Gossypium hirsutum
  Clone ID: GOSHI-09MAY01-C8155_1
cccacgcgtcgggacgcgtgggttgaattctttatttcacacaccaactcaacaatcaacctagtgaatacccataccatcccatagtaagaggatctgattgtctcccctctcatttaccgccatcaatggctaactctctgctctcttctaacttctttggtactcaactggggctgtctcctccaacaccagaagactacaagaaagttgcaggttactcaatccatcctcaacaagaaacccaactctagccacactgttaaaaccctccaatctcatgccactcttgctgccttactcttctctgccgtagccccacaagcactcgccgttgacaacgccccacccactcccccacctgtaattgaagcccagcctacgaagccaagcccatcgaaccagtcgcccttctcccaaaacctgctcttaactgctcccaagcctcaatctcaatcctccgatcttccggagggcagccaatggaagttcagcgaattcttgaacgcattcaagaaggggaaagtggagagagtcaagttcaaca

SEQ ID NO: 12728 - DNA, 765 bp, Gossypium hirsutum
  Clone ID: GOSHI-09MAY01-C8115_1
gcattattcattgctactttcgcttcattaagcctttactttagattttgaaaaacaaaataatctctagggttcttccttagtttccacttccacatatctatccttaaattgaagaaaatggccgcatcatcacctgccatgcaaatgcaatccctccttttagcaagtcccatgactggccttgctagtaagagacaaatggttcagttttatatcgtgaaacccatgcctcgttttcaaaggaaactcaatcttcaagttcgctgtttggcagaggacggtgatcaaaaggagccaatgccagcagcaagaacgccggaacctaagcagagccctccacggatatcacccaaagtgagcacgaaattctccgatgtgtttgcctttagtgggcctgcaccggagaggatcaacggcaggttggcgatggttgggtttgtggcagcgctggcaatggagttatccaaatggcaagatgtgttgacccaaatatccaacggtgggatcccgttgttcgttgggactagtattgggttatcgcttgcatctttgataccgttgttttgaggtgagacggtggaatcaaggtccggtcagttcatgagctcggatgctgagctgtggaatgggaggttcgccatgttgggacttgttgccttggctttcaccgaatatgtaaagggcggaaccctagtgtaggttctggttggtttcgctttttgtacgttgttgaatatgtgaacgaatttatcaagcttaagt

SEQ ID NO: 12729 - DNA, 600 bp, Gossypium hirsutum
  Clone ID: GOSHI-09MAY01-C8085_5
tagctttttaggctgccaagtcccaattctcatgttggattcttttaatttgaaaatcacatactatgatttgatcttttcaatttctttgatattttaatattcatggcaatatggttggaatcaaactctttatttaaacctttgatcatcaatttgtttatctttgaggttgtattcatgtgagttttgtgaattaaaagcttgattaccttcttttgttttttgtgcattgaatttatattcaatgaatgctattctaatggaggttttatgtttccaggtcatatatatctgcaagagagtgacatcatgtccctcccgtccgtgttcatacaatcatttgttcgaatacacatagcttaatcttgatgcaaaagaatgggtctctcaagtctcccagccccatcagaaggagtgctatgtgtactcttggtaaacacagctttatccatatctatggttaaaggcataattcgatcaatccttcacgttgtcggtatccatctctcctacttcttggcctgctactacttgtcatcatcatcatcaccgccatcctcggatcttattgaaatccctgcggtatcattcgacatc

SEQ ID NO: 12730 - DNA, 855 bp, Gossypium hirsutum
  Clone ID: GOSHI-09MAY01-C8085_3
cccacgcgtccggaaaagcttacatgtttactttctgttaaaacccagttttcttttccttatgcttcactgatcccatgaaaatttgtcctctttttgtgtcatatatatctgcaagagagtgacatcatttatatccttaacttgttcatacaatcatttgttcgaatacacatagcttaatcttgatacaaaagaatgggtctctcaagtctcccagccccatcagaaggagtgctatgtgtactcttggtaaacacagctttatccatatctatggttaaaggcataattcgatcaatccttcacgttgtcggtatccatctctcctcctcctcgtcctcctcctcctcctcgtcatcatcatcatcatcatcatcatcgccatcctcggatcttattgaaatccctgcggtatcattcgacatcagcatcggtaatgctgatagttacattaaagagttccggagcaggatgccatcgacccggtacgatgcggtatgtagcggcagtcaaccggagcatgactgttcagtttgcctgactaggttcgagccagaatcagagattaaccgcttgtcctgcggtcatctgtttcacaaggtatgcttggaaaagtggttgaactattggaatgtcacatgccctctttgcaggaacgctctgctgcccgaagacgatccggcctacttttggtgagcgtgcggagattttcgaattttccatgtacagcgcgtttattgtacaggtattttaaatgaaacgatgccgccctcggattagcgttaagcggagtggggttattacccgcgagatgtggtgatgtttttgttactgaatgtacatatacttttt

SEQ ID NO: 12731 - DNA, 678 bp, Gossypium hirsutum
  Clone ID: GOSHI-09MAY01-C8085_2
cttaaccacagtttgatttttagagttagggttgctatataaatagcgaaaggatcttgtggcaaccattgccagaccttgaaaaagcttacaattttttttatataatttctgttagaaaaaaacccagttcacttttcagttcttggtaccttggctgaccatttttgtttgaattgcaggttaccagggtttagccattgcttttcatttgaagctctcctccccattgtttttaaggtcatatatttattatatattatcagcacaaaaagaaaaaaatgggtctctcaagtcttccagctccatcagaaggagtgttatgtatactcttggtaaacacagctttatctatatctatagttaaaggcataatccgatcgatccttcacgttgtcggtatccatctcccaccaccaccatcggattacactgaaaatccctcggaagcattcgatttccaccttaatactcctgaaagttacatcgaggaattccggagtaggaccccaacaattcatttcggtgctgttttatgtagctgcaaacggcctcagcacgactgtcgggtttgtctgactcagtttgagccaaaatccgagattaaccacttgtcgtgtggccatctctttcacaaggtgtgtttggaaaaatggttggattaattggaatatcact

SEQ ID NO: 12732 - DNA, 906 bp, Gossypium hirsutum
  Clone ID: GOSHI-09MAY01-C8085_1
gaaaagcttacatgtttactttctgttaaaacccagttttcttttccttatgcgtcactgatcccatgaaaatttgtcctctttttgtgtcatatatatctgcaagagagtgacatcatttatatccttaactagttcatataatcatttgttcgaataaacttagcttaatcttgatataaaagaatgggtctctcaagtctcccagccccatcagaaggagtgctatgtgtactcttggtaaacacagctttatccatatctatggttaaaggcataattcgatcaatccttcacattatcggtatccatctctcctcgtcctcgtcctcctcctcctcctcgtcatcatcatcatcatcatcatcatcgccatcctcggatcttattgaaatccctgcggtatcattcgacatcagcatcggtaatgctgatagttacattaaagagttccggagcaggatgccatcgacccggtacgatgcggtatgtagcggcagtcaaccggagcatgactgttcagtttgcctgactaggggaatgtcacatgccctctttgcaggaacgctctgctgcccgaacctgatccggcctacttttggtgagcgtgcggagattttcgaattttccatgtacagcgcgtttattgtacagggtttctgaacttgtatgctcatctcacttatgttcggttcatccccagattttgttatgtctcctgttttcgattagtggaatcaaaatctgctgacagacaggattactgccttgtaatggctgtagctgttgttgtgtaatatgataatgtcaggtttctgatgttattttaaaacaacaaaatgagatagtacctgctactttgaagaagcaaactctgcccgggggtgggcgtcccatgtgtccttc

SEQ ID NO: 12733 - DNA, 506 bp, Gossypium hirsutum
  Clone ID: LIB3826-002-Q1-N6-F10
aaaaaataacatcagaaacctggcattttcattttacacaacaacagctacagccattacaggggagtaatcctgtctgtcaccagattttgattccactaatcgaaaacaggggacataacaaaatctgggtgaaccgaacataagggggatgggcatacaagttcagaaaccctgtacaataaacgcgctgtacatggaaaattcgaaaatctccgcatgctcaccaaaagtgggccggatcattttcgggcagcagagcgttcctgcaaagagggcatgtgacattccaatagttcaaccacttttccaagcataccttgggaaacagatgaccgcaggacaagcggttaatctctgattctggttcgaacctagtcaggcaaactgaacagtcatgctccgggtgactggcgctacataccgcatcgtaccgggtcgatggcatcctgctccggaactctttaatggaactatcagcattaccgatgctgatgtcgaatgat

SEQ ID NO: 12734 - DNA, 546 bp, Gossypium hirsutum
  Clone ID: GOSHI-09MAY01-C8075_1
cccacgcgtccgctctctctctctttctctctttgtctccgcccttttctcatggatccttttggtctcttctgtactggggctcttcttgcctgcggtctttactggttcgtctgccttttagggccggccgagcaaaagggcaagcgagccgtcgatctctccggcggctccatctctgccgagaaagttcaggacaactacaaacagtattggtctttcttccgccaaccaaaggagatcgaaaccgccgaaaaggttccagatttcgtcgatactttttacaacttagtcaccgatatttacgaatggggttggggtcagtccttccacttttctccttccattcgagggaaatctcaccgggacgctacgcgcctccacgaagagatggccgtcgatatgatcgaagtcaagcccggagatcgagtcctggacgtcgggtgcggagtcggcgggcccatgcgtgctatcgcgactcattcgcgagccaatgtcgtgggcatcaccatcaacgagtaccaagtgaaccgagccaggcttcac

SEQ ID NO: 12735 - DNA, 423 bp, Gossypium hirsutum
  Clone ID: GOSHI-09MAY01-C8015_1
cccacgcgtccggtttttcaaaaatatatgcaattttttttaaaacacacacactcatgaacaattttattcgtggcggttgggaaaatgttatatgaaaactctctggtgtccgacttgttcgccgccgtggtttgctgcggcgttatattcgcgtttctcttactctggcaagtaaccgccaaatgcggcgtagatcagaaactgaataggaagcttgtgcatataagtattgggctagttttcatgctttgctggccattattcagtgcagggtatcgcggagcaattttagcagctatcactcctggtgtcaatattatacgaatgcttcttatcggttctggaatttggaaagatgaagccactgtgaagtcaatgagcagatacggaaactacagggaacttctcaaaggaccactc

SEQ ID NO: 12736 - DNA, 770 bp, Gossypium hirsutum
  Clone ID: GOSHI-09MAY01-C8375_1
agccgggaattcttttcgttattaacatcactaatacattttctatcatacgactaaactgctgtacttatttgttttttactcatcgaattcaggatgcgggcatgagttatgcgtaaggtgtgcactctatctatgctcaacaagccacattccgtccaacatggttgccccaacaggttctattccatgccctctctgtagacacggcatccgctcctttgtcaagttgccgagttcgccaataaaagaaatcaagctacagctttcctttggcctatgtacaccatgcatgcttcatccccgtgatgcagattgcccatcaccaacttcagagatcagaaagaatcgtatttcatcggtctcttcagacattttctgtccagttacctgtagcccatttccttctgtcgccatccctttatgcacctgcaacgacagtccttgcccctctttcgaacatcgagagacaacagcagaaacacaagaagaatcccccggacgttcacaagcaacatctatagaacaggataaacttgaaggaccgagactagagagatcttcctgttcaagcatgttttggggcagaaggagctgtagtagagagcatcaatgctattcagaaataaatgcttgatttggtttttcttccattgtttgatctttatggtctacaaaaaaaaaaaaaggtattgtgttccatttatatcacaatgggggtttttgggttgttttatgtaattattacaagttgaaatttatttactgct

SEQ ID NO: 12737 - DNA, 422 bp, Gossypium hirsutum
  Clone ID: LIB3166-001-Q1-K1-G11
cccacgcgtccgatccgaaagaatcgtgttgcatcagtttcttcggatattttctgtccagttacctgtagtccatttccttctgttgccatccctttgtgcacctgcaacgatggtccttgcccctcgtttgaaagtggagagacagaaatgcaagatggatctccaagacgttcacaatctacatcgatcgagcaggataaaattgaaggaccgagactggagagaacaacctgttcaaacatgttctggggcaggaggagctgcagtagagagcatcaatgcaattcagaaataaatgcttgattaatttcatccgtggttgatcgatctattctacagagaagcttcattcttaggttccattctgagatgaacaattcccagtctgcgaacagagctggatttacgacagggacaat

SEQ ID NO: 12738 - DNA, 417 bp, Gossypium hirsutum
  Clone ID: GOSHI-09MAY01-C8365_1
cccacgcgtccgacaaaacccaaattcgaacgttgtaaaagaaacaaaggagaagccaaaaaaaaggagaaaaaaaatgtcgtgttccgttgccgtatctaactctccggcgttttctccgtcatcgtcccttttccttaacaaaacgccgatcatctctccttcgacggaagctctgaatttaacgttaacccacctcaagacttcttcttctccagcttctccgtctccttctccttcttcgcctttcaggctccggcttccaaagccgccgcctgtgtctttgctctcgtcttcttctgtttctaattcatcgccttcctccggttcgggttcggctccaggacttggatcgggaccggtatcaacagttttaaagaggaagagaccggcgaggctggaaataccggttgtgac

SEQ ID NO: 12739 - DNA, 896 bp, Gossypium hirsutum
  Clone ID: GOSHI-09MAY01-C8315_1
cccacgcgtccgcccacgcgtccgcccacgcgtccgcccacgccctcaacccaaaaactggtaacaatggccatatccgtccctattttagccatcatctttgctctccatctcatcgccttcgtcttcgccgtcggcgccgaacgacgccgtagcttcgctgaggtggtgcctgatcagtacgacgagaggacctactgcctctacagtacggatgcgtcgacggtgtacggactatctgcttttggtctgctccttcttagccaggttgttgttaacggcgttactagatgtctctgctttggcaaaggccttgtctccgccacttcatccaccacttgcgccatctttttcttcgttttctcctggttaagctttttgggagctgaggcatgtttactggcgggatcagcaaaaaacgcataccacaccaagtacagaggaatctttggcggagaggacatttcatgtgctacactgaggaaaggcgtatttgctgctggagctgctctaactttgttgtcattggtgggatcagtcttctattactgggctcactctagagctgatactggtggatggcagaaacatcggaatgaaggcgttggaatgacagagcagcctcccgaatttggtaaggtctgactctattgtgcctcacggcgttttaattccctaaaattttggtggtacctgtcaagagaggtattgatagatccaagaatgaatagactgaatgagctatggatgaatataagttgtgtagcttcaaagataaattatagatataggatgctatcgttgttaatattttacctacttacttggccacgttttcaatgatgatatggtgcatttctcaaaaaaaaagaaaaaaatcaaaaaaataccatcat

SEQ ID NO: 12740 - DNA, 400 bp, Gossypium hirsutum
  Clone ID: LIB3146-028-Q1-K1-F2
ctagatcgcgagcggccgctcgcgatctagaatatcataagacattatagaggatgtgcatctgatcgactacgaataatgcgtcagagctcaacgacgacctataatcactaatgtagtgcgtgatcagtacgactagaggacctactgactctacagtactgatgcgtgcaccgtgtacggactatctgattggggtctgctacttcttaaccaggttgctgagaacagcattactagatgtctctgatttagcaaaagccttgtctacagcacttgatgcaccacttgcgccatctttttcttcgttgtctcctgcttaagctttatgggagctgaggcatgtttactggcgggatcagcaaaaaatgcataccacaccaagtacagaggaatcttt

SEQ ID NO: 12741 - DNA, 763 bp, Gossypium hirsutum
  Clone ID: GOSHI-09MAY01-C8305_1
ccccgcgtccgattctctattcttacgctgtgtgatctgattttctttcctcttagataaactgagataagcaaaattctattcaaagatgttgtgggttgataaatatcgacccaaagccctagctcaagtcgttgttcatgaagaaattgcccaaaatctaacaaaactggttacagagcaagattgcccgcatttactcttctatggaccatctgggtctggcaagaaaaccctaatcatggcccttcttagacaaatatttggtcccagtgctgaaaaggtgaaagtggagaataggaattggaaaattgatgctggaagtagaaccattgatcttgagttgaccacattagcaagcacgaaccatgtggagttgagtccaagtgatgtaggctttcaggacagatacatagttcaagagattattaaagaaatggctaaaaatagacccattgacacaaaagggaaaaagggatttaaagtgctagtactcaatgaagttgacaagctttctagagaagctcagcattctctccgtagaacaatggagaagtacagtgcttcttgccggctaattttgtgctgtaatagttcttcaaaagtcactgaggcgattcgatctcgctgtctgaatatccgaataaatgcaccttcagcagaacagattgttaaggtgttggagttcattggaaaggaagaagggctgcaacttccatctggctttgcggcccccattgctggaaagtcaaaccggaattta

SEQ ID NO: 12742 - DNA, 415 bp, Gossypium hirsutum
  Clone ID: GOSHI-09MAY01-C8335_2
aattcatcgtctgtgcctgctcgatattggtcctttgttgacagatccgagactacatccatgttatggacttagctgatggccatactgctgcacttaggaaactttttaccacagagagtataggttgtgttgcctacaacttgggaactggatgtggtacatctgtgctcgaaatggttgcagctttcgaaaaagcttccagaaagaaaatccccattaaactatgcccaagaagacctggagatgctactgccgtttatgcttctaccgagaaagctcaaagggaacttggttggaagtatgcctatgattcgcatctctttcctagtgcattgttttattggaattacatggatcctctgttacatattcctattatatatccttacctatgatagtcgattgatatctg

SEQ ID NO: 12743 - DNA, 449 bp, Gossypium hirsutum
  Clone ID: GOSHI-09MAY01-C8335_1
cccacgcgtccgtcatgattatccaaccaaggatggcagcgccatcccagactacatccatgttatggacttagctgatggccatactgcggcacttaggaaactttgtaccacagagagtataggttgtgttgcctacaacttgggaactggatgtggtacatctgtcctcgaaatggttgcagctttcgaaaaagcttccggaaagaaaatccccattaaactatgcccaagaagacctggagatgctactgccgtttatgcttctaccgagaaagctcaaagcgaacttggttggaaggcaaaatatggtgtagctgagatgtgtagggatcaatggaagtgggcgagcagcaatccatggggataccagtcaaaaaagccttaaaagctttgcttaagattttctcatgttacaccaacatcaacagcatgtttaaagcaaaagt

SEQ ID NO: 12744 - DNA, 930 bp, Gossypium hirsutum
  Clone ID: GOSHI-09MAY01-C8295_1
acgcgtccggctagtcgtaaaacagacacgaaagagtcttcaagccgatgccttgatactcaacaccgccgaagagctcgatgggcctatactatctcaaatacgcaccaaatgccctcgtgtctatgccgttggacccttacatgctcaattaaacactagactcaatgcaaaacatggagagtcatatgatcacatctcgaatacactttgggaagtggataaaagctgcatcttttgcccccgcttccttccgaatcgatctgttatctatgtaagtttggggagcattgcgagcacgtcaagggagcaacttgtagagctttggtatggacttcttaacagtaaaacgaagttcttgcttgttgtaaggccaaattccgtgattggaaaagatggtgaaggggaggatgttgtaatggagcttatggagaagagtaaggatcgaggttacattgtaaattgggcaccacaagaggcagtcttgaaccacccggccattggcgggttctttacgcataatggatggaactcgactttagagagcgttgtcgcaggggtgcctatgatttgctggcctcagtttgctgaccaacacgtcaatagtagggttgtgagtgtggtgtggaaaatagggttggatatgaaggatgtatgtgatagcaagatagtggagaaaatggtaaatgatgtgatggtggatcgaaaggaggagtttgcaaaatccgcatctgaaatggctaaggaagataagaaggagatcaagatgctataatggaggtcaattcatctaaagatttcaagagccgaaacaagaacaagaagataggctgaccaagaagacaattgctcagagtaactctagggtgctaaaagaatgatctttttacatcattccttggaatatttcctcttgttcactggtatgac

SEQ ID NO: 12745 - DNA, 1163 bp, Gossypium hirsutum
  Clone ID: GOSHI-09MAY01-C8285_2
ccacgccgtccgcccacgccgtccgtgctgatggagctgaaaccttcacttctcatttccgaggtgtaaccccccaaaaagtatttggttttttggggtcaggtttacatttgggaaacatgttttccagtgcgggattaaaatctacagtccgaggattgtccatgtcttaggaaccgacgatagccccgaggtgcagctttattcagcgtgcaagggccatgctttcacaaccaagattcattacaacacaaaaagggaggccttttggttcttacaggttcctctcaattgtctatttgaccatgtcattaaacccaggtcacttggacttgaagacatgagggatgatgcacttgagccagctgatctcaatgacagggacatggtagttgtagatgttggtggtggaactggtttcactactttgggtattgttcagcatgtggatgctaagaatgttacaatccttgaccaatctcctcaccagcgcgccctcgcgtcccagtaggagcctctctaggaatgcgtcattattgtaggtgatgctgtggatcttccttttcctactgattttgccgatagatatgtgtctgctggaagcattgagttctggcctgaccctcttcggggggatcttgggttgctttctgggtgttgtttctaggtggtttagcttgcttaattggtcctgagtaccctacattttggttgtctcgtttctttgctgacgtttggaagcttttccctaagagaggacccacgcgtccggtggtttgaataggctggatttaaggatgtccaactcataagagattggccgctaaataggtatcgtggagttcgccgtcatggtttgatcatggggtgctctgtaaccggtgttaaacccgcatctggggactctcctttgcagcttggacctaaggctgaggatgtatcttagccggtttatccgtttgtatttctcttacgcttcatgttgggtgccactgcagcagcatattatgtactggttcctatctacatgtggctcaaagatcaaattgtaccagaaggtggaccaatctaaagaaagaaatgaacttctgctgttctgccctttcaagttgcatacatctctttagtatatatatagatatctctatgctagaccatgaagg

SEQ ID NO: 12746 - DNA, 1672 bp, Gossypium hirsutum
  Clone ID: GOSHI-09MAY01-C8285_1
agagagcagagtccagtccaaaagctgtggtgtccgtttcctttaagtctcaaccaaagttgcagaaagccagacgctaaaatactaaaactagctagcccaaaacggtaccctttttttgctccaatctcgtttacccttaaggtgtttatcttggtaattgatattttgctcaaatctttcagcaagtaaagattgcagcttttcaaatcgtgggttttttttttttttgcttgcttaatccatggcttcttccatgcttaatggagcagaaagcttcactctcattaggggggtaaccccaagaagggttgatttttttgggtcaggttttcatgggaaacacttatctaatttgggtttagcctttagtgtgaggatctccaggccaggaacaacaatggctccaaagtgcggcttatcagcatcaaggccagcttcacaaccacgattcatacaacacaaaaaagaggctttttggttctacaggttcctctcaattatatatgaccatgtgataaaccctggtcactggactgaagacatgaggaatgatgcacttgagccagccgatctcaacaacaggaacatgattgttgtagatgttggtggtggaactggtttcactactttgggtatcgttaagcatgtggatgctaagaatgttacaattctcgaccaatctccgcaccagcttgccaaggctaagcaaaaggagcctttgaaggagtgcaggataattgaaggtgatgcagaagatctccccttccgtactgattatgccgacagatatgtgtctgctggcagcatagagtactggccagacccacaacggggcatcaaggaagcatatagggtattgaaactaggaggaaaagcttgtctgattggtcctgtgtaccctacattctggttgtcacgcttctttgcggatgtttggatgcttttccctaaggaggaagagtacattgactggtttgaaaaggctggatttaaggatgtccaactcaaaaggattggccctaagtggtatcgtggagttcgcagacatggtttgatcatggggtgctctgtaactggtgtcaaacctgcatctggggactctcctttgcagcttggcccgaaggcagaggatgtatcgaaaccgataaacccattaacattcctgttgcgctttatactgggtaccatggcagctacgtattatgtattggtccctatctatatgtggttgaaggatcaaattgtgccggaaggtcaaccaatctaaacagcggccgtacctgctgctgcccttccaagttgcctatatttctctagtcatagcgtatgtaatgcaagacatcttctagctatgtgttttatcatctaatattatcctgttcgtgattcagatcttcaagcctgttttcgtgtaacatattagctttctgttttctttgttcaaagctgaattatcatagataaacaagagattagaaaataaaaaagtccagagatcagcctagggatcaattcagcagatcagcctctatgaacaagtttaccacaatagctttctgaaacatactagaggcagagggggtaattggcaaatgtttgtggtagcattttcattacccatttcgtttcttactttttaagtgaagcttgttgcccttgtttaatttgc

SEQ ID NO: 12747 - DNA, 204 bp, Gossypium hirsutum
  Clone ID: LIB3146-055-Q1-K1-A12
ggttgtaaaaccagggggaaaactttctttaattggcccgtgccccccacattgggggtgtcgtttctttgcagacgcctggatgctttttcctccggaggaagaatatatatagtggtttgaaaaggctggatttaatgatgtccaactcaaaaggattggccctccctggtatcgtggagttcgccgacctccactgatcat

SEQ ID NO: 12748 - DNA, 690 bp, Gossypium hirsutum
  Clone ID: GOSHI-09MAY01-C8245_1
tcgctctctctaaaggcccactcagcagtttaaaagagagagaaagtgtcctttctctctctagaactctaaagggtcaaagctttaaagccttcaaatatatacatataaatcgagagagagggagggaaacatttttttttaaattattttttgggagagattttgaatcatgggtggtgagaagaaattcggggttcttctatgcgcggaggactcggactacattaagaagaggtacggagggtattttggtgtgtttgtggaaatgctggcggaggaaggggagacgtgggacgttttcagggtggcgaacggcgagttccccgacgacgatgagatcgccgaattcgacggattcgttataaccggcagttgcaatgatgctcacgggaatgacgtttggatctgcaggttgatctcgcttttgaagaaattggattccttgaagacgatagttcttgggatttgctttggtcaccaaattcttagccgtgcgcttggagaaaaacagggcgagccgttcgggttgggacattggagttacaacaattcatttatcatcgtcctcatcgaagttcttttcatcacttgagatccccaccactcttctcatcatagagtgccaccgagatgatgttcgggaacttccccaaggccgaggtgttagcatggtctgagaaaacaggt

SEQ ID NO: 12749 - DNA, 405 bp, Gossypium hirsutum
  Clone ID: LIB3272-013-P1-K1-F4
gccatcgcagtccagcttgtcctttgtatctcatagatgtttatcttctggcgtcaacttcttaaatgtttatacccactgctaggtttcattacctgaaaggcggagcatagtctgggcccaagaaaaaagaattccgcctttcttctgttggccgcgccagctgattagatgttacaattatggttggactcgtccccaaaccgtattcatttgcttttgccctttctgttgtttgtttgttggaccagattcttagccgtgcgcttggaggaaaaacagggcgggccgtttcgggttgggacattggagttacgacaattcatttatcatcgtcctcatcgaagttcttttgatcacttgagatccccaccactcttcccatcatatagtgccaccgagatg

SEQ ID NO: 12750 - DNA, 384 bp, Gossypium hirsutum
  Clone ID: LIB3583-007-P1-K1-H5
taaagccttcaaatatatacatataaatcgagagagagggagggaaacatattttgtttttcttttaattattttttgggagagattttgaatcatgggtggtgggaagaaattcggggttcttctatgcgcggaggactcggactacattaagaagaggttgatctcgcttttgaagaaattggattccttgaagacgaaagttcttgggatttgctttggtcaccagattcttagccgtgcgcttggaggaaaaacagggcgagccgtttcgggttgggacattggagttacgacaattcatttatcatcgtcctcatcgaagttcttttcatcacttgagatccccaccactctttccatcatagagtgccacccagatga

SEQ ID NO: 12751 - DNA, 599 bp, Gossypium hirsutum
  Clone ID: GOSHI-09MAY01-C9945_2
ctgaaccagagaagaaacgccaagtatcatttcaaggtgtaggaagaactcttggtagcagcagtacttcggcagctcctgaaccaactaccggttccagtcctctcaacacagctctgaacccttcacctggcttggttgtagatgaaagtttaccatcgacctcaattcaacttaggctggctgatgggactcgcatgataacccgcttcaatctccaccacacagttgatgacatccgttccttcatcaattcatctagacctgggggtgcaacaaactacccgcgcgtccgtgcagataatgggtttccctcctaaacttcttactgatccaacccaaaccatagagcatgcaggccttgccaattctgtggtaatccagaagttctaggcccctgactgtgtcgaaagtgtcgtatctgcttatctctacaagtgcttattgtacctagcgaaaaagattccaaatacttgtaacgattatgaaccactactatatactggaagcaggtttttgatggttctttctagctaaataggtatggaatcgtttgaaacaaatagaattttgatcggaaatttacatgtagaacgggc

SEQ ID NO: 12752 - DNA, 1357 bp, Gossypium hirsutum
  Clone ID: GOSHI-09MAY01-C9945_1
gttagttttggctttggttcaaaggtagaaaagagaatctagccgccgacaagcatataattttcggctcaaggaaagcacatgagaagatccggtttgagccgtagggaatcaaattcccaagtgtgaattcaaaggtcaagccaagccaatctttaagccaagcgagccatagaaacataatttcctcctctctattttatctgtcgtctctctcggaacttgcctctccctcccgttaagcgaaatctgacaaaatcgatggcctcgcgtgacaagaaacctgcgaagccgtcgagcagccgtgccggtggaatacgcacgctctcggatctgaaccggccctctggacccgattccgacagcgattccgatgatccccaggagtactacactggtggcgagaaaagtggcatgcttgttcaagatccttcaaagaaaaatgatgtagatgaaattttcaatcaagctaggcaactgggagctgtagaaggtcctctcgagcatcctcgtccatcaagttcaacaagttttactggaaccggtagattactctcaggggaaactgttccttctgcacctcagcagcctgattccattattcacaacatagttttctggaccaacggtttcaccgtggatgatggccctctgaggaggttggatgatcctgaaaatgcagcatttttagagagcatcagaaagtctgagtgtcctaaagagcttgagcctgctgatagaaggtcttctgtccatgtcaatctgataaagagggacgagaagtgccctgaaccagagaagaagcaccaggcagcatttcagggtgtcggaagaactctcggtagcggcagtacttccgcaactcctgaagaaaccagcagtaccagtcctctcaacactgctccaaatccttctcccggcctggttgttgacgaaagtttaccatcaacctcggttcagcttaggttggctgacgggactcgcatggtcgcccgcttcaatctccaccacacggttggtgacatccgttccttcatcgatgcatctagacctgagggtgcaacaatctatcaactgcagatgatgggattccctcctaaacttcttgttgatccaacccaaaccatcgagcaggcaggcctggccaattctgtggtaatacagaaattctagcttgggctgcatggaactcgtccatctactcattactataactgcttattgtaccgagtgaagattttccataattttgaacgattatgaaccgctactatgtacaagaagcaggttttgatgtcttgagtctggttaaatgggatcaaattgtttgattctccacatagataaatttttttgg

SEQ ID NO: 12753 - DNA, 420 bp, Gossypium hirsutum
  Clone ID: LIB3166-020-P1-K1-D6
ccgacccacgcgaccggaaatctgacaaaatcgatggcctcgcgtgacatgatttttgcgaagccctcgagcagccgggccgcttgaatacacacgctctccgatctgaaccagccctatggacccaattcctacatccaatcatatttatccccaaggaatcttacattaaagccaaaaaaagtgccatccttgttaacaatctttcaaaaaaaaataatctacatcaaattttcaatcaagctaggcaactggaacctctaaaaggtcctttctagcatccttgtccatcaagttcaacaagttttactggaaccggtagatgactgtcaggggaaactgttccttctgcacctcaacagcctgattccattattcacaacatagttttttggaccaacggtttcaccgtggatgatg

SEQ ID NO: 12754 - DNA, 360 bp, Gossypium hirsutum
  Clone ID: LIB3493-058-P1-M1-E12
caattagtctctttaaggttcattcttaatcagagaataccaatggcttcacatgacaagaaacctactaagccgtcaagcagccgttccggtggcatccgtacgctcgcagatctcaacaggccgtctggacctgattccggcagcgattccgataatcctcaggagtactacaccggcggcgagaaaagtggcatgcttgttcaagatccttcgaagaataatgaagtagatgagattttcaatcaagctaggcaactgggagccatagaacggccaattgaacagcttaatccatcgtcaagttcaacaagttttactggaaccggtagattactttcaggggaaactgtatcttct

SEQ ID NO: 12755 - DNA, 502 bp, Gossypium hirsutum
  Clone ID: GOSHI-09MAY01-C9965_1
cccacgcgtgcgtgcatcctttactcatcacttcaagtctttatctcccctcttaaaacaaaaaccatggttcaagaaaagaagctagtccaggacgtatctggttggctaagagtctatgatgatggctcagtcgacagaacctggactgttccccctgaggtcaagttcatggctgaaccagtctcaccccatgaacaattcattgatggtatagccactcgtgatgtcaccatcgatcaaaattcaggcctccgggctcgaatttacttgccggaggaggaaaatcccaagtttccgatcatacttcatttccatggcggtggcttttgcatcagccaagctgattggttcatgtactatcagttttacactaggttagccaaatcgattccagctattgtcgtctcggtttacctcaggccagcacccgagaacaagcttccggcagcttgtgacgatggctacgccgctctcctttggctttaatcgctatctaaag

SEQ ID NO: 12756 - DNA, 707 bp, Gossypium hirsutum
  Clone ID: GOSHI-09MAY01-C9895_2
gccggcgccgaatctcaggctcaccgttgttttttttaatttcttttaattccattgagaagacaaaaacctaaattcaaaaccctaatttgacaaactttcactctcaacacccaaaagagtgagagcatggagcaatatgaagagcaagagcacgaggtgtacggaggggagattcccgatgaggaaggagaggtggacgctgacatgtctggtggagctgaagactacgaaggcaacgaacatgatcttgagcacgatcctaattccaactccaaggaatttggaggacatgaaaaagagacttaaagagatcgaggatgaggccggagctttacgtgaaatgcaagctaaagtcgagaaggaaatgggcgctgtccaagattcctcaggtacttctgcaactcaagctgaaaaggaggaagtcgattcgcgctcgatatatgttggtaatgtagactactcatgtacacccgaggaagttcagcagcatttccaatcctgtggaacagttaacagagtgacaattttgaccgacaagtttggtcaacctaaaggattcgcctacgttgaatttgttgaaatgacgctgttcaaaagctctgttgttaaatgaaacagattgcatggtcggcagttgaagggtgctgtgagagagtgaaggtgctggagtgaggcatttggaagaaggcgaccaaagcatattt

SEQ ID NO: 12757 - DNA, 753 bp, Gossypium hirsutum
  Clone ID: GOSHI-09MAY01-C9895_1
cccacgcgtccgagaataaaaccctaattccaaaattcccccccatttgactaggatggatcaatacgaagagcatgagcacgaggtgtacggaggggagattcctgacgaggaaggagagatggatgcggagttcgatatgactgctggagctgaggattaccaaggcaacgaccaaggccttcaacaagatcctagttcctccaaagacttggaagacatgaaaaagaggcttagggaaatcgaggaagaggcgggagctttacgtgaaatgcaggctaaagtcgagaaggagatgggcgctgtccaagattcctcaagtgcttctgcaagtcaagctgaaaaggaggaagtggattcccgctcgatttatgttggtaatgtagactatgcatgtacacctgaggaagtacaacagcattttcaatcctgtggaacagtgaacagagttacaattttgaccgataagtttggtcaacctaaaggatttgcttacgttgaatttgttgaaattgatgctgtccaaaatgctctactgttaaatgaatcagaattgcatggtcgccagttgaaggtctcggctaaccgaacaaatattcctggaatgaaacactatcgaggaaggcctttcaatccttacttccgctcccgaaggcctttcatgcctgctttttatcctccctatggctatgggagggttccaaggttcatgcgggccatgagataccgggcgtatttagatgggtcacacat

SEQ ID NO: 12758 - DNA, 542 bp, Gossypium hirsutum
  Clone ID: GOSHI-09MAY01-C9865_1
gaaaaacatatttgggctataaaaatctcatctttctttgttcactcccctctttcctctttcctttgttttgagcagcttaaaaggatgcgctagtgtaggaacgggaatggatttgttcctcaacgccaaagcggtgcgcctacgcggccaccacgacaagtatctcggttcgccgaggaagacgaagaatccgtctctcaagaccgaaacggatcctccaaggccgctcgatggaccgtcgagttcgtgcctgggtctcaaaccattatccgtctaaaaagctcttacaacaagtatcttaccgcctccaaccagccctttttacttgggatgaccggtcgaaaggtgattcagacactgcctaggaggctcgactcgtcagtcgagtgggaacccattagagaagggtgtgaagtcaagctcaagactcggtacgggaactttttgagagccaatggagggttaccggcttggaggaactcagtcacccacgatattcctcataggacggctactcaagattgggtgttggggatgtg

SEQ ID NO: 12759 - DNA, 382 bp, Gossypium hirsutum
  Clone ID: LIB3166-047-P1-K1-E3
gagaaaatagtaataaggtttgggttgttttttgttagattcttgtgtacactgggggtgtcttgtttcaacaggtaaactctaacaaatatcaggcggggatggatttgttcctcaacgccaaagcggtgcgcctacgcggtcaccatgacaagtatctcgtcgccgaggaagacgaagaatcctgttctcaagaccgaaacggatcctccaaaagcgcttgatggaccgtcgaattcgtacccgggtcagaaaacatcatccgcttaaaaagcgtttacaacaagtatgtgaccggctccaaccaggcctttttacttgggatgaccgggcgaaaggtgattcagtcgctgcctaagaggctcgactcgtcggtcgagtg

SEQ ID NO: 12760 - DNA, 488 bp, Gossypium hirsutum
  Clone ID: GOSHI-09MAY01-C9815_1
ctctcgcgtccgcctcaacctacttcagccaaagcggtgggccctcgactccatcgtccccaaccgcacgcgcggtcgccttttgaaaacaattttcagcctcgagatccctccttcaccctcaatttcgacgaagcaaggaggagtcaatggaagattcgcgagggaagccttttattctcttctctttttttttgaatatcagaatcacaaatccaaaaaaaaaagagaaactaaagaaaataaagtgtttagggattttttgaatcgaaaatcaccttgctctgttttatcgattgctttttattgcgttctctttgtgtgcgtaaaaaatatacaatggctattacatggcttttatagccggaaatagaggaaaatgaaaaagaaaatacaaatttcttggccgtttctttctttctctttgctgtgctggtgtttttgtatttgcttgcaggtacggagtccgctggcatgcgatggccctt

SEQ ID NO: 12761 - DNA, 400 bp, Gossypium hirsutum
  Clone ID: GOSHI-09MAY01-C9805_1
gtttttcacaccataaatttgtgtgtaagaaaaagaagagagcttttttttttttctttggtgagatctaaacaatttgagtggttctggtttttgttgtttgaaaatctttcccccttttttctattactccccgcttctctgaatccctttctgttaatcatctgtcttttgaatcaaaatctgatttttgggtttgtttttcatcagtacttagcaaatgggtcaaaagcaaacttagacaaggatttctttaaaagtcaggtgttttcagaaacgagatccaggtttttttttttttcttttccttcagctttgttgatataaagtttcaatatttgtctctatttccagggaaatcttataaaatttctcattttttttcgtctgtagataaatt

SEQ ID NO: 12762 - DNA, 1103 bp, Gossypium hirsutum
  Clone ID: GOSHI-09MAY01-C9835_2
cccacgcgtccgctgccccctgcctcctatctcttcaacgttcacaatgggcgcatttcaccgactcaacttgctccatttcacgctctctttagttgtcattgccgtcaatggccacaatataacggccattctcgaaggttttccagattactctgtttacaatagtttcctcacccaaacaaagctggccgatgagattaacacccgagagaccatcacttgccttgtcctcaacaatggggctatgtctgccctcacatccaaacaccccctttccgtcgtcaaaaacatcctcagccttcacgttcttctggactactatgacccccaaaagctccacaaaatctctgatggcactaccctcaccaccacgctttaccaaactactggtaatgcccctggaaaccttggtttcgtcaacatcaccgacctccaaggtggcaaagtcggcttcggctccgcaattcctggctccaaactcgactcatcttacaccaagtctgttaagcagattccctacaatatctctatccttgagatcagcgctccggttatcgctccgggtatcttaacggctccggccccgtcgtcttctggcgtcaacattaccggtttgcttgaaaaagccggctgcaagacttttgctagtttgcttaccagcagtggcgtgcttaagacttacgagtcggcgcttgataaagggttgaccgtttttgctccgtccgatgaagcttttaaagctgaaggtgtccctgatttgagcaagctcaccaatgcagaacaagtctcacttctagagtatcacgcctcgccggattacacacctaagggaacgttgaagacgacgaaggacccgatcagtacattggcgactaacggcgctggaaagtacgatctgacagttacaaccgccggcgactcggatgacactacacacaggggttggcccatccagggtcgccgaagcagtttttgactcaccgccggtcgccattttcaccgttgacaacgttttgctcccttctgagctgttcggcatgtcaccgtcgccagcaccagccccggaaccagtttttttggctttaccgacaccattttta

SEQ ID NO: 12763 - DNA, 829 bp, Gossypium hirsutum
  Clone ID: GOSHI-09MAY01-C9835_1
tgaaaaaccggctacaaacttttgctagtttgcttaccagcagtggcatgcttaagacttataagtcggcccctcgcgtccgcccgcccgtccgtgctccgtccgatgaagcttttaaagctgaaggtgtccgtggtttgagcaagctcaccaatgcagaacaagtctcacttctagagtatcacgcctcgccggattacaaacctaagggaacgttgaagacgacgaaggacccgatcagtacattggcgactaacggcgctggaaagtacgatctgacagttacaaccgccggcgactcggatgacactacacacaggggttggcccatctagggtcgccgaagtagtttttgactcatcgtcggtcgccattttcaccgttgacaatgttttgctctcttctgagttgttcgacaagtcaccgtcgtcagcaccagccctagaaccagtttcttcgccttcacctacaccatatttatctccaagcccatctccaatgtctaaagcagcgtcaccactaacagcttcaccacgagctccaccaactggcaccccagtcggatccccggccgatgcgccaactggtttgttagagaacaacacatcgaataatgccgccggtcacgtgagtgattctcttttgggcactatcatttttacggtctttgccactgtcttttttgtaacacccctacctcatcggaacagggtacggggcattaccggagcttatcgaatcattattaattagggaaaaaagtaaaacaaagtaaacatgtaatatttaataacttcgtataacatggtaattaacttactgcttctat

SEQ ID NO: 12764 - DNA, 1788 bp, Gossypium hirsutum
  Clone ID: GOSHI-09MAY01-C9585_1
gttctggcggccctcaaacccagagaactgggaagaatggttccaaggaactgctgatgctgtgaggcaatttgtgtgggtttttgaggatgccaaagccaaggatgtggagcatgtattgatattgtccggagatcatctttaccgagcagactatatggattttgttcagaagcatattgactcaaatgctgatatcacagtctcatgtttaccaatggacgacagccgtgcatcggattatggattgatgaagatagatggaacaggacgaattgtccagtttgccgagaaaccaaaggccctaatcttaaagcaatgcaagttgatacctccatattaggactatcagctcaagatgctgcaagatatccgtacattgcatcaatgggtgtgtatgtgtttaaaactagtgtcttgttaaagcttctaactcgaagctatccctcatgcaatgattttggctctgagattattccgtctgctgtgaaggaacacaatgtccaggcatatttgttcagtgactattgggaagacattggaacaataaaatctttctttgatgctaatttagcgctcacagaacagccaccattgtttgaattttatgatccaaagacaccgttctatacatctccaagattcttgcctcctaccaaagttgatgaatgcaagattgttgactccataatttcacatgggtgtttcttgcgagaatgtagtgttcaacactctatagtcggtgtgcgctcacgtttggagtccggcgttgttcttcaggataccatgatgatgggagcagactactaccaaaccgagtccgaaatagcatctctgctagcagaagggaaggttcctatcggtgtcggacagaataccaagatcaagaattgcataattgacaagaatgccaagataggaaaagatgtaatcatatcaaacactgatgctgttgaagaagctgagagaccagaagatgggttttacattaggtctgggatcacagtgataatgaagaatgcaaccatccgagatggaactgtcatataaaacagtttaactttgaatccttccagaggctgattctgttctgtgctgaaccggtgatggaaagccgagcgcccatagtctgttgccctttccaagtgaaaaatatatctaggacttccgctctgcctatgtaaaattctgaagttcctatgtacttttcaaataagttcaaacaccatttgttttattcgtctcttagtagcacaaacacaagcttacagcagaaaataagctggttcatcagattagtacacaatcacagaatgtatcactctttagttaagaacaactcatttttagaagagttcatctaattgtaaaccctaaataaataaataaaaaactaggacatcatcttgaaactttatcttcaacacttctatattactacaagaccatcatgtatctttattttctcaatttcccgtgtcgctgacaccatttccggaccaccattgtgctcttctgatttcccttgctttgttccatttctcgatgtctctcaaccttacgtacatctttcgaatacgattaagtttctgagattcttgagtgatgaggtcgacagttgaggtgccttggctcatgattacctcatacccatccccgtaagagtccattccttcggctaacagttgccagaatagcccaccgatggctgcacctccacccctggctgatgagtaaatcgctgtgtaaacagtgttgtacagctcgtctctttggttaggacccgcc

SEQ ID NO: 12765 - DNA, 492 bp, Gossypium hirsutum
  Clone ID: GOSHI-09MAY01-C9555_1
aagcaaatgaccgattccaactcagtccctctcttaccgtaactcagctctcagatattctctttttctttttatttaatgtttatgctacgatgttttcaagttgcccattttctcccgcgtctctgcttataaacaacgtcgtgctttacttggggcaatttttttaacctagtcaatttgtttcaatttagggtatttttcttcgtttagcttcaaatcaagtggagatctggtttggttagtaacgcaaacaaggaggtatggataaagcaaaactctctgaatggggcgagaaactgagaacgggtggagctcaaatgggtagaatggttagtgggaaaatgaaggaaattcttcaaggccccacatccgagtggaaagtcgtcgatgaggccacttctgagacattagaagaacccaactggggattgaacatgaagatatgtgctatgatcaacagcgaagagttcaatgggaccgaaattgtta

SEQ ID NO: 12766 - DNA, 354 bp, Gossypium hirsutum
  Clone ID: LIB3493-060-P1-M1-E3
cggacgcgtgggtttctggatctggaagtgctcgccggggtcaagcatgtcttcaacgtcttcgtattggtgttacagctgcacccgtctggttcgtgtggtggttttggatagcgggtcaaacgacgccgttgtctgcccgtactgcgacggaggcttcatcgaggagatcgaatcttcggataatcacaaccgtcggtttccagctatgtacatgatcaccagcaacgataatagccgtcaaaattcgaatcgggcgcgaaatctcgtctttcgtaggaatcgtcgtggttctgttgaccggtcaaacatcaatccgatcatcgtcctcctgggctccaccgacgacgagaa

SEQ ID NO: 12767 - DNA, 361 bp, Gossypium hirsutum
  Clone ID: LIB3166-015-P1-K1-H9
ctttatttctggatctggaatactcgccgttgtttagcatgtcttcaacgtcttcgtattggtgttacagctgcacccgtctggttcgtgtggtggttttggatagcgggtcaaacgacgccgttgtctgcccgtactgcgacggaggcttcatcgaggagatcgaatcttcggacaatcacaaccgtcggtttccagctatgtacatgatcaccagcaacgataatagccgtcaaaattcgattcgggcgcgaaatctcgtctttcgtaggaatcgtcgcggttcttctatgatgacggatctgggtcccgtttaagacccataccgacttcgatgtccgaatctctaatgggtttggtt

SEQ ID NO: 12768 - DNA, 447 bp, Gossypium hirsutum
  Clone ID: GOSHI-09MAY01-C9505_1
gtaccggaattgacgggccgggccgacccgtccggccatgtcctgctcccttgccctatccaactctctcgttctttccccgcccatgtctctttgccgtgacaataccccgagcgtctctccgtcgcccgaagctgtgaatttatcgttgactcacctcaaaccttcgtcgtctccttcttccccttgttcgccttttaggcttcgccttcaaaaacctccgtccgggtctctattatcttcttctgtttcaacgtcagcgtcttcatcggattcgggttcaactgcgggtcttggtccgcgatcggcgtcggcgatattgaagaggaagaggccaacgaggctggatataccaatgggccacgacggcgttgcattttgggggccggcgacgccgtgtgaagttatgagagaggtggaaagaagagggatgtggatattctgttt

SEQ ID NO: 12769 - DNA, 438 bp, Gossypium hirsutum
  Clone ID: GOSHI-09MAY01-C9415_1
gcaaaatcataaagctctcacaagtttcgaattttgctctttagtccctcaatttatatttgaaattcactaaggtcctaaaatgggcactgctcaaagcagggaagatcggatcaccgattcagaatccgatgaaggctatgaagaagaagaagaagaggaggaggagcaatacgacgacgctttaagcgatcatcaaaacactcaatcttcatcttcaacttcaacttcttcaggtactcaaaaaagcctcgacgatatcgatgctaagctcaaatccttgaaattgaaatacaattctcagcaatcaagccctaatctcaaaaacccagtgaagctttaccttcatataggcgggaacacacccaaagcgaaatgggtaatctctgaaaagctcacttcttatagtttcactaaggaaatgggtgatatgatgag

SEQ ID NO: 12770 - DNA, 593 bp, Gossypium hirsutum
  Clone ID: GOSHI-09MAY01-C9425_1
cgctgtttaagtttgttgttccacttcaccgctcctcctctacaggcatccacactacccttatcgggctcccaatcccaccgcgcctgacaaaccctcctcccattcctcacgcctctaaagtcaactgctacttcagttttggtttcatagataaagaatggcaagcgcgtgcttttcgacatcgccctcgtctcttcgattcagttctctcctcttctctccaaactcaagcaccaatgtcgattctaataagttgtctcttcctttccatccccttcgtcccaggaaattgaagaagtttctcagtaatcaaaagaatgcggtgaattatcagccaaaagctgtttacgcaggtgagttttgggctcctccgacaacttctcgacagggaatttggtcaataagggatgatttgcaagtccccgcatcaccttacttacttgcctatgcacaagggcaggggccacctcccatggtgcaagagagatttcaaagtgttgtcagccaactttttcaacatagaatagttcgctgtggtggagccgttgatgatgatatggcaaacattattgtagctcagcttctctatc

SEQ ID NO: 12771 - DNA, 486 bp, Gossypium hirsutum
  Clone ID: GOSHI-09MAY01-C9675_1
attaattggaatgtattatgtgctaaacccttattccccacccaaaaaccctgccaaagaattggcgctctccgtttcccatctggatctgaaaattgcaatccatttcaaaccccccttaaaacccttgaaatcatggcctttgcagagtcccaaaaccccttacgagtttatagaatcccgcagtccaggtacatcgactccgtccgctggctttcaccggtttctccctccgacagattcgcagccatcgcctatttcgacgctgataccaactctccctccatcgaaatcgcatacgttgacccaaacccacaaagctcgtctccaaccttaacccctcaatcttcatggacctcaccttctcgcatttcgtccctcagaaccgcccactctacccctcagcccctgctcgctgccgccactttctccggttcacttcacattttggcctctgatttaatcaatggaggggtgatggaatct

SEQ ID NO: 12772 - DNA, 502 bp, Gossypium hirsutum
  Clone ID: GOSHI-09MAY01-C9635_2
gaaaaaaaaagttctgatgaacttgaatgatgaatagatggcaaaatcgttgaagccagcgtcctccgatgaagaactgtacaatggttcgagttcatcgaagaggagcgaatgaacgctcatgtcaacggcgagggagatgatgaaagaggagatgtttggaaagctaaaagaattgggcaactctgttctgggtcgttttgggatgagtattgacaacttcaaagctgtcaaagatccaaaccctggctcttattctatatcattccagaattgacatcgtccctacccccaagcaacatgtgagagaaaaatgaaggcagcctttagcatgacccaagatacgcgggcttggaatttttttatgctgaatatttctttgcaagtagactgggcaatctgtgtcatgttcatatattttcccccccccccaggcgctttgggttattttaggtttaaaacccttttgcctagttaataatgcattataaggattttggcc

SEQ ID NO: 12773 - DNA, 475 bp, Gossypium hirsutum
  Clone ID: GOSHI-09MAY01-C9635_1
cttccgaaaacctggaatctctaaatcttttaaaatttctcccaattatttatcctcaaatcgatttcccaaaatccccaaatcaaaatacctttgattttcgtcgaagtccctttgattctcttttttttttcattttcattttcatttatcattgaaagaaaataaaagaggaaaaaaaaacgttctgataaacttgaagaagagatggcaaaatcgttgaagccagcgtcctccgatgaagaactgtacaatgtttcgagttcatcgaagaggagctaatgaacgctcatgtcaacggcgaagaagacgatgaggaggagattgaagctgttgctcattccgccgacgccttcgacaaagattaaaatctaaaatattaaaatcttgaagttttttattttagctaaaattttattagctttttatataattttacagtttcttttttgtataaagttggtctttaaaaatt

SEQ ID NO: 12774 - DNA, 385 bp, Gossypium hirsutum
  Clone ID: LIB3166-016-P1-K1-E3
gaattctgttacaattccatcttactttaaggttttataaacctttcaacattatccttggtggaagggacctcgtgtcctatggtatagttaagtacattattaaatagatgacttaatcttgggaatgccatcataagcaggtagcagattttggtctttcaagagaagagatggtagacaaacatgcagcaaacatacgaggaacatttggatatcttgatccggagtatatatccacaaggacctttactaagaaaagtgatgtctacagcttcggggtattgctgtttgaactcatagccggcagaaatcctttacagggtctcatggaatatgttgagctagtaagatctctctttttgctttgttaaaaggttaagct

SEQ ID NO: 12775 - DNA, 310 bp, Gossypium hirsutum
  Clone ID: uC-gsflnu33B066d03b1
aggggcttggaatatcttcatgatggggcagtttctcctgtaatacaccgcgacatcaagtcatccaatatcctgttggaccagtccatgagagctagggtagccgattttgggctttcaagagaagagatggtagacaaacatgcagctaacatacgaggaactttcggatatcttgatccagagtatatatcaacaaggacctttacgaagaaaagtgatgtttatagctctggggcatcgctattcgaactcatagttggtagaaacccttttacagggtctcatggaatatgttgagctcgcacct

SEQ ID NO: 12776 - DNA, 592 bp, Gossypium hirsutum
  Clone ID: GOSHI-09MAY01-C9145_1
tcctgccatttgatgagcaaaagaagagcatttacttgggggagacatattcggtcctagtatacggcgaccaccatcacagatgcaattattggataacatccaatattgttggtcgatcagcacccaatactcctcctggtctcggcgttttcgtttactatccaaatcatccaaggagatctcctcccacaactcctccacctcctcctctatggaataacactgaccctcgattggctcagagtcacgccattaaagctcgccaaggttacattcacactccaccttcacgttcagacagggtcattgtgttcctcaacacacaaaacacgatcaatgggaatgttcggtggtcggtcaacaatgtctctttcgcacttcctcatacaccttacttgatcgcactcaaggaaaatctaacccatgtgttcgatcaaaccccacctcccgatgggtacgatttccagaattatgatatccgtatagtacaagagaacagaaatgctacctccagcaatggggtttacaggttgaacttcaactcaactgtggatattatacttaaaatgccaacttcatgagtcttggt

SEQ ID NO: 12777 - DNA, 566 bp, Gossypium hirsutum
  Clone ID: AI054801.1
aggagatctcctcccacaactcctccacctcctcctctatggaataacactgaccctcgattagctcagagtcacgccattaaagctcgccaaggttacattcacactccaccttcacgttcagacagggtcattgtgttcctcaacacacaaaacacgatcaatgggaatgttcggtggtcggtcacaatgtctctttcgcacttcctcatacaccttacttgatcgcactcaagaaaatctacccatgggtttcgatcaaaccccacttccggatgggtaccgattccagatttggatttccgaatagtccaagaacacagatgtgctccctcaactgggtgttaccgggtacactaccctctgcggggatattactctaaggagacactcgaagagttgggcccccgtgagactcctcttggcatcactgcacaatatgcgagttggtgttggagaggagaatcgattgtctttaaggctcaaaaaagtatattggggaccccttttaagacacaggccgtccatctagggaggccgtgtaggttagctgtaaccggactggg

SEQ ID NO: 12778 - DNA, 1218 bp, Gossypium hirsutum
  Clone ID: GOSHI-09MAY01-C9175_1
cggaacccacgcgtccgccgacgcgtccgctgatttttcttggttagcatatgtctcaaaggcctaacgttccccactcttcttcaatagcttttggtctccattctcatctcctggtttccagtgagatgaaccctaattccaactggtcttaatagttccatctctttctttttcttctattgattttttgtttaaacttcttttatttcctttttgaaacaaagtaattgccttgttgatttgcaagcaaattttggtaaagttcttaagtatttgagtttagatcttctttgagagtgccgctatgggagtgaagagttttgttgaaggaggcatagcctcaatcgtggccgggtgttcgacccacccgcttgatttgatcaaagtccgaatgcagctccagggtgaaagccatgttcccaatccggctgttcaaacactccgccctgctttagcctttcagacaaccactactaccacctcctctgctatccacatgcctcctccgccggcgcgtgttggacctgtggccaccgggatcaagatcttccggaccgaaggcgtcgctgctcttttttctggcgtctctgctaccgtcctccgccagaccctctattccaccacccgcatgggactctacgacatcctgaaacagaagtggactgataaagagaccaaaaccatgcctctctcgcggaaaatcaccgccgggctaatcgccggggggatcggcgctgccgttgggaacccagccgacgtggcgatggtgcgaatgcaagctgacggacgcctccccgtatctcaacgtcgtaactataccagcgttgtcgacgccatcacacgcatgaccaaacaagaaggcgtgacctccttgtggcgcggctcgtcgctgacggtgaatcgtgcgatgttggtgacggcatcgcagcttgcctcctacgatcagatcaaagagatgattttggaaaacgggctgatgaaagatgggctggggacacacgtggcagcgagcttttcagccgggtttgttgcggcagtggcgtccaatcccgttgatgtgataaaaacaagggtgatgaacatgaaggtggaggcagggcaaaagccgccttacgccggcgctttggattgtgctatcaagacggggaagtcggaagggccgatggctttgtataaaggtttatacccacaatctcgagacaagggaccatttac

SEQ ID NO: 12779 - DNA, 292 bp, Gossypium hirsutum
  Clone ID: LIB3166-019-P1-K1-H4
gaaaaaaagtaattgcctagttgatttgcaagcttattttggtaaagttcttaaatatttgggttgagatcttctttgagagtgccgctatgggagcgaagggattcgtacaatgaagcatatactcaacaaccgccggaacttccacccacaaccaggacctgatcaaagatctaatgcagctacacatcaaacgacatgctaacaatccggctgaagacgcactcataactgctcatgcttctcatacaggcactgctaccaccatctctaatatccacatgcctactgc

SEQ ID NO: 12780 - DNA, 435 bp, Gossypium hirsutum
  Clone ID: GOSHI-09MAY01-C9135_1
cggggcgaccgacgcgtgatctcaaagactgcttttaggtttgttggggaatgtgccgtggttcaaaatctgaactgggtccttcaaatttcaccatggaaggtgagctacaagagcataaaattggtgctctatgtaaatgttcacttttgcttgaattggctgcttctaatgatctagtggcctttaaaaatgaagtagaagagaaaggtttggatcttggcgaagcaagtttgtggtatggtagaagaatttggtctagaaagatgggatttgaagaaaggacgcctttgataattgcttccatgttcggtagcgtggatgttttgaaatacatcattggaagcggcaagatcgatgtgaatgacgcttgtggtaccgatggagctactgctttgcattgtgctgttgctggaggttcggattctttggttg

SEQ ID NO: 12781 - DNA, 493 bp, Gossypium hirsutum
  Clone ID: GOSHI-09MAY01-C9125_1
ctttaaaaaagaaattctcagcattttcccgaagaattctcccccccctccatggttttctcaagctttttaagaatcacacaatttcgaaacagattattgtattcatttttgaatcattctctgaaaacccaaaagaaaaaccttggatttttgttcatattttttgtcgccggaaatatgtttggttcaccggagaaaccaatgtttaagcgaacttgtagcttgttaagtcagtacttgaaggaaaaaggtagctttggtgatcttactttgggaatcacatgcagtcacaacgttgaaaaagggatgccggagatagtccgtccggcgacggagacgaggacgaccaccatggatttgttccctcaaggagccggtttttctgccgataacggttcgagacgggtcggagtcgatgtggaccctcaaaacgcggcagcgccgatgacgatcttttactgcggacaagtgattgtgttcaatgatttcc

SEQ ID NO: 12782 - DNA, 409 bp, Gossypium hirsutum
  Clone ID: LIB3166-010-P1-K1-D3
cccacgcgtccgccatttattcctcgtgcttttaaaaatcacatctttaaaaaagaaatgctgggcattttcccgaagaattcaaccccccctccattttttctcaagctttttaagaatcacacaatttcaaaacagattattgtattcatttttgaatcattctctgaaaacccaaaagaaaaaccttggatttttgttccctcaaggagccggtttttctgccgataacggttcgagacgggtcggggtcgatgtggaccctcaaaacgcggcagcgccgatgacgatcttttactgcggacaagtgattgtgttcaatgatttcccagctgataaagctaaggaaatcatggctttagcaagcaagtgcagctccgaaaacccgaatacgaacacgtttgtaccc

SEQ ID NO: 12783 - DNA, 821 bp, Gossypium hirsutum
  Clone ID: GOSHI-09MAY01-C9095_1
tggccgaagaattgtctaagcatgagcgatcctgatctatcccacttcttgttcaggaaaatatatcaattataggcccagttcaattggtaaagatgacagtggaattaaacgaatgaactcaattgcccgagctgctgagtctattggtgatggtgatataataaacgtgcagattcgaagatatcgacagtggcagctctcacaaactagtgccctttcatcatgtatcattcctgctgcattgctacatggacaaagggagacgcttgaacagggagaacgcaatttcaatagatttggtgggtggctgggaaagaattcaaccatgggcaaaaatataggcttttggaggattttcatgttcatttccttgcttctcgtgagtcttgttcaggaagagaaactcttcgacttgaatatctcccaattcttctgaaaagattgaccgatccgcttcgagacatgcctaaggatgaagctgttaagcaggttttagagtttatgaacgcttactcaataagccaagaggatttcgatacaatcgtggagttatctaaattccagggctatccaaatccaatggaaggcattccatcagctgtcaaagcagcactgacaaaagcatacaaggaaggaagcaaaacacgaattatacgagctgcagatttagtaactcttcctggaatgaaaaaagccccaaagaagcggattgctgcaattctagaaccatcagatgatgtattaaggggaggagaatggtgacgaattgccagaaaatgatgagaacacttcagactcagaggactttgaaggtacta

SEQ ID NO: 12784 - DNA, 508 bp, Gossypium hirsutum
  Clone ID: GOSHI-09MAY01-C9075_15
cttttagattccctttccattgtactgatctttctttctgtggaattactcactcctgttctagatgaaggttctctccccaattcttgcttgcctagcgcttgctgtggtggcaagtcatgctgctctctcaccccgagcaatattggagctataagctgccaaatactccaatgccaaaggctgtcaaagaaattctacatccagaactgatggaggagaaaagtacctctgtaaatgtaggaggtggtggtgtaaacgtcaacacaggaaaagggaagccagcgggtggcactcatgtgaacgttgggcgcaaaggagttggagtgaacacgggaaagccagggggtggcactcatgtgaatgttggaggcaaaggagttggggtgaacactggaaagccaggaggtggcacccatgtgaacgttggaggcaaaggtggaggagtatctgtacacaccggacacaagggaaagccagtaaatggtaatgtgagtccgtttcttta

SEQ ID NO: 12785 - DNA, 649 bp, Gossypium hirsutum
  Clone ID: GOSHI-09MAY01-C9075_11
cggcgggacccggcccgaatttccgggttgtcccaagccgttttttctcccgtccgggaagactaatttttggggggtttatttaaaggcaaaggctaaacaatggggcgctaattttttggtttgaaggcatggaccaatgccgtaaatggcggaggggacgtttggaacaacgagcacaggttcaagatcgtgaggtatctcggtgaaggtgggttcgcctacgtacacctcccgcgcgttcgcccacccgattccgcctcacgcgttcgtccacgcgtccgcttagccaaaaaagtcaaggacccttctcatctttccgatgatggaacttatgcaatgcagaaagttctcgttcagaataactgagcagttggaattggttcgtgaggagatccgtgtttcatccttgtttagtcaccctaatctgctttcacttcttgatcatgaagcatatttgttatttcctgttcatttggatggaacattactggacaattccaatgctatgaaagctaaaaaggaattcttttctacctcagatgttcttcaaatatttcggcagctgtgtgcagggctgaaacatatgcatggtcttgttcctccatatgcacataatgatgtcatgccaggaaatgttattttaacc

SEQ ID NO: 12786 - DNA, 865 bp, Gossypium hirsutum
  Clone ID: GOSHI-09MAY01-C9075_8
agcggatccctgcgactttacgattctacaccaggtgttttttttcactacttgttctaaggctcgtgctacgtttctcattataaatgtggagaaatcttgttctactttccattccatgcaacactagcttttagattccctttccattgcactgctctttctttctttagaattagtcactcctgttctagatgaaggttctctccccaattcttgcttgcctagcgcttgctgtggtggcaagtcatgctgctctctcacccgagcaatattggagctataagctgccaaatactccaatgccaaaggctgtcaaagaaattctacatccagaactgatggaggagaaacgtacctctgtaagtgtaggaggtggtggtgtaaacgtcaatacaggaaaagggaagccagggggtggcactcatgtgaacgttgggcgcaaaggagttggagtgaacacaggaaagccagggggtggcactcatgtgaacgttgggcgcaaaggagttggagtgaacacgggaaagccagggggtggcactcatgtgaatgttggaggcaaaggagttggggtgaacactggaaagccaggaggtggcacccatgtgaacgttggaggcaaaggtggacgagtatctgtacacaccggacacaagggaaagccagtaaatgttaatgtgagtccgtttgtttacaactatgcagccagtgaaactcacatccatgaagacccgaatgtggctcttttctttccggacaaggatctccacccggggcaacaatgatcctccatttcactgatcatacagagaaatcacctttcttaccttatcaaactgcccaaaaaataccgtttttcatc

SEQ ID NO: 12787 - DNA, 587 bp, Gossypium hirsutum
  Clone ID: GOSHI-09MAY01-C9075_6
aaaaatgatagcttgaaggtctaaagggaatttttttttcttttttagttgaagatagaaaagaaaagaacaatggggtgttcattttcagggttgaatgctttatacgacgccgtaaatggtggaggggacgtttggatcaatgacaacaggttcaggatcgtgaggcagttgggtgaaggtggattcgcttatgtctatttggtgaaggaagtcatatccgacgcctcttcagcttcatctgttggcttagccaaaaaagtcaaggacccttctcatctttccgatgatggaacttatgcaatgaaaaaagttctcgttcagaataatgagcagttggaattggttcgtgaggagatccgtgtttcatccttgtttagtcaccctaatctgctttcacttcttgatcatgctattattgccattaagcctacacaagaaggatcatggaatcatgaagcatatttgttatttcctgttcatttggatggaacattactggacaattccaatgctatgaaagctaaaaaggaattcttttctacctcagatgttcttcaaatatttcagcagctgtgtgcagggct

SEQ ID NO: 12788 - DNA, 466 bp, Gossypium hirsutum
  Clone ID: GOSHI-09MAY01-C9075_5
gcggaaggaaagggagaaaaaagggacatcaagggaaacacgaatcacaagcgctgatgaaccatctggaagagtgcaaagcctacaacccacaacatctacaacaagaagagatggcagcttccgcgggggctatggacggattggctgcatccgctctccgctccgttctccagagagtccaccagaccgccgagcggtgtggtcgtgaatcgcagcggatccatgtggtcgccgtcagtaaaaccaaacccgtctccgtcattcgccaagtgtacgacgctggtcatcgctgtttcggtgaaaactatgtccaggaaattgtcgaaaaagctcctcagcttccggatgacatagagtggcattttattgggaatttgcagagcaataaagtgaagcctttgattgctggtgtgccaaaacctgccattgtggaaactgtagatgatgagaaagatgcaatcat

SEQ ID NO: 12789 - DNA, 1539 bp, Gossypium hirsutum
  Clone ID: GOSHI-09MAY01-C9075_4
cccagcgtccgggagagagagaagggggagtgcttgttaagatccgccatttttacgtttctcaattccaacacaccctaaaaagaaaaaaaaatttgagagatctgaagatgtaaaaggaattttttttcaagtgaaaggcataaggggaaaacaatggggtgtacattttcagggtttaatgcaatgtacgatgctgctaatgggggaggagacgtttggatcaatgacatcaggttcaagatcgtgaggcagttgggtgaaggtggcttcgcctatgtttatctggttaaggaagtcacctccgattcttcttcaatttcagctggtggcttagccaagaaagtcaaggacccttctcatctatctgatgatggaacttatgcaatgaagaaagttctcattcagaataatgaacagttagaattggttcgggaggagatccgtgtttcatccttgtttagtcaccgtaatcttcttccccttcttgatcatgctatcatttctgttaagcctacacaagaaggatcatggaatcacgaagcatatttactatttcccgttcatttggatggaacattactggacagtttcaaagctatgagtgctaaaaatgatttcttttctacctcggatgttcttcaaatatttcggcagctgtgtgccgggcttgaaacatatgcacggtcttgagcctccatatgcacataatgatgtcaagcctggtaatgttcttttaacccgtagaaaagggcaagcaccacttgctatattgatggatttcggtagtgctcgtcctgcaaggaaacaaatccgctctcgttctgaggcactccagcttcaggaatgggcatctgagcattgttcagcacctttccgagctcctgagttgtgggattgcccaagcgatgctgatattgatgagagaactgatatttggtcgttgggatgcactttatatgcaataatgtatggggtatctccgtttgagtacgcacttggagaatccggaggaagcctacaattggccattataaatgcacagatcaagtggccagctggacctaaaccaccatatccggaagctcttcaccagtttgtgacatggatgcttcagcctcaggctgctgttcgcccacagctagatgatatcataggtcatgtagacaagttgatctcaaagttttcacagtgataccatataggggtgcgaagattagagcattccagccattaatgcatacaagttaagtccattgaaatacttccggaagtgaacagcgtttatcaaagcaatagcagttctttagtaatgttacatggtttggacttagctgtcttagttgtgtcgataactctatgacgtcatgttctgtaatttattgacgtccagatttctacattcatgattcgatttgatagaaaaaccccaataatttgtgttttccatttagtttaatgtttcagatatcccagtgtttctctgtgtttctagctattagtcatttagttctgcaatatcgagtgaatatccgatat

SEQ ID NO: 12790 - DNA, 1023 bp, Gossypium hirsutum
  Clone ID: GOSHI-09MAY01-C9075_3
ctgccctcttattctaaacctctccttgtcccttccattagacccaaaatgccgcttcactcggcggtagcattgttttatgccgccgcttctcttttcgccattgctggcgccgaagatccctacaggttctacagctggaatgttacgtacggtgacatttaccctcttggcgttcgtcaaacgggtcttctcataaatgggcaattcccaggccctgatattcactctgttaccaacgataacctcatcatcaacgtctataacaacttaaacgaatcttttctcctctcctggaatggagtccaacaaaggaggaactcgtatgaagacggcgtgtttggcacaacctgccctattccaccaggaaagaacttcacatacatgcttcaggtgaaggatcaaatagggagtttctattactacccatcacttggattccacaaggcagctggtggttttggagggatcaggatccttagtcgcccacgaatcccaggccccttgcctgacccagccggggattacactgtgctcattggcgattggtacaagtccaatcacacggttttgcaagctcatctggatggtcggacgcggcggcctttccctgatggagtccttatcaatggtcgtggacctggtggtgcctccttcaatgttgaacaaggcaaaacctacaggcttaggatatcaaatgttggactgcaaaattctctcaatttccgcatccaaaaccacaggttgacgttggttgaagtggagggaacacacaccctgcaaacgacctattcttccatcgaccttcacctaggccaatcgtgctccgttttattcacagctgatcagcctgcacaagactattacattgttgcctctactcgcttcaccaaccccgttctcaccactactgcgacccttcgttacagtaattctgctggtcctgtctctggtcctcctcctggtggacctaccatccaaatcgactggttttgacccagcacgctctataggactaaccta

SEQ ID NO: 12791 - DNA, 1360 bp, Gossypium hirsutum
  Clone ID: GOSHI-09MAY01-C9075_2
cgtccgttcatcgggtacgcgcgtcccttcaagtcgacggtatcccagacttgatatcaaattctgcatgaggatcaaatgttggactgcaaaattctctcaatttccgcatccaaaaccacaggttgacgttggttgaattggagggaacacacaccctgcaaacgacctattcttccatcgaccttcacctaggccaatcgtgctccgttttattcacagctgatcagcctgcacaagactattacattgttgcctctactcgcttcaccaaccccgttctcaccactactgcgacccttcgttacagtaattctgctggtcctgtctctggtcctcctcctggtggacccaccatccaaatcgactggtctttgaaccaggcacgctctatcaggactaaccttacagcgagtggaccaaggcctaaccctcagggctcctaccactatggtctcattaatacaaccagaaccatcaggcttgcaaactctgcgggacaagttaatgggaagcaaagatatgcagttaacagtgtttcctttgttctgccagacactcctttgaaacttgccgactatttcaaaattggaggagtcttccggcctgggagcatatcagataatccttatggtggagggatataccttgacacttcagttctgaatgctgattatagggcttttgttgagattgtatttgagaacactgagaacatcatacagagctggcatctcaatggctactctttctttgtcgttggtatggacggagggcaatggacagcagctagtaggaacggatacaatctacgtgatgcagttgcacgttgtactactcaggtgtatccaaaatcatggacagccatatatgtggcacttgacaacgtagggatctggaacttgaggtctgagtactgggcaagacagtaccttgggcaacagctttacttgcgtgtatacacagattcaacatctctcagggatgaataccccatccccaagaatgctctcctctgcggtagggcagctggccgaagcacccgaccgctctaagccaccatatgataaagaacgttgtgtggtgaatggatgaagatgattgaagagagtagagttttgcctctaatcttgatatgtatatctttaattatataatatagctcattatattgtgcttagcatctaatatttaagtctaaaattaatggacctcagctcgaggtcgcattctttgttactttagattagatctgtattccctttgtattgttcaggtttccaaccataaattattggtactatcttattgttatcataattgacgtgttgtttaagtgcaactactgcattcacatgcc

SEQ ID NO: 12792 - DNA, 1502 bp, Gossypium hirsutum
  Clone ID: GOSHI-09MAY01-C9075_1
cccacgcgtccgaaaattgtgttggcagtgttattcagcagtacttgttctaaggctccaactacatttctcattataaatgtggagaaatcttgttctactttccattccatgcaacactaacttttagattccctttccattgcactgctctttctttctatagaattagtcactcctgttctagatgaaggttctctccccaattcttgcttgcctagcgcttgctgtggtggtaagccatgctgctctctcacctgagcaatattggagctataagctgccaaatactccaatgccaaaggctgtcaaagaaattctacatccagaactgatggaggagaaaagcacctctgtaaatgtaggaggtggtggtgtaaacgtcaatacaggaaaagggaagcctgggggtgacacccatgtgaacgttggaggcaaaggagttggagtgaacacgggaaagccagggggtggcactcatgtgaatgttggagacccttttaattacctatatgcagccagtgaaactcaaatccatgaagacccgaatgtggctcttttctttctggaaaaggatatgcaccccggggcaacaatgagcctgcatttcactgaaaatacagagaaatcagctttcttaccttatcaaactgcccaaaaaataccgttttcatctgacaagttgccagaaattttcaacaagttttcagtgaaacctggatcactgaaggcagagatgatgaagaacacaattaaggagtgcgaacagccagcgattgaaggagaggaaaaatattgtgcaacctcactggagtcaatgattgactatagcatttccaaactagggaaagttgatcaggcagtctcaacagaagtggaaaaacaaaccccaatgcaaaagtatacaatagcagctggagtgcagaagatgacagatgacaaagctgtagtgtgccacaagcagaattatgcatatgctgtcttctattgccataaatcagaaacaacaagggcttacatggttcctttagagggtgctgacggaacaaaagccaaagcagtagcagtctgccacacagatacatcagcatggaacccaaagcatttggcttttcaagtcctaaaagttgaaccaggaaccattcctgtctgccatttccttcctcgggatcacattgtttgggtccctaagtaaaagtcctgaagagtagattcatacactatagtttcttcacagtgtgcattaaaacagcttaaagcaatatccagtttgttctataataatatacccacaagtttagtcatgtaaaatctatccatgaatcatgttcttagtaatggataaaatgatattactttctgtatcacaagggtttggtgataaatgtattagtattttaagtaacttttcagaaaaaaaaaaaaaaaaaaaaaacggccgaaaaaaaaaaaaaaaaaaaaaaaaaaaaaaaaaaaaaaaaaaaaaaaaatattaaaataaa

SEQ ID NO: 12793 - DNA, 513 bp, Gossypium hirsutum
  unsure (1)..(513): unsure at all n locations
  Clone ID: uC-gsflnu33B082h02b1
tttcttttacggcgcagagccatgcccccactggaggtatcactataactgacggcggagatccctacaggttttacaggtggaatgtgtacgtacggtgacatttaccctctaggcggtcgacaaacgggtcttctcataaatgggcaattcccaggccctgatattcactctgttaccaacgataacctcatcatcaacgtctataacaactaaacgaatcttttctcctgtcctggaatggagtccaacaaaggaggaactcgtatgaagacggcgtgtttggcacaacctgccctatttcaccaggaaagaacttcacatacatgcttcaggtgaaggatcaaatagggagtttctattactacccatcacttggattccacaaggcagctggtggttttggagggatcaggatccttaatcgtccacgaatcccagtccccttccctgacccggncggagattacactgtgctcattggcgattggtacaagtccaatcacacggttt

SEQ ID NO: 12794 - DNA, 497 bp, Gossypium hirsutum
  Clone ID: uC-gsflmaxxa097e09b1
tcttttacgcgtccgtgaagatctattttttggggggttttttgaaggcaaaagctaaacaatggggtgctcattttctggtttgaatgcattgtacgatgccgttaatggcggaggggacgtttggatcaacgagaacaggttcaagatcgtgaggcagctcggtgaaggtgggttcgcctacgtttacctggtgaaggaagtcgtatccgattcctcttcagctttggccagtggcttagccaaaaaagtcaaggacccttcacatctttctgatgatagaacttatgcaattaagaaagttcttattcagaataatgagcagttggatttggttcgagaggagaaccgtgtttcatccttgtttagtcatcctaacctgcttccgcttcttgatcactttatcatttctgttaagcctacacaagaaggatcatggaatcatgaagcgtatttactatttcctgttaatttggatggaaccgtacttggacaat

SEQ ID NO: 12795 - DNA, 404 bp, Gossypium hirsutum
  Clone ID: uC-gsronu33B019f07b1
ataatcatggacagccatatatgtggcacttgacaacgtggggatctggaacttgaggtctgagtactgggcaagacagtaccttgggcagcagctttacttgcgtgtatacacagattcaacatctctcagggatgaataccccatccccaagaatgctctcctctgcggtagggcagctggccgaagcacccgaccgctctaagccaccataggataaggaacgttgggtggtggatggatgaaagatgattgaagagagtaggagttttgcctcttaatctcaatgtatatatcattaatatttttattattgctcattttttctgttgctaggcatgtaatactttttgtaaaacccataagggacttttaattttaggggttcaatttttttttctttt

SEQ ID NO: 12796 - DNA, 618 bp, Gossypium hirsutum
  unsure (1)..(618): unsure at all n locations
  Clone ID: AI726957.1
ctaacttttagattccctttccattgcactgctctttctttctatagaattagtcactcctgttctagatgaaggttctctccccaattcttgcttgcctagcgcttgctgtggtggtaagccatgctgctctctcacctgagcaatattggagctataagctgccaaatactccaatgccaaaggctgtcaaagaaattctacatccagcccattttggtgtatttgcagaactgatggaggagaaaagcacctctgtaaatgtaggaggtggtggtgtaaacgtcaatacaggaaaagggaagcctgggggtgacacccatgtgaacgttggaggcaaaggagttggagtgaacacgggaaagccagggggtggcactcatgtgaatgttggagacccttttaattacctatatgcagccagtgaaactcaaatccatgaagacccgaatgtggctcttttctttctggaaaaggatatgcaccccggggcaacaatgagcctgcatttcactgaaaatacagagaaatcagctttcttaccttatcaaactgcccaaaaaataccgtnttcatctgacaagttgccagaaattttcaacaagttttcagtgaaat

SEQ ID NO: 12797 - DNA, 582 bp, Gossypium hirsutum
  unsure (1)..(582): unsure at all n locations
  Clone ID: AI726682.1
ggagagagagagcttgttaagatccgccatttttacgtttctcaattccaacacacccaaaaaagaaaaaaaatatgagagatctgaagatgtaaaaggaatttttgtgcaagtgaaaggtataaggggaaaacaatggggtgtacgttttcagggtttaatgtcccgtaccaaacgctgtctgggaaatgctacatccagaactgatggaggagaaaagtacctctgtagatgtaggaggtggtggtgtaaacgtcaatacangaaaagggaaacctgggggtgacacccacgtgaacgttggaggcaaaggaattggagtgaacccaggaaaccccncgggtggctcacaagtgaattatcccaacccatatagttctcattctgaatactgaacagttcgaatcggttcgggaggagatccgtgtttcatccttgtttantcaccgtaatcttcttccccttcttgatcatgctatcatttctgttaaaccctacacaagaaggtatcttggattcncaaagccatattaaccatttccccgttccattgggaatggaactttactggaacattttcat

SEQ ID NO: 12798 - DNA, 688 bp, Gossypium hirsutum
  Clone ID: AI726131.1
cggccgtgtcaacaattagtcactcctgttctatatgaaggttctctccccaattcttgcttgcctagcgcttgctcttgtggtaagccatgctgctctctcacctgaacaatattggagctataagctgccaaatactccaatgccaaatgctgtcaaataaattctacatccagaactgatggaggagaaaagcacctctgtaaatgtacgatgtggtggtgtaaacgtcaatacaggaaaagggaaacctgtgggtgacacccatgtgaacgtcggacgcaaatgagtcggaatgaacacgggaaaaccagcgggtggcactcatgtgaatgtcggagaccctcttaattacctatatgcatccagtgaaactcaaatccatgaagatcccaatgtggctctttcctctctggaaaatgatatccaccccggggcaactatgatcccccattccacctgaaaatacagataaatcacctcttcttaccttatcatactgccccaaaaataacgttcttctctcacaacttgcccaaaattttcaaccacttctccactgaaatcctgcatctctgatagcttagattattaataacacatttcatgaatgttaacaccccctcaattaacgacatgaaaaaccggttgttggttgttctgcattccttgaacccactcacatccc

SEQ ID NO: 12799 - DNA, 323 bp, Gossypium hirsutum
  Clone ID: uC-gsflnu33B076h08b1
tcggaagagtgcaaagcctacaacccacaacatctacaacaagaagagatggcagcttccgcggtggctatggacggattggctgcatccgctctccgctccgttctccagagagtccaccagaccgccgagcggtgtggtcgtgcaattcccaggccctgagatgcaccctgttaccaacgataacctcatcatcaacgtctataacaactaaacgaatcttttctcctctcctggaatggagtccaacaaaggaggaactcgtatgaagaccgcttgtttggcacatcctgccctattccacccggaatgaacttcacata

SEQ ID NO: 12800 - DNA, 334 bp, Gossypium hirsutum
  Clone ID: LIB3197-019-Q1-M1-F7
ctgacagaaaaattgctgatagatgtactagtataaaacagggtcatcagagaacatagtcatgcaagctgttaatatcttgatgactgatttttacatgtttaagtcgcaaaagtggtcttgaaatgaattatatagtttcgtattggagctataagctgccaaatactccaatgccaaaagctgtcaaagaaattctacattcagaactgatggaggagaaaagcacctctgtaaatgtaggaggtggtggtgtaaacgtcaatacaggaaaagggaagcctgggggtgacacccatgtgaacgttggaggcaaaggagttggagtgaacac

SEQ ID NO: 12801 - DNA, 232 bp, Gossypium hirsutum
  Clone ID: LIB3189-006-P1-K1-G3
gccgcttcactcggcggtagcattgttttatgccgccgcttctcttttcgccattgctggcgccgaagatccttatatgttctacagtgtaggttgcctagcgcttgctgtggtggtaagccatgctgctctctcacctgagcaatattggagctataagctgccaaatactccaatgccaaaggctgtctttgaaattctacatccagaactgatggaggagaaaagcacc

SEQ ID NO: 12802 - DNA, 1036 bp, Gossypium hirsutum
  Clone ID: GOSHI-09MAY01-C9385_1
ctccctttgggttctggggcctcgccacgtttaaggtatcataagcttgatctcgaatccaccccgccggtttatcttttcactcactctgttggctaagccgcttttctagggttcatttatctttcgcctccctctcttttcttttttcaatcccctccttctttcaggtaaaatgcaacgggcagttcgagctttttcggtgcacggaaatactgtgaaaaatgcgatcttgcatcgcattcgggttgtcaatccggttatacgacccgttatgttttccagatcacttacatctgctagtatggaagaacatggcttcgagagcaccactatttcagacgttttgaaagccaaaggcaaaggtgcagatggatcctggctttggtgcactacggatgactctgtgtacgatgctgtgaaatcgatgactcaacacaatgttggtgctctggtggttgttaaacctggagagcagaaatcaattgcgggtatcatcacagagagagattatcttaggaagataatagtacatggaagatcatccaagtcaactaaagttggggacatcatgactgaagagaacaagctcatcacggtcacacctgagaccaaagttctgcaagcaatgcaattgatgacagaaaaccgaatcagacacattccagtgatcaatgagaaggaaatggtaggcatggtttccattggagatgtggttcgtgctgtggtgagcgagcaccgtgcagagctggaccgcttgaatgcttacatacagggaggttactagatgatgatgatgatgatgatgatgatggaatatgggtatgtttcacttgttggacttaagcaagcaagcaaggggagagcttgcaaatatgctatgttttcgtggtttttctgtgaatatgcaagtgatgttggaataattaccatgtggactaagtgtttgacaataatcattctcatgttgcttccttcctatttgactaggaaagtggcaaggcaaccttgatcaaaaaaaaaaaaaaaaaaggaa

SEQ ID NO: 12803 - DNA, 397 bp, Gossypium hirsutum
  unsure (1)..(397): unsure at all n locations
  Clone ID: LIB3166-013-P1-K1-G3
cccacgcgtccgaaatcgatgactcaacacattgtcatcctggctttggtgcactacgggggagtctgtgtccgatgctgggaaatcgatgactcaacacaatgttggtgctctggtggttgttaaacctggagagcagaaataaattgcgggtatcatcacagagagagattatcttaggaagataatagtacatggaagatcatncaagtcaactaaagttgggacatcatgactgaagagaacaagctcatcacggtcacacctgagaccaaagttctgcaagcaatgcaattgatgacagataaccgaatcagacacattccagtgatcaatgagaaggaaatggtaggcatggtttncattggagatgtggttcgtgctgtggtgagcgagc

SEQ ID NO: 12804 - DNA, 750 bp, Gossypium hirsutum
  Clone ID: GOSHI-09MAY01-C9365_2
cccaatgttgatttggaagctattgcaaatatgactgatggatactctggaagtgacttgaagaacctttgtgtgactgctgcacattgtcccataagagaaattttggaaaaggaaaagaaggagagagcgttggctgcagctgagagtagacctttgccttccttgtataacagtgctgacattcgttctctggaaatggatgattttaaatatgcacatgagcaggtgtgtgcaagcgtgtcatcagagtctacaatatatgaatgagcttcttcaatggaatgagttatatggagaaggtgggtcaagaaagaaaaaacttcttagctccttcatgtagaagagaggtatcgttatttatttatagccattcctttttcccatttcattcttggatgtcaccataaaaggtggccaagttgagaaatctgtttgaggaatccaatttgcaggtcccagcttccttgtgtatataggttttcataattttcagggtcttgatgttagcagttttagaatgtttatcgagcaggtttactttgttaaaagcatttttcctttctcttttgcttatttcctcaagtgacacctaacttctctgcctgtacagaaaagtaacaaattgagcaatgaagtaattctttgtaattttataactgtgatgccagtccttggaaatgatatataaatataggtggtttttgggtttaaatataaagaacaaaaaaaaaaaaaaacaaccaaact

SEQ ID NO: 12805 - DNA, 868 bp, Gossypium hirsutum
  Clone ID: GOSHI-09MAY01-C9365_1
ggcaaaacgatgcttgcgaaggcggttgcaactgaagctggtgcaaattttattaacatatcaatgtccagtattagttcgaagtggtttggtgaaggagagccctcgcgcccggccgttttctctctggccagtaatattgcacctagtgttatttttgtcggtggggttgatagcatgttaggaagaccagagaatccaggtgaacacgaggctatgcgtaaaatgaagaatgaatttatggtaaattgggacggtcttcgtacaaaggataaagaacgagtgttggttcttgctgctactaaccggccatttgaccttgatgaggcagtcatccggaggcttcctcgaagattgatggtaaatttgccagatgctccaaacagagaaaagattttaagagttatattggccaaagaggatttgtcacccaatgttgatttggaaactattgcaaatatgactgatggatattctggaagtgacctgaagaacctttgcgtgactgctgcacattgtcccataagagaaattctggagaaggaaaagaaggagagagcttcagcagcagctgagaatagacctgcacccaccttgtatagcagtgctgacgttcgacctctgaagatggatgattttaaatatgcacatgagcaggtgtgtgcaagcgtgtcatcagagtctacaaatatgaatgagttgcttcaatggcacgagttatatggagaaggtggatcgagaaagaaaaaacctctgagctacttcatgttgaggagaggaggtatctttgtgtataggcgtagcttcatcattcctttttcatttcattcttcattggcgccattaaggtggccaagttgagagtgac

SEQ ID NO: 12806 - DNA, 687 bp, Gossypium hirsutum
  Clone ID: GOSHI-09MAY01-C9335_1
caatatcccattctctttgtcttttagatcccagcgactccaaagcatatctgggcaatgaatccttccaggtcctgtacaccaccgtggctaacgaaatctggaggattctacccacatcagctttagtaaagttcgcagttcctaaaacccgcgcatcatctgtcactgagattttctcccttttacccactctctagcacaaccctttctgcaagtcctttcgttgccgatatactctgccaggtataagaagatcaagaactaaagaaatcaaatttagatcggggaaaaatgaaagtggtcgactagttgccctgttccattttacatcgtccgagattttagattcaagtttcaagctcggggatcgtcagcaaagtctatcacactattgaccgcttttggtatttataaagttgcattttggaactatggcatgtgtaggctgcaatatatttttggaaatgttgaatttggttatgtaattaaagccatgctaatatagcttgctatttttgtttggatttagttttatgggtgcttagttataaggtttagtaagtttggtttagaaatttggttatgcttgataatggtttaaattcgtttagttaaagtgagtagtactatgaatggatgatgtttgtggtaagtatttcatgaattgaaaatggctttaatctt

SEQ ID NO: 12807 - DNA, 426 bp, Gossypium hirsutum
  Clone ID: LIB3166-013-P1-K1-B8
cggacgcgtgggtcaatatcccattctctttgttttttagatcccagcgactccaagagcgtatctgggcaatgaatccttccagatcaagaactaaagaaatcaaatttagatcggggaaaaatgaaagtggtcgactagttgccctgttccattttacatcgtccgagattttagattcaagtttcaagctcggggatcgtcagcaaagtctatcacactattgaccgcttttggtatttataaagttgcattttggaactatggcatgtgtaggctgcaatatatttttggaaatgttgaatttggttatgtaattaaagccatgctaatatagcttgctatttttgtttggatttagttttatgggtgcttagttattaggtttagtaagtttggtttagaaatttgggtatgcttgataat

SEQ ID NO: 12808 - DNA, 782 bp, Gossypium hirsutum
  Clone ID: GOSHI-09MAY01-C4965_1
cagagatgaagacccagaaattctcaaatttcataaatgcatttcaattgatagcaatgtcacatgatctggatttatcaggtctctttgaagggcaggatggcaaaaggcagagaaccacaattggatccaagcatacagttaatgaaaccataaagaaaatagaagccgctgcaatggatgtgagtctgtcggttgaaaggatgaatagtttcaaggtaattgtggttgctccaacaaattgtgttgtagaaatatcaaaatcggcaggagaaatagcagtttacaaagagttctgcaagagtttgtcaagtctgctgatagagaaatcagatgcctcatcacaaattcaagggtccaagacagtcaccaacagcactagtattctaatgaatgaatgctccaaagaagaaaaagacagaacagaagaccagcgaggatatttctcctcttgaagatcgggttaattaatttagtttcaacttccatcctttcagtatcctgagtaaattccccaggattaatagagactcgtgaacacaatctgtctcaacagcaggaactatgagaactcaaaattactgctcttgggcatcattcttcacccaatacgaagttcaaacaacgtcatctgcacagctatgttcatgttttatgtgaaggttttgtccttttactttctcctctcttaaattagacactgcaccatatgcttccaagatgtatattagagggtatgttggaacaatgaacaaggatgaaagaaacaaaacaatttcttg

SEQ ID NO: 12809 - DNA, 535 bp, Gossypium hirsutum
  Clone ID: GOSHI-09MAY01-C4935_1
caagaacccaaccttctccaacaccctttgagaccctacattttctacctctaccaaagcttcagcccctgacgaggccttggaactctgtgaaggcattggcaaccgccctcttcaacgcagctgtagcaatcccttgtccccggtaccctgcactcactgcatacccaaggcgagctctgcttttatcattgccggatcctggcttgatcgaaacgtatccgatggaacgatcgtctaaacaaatggagcgacgataagtttggggtatagcaactttctggagatacgacaaggcctcttccctggaagtgatggtgttccatctgagataacgagtaactttgtcgtcgcttgcccattttaggaagtcgtcgacgtcggggaggtggaatcgacggagggagattcttgatgggtccatttatacaatggttaaaaggagcgcttagcgaggattgaaaaaaaaaaatcccttcgaactttgtcaaattattttgttcataatgaatctactatttagtgcattgaattg

SEQ ID NO: 12810 - DNA, 571 bp, Gossypium hirsutum
  Clone ID: GOSHI-09MAY01-C4925_1
gcgtccaagctagatctgtgcttgtgttcacaccaagatccctttcaaaaaaaaataaaatatggaagctctagtgtctgaattcaccttcctgtgagatcaagcattacaagacaagaactttgatccatccaccatagaagacctaatgaagctgtttgagattgaatcatacaaggcatgggcagctatggagcttgaacaagaagaggaagtgaaagaagctgaaacaagcaggcagcaagctgagggttatcttgactcagtcatggaagctgcgatggatgagtttaggcggttggaggaggaaaatggaacgcatggcaaaggctgaactgaaggacctggaagacacagccgacaaggctagaaaaatgggaaacctgatggaaaaagctgccgctatcgcctccaaaaagtacgttgaggctgcacttaattctgctactgcttctatgaaatctgcttggaaaggactttcttctaaaaaggttcatccttcatgaaatgaagctcttgttgtatcttacatataatataattgaaataccccttgttctgggttttcttt

SEQ ID NO: 12811 - DNA, 785 bp, Gossypium hirsutum
  Clone ID: GOSHI-09MAY01-C4885_2
acggtgcttctacctttccacgcaatctcaactcccccccttttagagatcggataattttcagttctcgaattatttcccctctgtatttgtatgatagctgtctggttcaagactaacacttagttacttattcaagggttctatttgatcaagttttctaggactttttacattgcattatattgttcagtgctttggagctttgcatcaggatttgtcatctgattttctttgtacaagttaacaagtgacgattctatagttttcagttcgcgtctcacagagatacagattacagaagcctgcggtaggaaatatattcaaagttcagtgtcctgcatgttcaagatggctggtgttaaacgaagaataattactgatttggatgtccgtgctctccataaagaactggatgaagtctcatgtccaatctgcatggaccatccacataatgctgttctgctgctgtgcagctcgcacgacaagggttgcagatcttacatttgtgacacaagttacaggcattcaaattgcctagaccgatttaaaaaattcagggctaattctagtaatggaagtcaaaatctgaatgaaaccaatagcatggcaggaggatcagaagataatatccgagagccaactaggaatcttgattcacaaggagaaggtattatagaaatagcagactcttactccttccggggaagatctgaatccgaagatgtagatgctgagaattttaaatctagtttgaaatgccctctttgccgagggaacgtact

SEQ ID NO: 12812 - DNA, 1982 bp, Gossypium hirsutum
  Clone ID: GOSHI-09MAY01-C4885_1
ggaagtagttatgaaagaattaaaaaattttgattgcttgagctatacaattgtattctcatgtttatcaccaagtaatctgggaaataaatctcattgagcataaaaactttatgaaaaaagtactattcaaattcaattgattgttcaaacttcaaacaactatttctacctttgcctctatgctgcactatctgcatggttcctatgcatttttcttctctctattgatgattgataaaaattgtagattgatatatatcaaaattgacaatctcttctggtttttgtggcccgagtgcaggtatgatagctgtctggttcaagactaacacttagttacttattcaagggttctatttgatcaagttttctaggactttttacattgcattatattgttcagtgctttggagctttgcatcaggatttgtcatctgattttctttgtacaagttaacaagtgacgattctatagttttcagttcgcgtctcgcagagatacagattacagaagcctgcggtaggaaatatattcaaagttcagtgtcctgcatgttccagatggctggtgttaaacgaagaataattactgatttggatgtacgtgctctccataaagaactggatgaagtctcatgtccaatctgcatggaccatccacataatgctgttctcctgctgtgcagctcgcacgacaagggttgcagatcttacatttgtgacacaagttacaggcattcaaattgcctagaccgatttaaaaaattaagggctaattctagtaagagtccaatattacctcatcccttccccctaaaccctccgaattctagtgcttttgatttgaacttggcattaagaactgattttgttgaaggtaatggaagtcaaaatctgaatgaaaccaatagcatggcaggaggatcagaagataatatccgagagtcaactaggaatcttgattcacaaggagaaggtattatagaaatagcagactcttattccttccggggaagatctgaatccgaagatgtagatgctgagaattttaaatctaggttgaaatgccctcattgccgagggaacgtacttcgctgggaggttgtggaagaggccagaaagtatctaaattcgaagaagagaacttgttctagggaatcttgctcctactctggaagttaccaggaattgcgtcggcatgccaggagagtccatccgacaatacgaccttcagatattgacccatccagagaacgagcctggcgccgccttgagcaccaaagagaatacggtgacattgtaagtgctattagatctgccatgcctggtgcccttgtggttggagactatgttattgagaatggagataggttggcagctcgaagggagaatagcaccggtgaagcgagttcaccatggtggactactttctttctgtttcagattggttcagtcgacaatgttggtgaatcaagagccaggtccagggtttggtcaaggcatcgacaccctggaggagctgtatctgagcggaggttcctttggggcgagaatctcttgggtttgcaagatgacgacgatgaagatgatgtgcgtgtaataagtgatgtaggtgaagacgcatccccaagcccaaggagacgcagacgcctgacgcggtcaaggtcagatgaagatcagtcatgaaataaatcagatatttttgcaggtaagtcccagttgcttgacattatttcgaatgggatttatttcgaactgcttttccctgatccggtcggtagtattcatcccaagtagtatgcataagcttttgctggtctcagaatccaccatcttgtgggtttctagtatgtgtcatctggaattatgtattcagacttttatgtattctggctttagacaaatgtatttagatgtactgaagctcaaaccagttttctcttcactggtcctgcattactaaggagttttatactggc

SEQ ID NO: 12813 - DNA, 596 bp, Gossypium hirsutum
  unsure (1)..(596): unsure at all n locations
  Clone ID: AI054903.1
gttaagtctattttattcaattcaattctcattagacatttagtcagatttttttttctcttttacggtgcttctacctttccacgcaatctcaactccccccttttagagatcggataattttcagttctcgaattatttcccctctgtatttgtaaatcctcaccttttccgcatgttaatttgttaaattatttttcatgttttttgcttttttatttttggattgatgaactgattgatctctgttatatgaccaatagggtgctttgattttctgcctgtaattcataactgatgttgttggatcgtttatcctgataaagaggaatcttttgngtggtaggttaggtgtggatgnttttggggaattgtgggaaggattgggattttggataacatgtgngggngggttttgggatnttgatnttaagatactgaatcttcccgggggggggaaattaaatctggaatttgggaattgggaacacctataagactcatatgtccggggaacttgttttcattttagaagccactatattataatgatggatattatatcttactggaaattgcctgagtgagtttgtatg

SEQ ID NO: 12814 - DNA, 665 bp, Gossypium hirsutum
  Clone ID: GOSHI-09MAY01-C4815_1
ggcttgtgaccttctccacaagcttttactgtggggactcactgtacctgataagcacaaagctctagttgtgtcattaatggctgctgctgggtttttcagtagcagataacactgtgctctgttactgtaaagaacgattctctcttttctaaagtttaatggacacaattccaaggccttggaatagggcttgcaagctttctcaattttaccagtccaaaacttttggttgccttgttttttcaacttccctacaagtgcttgtctctctttcatgtcttgttcagacatcagtttgtctcttttgatgttctcaactctcaattcccataattcttctaatgctttctcagcttcctggctcttcagcttcaaaaacccaaatttgattttgtagtaatcttgcaacaatgtctgacttattgtttcccccaccattttgctttctccaaggcttctaagttcaactaaatcaacaagagacgatgctgcaatgtcaataacaccatatcttgtctctgggtctttgagaagcaacaagagacaatcaatggccatgttttgccagtcatctgaagatcttgaaacattgcaaaggctctccattacttgtcttgaatttgctacatttttcctttctgtttttgaggaacaaagagttc

SEQ ID NO: 12815 - DNA, 1464 bp, Gossypium hirsutum
  Clone ID: GOSHI-09MAY01-C4805_1
gttggctgctactagagaagttcaaagtttggtgaagttttatgaaaccacaaacaaagcagtggccgcggttgttcacaatttgcagaaagatttggaagataccagaagagtctccgagaaagctattgaagaaagagatgtatgtcaaagtagggttttcaagttggagagtgatgtagaagcactggaagaatcatacagagaagtgacgcataagatagatgattatcaagccaaagaggacatatggaaggaaaaagaggtagaacttttgtcattgtacaataatatgtcgatgaaagaaaaagaagccaaggagccgcttctatcagcaactcaattaagaactttattggacaagctaagtgtgatcgagattcctcttgtagagtctgaagacctcgagccccatagctcaactgatgttaagaaactgttttctattattaatagtttcgctgaattgcagaaccaaataaatttactttcttatgagaaggacgaactacagtctatgctttcacaacagagttttgaaattgagcatcttaaagaagaaattgagagacatgttagaaataagccagaattggaagggatgaaaatggagctgcctgaggctacatttggcctggaaaagattattgttggattgggaggtaaagagttgattggaagcccaaattctgttggtatgagagcacttttgcctgttttagaaaagcaggtgaatgccttgttattagtggctgaaagttcaaaatccagagcacaggaacttggtaccaagttgcttggaagccaaaatgccgtggatgaattgttaactaaggttaagttacttgaagattctcttcagggtaggactattcagccagaagttgtccaggatcggagcatctttgaagcaccttctgcatccacagggtcagaaatatctgaaattgaagatgtgggatcccacgtaaagaaaacagtatctcctgttccctcagctgctcacgtccgaattatgcaaaaaggatcagctgaccatctagcactcaatattgactcagaaactgatcgcttgatcaacagtgaggaaactgatgaggacaaaggtcgaatgttcaaacctcttaatacaactggcctcatcccaaaacaaggaaagtctattgcagatcgtgttgatggaatatgggtatctggtggccgagttctaagcagccgtcccagagtaaggcttggcctaattgcctattgccttcttcttcatttatggctacttgggaccattgtgtaacgaaggttgcaatcatcaagcctctgaaccaacgatgtacttaaaattgtatcatagacaaaatatcataatcaattctttccccatatgttttacgtttttacatcataggcggataggttgttagacatattttgaggaccgtatacatcctctgtgatggcatttttagg

SEQ ID NO: 12816 - DNA, 482 bp, Gossypium hirsutum
  Clone ID: GOSHI-09MAY01-C4835_3
cccacgcgtcccccctcgcccccgccgcgcgccgccaaaaaccatgtatcaccctcaagttccaggcgagcccacccaaaccaccacttccctcgtcgagactgccaccggcgccatccaaagcttccgccctatcaaacaaatccatcaacacctctgcgcatttcatttctatggcggcgacatgacccgtcaagtcgaagcgcaccatttctgcgcacatcaaaacgaagaaatgcgacaatgtctcatatatgacaccccagaagccgatgcaaagctcatcggattggagtacatcatatcggagaatttgtttttgacgttgccggacgaagagaagccgctttggcattcacatttgtacgaagtgaagagtggggtggttgtttatgccgcgagttccagggccgatcgagaggcaagatctggacaaagtttgccagacttatggggagaccatccatttttggcaagtcgat

SEQ ID NO: 12817 - DNA, 597 bp, Gossypium hirsutum
  Clone ID: GOSHI-09MAY01-C4835_2
cccacgcgttcgatcgatgtcaaatcatgcgcgggttccaggtcgatgcccactgtaaaccaccacttccctcgtcgagaccgccaccggtgccatccaaggcttccgccccatcaaacaaatccatgaacatctctgcgcgtgcgtattaatcttccttccctattccgtttcaatgttggggggaaagttaaatcatttgttgttgtagatttcatttctacggctacgacatgacccgtcaagtcgaagcgcaccatttctgcgcacatcaaaacgaagaaatgcgacaatgtctcatatatgacacccccgaagccgatgccaagctcatcgggggggagtacatgatatcggaagaatttgtttttgacgttgccggacgaagagaagccgctttggcattcgcatttgtacgaagtgaagagcggggtgttgtttatgccgcgagttccggggccgatcgagaggcatggtctggacaaagtttgcaagacttatgggaagaccatccatttttggcaagtcgataaaggtgataatctccctcttgggttacctcaattgatgatggctctcactagagatggtcagctc

SEQ ID NO: 12818 - DNA, 1038 bp, Gossypium hirsutum
  Clone ID: GOSHI-09MAY01-C4835_1
cccacgcgtccgcccacgcgtccgcccacgcgtccgcccacgcgtccgcccacgcgtccgcccacgcgtccggcaaccacaaagcgatgtcgaatcatgcgcaagttccaggcgagcccactgaaaccaccacttccctcgtcgagaccgccaccggtgccatccaaggcttccgccccatcaaacaaatccatgaacatctctgcgcatttcatttctatggctacgacatgacccgtcaagtcgaagcgcaccatttctgcgcacatcaaaacgaagaaatgcgacaatgtctcatatatgacacccccgaagccgatgcaaagctcatcggattggagtacatgatatcggagaatttgtttttgacgttgccggacgaagagaagccgctttggcattcgcatttgtacgaagtgaagagtggggtgttgtttatgccgcgagttccggggccgatcgagaggcatggtctggacaaagtttgcaagacttatgggaagaccatccatttttggcaagtcgataaaggtgataatctccctcttgggttacctcaattgatgatggctctcactagagatggtcagctcgatgaagaacttggtcgagatgtggagaagcgatttggggtatcatttgagaaagaaagggcgaagagagctgagttgacgggtccaacacatgggattcatccattggcaaatggtggtgggaaagggctgatccctaaactcagggaggtggattgtaagcctgctgattcagttccccgggtcttcgtttgaatcatcgtatcttttgagtatacgtttcttaacagcaattacgaggtgaaactgatgtgatcaaagaacagaatctaccattgtccctcatgtttatgttgttgtaattttgatatttgtgtgatgtactggatataaataacatattttttttttttttcaagtatttgttcttaattatttgtgtattttcgtatatgtatatatttaatatcaaatctattttgatatatctgatatttattctacc

SEQ ID NO: 12819 - DNA, 670 bp, Gossypium hirsutum
  Clone ID: GOSHI-09MAY01-C4535_2
tggaaaaaaaaccagagtgcaaactacgtcagaaaccccccaccccccgaaaaaaaaaagccgtacaaaaagaagaagaagaagaacaagcaattatgactttgggcttgatcaatgcgaacccagtagttcacgccaagaaagaacgagtcgttcgtaacgaagatcctcacggtgacgacgccgttgatccactcgaaatctatgatttcgtgagggatatcagagatcctgaacatccttattcattggagcagcttagtgttctttccgaggaatcaatcaccgttgatgagaagctcggccgtattctgataactttcactcccacaattcagcattgcagcatggcgactgtaatcggtttatgcctaagggttaaattaaaagaatgttttcctccgcattttaaggttgacattaaagtcgccccgggatctcatgctgatgaagaatcagttaataagctgttgaatgataaagaacgagtcgccgctgccttagagaatcctacccttcgccaactcgtggacgagtgcctttattccaatgaactttgaagccaagtactaatcttctaaagcttattgtacaggtcaaaaaacatcagcatctctagttcaataagaaataacatggttgcaatgtttcttctcatttgcagaatgta

SEQ ID NO: 12820 - DNA, 540 bp, Gossypium hirsutum
  Clone ID: AI732021.1
atggcgactgtaatcggtttatgcctaagggttaaattaaaagaatgttttcctccgcattttaatgtcaaccttaaaatgcggaggaaaacattaaagtcgccccgggatctcatgctgatgaagaatcagttaataagctgttgaatgataaagaacgagtcgccgctgccttagagaatcctaaccttcgccaactcgtggacgagtgcctttattccaatgaactttgaagccaagtactaatcttctaaagcttattgtacaggtcaaaaaacatcagcatctctagttcaataagaaataacatggttgcaatgtttcttctcatttgcagaatgtatatgcttgtgtgttgtcgttttactatgcagaagagtgcatgtgcatctaggatatctctatgtttttttttttaattattatttgtctccaatggcgttttttcatgtggctattcgtaacaatgaagaggatgggaaacttcggtttttttttttttttttttttttgtttgtaacaatgaagtgatgttccagt

SEQ ID NO: 12821 - DNA, 439 bp, Gossypium hirsutum
  Clone ID: GOSHI-09MAY01-C4445_2
tcgtgataaactcccaggacagcataagaaagagggagaggttacctccccaccaccagctgctgctgccccaactgagaacgaccaccatgagggagagacaaaagagaagaagggatttttggagaaaatcaaggagaaaattcctggttaccactccaaaacagaggacgagaaggaaaaagagaccactgctccccattaatgaatcaatataatgcatttcaagtaaaagatgtctatgagattgtgtggtttattaatttgttggaactgtttgttctctgtatttctttttggggttgcatacatcatataaatttctgcgtctgttttcatgattgtaagtaaaaagtaaaagggtatgtatatttaatgtttttaatgttattataataattaagaaatgatggtactatttcctttttatcaaaaaaca

SEQ ID NO: 12822 - DNA, 944 bp, Gossypium hirsutum
  Clone ID: GOSHI-09MAY01-C4445_1
cccacgcggccggccaactttgtacgtacaagtgaagtgatccacaatcttgatacggtaatacgttaggtagctttcagcatacttgttttgagtttagtggttgtagataaagaaaaaatggctgaggagcataccaaggttggtggtgaggaagcagtggagagcaaggagcgagggatgtttgatttcttggggaagaaagaagatgagaagcctcaacctcaagaggaggtggtcgccacccagtttgagaaagtcaagatagaagaggaacataaggaagatgagaagaaacacagtctcctggacaagcttcacctatccaatagcagctccagctcttctagtgacgaggaagaaggtgaaggcggagagaagaagaagaagaagaaaaaggagaagggaaagaaagaacaggacagtgcagtcccagtggagaagtgcgatgaggtagcaacagttcaccactcagagacgccggaaaagaagggtttcatggataagatcaaagacaaactcccaggacagcataagaaagatgaagaggacaccacccaaccaccagctgctgctgccccaattgagaacgaccaccatgaaggagagacaaaagagaagaagggatttttggtgaaaatcaaggagaaaattcctggttaccactccaaaacagaggacgagaaggaaaaagagaccactgctcccaattaatgaatcaatataatgcatttcaagtaaaagatgtgtagagattgtgtggtttatcaatttgttggaactgtctgttctctgtttttctttttggggttgcatacatcatataaatttctgcgtctgttttcctgcttgtaagttaaaaaagaaaagaaagaaaaaagaaggtatgtatatttaatgcttttaatgtcattataataattaagaaatgacggtattatttc

SEQ ID NO: 12823 - DNA, 378 bp, Gossypium hirsutum
  Clone ID: LIB3146-020-Q1-K1-G9
cccactcgtccagccaactttgtacgttcttgtgaagtgatccacaatcttgatacagggatacgttaggtagttttcagcatacttgttttgagtttagtggttgtagataaagaaaaaatggctgaagagcataccaaggttggtggtgaggaagcagtggagagcaaggagcgagggatgtttgatttcttggggaagaaagaagatgagaagcctcaacctcaagaagaggtggtcgccacccagtttgagaaagtcaagattgatgaggtacataaggaagatgagaagaaacacagtctcctggacaaagcttacctatccaatagcagcttcagctctgtaattacttttttttactttcttgcttactat

SEQ ID NO: 12824 - DNA, 603 bp, Gossypium hirsutum
  Clone ID: GOSHI-09MAY01-C4415_2
ctgggaactgttctctcgttcgacacaaagactgggaattgcacgaaaggctatgccggtttgtgcttctccaatgtggatctcattgcatcgttgactctgaacgaaaagggtgactctcttaacgcgtcatactatcatatagtgaatcccatgactaacactgctgttggcgccgaggtgacccatagcttctctaccaatgaaaacaccatcaccatcggtacacaacatgcattggatccattgacgatggttaaggcacgggtgaacaacgctgggaaggcaagcgcactaatccagcacgagtggcgccccagatccctcattaccatttctggggaggtggataccaagtccattgacaagagtgccaaggttggacttgctttggcactcaagccttgagctttataagagctctccatcttggaagagtacggcaaggtaagcttagaattttgaaatgaaatctgttgacactttttcatggcgttgccatagacacttatgtcaggggtccttttttctctttgtggcttaaaataagaagaaaacggaacaaaaagaaaaagaaatggcatgttggcttctttttgaaca

SEQ ID NO: 12825 - DNA, 1158 bp, Gossypium hirsutum
  Clone ID: GOSHI-09MAY01-C4415_1
gaaagttagggtttttggattctcctatttattttatccacctctgtgggtgtgcgcgtccccccgcttccccggccgcgtcgctgaaattccaagcaaaatatcatgggcaagggtcctggtctctacactgaaatcggaaagaaagctagagatcttctttacaaggattatcagactgaccaaaagttcactttgaccactagctctcccactggtgtttcaattacctctgccggaacgaagaaaggtgatcttttcttggctgatgttaatacccagctgaagtctaggaatgttacaactgatatcaaagtggacaccagctccaatctatttaccaccataacagttgatgaacctgcacccgggctaaaggcaatctttggcttcagagtccctgatcagaggtctggcaagattgaactccagtatttgcatgagtatgctgggattagctcaagcattggattgactgccaacccgattgttaacttctcgggtgtgcttggaacaaatgttcttgcactaggtaccgatatctcattcgacacgaagactgggaatttcaccaaatgcaacgcgggattcagcttcaccaatgcagacctcattgcttctttggctctgaatgaaaagggtgattcagttaacgcatcttactaccatattgtgaatccatcgaccaacactgctgttggtgctgaggtgacccatagcttctctaccaatgtgaacaccatcaccgtgggtacacaacatgcattggatccattaaccacaatcaaggcacgggtgaacaatgctggcaaggcaagtgcactcatccagcacgagtggcgcccgaaatcgctctttaccatttctggagaggtggataccaagtccatcgataagagccccaaggtcggacttgctttggcactcaagccttgagagcttaaaaaaaaaaaaaagaaggagctcattttggtaagggtatggtagacttgaaaagagttttgaagttttagtctgttattgacattcatggtgttgccatcttacctttcatgtcaatggtttttcatttaaaaaaagaattaagtgaaaaaaatgtgataactgtttttagtcattccttgtttaattgagggtgaagtacctttgatttgcccc

SEQ ID NO: 12826 - DNA, 428 bp, Gossypium hirsutum
  Clone ID: LIB3197-060-Q1-M1-H8
cccacgcgtccgggtgattcagttaacgcatcttactaccatattgtgaatccatcaaccaacactgctgttggtgctgaggtgactcatagcttctctaccaatgtgaacaccatcaccgtgggtacacaacatgcattggatccattaaccacaatcaaggcacgggtgaacaatgctggcaaggcaagtgcactcatccagcacgagtggcgcccgaaatcgctctttaccatttctggagaggtggataccaagtccatcgataagagccccaaggtcggacttgctttggcactcaagccttgagagcttaaaaaaaaaaaaggagctcattttggtaagggtatggtagacttgaaaagagttttgaagttttagtctgttattgacattcatggggttgccatcttacctttcatgtcaat

SEQ ID NO: 12827 - DNA, 465 bp, Gossypium hirsutum
  Clone ID: LIB3582-005-P1-K1-A7
gtggacaccagctccaatttatttaccaccataacagttgatgaacctgcacccgtgctaaatgcaatctttggcttcagagtccctgatcagaggtctgacaagattgaactccagtatttgcatgagtatgttgggataagctcaagcattggattgactgtcaacccgatagttaacttctcggctgtgcttggaacaaatgttattgcactaggtaccgatatctaattcgacatgaagactgggaatttcaccaaatgcaacgcgtgattgagcttcaccaatgcagacctcattgcttctttggctctgcatgtggttatgttctatatacctatctacggctgaacattccaaatgatataatctcaaagttagtaccttgtttgtcaatgcaagaatgaaaagggtgatgtagttaacgcatcttactaccatattgtaaattcatcgaccaacact

SEQ ID NO: 12828 - DNA, 404 bp, Gossypium hirsutum
  Clone ID: LIB3493-002-P1-M1-H11
gcaaaatatcatgggcaagggtcctggtctctacactgaaatcggaaagaaagctagagatcttcttatcaaggagcctcgtagttgctaaagaggcactcagaccactagctctctcactggtgtttcaattacctatgccggaacgaagaaaggtgatcttttcttggctgatgttaataccgcaagggaccaaagccaccaaagaagggccaacccgaagatgcagtgtatgactttgaagacaagatcaactttgcagttatcccttaccttcacggtggtcctcacaatcaccagattggtgtcctggctgttgtcttgaaacagtccatgacaatttgcatgagtatgctgggattagctcaagcattggattgactgccaacccgattgttaacttc

SEQ ID NO: 12829 - DNA, 400 bp, Gossypium hirsutum
  Clone ID: LIB3146-054-Q1-K1-A4
cccacgcgtccgctgaagtttaggaatgttacaattgatatcaaagtggacaccagctccaataacatcatactgcttgggacctgtcctatttggcggaaatgcttttcaattgaaggatctctttggttgattatttaccaccataacagttgatgaacctgcacccgtgctaaatgcaatctttggcttcagagtccctgatcagaggtctgacaagattgaactccagtatttgcatgagtatgttgggataagctcaagcattggattgactgtcaacccgatagttaacttctcggctgtgcttggaacaaatgttattgcacaaggtactaaacttgagattatatcatttggaatgttcagccgtagataggtatatagagtccatcgataa

SEQ ID NO: 12830 - DNA, 1059 bp, Gossypium hirsutum
  Clone ID: GOSHI-09MAY01-C4405_1
ggctgctatgccatcctctccggtggccttccgagaaatctgtcacctactgtgcagttcaagtcagagtacaggagtgctggcaatttggattctatgccagttaggaaggcaacgacaaacagcttgcaacagagtgatcaacctgcatcttcaagtacatcattccaaatggccggtatatcaaaatccgagattcagaaggctgcagctccaaaaccaaccgaaaaactaatgacctcacaagtacctgtcatgtcaaggccctcaagtgctcctctagttcctggtcctaggccaacaactcttgtttctacggttcaaactactccttttcttgctcgttccgttagtgcagctggccgtttaggtcctgacccgtcaccagctactagttatgttcctcagtcctacagaaatgcaataatgggtaaccatgtttcttctagctcagctggtttcactcatcccaactcccgtagctcaggagtgaattcgctgccagcatactcacaaccacctgccttggtatctgcaccggtttatataccccatacccccgataggatagagccaaattctgtccagtcgggctttccatttggcatggtaactagagataccttgccaagtgcacctcaatggttggagagttctcgaaggggtggaagtagaagtacgcactctgatccttcattgcttagtgagatccaaaatcttgacctgtacaagtccgaacgtaatgaaacccaggaacacgtctttgctgagcttcctgcatgtacatctggatatcattcccaaggtgtattggcagatgagtttccacaccttgatataatcaacgacttgcttgatgaagaaaacaatgttgggagagcagttagggtaggaacagggttccgttctcttggcaactgttcacatttatttctaccggcaatttcttttccttccaatttgggcatgtcgggtgagatgggatcctcgaatggcgcatgcaggtttgaccgagcgcacaagttcaatgatgatggattccgacaagggtacagtact

SEQ ID NO: 12831 - DNA, 536 bp, Gossypium hirsutum
  Clone ID: GOSHI-09MAY01-C4705_2
tcccagtgtaggtgatctcctatcgcactacaccattatatgatgtacataatatctcttctgaaatcaatgactgggacctcaagttcatgtttcttcaagaaactggatttgcttcgctccaagaactgcatcaagtcactggttgggcccccctcctcgtgctgcttcaagaaactggatttgcttcgctccaagaactgcatcatcgtttgcgaatgtcatgctctgccagtttcttttgaacataacaggatccgatgaatggataatcaacacggatcagtaacctcaggaagatcatgctggtgcatgatatgctaaggcatttcggtcgaaaatgtttatcgttttcggtgaccaaatccggcttgactgactaactgttagggtgatttttgatgttgtccagcagcattcctagttgtggaggaccatttttaaacagggccaattgtaggctttctacatgaaaattgctgcctttttcttcttgaatggattggtgatgtacatatatcattaccttagacata

SEQ ID NO: 12832 - DNA, 922 bp, Gossypium hirsutum
  Clone ID: GOSHI-09MAY01-C4705_1
ctctacacgaaatgggattccagaaaatatccgagcccctggttataatctggtttcacagacctcttcgatattgaatttccccatgaatcatgcttccgaactacctgttgattctttctccctcagaagtacaccgggaatgtctgatcacacatcaaaaggtgcttttcacgaagattttaactcagaaattaaaggatcagggggattcttgcctacttacgatgtatttaatgactatcaatataaatcccaaaattgggagctacagaatgcaggcatgatattagaagactctcagcattcaaactctcttcaaggcaaccttgatctcgcgcaatcggttttagttcaacaaggatttccttcgggccaaataaatggacaaaacaggagtgtacccattgtaagcaaggcgatgttctcagccggagatagtacagaacctgggaatctgctaaatgtcaatcatcatctcaacacaattcgtgctgaaaatacggttcgggtcaagtccgggagtgttgcagatgggaatccttccaatctatttgctgatcacttcggacaagaggatctcatgattgctcttctgaaacagcaacaaggcatcgcaccagccgaaaacgagttcgatttcgatgggtattccttggataatatcccagtgtaggtgatctcctatcgcactacaccattatatgatgtacataatatctcttctgaaatcaatgactgggacctcaagttcatgtttcttcaagaaactggatttgctttgctccaagaactgcatcatcgtttacgaatgtcatgttctgccagttacttttgaccataacaggatccgatgaatgataatcaagaaggatgagtaacctcaggaagatcatgctggtgcatgatatgcaaaggcatt

SEQ ID NO: 12833 - DNA, 559 bp, Gossypium hirsutum
  Clone ID: GOSHI-09MAY01-C4735_1
ggaagaaatggaggccaaataccatgaaaaggctatggagacaggttcattgattgtttctgcatgcgggttcgattcgattcctgctgaaatgggggttatgttcaatacgaagcaatgggtggctcctgctgtgccaaaccatgttactgcatatgtaagtttggagtctgataaaagaattgttgggaactttgcaacatatgaatcagcagttttgggtgtggcgaacatggataagttgcaacagttgaggcattccagacccaagaaacctaggcctgtgattcctggtccccgtcttcccaagggaccaactatcgaataccaggagaagattggtctcagggctttaaagttaccctcagcagacgctgtagttgttcgaaggactcttgttactctgatggagaacccccatggtctccctgggatcaatgagagtcctgaacatattggaaagagggaggcctactggtcatcagtgaagccagctcattttggagtgaacatagcatctaaatacctattaggcatctaccgaatactcggagttggg

SEQ ID NO: 12834 - DNA, 946 bp, Gossypium hirsutum
  Clone ID: GOSHI-09MAY01-C4695_1
atttatttaatggttaaaattcatgaaagctatgatagggtgaacagagtgtggggcactctagtcccgatcattcaactactccccattcagagagatggacaagtttccggcgtttcttcttcttccatttctttgttttttccactctttatttctttccgacgccgatgttactggaaattcgtccgatcccggcctaactctctccgccgactctctctgcgcccagcttatcgagcccaatggttatttctgcactgaacacactattcaaactaaggatggctatttattagctctccaacgcgtctcatctcgttctggggatcttaaagttcagcaaggtcatcctgttctgcttcagcatggattattcatggcaggtgatgcatggtttttggattccactgaacagtcgttgggcttcatccttgcagaccagggttttgatgtgtgggttggaaatgttcgtggaacacgttggagccatggacacatatctttgttaaatacagacaaggaattttgggagtggagttggcaggaattagctttgtatgatcttgcagaaatgttgcactacatacacgcaattaccagctccaaaatctttattgttggacattcacagggcacaataatgtctttggctgctctcactcagccagacatagtggaaatggttgaagctgctgctcttttgtctccaatatcttatttagaacatgtcagtgctccacttgtacttagaatggtcgcaatgcatctgcatcagatggttcttgctttggggttacatcaattgaatttcagaagcgatgtgttggttaaccttgtggattctttatgtgatgaccacgtggattgtactgattttctaagttctataacagggcaaaattgctgctttaataaaactcgcatgaacttctatctggaatat

SEQ ID NO: 12835 - DNA, 859 bp, Gossypium hirsutum
  Clone ID: GOSHI-09MAY01-C4655_1
ctttgggattggattgttggtatttggcaagatgtgtgtagcaattaaggatgatgaggttgacattgtaataggagctcttcgttcggatctgacaacatttatgaatgaatggagaccaatgttctctcgatttcatctcagtccggtcaaagaccctgatttgaaagaggaactcaaaatacctgaaggctttaaccttgatgtctacggaaagcccgacatagatcaagtggtgggttcttctacttcgattctcttctctggctattcctgcaggtattttggatatcttgtttctcggaaaaaatacattatctctgtagacgatgactgcctcccagctcgagaccctaagggctttttggtggatgctgttgcccagcatataagcaaccttaccaacccagccacaccattcttttttaatactttgtatgacccttatgctgaaggagctgattttgttcgtggctacccattcagtcttcggggtggggtgaaatgtgctttgtcatgtgggctatggcttaatctggctgatcatgatgcacctactcaagccctcaaggcaaggcaaaggaattcccgatatgttgatgcagttatgactgtcccagccaggtccctcatacccattagtggaatcaacatcgcttttgagcgggaggcagtaggacctgcattggttccagctctgaagttggctggggaaggtaagtgtaggtgggaaacaatggaagacatctggagtgggttgtgtgttaagatcgtatgcgatcatctggggcttggtgtgaaaactggactgccatacatatggagaaccgatagaggtgaccctatagcaagcttgaaa

SEQ ID NO: 12836 - DNA, 551 bp, Gossypium hirsutum
  Clone ID: GOSHI-09MAY01-C4185_2
agaaattggtggaattaaacattttatgtcgcatcacatattgatgatctaaatggcatggttaacggaggaatatactctcaacctctatatataacagttaacaattttatattgaaaatttaaatgaagttcaaaggttattttgggttcattgaacccaagctccctgttttgttgtaggtaatcgtccacctgctaagattcctgttccattgccaccatctcgttcaacaaagagtgaggagtcattaagtcggccactgcagcttagtgaacagggccgcattcttgaagcggctattgaggcagcagtaaatgctgtaatgggtatgagggacagtttgaatgactgggatagcaaagttggtgatggtgattgtgggtcaacaatgtacagcggtgcaacagcaatccttgatgatatgaaaaaatattatcctctgaatgatgctgcagaaacagtgaatgaaattggatcttctggtagaagagctatgggaggaacaagtggagtcctatataatatattttctaaggcagcatatgca

SEQ ID NO: 12837 - DNA, 628 bp, Gossypium hirsutum
  Clone ID: GOSHI-09MAY01-C4185_1
cggaaactaactatgttccaattacacgaggcaatagagtggtactcatgattaatggcttgggtgccactcctgtgatggaactaatgattgcagctggaaaaactgtccctaagttacagctggaatttggacttgctgttgaaagagtgtatacagggtcatttatgacctctcttgatatggctggattttcaatatctataatgaaggcagatcaaactctgttgcaacgcctggatgctcccactaaggctccacattggcctgttggttctgctggtaatcgtccacctgccaagattcctgttccattgccaccatctcgttcaacaaagagtgaggagtcattaagtcggccactgcagcttagtgaacagggccgcattcttgaagcggctattgaggcagcagtaaatgctgtaatgggtatgagggacagtttgaatgactgggatagcaaagttggtgatggtgattgtgggtcaacaatgtacagcggtgcaacagcaatccttgatgatatgaaaaaatattatcctctgaatgatgctgcagaaacagtgaatgaaattggatcttctgttagaagagctatgggaggaacaagtggagtcctatataatat

SEQ ID NO: 12838 - DNA, 520 bp, Gossypium hirsutum
  Clone ID: LIB3583-005-P1-K1-H8
cgtacacctgctaagattcctgttccattgccaccatctcgttcaacaaagagtgaggaggtaagttcagctatcaattactctatagaagagtaggaaaggacaggtaatttgttataggaaagtaaactaattaaagttttcatttaaagtaaaactaacatctaaactaattaaagttttcatttaaagtaaaactaacatctatttcatctagaacctagatattaggttttttagctgctatcactaaatcttcattctttgatgctaccattgatagatattgacaacagctaaccaattgcatgatattatacttgctagataggttatgactaccaacaaaagactacgtaatgacattataataagcactcattgtgtaccaaaaataaaaagtttgtgcactttgtatgtcttgtgtgtgaatacaaattggccaaaggtgactgcttcgactcgtcccagaataacaaatagaaatatggattacactaagaagctactagtattaggc

SEQ ID NO: 12839 - DNA, 816 bp, Gossypium hirsutum
  Clone ID: GOSHI-09MAY01-C4125_1
cattttcagtacttccccattaacactaaagcttcctgtttacttttatctcacttcagagacaacccttttttttttcctttctttcttttgttatcaaagattcaaactttgtgtgtttttttctctattctggctctcccaacaatggaagcttttagcttgcttaagtattggagaggggctggtggtggtagtaatggttgtgttaatgcacgttctgcagccacagccggcggcacgactacgattgtgacggcggtgagtactcgtcaggtggtggatacggatgatgatgatgacgacgatggccctttctttgacttggagtttgcggttcctgatgaggacgaaacagaggggagtgaagagaaaaaggaagaagatgaagatggtaatattgaaggtgatgaaagtgaggaacaaagtgatggtgacgatgcaaaatctgatgatggaagctctgatggtgatgatagagagttcaattttacactctcctctggttcaagcagcgacccttgtgatccaaacttaactctatctccttcagatgatttgttctttaaaggaaggctggtacccattgaagcaaactcttgtttggaatcaaagcctcctcaattcccagtttcattgttgaaatcggccaccaagtttcgagttttcttgttaaggttcaagaaatcgaagctcaactcaactgaaaaaacagagtcgggttcagctaatggacctgtttcagtccccacgactgcaaaaaaacagaaacaccccagagaaaacacaacagaacagcttttcacagtgaaattt

SEQ ID NO: 12840 - DNA, 1702 bp, Gossypium hirsutum
  Clone ID: GOSHI-09MAY01-C4095_1
ttctcttcgtccgcttggtcttaccttagtctcttcccttcgcatctcaaagcttcccattcacactcggttcttcgtttttgacgagctaactcactcagtcagttactcgttctctctttggctcactcgctcgatctctctctagatttttccgattacaaatggaggatttcgatatcccggcggcggaagacatgatgaacgaagatatggatcttcccgacgacagtcccattctgaaagtcggagaagagaaggagatcggaaatcaaggcttgaagaagaagcttgttaaggaaggtgaaggttgggagtatcctgaaatcggagacgaagttgaagttcattatacggggacgttgctggatggaacacagttcgattcaagccgtgatagaggcactccttttaagttcactctccgtcaaggacaagttattaaaggatgggatgaaggtattaagacaatgaagaaaggtgaaaatgccatctttaccattccccctgcacttgcgtatggcgagtctggttcaccaccgaccattccccccaatgcaaccctccaatttgatgttgaattgttatcttggacaagtgtcaaggatatttgcaaagatggtgggttatttaaaaagatacttattgaaggtgacaaatgggagaatccaaaggaccttgatgaagtgctcgttaactatgaagctaagctcgaggatggcacagcggtggcaaaagccgaaggcgtagagttcactgttaaggatggtctattctgtcctgctttggcaagggctgttaagacaatgaagaagggggagaaggtacttcttacagtgaagccacagtatggtttcggtgagaaggggaagccagccactggtgctgaaggtgcagtgcctccaaatgccacactcttgattactttagagttggtttcatggaaaactgtgactgaagtaactgatgacaagaaggttataaagaagatcttgaaggaaggagagggatatgagcgcccaaatgagggggctgttgtccaagtgaaattgattgggcaactgcaagatggtaccatattcttgaagaagggccacaatgaaggagaagaattgtttgagttcaagacagatgaagaacaagtcattgaaggtcttgatagagctgtgttgaatatgaaaaaaggcgaagtagcactgttgactattgcacctgagtatgcatttgggtcatccgagtcaaagcaggagttggctgtggtaccgccaaactctactgtttactatgaagttgagttggtatcatttgtcaaggaaaaagaatcatgggatctgaacacccaagaaaaaattgaagctgctggtaaaaagaaggaagaaggaaatgtattgttcaaggctggcaaatatgtgagagcttctaagacatatgagaaggctgttaagtatattgattatgatacttcctttagtgaagaggagaataagcagtccatggcgttgaaagttgcttgcaatctgaacgatgctgctttgcaaatgaaactaaaggacttcaagcaggctgagaaattgtgcagcaaggctatagatatatatagtggctacgttgaagcactgtatagaatggctcagcatacatcaatctggcatatttggatttggcggtacttgattcatgtaagctttgagctgacccggtt

SEQ ID NO: 12841 - DNA, 677 bp, Gossypium hirsutum
  Clone ID: GOSHI-09MAY01-C4045_1
taagattgcgaaccaatcttaatggagtcaaaagcactgttgcatccacagtttcctgccaatcgggaaacaagaacgactttctcttctggattttggcctgcttgcttccaagtttcctcggaacccttgttgcatacgttaacttccagttgtttaaggccattgtacgggtgcccctcttcatctattcacatcttggaatctttacaactatagcctcggaaggctttttaaaagtaatctgcgtcatttcttaaaagcagcatggtttcctctcacttatctagtttaaatgggtcccgcttgcacaaaggcttccagaatcagttgctttttcccaccggacaacctgataccccgacctctgatcatcttgagtttgatttctctgatgtgtttggacctgcttcagttcaagcctcaactgaaatcagcacagagattcccaaaaatctgattgtggcaactgaatcaaatgaactgctttatgatgatccagctgtcatctgtagccgctcccactccttggttggcccctcgacttatgttagccactcattgaaacatagcaagcttacattacgtgaaataggggattccttggaacttgtagaaggagctagggaagaggcttaagaggagattaggaaaccatcattggtggatgtttttcc

SEQ ID NO: 12842 - DNA, 448 bp, Gossypium hirsutum
  Clone ID: LIB3165-006-P1-K4-A7
gcgtccacgcgtacggaacgactctttctttgcgttgtctctgcagtccactaaagaggtgcgaaccagatcttaatgaattcaagaagcactgttgcatccacagagtcctgccaatcgggaaacaagaacgactttctcttctggattgtggctagcttgcttccaagtttcctcggaacccttgttgcatacgttaactttcagatgtttaaggacattgaacagtgcccttgaggggagatgtatcttcgagcttctttacaactatagcctcaaaggctttttaaagtaatctgcgtcatttcttaaaagcagcatggtttcctcacacttatctagtttaaatgggtcccgcttgtacaaaggcttccagaattcagtgctttttgtcacccgacaacctgatacaccgacctttgatcatcttgagatagatatatttttt

SEQ ID NO: 12843 - DNA, 1291 bp, Gossypium hirsutum
  Clone ID: GOSHI-09MAY01-C4035_1
tgtattttttcctctttttccctgcttccatcttctttcaccttttttttattttttctcttgaagaaagaaagaaaaaccctagaatccgtttcttgaaggtaattatttccaaatatggaaataaatagaggcgtattaatagtagttttaattgtagtttcgagtgctgggttgggtttagctggggattttgttcatcaagacgacgttgctccgaagagacctggttgtgctaataattttgttctggtaaaagtcccgacatggattaatggtttagaagacaacgaatatgttggtgttggtgctcgttttggacctactttggagtcaaaagaaatacatgcaaaccataccaggcttgcacttgcagatcctcctgattgttgcagcaaacctaggaatcagcttacaggggaggttattctggtgcatcgaggtaactgtagtttcacaatgaaggcccctcgcgcccgagaagctggtgcttctgccatcctcataataaacaaccaaacagaactcttcaagatggtttgtgaatcagatgctgatgtaaatataaaaatacctgctgtcatgcttcctcaggacgctggttccaatttggaaaattatataaataataacaccagggtttctgttgcgctttactccccaaagcgtccggcagttgatattgctgaagtttttctgtggctaatggctgttggtaccattttgcgtgcttcttattggtctgcatggactgctagagaagttgctattgagcaagacaagctactaaaggatgcatcagaagaatttctacaagtgggaagtgcaggttcaagtggttttgttgacataaatacaatgtcagcagttctctttgttgtgtttgcttcatgtttcttggtcatgctctacaagcttatgtcattctggtttgttgaggttcttgtggttctgttttgcatcggtggagtagagggcttgcaaacgtgcttggtgactttgttatcatgtttcaggtgttttcaacgctttgcagaatcatttattaaagtacccttctttggagctgtttcgcatctgacactggctgtctgtcccttttgcattacatttgctgttgtttgggcagtgtatcgtcgtatctcctttgcctggataggtcaagatattcttggtattgcacttataatcacagtccttcagattgttcgtgtgccaaatctcaaggttggaacagttcttttgggttgtgctttcttgtatgatatcttctgggtgttcgtttccaaat

SEQ ID NO: 12844 - DNA, 708 bp, Gossypium hirsutum
  Clone ID: LIB3583-003-P1-K1-C5
cggacgcgtgggctctttgaaagaaaaggaggaaaaccaataatcctcttatttcctatggtaaatctttctaaatatggaaataaattgggatgtatttatagtaattttagttgtagttttgagtgccaggttgggttcggctggagatattgttcatatcgacaacgttgctccaaagagacctggttgttctaataacttcgttctggtaaaagtcccaacctggattgagggtttagaagacaatgagtatgttggtgttggcgctcgttttggacctactttggagtcgaaggaaaaacatgcaagccataccaaacttgcacttgcagaccctcctgattgttgcagcaaacctaggaataagcttacaggggaagtcattctggtgcatcgaggtaactgtagtttcacagtgaaggcaaatgttgctgaagaagctggtgcttctgccatcctcataataaacaaccaaacagaactcttcaagatggtttgtgaatctgatgctgatgtaaatataaaaataccggctgtcatgctccctcaggatgctggttcacgtttggaaaaatatataactaacaccaccatggtgtctgttgctctttactcaccaaagcgcccagcagttgatattgctgaagtttttttgggctaatggctgttggtaccatcttgtgtgcctcttattggtctgcatgg

SEQ ID NO: 12845 - DNA, 379 bp, Gossypium hirsutum
  Clone ID: LIB3146-051-Q1-K1-G7
gaaaaaccctacaatccgtttcttgaaggttattatttccaaatatggaaataaatggaggcgtattaatagtagttttaattcgtacattcgagtgctgggttgggtttagctggtgatattgttcatcaagacgacgttgctccaaagagacctggttgtgctaataattttgatctggtaaaagtcccgacatggattaatggtttaaaagacaacgaatatgttggtgttggtgctcgttttggacctactatggagtcaaaagaaaaacatgcacaccatcccaggcttgcacttgcagatcctcctgattgtcgcagcaaacctaggaatcaggttttctaattctaatctttttaacaatgtattcatccaa

SEQ ID NO: 12846 - DNA, 1037 bp, Gossypium hirsutum
  Clone ID: GOSHI-09MAY01-C4385_1
atagagagcatgttgaggattggattcagaaacatcattaatggcttcatatgtagagcctcacttcctcagagcttttataacagggaattatcgacacaaaccggaaggctgaaaggcaaaatagcattgatcactggggcagcaagcggtatcgggaaggcagctgcagcaaaattcatcagtaatggtgccaaagtcgtcattgctgatatacaacaccaactagggcaagcaacggcgaatgagcttggacccaatgctacttttataccctgtgacgtaacgaaagaatcagatgtatccgatgctgttgactttaccatctccaaacacaaacgactggatgttatgtataataatgctggggtaccttgctacacgcctccgagcattgtggaccttgaccttgccgtttttgacagagttatgggcatcaatgtgcgaggagtcttggccgggatcaaacacgcttcgcgtgtgatgatccctagtagaactggctccattctgtgcacagctagcgtaaccggaatgatgggtggactatctcaacatacttacagtgtgtccaagtctgctgtcataggaattgttaagtccatggcagctgagctatgccagtacggaatccgtatcaactgcatatcaccttttgcagttccgactccatttgcactagatgagttgagcccgatttatccccaaattgatgccgagcagctcgtcaaaatgatacatagttttggtgggctaggcaaagcaacattggaaccaggtgatgtagccgatgccgcagtctatcttgcatcagatgatgcaaagtatgttagtgggcataatttggtggtagatggaggttttacatcatttaagagattgggacttcctaagagctaaagtcttataaatgctgcccaatggatatatcttggaaattgaagtacgtggtatatttcaagtttcttctaggttttgccagtctggggaacaacaattagactaaacacaaatgaatttcagtaccttgagatttt

SEQ ID NO: 12847 - DNA, 1214 bp, Gossypium hirsutum
  Clone ID: GOSHI-09MAY01-C4285_1
cagtcgcgtgggttttttttatctatatgcataggccttgctcatgatcatatctatatgcataggccttagcacatggcatttattcaattagaaaaaatttcaaaactcacatatcaaggctccatggttcaaggatctgcttagcatgttttccgcataaacatggcgattggaatcaacttcaaaatagtgcttatacaagaaattcaaatcaaaccctttaataatattaaaaaaaaaaccttcaatagcaagaaaaacatagagttaaaatacctaaaggaatttactccataaacgcaaacccataatcaacgacaataccgttttgccttcataatctattaattcatgcaattaggaatggcagaacggtaagcataaaagcttcgtatgtaaaagtcgcattaccactgtacatggcatccttctccttgaatttctcagttagtcctttaactgtaaggcagcactcgatgaagttgtcatattcaatggccttgtttttgcctccagttttatcaaactttgagacaagcaaatccaaaacaccaggagagactgaaaatccgagactcaaaagtgcttctctcagttcattggcatctattttgccactcctgtccctatcgaatctctcaaagatggccctccaattctgaagactatagaacactgaagtgaactccttcggaccgatctttctggtgttagtattagtgaagagatacatgagcaaacgaacagttctcaaactgaagctttggttatacgaagaaagcgccctttgcaactctttatcatcaataaacccacttccatcttgatcagccatttgaaagcaggcaacgacgttaggatctgtccccggtggaaatgccgacggcaacagagatgcgaacgggctcgcatagcctcctgcgggaggatagcttccgctgtgaactggaggagcaccaccgacgccatgcgcttggtgcttgtcctttggtggtttctcgcctggaggggcagagtagggagcagaaggtgcgccgtatggtgcagcggcgtatggagtaccgtacggttgaggtggcggcggtgctccagctgtgtatggagcggctgtgtaaggctgagctggtggggaaccgtaaccgtagccgggagggtgttgagggtatccaccggacatgtttagaattattttcccgaacagaaatgagcca

SEQ ID NO: 12848 - DNA, 539 bp, Gossypium hirsutum
  unsure (1)..(539): unsure at all n locations
  Clone ID: LIB3189-042-P1-K1-E2
ccttaaaaaccttccgggttacggttccggttcccaaccagttaagccttacacagccgttcaatacacagttggagcaccgccgccacctcaaccgtacggtactccatacgccgctgcaccatacggggcaccttctgcttccctactctgcncccttcaggcggagaaaaccaccaaagggacaaaagcaccaaggcgcaatggncnngtcggtggtggcttcnnctccagtntcaacaagccggaaaggctatttcctttcccgcagggaaggctttatgcnngagcccgtnntcgcaatctttctgttgcncnngtcggcattttcccaaaccggggaacagggatcnctannacgtccgttgcctggggctttcannaatggctgnnnatcaagaatggaaggtgnggnntttattggatgnnataaaggagggttgcaaaaggggcgcttttcttttcgtattaacccaaaggcttcaagtttgaggaactggttcggtttgcctcatggtattctcttcacttaatactaa

SEQ ID NO: 12849 - DNA, 249 bp, Gossypium hirsutum
  Clone ID: LIB3147-009-Q1-K1-C6
ggctgatcaagatggaagtggttttattgatgataaagagttgcaaagggcgctttcgtgcgtataaccaaagcttcagtttgagaactgttcgtttgctcatgtatctcttcactaatactaacaccagaaagatcggtcagttcccttttccttctacttttattgtaactctttcgatgcttttcggccccaattgcaattgaattattaggtcaattgattttgaaaaaaaaagcgaacatttgt

SEQ ID NO: 12850 - DNA, 809 bp, Gossypium hirsutum
  Clone ID: GOSHI-09MAY01-C4255_1
cggacgcgtgggcggacgcgtgggaaaaactttctgcagaactaaaactgaaaagccttcccaaactcagctcacacccacagaaagagagaggaggagaaaacataacttctagcaaactgggttgttgaaatggcatcgaagttgtgtgactcgtgcaaatcagcgacggcgactcttttctgccgggctgactcggcgtttctatgctccaactgtgactccaaaatccacgcggccaacaagctcgcctcgcgtcacgctcgagtttgggtctgcgaagtctgcgagcaagcgcccgctcacgtcacttgcaaggccgatgcagccgctctctgtattacctgcgaccgtgacatccactccgccaaccctcttgctcgccgacacgagcgcctccctgtaacccccttctacgactccgtcaattcagtcccagccgtcaaacccaacggagttgttaactttctggaggagcgttacttctccgacgtggacggagacgctgatgtcagccgggaggaagcggaggcggcgtcgtggctgcttccgaaccctaaccataaggctgtggacagcccggacgtgaactcggggcagtacgtgttctcggagatggacccgtttctggatctagattacgggcatggggatccaaaaatggatgcccaggagcagaacagctccggcaccgatggggtggtccctgtccaaagcaagaatgttcaagctccgtcggctaacgatcactgtttcgacttggacttcaccggatccaaatccttctcttatggctacaaccccaactt

SEQ ID NO: 12851 - DNA, 388 bp, Gossypium hirsutum
  unsure (1)..(388): unsure at all n locations
  Clone ID: LIB3165-023-P1-K1-E2
ccggggcggccccacgcgtccgcccacgcgtccgcccacgcgtccgaaaagatatcttcaagcaaactgggttgttgaaggggcgtcgaagttgtgtgactcatgcaaataaccaacggcgactgtttcttgccgggctgcctcggcggttctatgctccaactgggactccaaaatccaacccagcaacaggctcgcctcgcgtcacgctcgagtttgggtctgtggagtctgcgaggcagcccccgctcacgtcacttgcaaggccgatgcagncgctctctgtattaccctgcgaccgtgacattcactccggcaacccttnttgctagcccgacacgagcgcccntncctgtaaaccccctcttctacgacttccgtcaaattc

SEQ ID NO: 12852 - DNA, 769 bp, Gossypium hirsutum
  Clone ID: GOSHI-09MAY01-C4245_1
gagaactagtctcgagtttttttttttttttttcagtgcttttcttcggatcggccacatatcctgtgtccttaccggcgtcgacaagggtgtggccttcgttcagatggtttaagagctgttgtaattgtatcacttgagaggaactgttgcctgacttgattttgtaaatcttagtctcccctcgtagcatggacaacaccagcaatgatgatttcaccttttgtaaggttgggttaccgactgatcaaaatggtttggaggaaaagaatcttgcagctgatattggtggtattgccattaaagacgaaacctcaaactgcagcgatagtagcaagaatggtggttttccctggaaagataaacatccaaataattccacatttgtagatcaggctactgttggttctttgactttcaatgttattgatgcttcatgtttgaaatcatcaggtgaatcatcaagacaagtagcatatgtagatgcgggtgcttcagcagtgaagtcagaaaaaccaagaagttctaccagaaagtctgcacctcggaccaaggttccttttgagaagggatatagtcaaatggactggcttaagcttagtcaaactcatcctgaccttgcaggattgaaagggcagtcaaataggaggcttgtttcaatgagtgaagttaagcaaaatcaaaaagaaggttccatgtggactgttctgaaaggacgtgtctacaatatatctccataacatgaagtttcaccctggaggtattgata

SEQ ID NO: 12853 - DNA, 588 bp, Gossypium hirsutum
  Clone ID: LIB3828-006-Q1-K6-E1
cttttccagtgcttttcttcggatcggccacatatcctgtgtccttaccggcgtcgacaagggtgtggccttcgttcagatggtttaagagctgttgtaattgtatcacttgagaggaactgttgcctgacttgattttgtaaatcttagtctcccctcgtagcatggacaacaccagcaatgatgatttcaccttttgtaaggttgggttaccgactgatcaaaatggtttggaggaaaagaatcttgcagctgatattggtggtattgccattaaagacgaaacctcaaactgcagcgatagtagcaagaatggtggttttccctggaaagataaacatccaaataattccacatttgtagatcaggctactgttggttctttgactttcaatgttattgatgcttcatgtttgaaatcatcaggtattgccattaaagacaatcctcaaactgcagcgatagtagtaagaatggtgaatcatcaagacaagtagcatatgtagatgcgggtgcttcagcagtgaagtcagaaaaaccaagaagttctaccagaaagtctgcacctcggaccaaggttccttttga

SEQ ID NO: 12854 - DNA, 569 bp, Gossypium hirsutum
  Clone ID: LIB3828-006-Q1-N6-E1
gggaaacagaattcttttataatatcgaatgataagatttgtcccacgggccatagctacggatcttattgcatcctctactgcgcttacaataacaatagacaacatggctgagtaccaagaagcggttttacaatgtctgggtgcctttgccatcatccaaagtacaaaccagacatttttccagcaagaattcagcgtttacccaagcatggtatttgtcttatacacaagttaaggaaaataaatagcttatactttcaccaagtctggagcctttgtccaaggcaccaataccactgaaaaacatgaccctcatatatcttaagccttgctttcaagcatctccattgagtatggctgtatctaattaacaccaccaaattggaaaaagttaaatcctaatataatatgtttatttgaaattgtaaataactaagtactgtaatcctaatccaatcttatatgcaaacattattttaactgaaaaacatgtaaaaattgttgttacctcggtgctcaccacaaatagatttttttatttttttaaaaaaagaaaaagatactga

SEQ ID NO: 12855 - DNA, 396 bp, Gossypium hirsutum
  Clone ID: LIB3148-038-Q1-K1-D3
cccacgcgtccgcccacgcgtccgcccacgcgtccgtggcttaagcttactcaaatgcatcctgaccttgcaggattgaaagggcagtcaaataggaggcttgtttcaatgagtgaagttaagcaaaatcaaaaagaaggttccatgtggactgttctgaaaggacgtgtctacaatatatctccatacatgaagtttcaccctggaggtgttgatatgctcatgaaggcagtggggaaagactctacatctttattcagtatcctttttctttttttaaaaaaataaaaaaaatctatttggggagagcaccgagccatactcaatggagatgcttgaaagctaggcttaagatatatgagggtcatgtttttcagtggtattggtgccttggac

SEQ ID NO: 12856 - DNA, 670 bp, Gossypium hirsutum
  Clone ID: GOSHI-09MAY01-C4275_2
cccacgcgtccgcggacgcgtgggttctttctctctctctctctctctcttacattatgactatcctctctaatgctttggttggacccacaagtcttccattccaattatcttcttctggctcacatttaaagacagcagggggtgctagtcccacaaactcgtcattcaattctaatggcttaggaaaactgcatctttcttcctctagaaggccagtagtaacagttcaagcttcctacagtgatggtgaaagaccaagcagtgcaagcatctttgttggaggttttattttgggaggacttgtggttggtgcacttggatgtgtatttgctccccagatcagcaaggcagtagctggagctgatagaaaggatctaatgaagagactacctaaattcatatatgatgaagaaaaagctttggagaaaacacgaaagatactgaccgagaagattgctcagttgaactctgctattgatgatgtttctgctcagcttcgatccgaagatgctccgaatggagttgcggtgaactctgatgaaattgaaactgccatatgaatgggctaccttgttattattcagatgctgttttaacacttaactgatattgtcatcctcggtatgaaataatatgtgaatttattgtaattttcctgttttcaagt

SEQ ID NO: 12857 - DNA, 783 bp, Gossypium hirsutum
  Clone ID: GOSHI-09MAY01-C4275_1
cccacgcgtccgcccacgcgtccgcccacgcgtccgcccacgccgtccgcccacgctatttattttgtttccctcctcgttcaactgtctcgtttcatttcttaaaaaatgactaccctttcaaattctttggttttatcgacaaatcctccccttcaactattttctggctctcatgggagtgccagctccaccaacttggcattcaattctagtcatttaaggaaactgcatatttctacctctagaaggcctctcactgttcaagcttcatacagtgatggcgaaaggtcaagcagtgctaatgcctttgttggaggttttgttttgggagggctcgtggttggtgcacttggttgtgtatttgcccctcagatcagcaaggcactagctgtagctgatagtaaggaccttatgaagagactgcctaaattcatatatgatgaagaaaaagctttggagaaaactcggaaggtactgaccgagaagattgctcagctgaacgctgccattgatgatgtttctggtcagcttcgatctgaagatgccccgaatggagttgctgtaaactctgatgaaattgaagctgccatatgaattgccttacgaacggtggtttaactagtctgttattaagaaataatagggaatttgttgtaattttcctgttttctcgacaaaacagtgtaactctgtcatttgaatatgtggtgattggtgctaaaaacatgaatactttaaaaacttttgccgtacttgaaggtagatgctcagggttgcgac

SEQ ID NO: 12858 - DNA, 804 bp, Gossypium hirsutum
  Clone ID: GOSHI-09MAY01-C4265_1
gatgaatttggtactgaggctgcccagtttttgagtgaggagacactaggaagttcactgcaattcaaggcagtgatagaggaaagggatacttccgggcgtccggaaaagtcaaggggcagggaactggtacttgtctcgttgtaaccctctttaccgaggacccggaggatagcatcaatgcagcaatgctgaaggacggtcttgctaggttggagaagaggaagaaatgggaatcgaaggagagaaaagtgatgcttaataaattggaagagtgtcaggaggaagcgaaaactggtcggcgtggaatgtggcagtatggagatgtggagtcggatgatgaggatttacttccgccagttgcggctaagaaaaccggaggtcggcgttaggtattgtaatttttttatcaatcactttttggggttaaacatctaaagagttctaagttataggtgtggatcattctcgtttgaagagttacaagagctccccgaaagaaaaatctcaaccataacatgcttaaattttgactctttttttaaaatctttttttttttttacattacgagagacaatttttttaatacatgtttaaataaggtgaacagtagcatttctgttatgtttccatgtgggagaccgataggaacaatttttttttttcaaattcccgttggatagagtttttaatctatgtttattttggatatttctatggtacggaaattcctttttaattatttgtaagtattggtttgaatgtcagaatgcatttagtcaacgtaacagttcgccgagagt

SEQ ID NO: 12859 - DNA, 499 bp, Gossypium hirsutum
  Clone ID: GOSHI-09MAY01-C4215_2
tcgtccccgcgcccgcttcatttcttcgtcaccagaagaagaaaaagaaaaaaaacagtttccttagggtttctaggaaatttagagaatggatgattacacgagagaaatgatggatttgaaaaccctagttacacgaacccttgagaagaaaggggttctagctaagatccgggctgaacttagagcaagtgtctttgaagcaatagaagaggaagatcgagtcattgaaaaagaagaaggtttacctcctgcattattgagaagttgcaatgatcatgctaaacgacttcatgcttctcctttgggaagacttttaaccgcactaatatgcgagtacttagactgggcgcaactaaatcacacactaaaagtttatctgccagaatgtaatttgcaaaaggattcttggaaagctgagttggaagacttcagtggcaaaagtggttatgatctcaacagaaatgggaatagtggacctgtgcttttggatgttctt

SEQ ID NO: 12860 - DNA, 1117 bp, Gossypium hirsutum
  Clone ID: GOSHI-09MAY01-C4215_1
gcagcaccatgtaagaagacctaaaaaagttgggaggtttttttccccttaattttctagggaaacaaacaaaaccatggatgattacacgagagagatgatggatttgaaaaccctggttactcgaaccctagagaagaaaggggttctagctaagatccgggctgaactaagggcaagtgtctttgaggcaatagaagaggaagatcgagtaattgaaaaagaggagagtttacctcctgcattattgggaagttgcaatgatcgcgctaaacgacttcatgcttctccttctggaagattgttaactgcactagtgtgtgagtacttagactgggcgcaactaaaccacactctaaaagtgtaccagccagaatgcaatttgcaaaaagactcctggaaagctgagttgaaagactttagcgtcaaaaatggttatgaccttaacagaaatggagataatcctgtccttatggatgttcttgattgcttcttgaagtttgagaacttaacccaagcaagaggaagtggaaggagatcacaagaaattgagtcctcgtctagttcagagtctcgtaacacaagaagaccctcatcatctactgttgctgggggcttgcctccattgggaaggccggtccctgcctcgcagtcgtctgataggagagcaggctcctccatgtctggttacaggaaagaggagtatagttggagatatgatgatgacctcccagaagacgtgattcgagcttcagctgccctcgaaaatcttcagttggacagaaaggccaggaatctaacttcttcttggcggcatgctggggattcagtcagcggggatgacgacaaggttgatcatatgtagctgaacgacatctattgcaatccggcaagcctagtttagtgtcaaggtttcaccgatccgagtttttcttaaccacaaaaaacgggcagagtgaagttatcatgtaagttttaatctatatataattgtgatgtgatttaggtcctcacttttaagctttctttcctctctttcacttatttgtttttggtagacctttcattgtatgtgaggttttgtatggggatttagatcaaactatgttttgcaagc

SEQ ID NO: 12861 - DNA, 916 bp, Gossypium hirsutum
  Clone ID: GOSHI-09MAY01-C4235_1
ccccgcgtccgctattatttaaatttatttctttagtcttttaaaaaaaaaataagtgaatttctgcaaacaatccttctcccttattttgtaacactagaattcatagtgaaatatacctgaattttgttactagatgatggatcaaaatgagagcctccagcttggcgagctcgttgcctggacaagcatgaacaccgttgccaaacggcatgaaggtatttggttttggagctacctgcttaaatccatttccaggaaagcaaaaataaggcagcccatgagtccaaggcagagagagctatgtgttcaataccaggaattagcttcctgatggtatcaggtgctagtgagtattgaaccaacttccttagccgagtgtggtattcaccctggtgaaagaagagcgcccaagggccaatcatcatctccttgcttttggggtaagttggtttgaacaagtgagcatgagtcaccagcacgaacctcgcggcttcagggctagccaacatggcacaaggacaaccgagtattttgcgtttttgaatatttctccgtatctgttctgctctgtgagaaacaagctatggcggccttgagagtaaagttgaagagtttctccaatatatggccaacccattgaacctggtggaagcttatacctttctattggaaaccctcttttttgcttcctaagaaatggatatgaaagaagagttgagagaaagagaatcacgtatagtataataaaaacaatagtttccattgcaaaaaaagaaataatgtagtctctccccccccccctctctatttctctccccttgcttatccttaatttctctctttagccaatgagaatttgatgttgcagctagaaataggttataggaaaataaaaattgaaggcttagtgaaa

SEQ ID NO: 12862 - DNA, 583 bp, Gossypium hirsutum
  unsure (1)..(583): unsure at all n locations
  Clone ID: LIB3583-006-P1-K1-E11
tgaattcagatagaatattaaatttactatttgcagtgggntttgaatatctattattttattgctttaattggtgtatttcggatattcaaatatgttatcttcatctacttcattttgcatatatccaaattcaatatatcttcacatatctagctattatttaaatttatttctttagtcttttaaaaaaaaaattaagtgaatttctgcaaacaatccttctcccttattttgtaacactagaattcatagtgaaatatacctgaattttgttactagatgatggatcaaaatgagagcctccagcttggcgagctcgttgcctggacaagcatgaacaccgttgccaaacggcatgaaggtatttggttttggagctacctgcttaaatccatttccaggaaagcaaaaatagtaagttccgattgtgctgcttgtatgtgtacatatgtctatttgtcagtgtagtaaaactggtagaaaatngctataatcttcataagcaaaacagtaaccacctcaaatctagatggatcaaaatcatgaggatcagaaaagaaattctggattatgaatgata

SEQ ID NO: 12863 - DNA, 676 bp, Gossypium hirsutum
  Clone ID: GOSHI-09MAY01-C5915_1
gcaacccaaaacgaaagagaaagagagaaatcgagtagagatcgcctaaaagatagcagtgagtgagcacaacagaagagaagaataatggaggagataaaggtggatgaaaggaagcgttggcatgctgcggtagctcccaattcgctaagcaaatggctttggcatctccatttccttcagtcgatcatgctatctctgtagccaaggatatctggttcgacaaggttgatgttattggttggttggaagcatttgcagctcatcctcagattggagaatccccttcttctcataccaccagtgctcagtggagtaagggagaacaatcaactgctttagcaactgccactgattctgggttacaggaactatctgactggaatgctcgatataggcgaaaatttggacatgtatttctaatatgtgcctctgggaggagcgctgctgaaatacttggtgaattgaagaaccggtactcaaacaggcccatacatgagcttgagatagcatcccaggagcacatgagaataacagaattacgccttagaacgcttttctcagctagaacaaaagctgattcaacaggcagccagtattcaaccgcggtagcgagtaaagctgaaaaagaacgtgtgggcatagttggacagcatttaactgctcctttaaaggg

SEQ ID NO: 12864 - DNA, 314 bp, Gossypium hirsutum
  Clone ID: LIB3583-059-P1-K1-B1
gcgcggacgcgtacgcccacgcgtccgcccacgcgtcctaagtgtaacagttatccttgtaactgtaatgcggtgccagactacaattattctttgaatttctcctctctctaaattatgaactttttattagtctttgttgttaggtcacttgaaattattattatttatttatttatttacaggtggagtaagggagaacaatcaactgctttagcaactgccactgattctgggttacaggttgaaattatgcttcacttgaacagctaaactatctaggcactgaaaacatggctctcaccaaacattat

SEQ ID NO: 12865 - DNA, 776 bp, Gossypium hirsutum
  Clone ID: GOSHI-09MAY01-C5885_1
ctgcgaggtgccctggcacatttcttttacaacaatcctgcaattgtgtgcaatcaccacaaagactgtgtatggttccataccagatcctacacaattttgaacccggagttgattttatcgttgttgtagttgaaatgctcctagtctaaagacggtctttatctcaaagttaggtataatgctaaatgaagaaacaaaacacgagatgcatttgttttttgtcagattagaagggagtatagcaattttttagtggatttttgttttgaggtgcaatagttggttaagagatcacgtcttttcctcattgtaggggaatattcagcggaggatgcatgggagttcaaggaactagaagaagcaatcactaaaggttatttctagctgcatctccgttgtttcaagagtcctaccattgatgatcaatcagctccaatcttcaaatctttctcccccatctttgtttgtaacgattaaactgcaataatagttaacattaatttctttttggctactagttttattcttttgaaggcaaattttccaagttgtacagggcagagatgactgtctcacatgaatgcttaacgatctaaagcatttacaagtttatatagtttttaatcgtttacttatgttgataatgcgggctagggtgccaccaatgcctttctgagcttaagcctcaatcaacaccttcgccctttgttcatactgcaacgtttggtatgaaatgatttgcatcagaaggagaaacaaattaggaacttcat

SEQ ID NO: 12866 - DNA, 1148 bp, Gossypium hirsutum
  Clone ID: GOSHI-09MAY01-C5865_1
gtcatcgtggaaaccacttctttatccagaggagaagtgaggagtgtttcaattcagaactactagcttgtccagtggataatacatctgcaacaacagttcttattcctcacagggcaagtgtaaagattcagtatattcaactttttagtgatcatcttgctgtctctgagcgtgaagaaggtttgcccaaaattactgtttaccatcttccggaagttgaagagccactcgtaaatcttgaagggggtaaatcagttcaatttattgaccctgtatactcagttgatctatcagtatcacagttttcctccaccattttgcggttttcttatagctcattgcggatgcctaattctgtctacgactatgacatgaatactggggagtctgttttgaagaagattgaaactgttttgggaggctttgatgcatctaattatgtcaccgaaaggaaatgggctacgtgcttcagatggcactcaaattcccatatcaattgggtaccaaaagaatcttgtcaagcttgatggatctgatccaatgttgctttatggatatggttcatatgagatatgtatagatcctgactttgaggcatcaaggctgtctttattagatcgtgggtttatctttgcaatagctcatattcgtggaggtggtgaaatggggaggcaatggtatgagaatgggaaatttttaaagaagaagaatactttcactgattttatctcttgtgccgagtatttaattgaacagaagtactgttcaaaggaaaaattgtgcatagagggaagaagtgcaggtggattgcttattggtgcagttcttaacatgaggcctgatttgtggaaggctgctgtcgctggagtgccttttgtagatgtcctgactacaatgctcgaccctactatccctcttacaacttcagagtgggaggaatggggtgaccctcgaaaggaagagttttacttctatatgaactcgtattcccctgttgataatgtgaaggctcaaaattatccggatattctcgttacagctggcttacatgatccgcgtgttatgtactcagaacctgcaaagtttgtagctaaactaagggatatgaaaacggacgataacatgctgttgctcaagtgtgaacg

SEQ ID NO: 12867 - DNA, 927 bp, Gossypium hirsutum
  Clone ID: GOSHI-09MAY01-C5555_2
gggagctgttcctaggtacctgagacctggaactcgaggctttggggctgggcgtggtaatggtggtgctcctatcggtagtcatcttccacaccagcaaggcacacagcaaaacattggaactatgggatcttctttcaacttccctctggagaatccaaatagccagccatccgtgggtggtccattatctcagcctggatttgtcaacaatgtccaagggccgagtcaaactttccgtgatggattttcaatgggaggaatgtcccaggacttcttgggtgatgacttcaaaagccaaggctcacatgtcccttataacattgctgatttttctacacaggcttctcagagtggatatgctgttgattacgttacacaaggagcacagggcgggtttccagggaacttcctaaaccagaattctcaagctggatattctcgttttggttctggaaatgatttcatgtctcaggactacatgaatcatggatcacaaggcctgtttactcaggctggctttaatgacccttctcatgatgatgcatctcagagccactttggcgcggctaatcccaaccagcttcagtcccagggcttgatgaactctctctactcccagccctttgcccactacaacacacagccactaaacttgcagtctcctcaacagcagcaaccacagcagggccagggttcccaaaaccagaatcttcgctataatggttaataataaagatgtatttggctttgatgggttatggtctttgcaatcagcaacttggtttgtgctgtccttgtatgcccaaatatatccttctctcaagtgcaaaatgtttgccaggtcagttaacttcctgttcgtaacctgtaagatgattccagttgatggggaataaatataattggagtaaggattatatcatt

SEQ ID NO: 12868 - DNA, 1063 bp, Gossypium hirsutum
  Clone ID: GOSHI-09MAY01-C5555_1
ccttctcgcccgcccacgcgtccgtccccgcgtgcgcggaagcctaggctcacatggtccttataacattgctgatttttcaacacagggtggctatgcggttgattatgcttcacaaggagctcagagtgggtttccagggaacttcctaaaccagaattctcaagctgggtattctcgttttggtgctggaaatgatttcatgactcaggactacatgaatcatggatcacaaggcctgtttactcaggctggctttaatgatccttcacaagatgatgcatcacagagccactttggtgcggctaatcccaaccagcttcagtctcagggtttgatgaactctctctactcccagccctttgcacactacaacacacagccactaaacttgcaggctcctcaacagcagcaaccacagcagggccagggttcccaaaaccagaatcttcactataatggttaagaataaagatgcatttggctttgatgggttatggtcttttgcaatcagcaacttggtttgtgctgtccttgtttgcccaaaacatacaactccgaagatgcttaaccgtttgcctgttttgaggtcagttaaatttctgtccataacctgtaagatacaattccttatggtgggaataagtataaatagaagtaagagtaagatggttatggggactatgtgcaaatactggggagtgcatccagggctgtgaaaagaaaaggataacccccaaatacctgttttgaagaaatgttattgattcaaaagagcattacatggtaggttttgtcaaaagggttcgatattaaagatggcaggccgttggtttaacttatgggataaaaaacccattatagatacagagaggcagttacaggtgaagaaacattttgtatagcgtgctgctggggaatatcggctgaccctttcagcgcaacctgaaatgtaattatactctttaactaccgctagtagacgaggccaatatgttggaaagtgttcttggtgtttgttgacactttactttgcatataaaatgttgttgatggctttgtt

SEQ ID NO: 12869 - DNA, 940 bp, Gossypium hirsutum
  Clone ID: GOSHI-09MAY01-C5575_1
acgcccacgcgtccgctcaaactggccacctgtggattggaatactgctcctggtctcagtaagacaccggcgcctatgtcacaaccaatgaggggtgccaagcacattgattcacacactagcagtgatggtccagttgcaatagccactgatatgttcatggaagacaatacagaaacaacttcaccagttccaattttgccagactctgaaattttggatcatcagtatggcaacactaccaatccaactggttctggtgtgagaaccacatttggcacagttgattccggtgtgagaatcgcatgtgatcctgttgatttaagtctagtgtcggaaaaccctcaggtggtttcacttgagtgtgaccgagagaaatcagcttaatactggattcgtttcatctgaatttagccagagagatcagcttcttactggcacacccaatacagctcaagctttgctaactgggaaactgggtgagcttgcagctttcaaatactttaccggcacctcgggtaaaaaagtgaagtgggtgaataaagataatgagactggattaccctatgatctagtggtagaagatgaaagaggtcatatcgaatacgttgaagttaaagccaccagatctgcaaggaaagactggttcaatatatcagcaagagagtgggaatttgctgctgaagaaggtgattctttcagcattgcacatgtattcttattaagcgagaaggatgctgagattgcagtatatacgaatcctattagactttgccagcttgggcagctccaactggtcgtgttgatgccgacgcaccggaaggattcacctatcgtatcgtaactgggcaccattttatgccattatgtggattaaattagcaatgtgatctgaggttacctgctggaatgacctttgggttggtacgttcgatgctg

SEQ ID NO: 12870 - DNA, 361 bp, Gossypium hirsutum
  Clone ID: LIB3583-027-Q6-K1-B3
ttcttccgttgatctttgttagagattagctttttaatttttcattatgcgaaagataaccatcggtatgaatggatttggaaggagcgcccgtcacattgctacacacactatccaaaacgatccaattgcactagccactgatatattcatctaacacaatacagaaacaacttccccagttccaattttgccagactctgaaattttggatcatcagtatggcaacactaccaatccaactggttctgctgtgataaccacatttctcacagttcattcctttgcgagaatcgcatgcaatcctttttctttaatgtctgggggggggagaccctccaatttctttcactttaacttt

SEQ ID NO: 12871 - DNA, 309 bp, Gossypium hirsutum
  unsure (1)..(309): unsure at all n locations
  Clone ID: LIB3583-027-Q6-K1-B7
cccacgcgtacgtccacgcgtacgaccacgcatttttccattcgtncgactctagatcgcgagcggtcgcgatcaattattcaaggtgtccaaccacattcattcacacactagcagtgatggtccaattgcaatatccactgatatgttcatggaacacaatacagaaacaacttcaccagttccaattttgccagactctgaaattatgaataatcagtatggcaacactaccaatccaactggttctgctgtgagaaccacattttgcacaattgattccagagcgagaattccatgagatcctgt

SEQ ID NO: 12872 - DNA, 797 bp, Gossypium hirsutum
  Clone ID: GOSHI-09MAY01-C5515_3
taatactctaatactaatagaatagtattctattagtattagattagtattagttagattagagtagtattagttagtgatcccggctcaatgagtcctttcttccgtgattaactgttggcgccagtcctagtcctactaatactaatctaatactaatagaatactaatctaatactctaatactaatagaatagaaaaaatagaatagaaaatactaatataatagaaagaactgtcttttctgtatactttccccggttccgttgctaccgcaggctttacgcaatcgatcggatcatatagatatcccttcaacacaacatatgtcgtcgaaaggatctcggagactcaccaaagcacgaaagccaggatctttcagaaaatggattcctattcgaagagtgcataaccgcatggataagctcacactaacccgtcaattttggatccaattcgggattttccttggggggtatcagtaaggaattggaatgtaataatattgattcatataggaggaaaaggttctctattgattcaaatgctgtacctatgggatagggatagagaaagaggaaaaaccgaagatttcacatagtgcttttgatcgaaaaatcaatctgatttatttcgtacccctcgctcaatgagaaaatgggtcagattctataggatcaaacctatgggacttagggaatgatggtaggcgactaaattaatgaaaaaacgcagtcctatcccaaattaatcgtcttgcagaacataccctttttgtcattttgtttaaaacaaaa

SEQ ID NO: 12873 - DNA, 736 bp, Gossypium hirsutum
  Clone ID: GOSHI-09MAY01-C5515_2
cataaatccatcactattacaagatccatagcaaaaatcatctcggtcgctgtttgttcatttctggggtttcttctattttttcacttcaaagctctctgtaaatggcagcttcggcatcatcatcatcaacaacaaaaacgataccggcaaggaaaaggggatggctcagtaacatctcctcaatttcatcacggatttatttcttccttatcttccttcagatcccacttttcaggatcccatgcagatccggaatgtgttcaactccaattcatgtcacatcttcccagttgatcgcaagtgacatctttcctgtgcctgtggtgaaggcaatcctttttcctggagccattacaaatggccttgccaagaattggactgttccgagctgggacaacttgttaaacatgtataacttaactagtataaaggaatcctctgcattacccgatctccagcgcttagaggttctagctggaagctacttttgtgtggcaggagcactcgtgggacttctaaaacccggaagaatgagcatgtttgggacactactcgtaatatggggtcttgtcaaggaagggatcataggaaaaccggcaaataccgatcctacaaaagctgtatatgtatatccaacaatggtgcttgcactaatttgtgccttgtcatcgatcaagtacgacgtaaagaaagttatgagaactgcccctgcacgaccaattgcaaagcctct

SEQ ID NO: 12874 - DNA, 1507 bp, Gossypium hirsutum
  Clone ID: GOSHI-09MAY01-C5515_1
cccacccctcccgaaacagaatttgtaacttgctatcctcttgcctagcgggcaaggatttacctccgtggaaaagatgattcattcggatccgcatgaaagcccaactccattgcattgccagaatccatgttgtatatttgaaagaggttgacctccttgcttctctcatggtacaatcctcttcccgctgagccccctttctcctcggtccacagagacaaaatggaatgtaggactaggactggcgccaacagttaatcacggaagaaaggactcactgagccgggatcactaactaatactaatctaatctaactaatactaatctaatactaatagaatactaatctaatactctaatactaatagaatagaaaaaatagaatagaaaatactaatataatagaaagaactgtcttttctgtatactttccccggttccgttgctaccgcaggctttacgcaatcgatcggatcatatagatatcccttcaacacaacataggtcgtcgaaaggatctcggagactcaccaaagcacgaaagccaggatctttcagaaaatggattcctattcgaagagtgcataaccgcatggataagctcacactaacccgtcaattttggatccaattcgggattttccttggggggtatcagtaaggaattggaatgtaataatattgattcatataggaggaaaaggttctctattgattcaaatgctgtacctatgggatagggatagagaaagaggaaaaaccgaagatttcacatagtgcttttgatcgaaaaatcaatctgatttatttcgtacccctcgctcaatgagaaaatgggtcagattctataggatcaaacctatgggacttagggaatgatggaagggaataaaataaaaaaaaaaaagaaatcaaaaaaagaggggaaaaaaataataaaaataataaataagtaaataaaaatgaagtagaagaacccagattccaaatgaacaaattcaaacttgaaaaggatctttctgattctcgaagaatgaggggcaaagggattgatcgagaaagatctcttgttcttattataagatcgtgtgattggatccgcagatgtttggtaaaaaaaatcttctcttttgagaataatcaaaaatggaaagtgttcaattggaacatgaaaacgtgactgaatttgtcctagttactcttcgggacagagtggaagaagggaggagattctcgaacgaggaaaaggacccaatgacttcgaaagaattgaacgaggagccgtatgaggtgaaaatctcatgtacggttctgtagagtggcagtaagggtgacttatctgtcaacttttccactatcacccccaaaaaaccaaactctgccttacgtaaagttgccagagtacgattaacctctgggtttgaaatcactgcttatatacctggtattggccataattacaagaacattctgtagtcttagtaagagggggtagggttagga

SEQ ID NO: 12875 - DNA, 313 bp, Gossypium hirsutum
  Clone ID: LIB3149-029-Q1-K1-C5
atgcagatccggaatgtgttcaactcctattcatgttggatccaattcggtgatctgccttggcaggtatcatgtgcgaagtggtgaaggcaaacctttgtcctggagccattgcaaatggccttgccaagaataggactgttccgagctgggacaacttgttaaacatgtataacctaactagttcacatagtgcttttgatcgaaaaatcaatctgatttatttcgtacccctcgctcaatgagaaaatgggtcagattctataggatcaaacctataacccctgaagaatgagcatgttggggacactac

SEQ ID NO: 12876 - DNA, 307 bp, Gossypium hirsutum
  Clone ID: LIB3148-039-Q1-K1-A8
ggaaaaggttctctattgattcaaatgctgtacctatgggatagggatagagaaagaggaaaaaccgaagatttcacatagtgcttttgatcgaaaaatcaatctgatttatttcgtacccctcgctcaatgagaaaatgggtcagattctataggatcaaacctatgggacttagggaatgatggaagggaataaaataaaaaaaaaaaaagaaatcaaaaaaaaaaaaaaaaaaaaaaaaaaaaaaaaaaaaaaaaaataaaaaaaaaaaaaaaaaaaaaaaaaaaaaaaaaaaaagggggcggc

SEQ ID NO: 12877 - DNA, 759 bp, Gossypium hirsutum
  Clone ID: GOSHI-09MAY01-C5505_1
cgtagacatgcattgccaagcctgtgctgagcaactcaggaaaaagatactgaaaatgagaggcatacaaagtgcagtaacagagcgtaccacagggaaagttccagtgacgggtaccatggacgcgaccaagctagttgattacctgtatagacgcaccacaaagcacgctcgcatcgtgcctcacccggagcctgaaccgcaactggaacccgaaaaacaagaagagaagaaggaaggcgaagagaagccatcggaagaagctaagccagaagaaaacccggataaaaaagaagaagaaaaaccagcagccgaagaagaagccaaggaagaaggaaacaatgaagctactggtgagaccaaggaaggagaagataagaaagaagacaacaatggcagcaacaatgaggatgaatctatgaagaagatgatctactattatcagccgctctacgttattgaacgaatgccaccggctcctcagttgttcagcgatgaaaatcctaatgcttgctgcatttcatagtcaaatgatcatactagttgacagtatatagtgtatatgtatatattttggtgagtccgtgccactggtaatgagaattttagagcaaagcggtggacggatcgcatgatgatcaatcagtgaatgtggggaactcgggataatcacaatacaagtgaggctaataataatatgattattatgtattaaaatgtatcatattggtattaataatatgattgtatgaaaaatga

SEQ ID NO: 12878 - DNA, 768 bp, Gossypium hirsutum
  Clone ID: GOSHI-09MAY01-C5405_1
caaaaaaatattaagtaaggtttaggacataagtgtcattaaaagattttttggtccaagaggtgagcacctgaattgaaacccgcgtttctctcgctctagatttctcttccaatcaaatcactgttttagggctttgatttttggaacccagaaaagcactggaaggagaatgttttttttgtacatgcacagaaatgaagaaatacccaatgtatagttatatgtgctcgatctgaggttttctccctcttcgtcttcaattgtttttgtgacctttgaatgtggtaatgctaaattgtttcatttggattgctgaggctgcagcagtggagtttggggaatgttgataccttaaccaatttgagccaggctgatgttttaagggtgaaaccacctcttgttccacttgcgaccttacttggtcgtgaattgaggaatgtaaaagttgagaagccttttgtgaagtttggacaggctgctttggccaaaaaaggagaagattattttctgattaaacctgattgcgagagggttcctgggaatccggaaacatcttcttcggtatttgcgattcttgatgggcataatggtctatcagctgccattgttgcggaggagaacttattgggcaatgtcttgagtgcaattacacagggcatcaatagggaggagtggctgtaagccttacatcgggctctgggggcacgattggagatgacagacattgcggtttaggagacaggtgatacttctggaacaactgtt

SEQ ID NO: 12879 - DNA, 450 bp, Gossypium hirsutum
  Clone ID: GOSHI-09MAY01-C5725_1
cccacgcgtccgcccacgcgtccgaattcatgtaacctgtgctttagtttatggtccaactccaaccagaagaattcatcggggtgtgtgttcgacctggatgaagaatgcagtttctctggagaaaaacagtgattgcagcggagctcctatttttatcaggcaatctaattctaagctaccagcagatccttcaattccgatcatcatggttggacctgggactggaggagcacctttccgaggttttctacacgaaagagtggtccttaaagaagatggcgcagaacttggtccatctctactcttttttggatgtaggaatcggaaaatggatttcatttacgaagatgagctcaataatttggtggaacaaggtgcactatccgagctcatcgttgcattctcacgagagggcccacaaaaggagtatgttcaacataagatgat

SEQ ID NO: 12880 - DNA, 415 bp, Gossypium hirsutum
  Clone ID: GOSHI-09MAY01-C5625_3
actgtgagcttagcctttgactgaaggaatgcttgtgcttcttagctttcgcaattttgcaaaaagggtattgcttgaaatcagtgctgcttttgtctagtatacctcgcaatatataagtttgttctatggttggacgcacacgcaatgacaacgcctcttatatcttgtgtatctttagttgcttgaggagagcctttagaactttgccttggagtgtgataggttcaaatgttaaaactctatcaaccatcagtttaaacagcctggtattagttctgtgttttgtctcatggctcgaagcaatagcatggtgaacttatcttatatatcttgctacagacattgatttatttaggaattccaagactaacctcccctcgttcttatatggtaaaaaaaaaaaaaacaaaaa

SEQ ID NO: 12881 - DNA, 668 bp, Gossypium hirsutum
  Clone ID: GOSHI-09MAY01-C5625_2
ggaatttccctcttcatagcaacaaatatctgtgaaaacataatctggaaggcatttagccccacaacaattaacagtggcagaggtgctgagtttgaaggagctgttattgcatttgtccataatcttttaactcgagaaaacaagattcgtgctctccgagaagccttttatcgacagaatctaccaaacgtgacaaatttgcttgctacagtcttgatttttctaattgttatctacttccaagggttccgtgtggttttgcccgtgaggtcaaagagtgcccgtggacagcagggttcatatcctatcaagctgttctacacctctaacatgcccatcattctacattctgctcttgtttcaaacctttacttcatctctcagttactgtacagaaggtacagtggaaatttttttgtgaatctcttgggcaagtggaaggagtctgaatattcaaatggtcaatccattcctgttggtggccttgcatattatatcactgcaccatcaagcttagctgagatggctgccaatcctttccatgcgttgttctatcttgggtttatgttatcagcatgtgcattgttctcaaaaacttggattgaagtctcagggtcatctgctagagatgttgccaagcagctcaaggaacaacaaatggttat

SEQ ID NO: 12882 - DNA, 1005 bp, Gossypium hirsutum
  Clone ID: GOSHI-09MAY01-C5625_1
ccccgcgtccgccccgcgtccgcccagcgtgcgcccagcgtccggtctgaatattcaaatggtcaaaccattcctgttggtggccttgcatattatatcactgcaccatcaagcttagctgagatggctgccagtccggtccatgcgttgttctatcttgtgtttatgttatcagcatgtgcattgttctcaaaaacttggattgaagtctcagggtcatctgctagagatgttgccaagcagctcagggaacaacaaatggttatgcctggccatcgtgagggaagcttacagaaagagctaaaccgttacattcccacagctgctgcattcggaggcatgtgcattggtgcactcacagtattggctgatcttatgggagcaattgggtcagggacgggtattcttctcgcagtcacaatcatctatcagtattttgagacttttgagaaggagaaggcgagtgagcttggcttctttggactgtgagcttaggctttgactggagggatgcttgtgcttcttagctttcgcaattttgggttagctgagggattcatttcgggcctacttttgacaacagagtttacaatttagttagttcaatatgttttgtttacacattttgttttgagaaattacagaaaaagggtattgcctgaaatcagtgctgcttttgtctagtatacctcgcaatatataagtttgttctatggttggacgcacgcgcaatgacaacgcctcttatatcttgtgtatctttagttgcttgaggagagcctttagaactttgccttggagtgtgataggttcaaatgttaaaactctatcaaccatcagtttaaacagcctggtattagttctgtgtttcgtctcatggctcgaagcaatagcattgtgaacttatataaaaattaaaaaataaaaaaaattaataaaatttatataataaaatataatactaataaaaaaattttataattattattaataaatatttaaaaa

SEQ ID NO: 12883 - DNA, 625 bp, Gossypium hirsutum
  Clone ID: GOSHI-09MAY01-C5185_2
cccacgcgtccgcccacgcgtccgggtgtcgctctgttgtatgcatcgaaagagttggacaagctacctacaggtaactttgaccagaagattggtgttcaaatcatccagaatgctctaaagacacctgtgcacacaattgcttcaaatgctggagtcgagggagctgttattgttggtaagctgttggagcaggataaccctgatcttggctatgatgcagccaaaggtgaatatgtcgatatggtaaaggctggtattattgatccattgaaagtaattagaactgctttggtcgatgctgcaagcgtgtcatcattgatgacaactaccgaagctgttgtagtcgaacttccaaaggatgagaaggatgttccggcaatgcctggcagtatgggtggcatggattattaaggttattccccctaacaatacactgattttaagtgctttcctctaatctatttccatttcctcaacatctgtgagaaaaagaatatccgagtctcgatgtctaagttggaaggtggttttggtgataaagggtcaacaggactctcttattgttgttgctagaaagaacgaactagtttgtattgggccattttatcttgaaataaatgga

SEQ ID NO: 12884 - DNA, 1446 bp, Gossypium hirsutum
  Clone ID: GOSHI-09MAY01-C5185_1
cccacgcgtacgcggacgcgtgggcaaaactttctggtggtgtggctgttttgaagatcgggggagctagtgaagctgaccctcgcgtccggaaggatagagttacagatgcactgaatgcaacaaaagcagctgtagaagagggtattgtgccaggtggtggtgtcgctctgttgtatgcattgaaagagttggacaagctacctacagctaactttgaccagaagattggtgttcaaataatccagaatgctctaaagacacctgtgcacacaattgcttcaaatgcaggagttgagggagctgttattgttggtaagctgttggagcaggataaccctgatcttggctatgatgcagccaaaggtgaatatgtcgatatggtaaaggctggtattattgatccattgaaagtaattagaaccgctttggtcgatgctgcaagcgtgtcgtcgttgatgacaactaccgaagctgttgtaatcgaacttccaaaggatgagaaggatgttccggcaatgcctggcggtatgggtggcatggattattaaggttattccccctaacaatacactgattgtaagtgttttcatctaatctatttccatttcctcaacatctgtgagaaaaaagattatccgagtcttgatgtttaagttggaaggcttccatgtaatcataaattgagagctatttggtggttttggtgataaagggtcaacaaaactgtctcattgtttttgctagaaagaaaggactacattgtattggaccattttttctggaaataaatggaaaaaatgaaaaaagaattctctctttcccccgtgttcgattaaaaaaaaaaaggctaacaagaagaagccttcatcttctttcaaccgattggaacggattctattttttagttgttttatcaacgaaatcaagaagaacccaaattacaattcccaataaccttgatttttttttccggaaaagtttgaatttttccgttaatttgcaattttttttatctgggtcgatggcagaaatggaagacagcaaggcgaaatcatcatctgggtcgttgttcttcaatcgttcgttcacgatgaactctacggcggcagctgagtcgaattcccccaaattccatctccttctcaacagcccttcgtctctcaatcgagcagcttccatttcgaggttttacaattccttcgattccgtcaaaggtaaagttaaaaagctttgcaatttgttcgaatccgctaagtcttcgtcttcaccatcgaacttagccagtcctaaagaaacttctcccaaagctgttttgagaccctcgaaatcgattgcggattcgtcctcgttttctttgagctctaataactctccgataaggttaccgtgcactgaagatcgaattgttggttatttaactagtttgcgagggatttcgaagac

SEQ ID NO: 12885 - DNA, 1394 bp, Gossypium hirsutum
  Clone ID: GOSHI-09MAY01-C5155_1
gtaaagtttctcctgtgaaggatggaacaaaaaactcaaccaagaatgatgatgaggaagtgattggatctccaaagtcagtgaagccaaacaaacaagattctcacaaggaggggacccctaagacaaattccaagagaaagcatatgccaagtaaagaaaaatcttctgattctatggagtatggtgagaatcttgtcggcttgaaggtgaaggtctggtggcccaaagaccgtgagttctatgaaggttttattcattcatttgattccgctaaaaagaagcacaaggtgcgcgatgatgacggtgatgaagaaattttaaatcttaaaagagaaaagtgggctgtgattgaagatgagtcagggtcagatgaggaaggtgcagcaaatctaccaagtcctgatggttcatctgacattggcaggcttccaaagaaggcggcaaaaaccgctgatccctcgagcaagaaagctaagatggatgcttcaccaaaaaggggtggaggaacttcgtcggggaaatccaagggtagtgccacaaagtctggtcgcaaaacaaaggaagatgctaaagtggatgggaaatccaaagatggttccaagagtgtcggtaaatctggcaatgacagtgttgctaagtccaaggatcctagcacccccaaaactggcagtaaaccagttgacaatgcttcaaaagcagacaagaagtccaagaatgaggagagtggtgaaacaccgaagtctgcgaaatccaaggatgatggaagtgccacaccaaaagcttcctcaaaggtggagcaagacatctcaaagacggccaattccaagcaggaaacccccaaaatttcgtcccaatctaagggtaagtctcttaagagtgggggcaaatccaattctaatggcactggtaagtcaaaatctggttcgtcaaaggtgaaaggaagtgaaagcgtgaaggagagctcaactgattcagcaaaagttgtgggaagtgtgaagcggaaagcaccaagtttgttgaaggcgcagggaagtgattcgaagtctggaaaaaagcggcaaagatgagttgaaagtcgcacctactgcattgtcatttgccaagggttggttcttctccaatgtggaacttgggtgaattgtagtatttattgtagcatttgggtatttgacgtagttcttaggtttgtggctagcaaatattcgtagttaatgcagtttatagtggttgtactttgtagggttaagataccttttttatatagatatagtttttttcctttccctttattattgatgcaggcaataggatcacattgggtttagagtttctgcctttgtactaaagagttgcttctatagattaacgtaatagattcgattcgagaaaaa

SEQ ID NO: 12886 - DNA, 578 bp, Gossypium hirsutum
  Clone ID: GOSHI-09MAY01-C5145_1
aaaaaaaaaagagagagatagagagatctaaagagagagagagaaatagagcgagtcacagcgaggtcatcaccgatccaacgcgaacgaggtaaatggtaggagtgggggctcgactcgggcggtcctccactcggtacggaccagccacggtgttcactggaccggtcaggaaatggaagaagaaatgggtccacgtttccccttctaacaccggcaacagctccaacaataacaacaataatcgctctcataataatcatcagaccacaatcaacggtacttctaacggtaataacggttcccatctcctcctttttaaatggacacctttatcccaaacccaaaccaacaacaacgataatgacaattcctccaaggacgacgccgtggcggcgcccgaagagccgccgagacggaagtttaaatacattccgattgctgggctagaggaacagagaaaggaagctgatgaaaacagcgatgatgaagctaaaccgagcaaagctgaccctagtgctgtagagccaacttccaggaatgatggtcttgacgaaaaacccgacattaatgacata

SEQ ID NO: 12887 - DNA, 880 bp, Gossypium hirsutum
  Clone ID: GOSHI-09MAY01-C5175_1
caaagtcagagaaggcaaacgccatattcagtactaacttctcttttatcagtctagttattccctgtaaacattcctgttgtcagtgtactcagtcagcataaccaagtaaactagtaggataaccttatcatttactaaaagaattctggagaagctttcagctgtcatcggataatggcagaagaacctgttaatgtcaatggatttcgagaactagcgaggcaaacccttccaaagatgtactatgatttcttcactggaggagctgaagatcaatacaccttaaaggagaatgaagaagcttttcatagaatcactattcagcctagaattcttgtagacacgagcagcatcgatttatcaactatggtattgggttacagtatctcaatgccagtcatgatagctccaacttctagacataagctggcaaacccttcaggagagattgcaacggccagagcagcatctacatgtaacacaataatggttttatctatctcatccacttgcactttagaggaagtagctgcctgctgcaatgccgttcgcttcttccaattatgcgtgtataagagacgggatataacagctaagctggtgcaaagagctgaaaataatggatataaggccattgtcctaaccggtgactctccaagacatggtggaagggaggctgacatcaagaacaagatcattataccagaattgaagaatgtggagggtttattgtcaactaagattgtcgctgataaaggttcaaatttagatgctctggccaatcagacccgtgacccttcattcagttgggaggacatcggatggttgaaatccatcacaaaattgccaattctgatcaaagggttactcactcatg

SEQ ID NO: 12888 - DNA, 731 bp, Gossypium hirsutum
  Clone ID: GOSHI-09MAY01-C5165_1
aaaaaattggccacccaaagttatcacactatcagcagccgcctgcaagccgtaaagcaaaaatctggcaaatcctacaatcaaatagccgaagaaaccggcttaaccaacgtttacgtggctcagctcctcaaacgccaggctcagctcaagactgaaaccgctcctaagctaagggcagccttgcccgaattgcctgaggagcttctccatgagatgatgaaaccaccgttacggtcctatgatccgaaccttatccaagaacccactgtttacaggttgaatgaggcagtgatgcattttggtgagagcataaaggagattatcaatgaagagtttggtgatgggatcatgtcagctatagacttctactgctctgttgacaaagttaaaggcgtggacgggaaagaccgtgttgtcgtcacatttgatggaaagtacttgccatacagtgaacagaaatctgagcatatggtttcaagattaaggctgcaatgaaagctgatgaacagccatatcctgaaaccttggagcttcttgttgaaaggaaaacaataaaactgggtttgtatattcatttattatgttactcggacctatttatttttctgtctccgaacatgctccggcatatatccggacatgtattggatatactcgtggttgacattaattttggagttcaaataaacatgtcacaagtttttcagtggcattaaattatcatttgc

SEQ ID NO: 12889 - DNA, 1212 bp, Gossypium hirsutum
  Clone ID: GOSHI-09MAY01-C5135_1
caaaacgctacggttccgaagaaatcgttcacggtggagattgcctgtgggtctttcttgattgtttttttagtcaattactttaccggtaaacgtgaaaacgagaaccttgctttggcatgggccgccaaattcgctacggagggttctatctttgagaaaaatttcagtcttttgggtgtgggagaaggggaggactcgccgttgctgttaaaagaagggcaaaccgtattcaaattctacgcgagtggacgaagatactgccagggattgctggcaacgatggagttaaagagcagacatgatctgatatcgagattgtttaatttggtggtcccgtgtaaagatgaaattacttttgaagtttatatgaatgacgaagcaatggatcaggtggttttcgcggtggcaaagaagaaagcggccaaagggatgcaaaaagaggtgagagatttacaaagatttgccgggttgatgccgactcctagtggaagaaaatgggtggtggatgaactatccgtcatctccgagtctaaggaagttgctggggatctgattaccgagaccgtgctcgaacaggtttttggggacaaatcttttgagaaatacggaaaggatttcatttcgatgcatttttcggatcaacatcccggcaagcacaggaagatgctgttgtttaagtttgcccttcctgatgccaaccacatggctgacatgactcgcttggtagctcttgtaccatactacatcgatttaatcgggcggtacaagctcagctctcaggctcgatccaaaaccgaagctgcaagagtgaaggctgcccaagaagcatacaaagaacttcaaaatgctaggctagaagcattgcagagaaagaaagccgagaggaaaaagatgttagaagaggcagaggcaaagctcagtgcagaagcggctcgcaagagagaagcaaaagatcgtgctcggcagatgaagaaggcaatgccaagaatgaagatgacccgcgcacattagatggctgtggacattagtagtatgaatgcttactcatctgcagattgcaggttattagttccctggtttctgtatgtcactgggaatgtatttttagttgtcaactaccgattcggaatgttcctgaagatactgctccaggaacttgataaagtttcttccatgggatgacattttaaaacgcatttcccaagtaat

SEQ ID NO: 12890 - DNA, 426 bp, Gossypium hirsutum
  unsure (1)..(426): unsure at all n locations
  Clone ID: LIB3148-033-Q1-K1-E4
cccacgcgtccgtacaagctcagctctcaggctcgatccaaaaccgaagcagcaagagtgaaggcagcacaagaggtatacagagaacttcaaaatgctaggctagaagctttgcagaaaaagaaagccgagaggaaaaagatgttagaggaggccgaagcaaagctcagtgcggaagcaattcgcaagaaagaagcaaaagaccgtgcacggcagatgaagaaggcaatgccaaaaatgaagatgacccgtgcttagatgtttttcgatcattaatacacactcttgacgccattaaccatagtagttcagggttgttcttagcatccgcaggtaaattgttatctttccttagaatttatattagttttctgttacctataaacacagctntttgtgggttttgaatgtaccacaagacaatgc

SEQ ID NO: 12891 - DNA, 823 bp, Gossypium hirsutum
  Clone ID: GOSHI-09MAY01-C5095_1
aggatggtgctttttatccatctctttctttcattagcatggcagagatttgaagcttttaaactaaataggcttcagatttcagtcttggaagaagcgggtgatgtttacaccaccgagcttcagaggttcattaactttataagtgaggtctttgcaaattcgccattctttatttcagcagaggatgccagtatgttagaaatggggaaaaatgacgaatacaaggagataactgttcctgctgggaaaagttatgaggtttcattgacagtggagtcaataaactcatatattgcctgggatttctcattggtgcagggcaagttgagcatggatattggatttagtgtggagtacacaaataatggtggggaaaaaacactaatattgccttaccggcgctatgagtcagatcaaggaaacttcagcacatgcatggctggaaactacaaactcatctgggataattcatattcagcctttttcaagaaggcccttcgatacaaagtggactgtatacctccggttttggaggagtccgagaagggcagtgaaagaaatgaagtggaagaatgatgatgataattggtaccctggcttggttttcgtctttgatcatgtcttgtatttttattctattctatatgaatcggatgcaacttttgcgtgttaactttacgttgtcgctgttgtgcccaaccttaccctttgtacattgtttatctgtttgactgacaacgagacgcactcaaacgaaaaagaaaatctgttgcgtaatgtattgtccatcattggatactcgatagtcgggcaattggcg

SEQ ID NO: 12892 - DNA, 511 bp, Gossypium hirsutum
  Clone ID: GOSHI-09MAY01-C5065_1
cccacgcgtccgcccacgcgtgcgcccacgcgtccggaaagaaataacatgaacgacactggaataaacgtgtgcctaggttttcaaaatgtgttgttttcttcagaaaaaatatgatatgatccatttgcacctttaaaatcaataaactttcgtcttgcatttgggattatacgtgaaaaagaagaaaaatcaactccgaggctaccttgaccataggtcaaatcgtgaattttcattaagatatctcaaaaaatggagaaggaagtgggcaacgggtgttcttctcttgcttacaagcttttattctcatgccctttcggtctgtctcagccacagctgtccgcagttttcgatgaatcatacgatagaattcctcattcagactcgaatttggagaattccatttctcagatatgggatcagagggttcagaaaaatggatctttattcaatggcaagaaatttatgtatggaaggtatagtcagaagagtggagatggatcaaaga

SEQ ID NO: 12893 - DNA, 1149 bp, Gossypium hirsutum
  Clone ID: GOSHI-09MAY01-C5015_1
gagcagagcaaccggggaaatccccttttttgtgcagtggaagtaaaaattacctaccattagaaaaggagaaggattggtgaagtattgcagcgctccgtaaaggcattttggtatagcaagtagcagcagttcatcaaaaggcagcatttctttttgtaccaggggccctttaacaagctcaactctcgcgcttctttgcgtttcaaatctctctgcaagtcgcaggacatctgaagcagaaagcccagattcctctctaatcttagattccagatttgcataggttatggcgtatcctgagcctcaagttgcagatagggagatggttaaggtcaatcctaccccaagaaaaccccgggttttactcgctgccagtggaagtgtagctgccataaagtttgggaatctctgccattgtttctctgaatgggcagaagtaaaagcagttgccacgaaagcttctttgcatttcattgacagagcatcacttcctaaggatctaaagctttacactgatgaggaggaatggtctagttgggggaaaataggtgacagtgtgcttcacattgagcttcgtcgatgggctgatattatggtcattgccccattgtcagcaaacacacttggcaagattgctggaggattatgtgacaatttgttaacttgtgtcgtacgagcatgggactacagcaagccaatgtttgttgcaccagctatgaacactttcatgtggagcaaccctttcacagaaaagcatctcatgacaattgatgagcttggtatttctctcatcccccctgtctccaaaagactagcttgtggggactatggaaacggcgcaatggcagaaccttctctaatccactcgactgtaagattattcttggagtcacgacctcaaccaagtgactgaagactatttattcgccatgaattataaatactatattagttgtatggtagcccagttgactctaggttgggtgtatgtctattagctgtctaacaagcttattgtacatttatagttgcatttccgagtttgctgaactttgcatatcatgaggaatggtctttgaatactgctgaaaatttgatcctgtaagctgatgatactgatgagagttggcagaattgtagtagatt

SEQ ID NO: 12894 - DNA, 719 bp, Gossypium hirsutum
  Clone ID: GOSHI-09MAY01-C5255_1
gcgaagtttatgggaaaaactatctaagttggacaggttctagagctatgcttgttattacagaaccggagcttagcaaagagttacttaaacccacgcgaccggctttcccaaagaggactagcagagaaaggaagaaagaagacgatttcgttcttaagatactaggggatgggcttgtgacatcagaaggtgagaaatgggcaaagaaaaggaaattggcaaaccatgcttttcatggggagaccttgaaaagcatgacccctgcagtgattgctagtgttgagacgatgctggagaggtggaaactacttgaaggcaaagaaattgaggtgtttggagaatttagattgctgacatcagaagtgatatccagaactgcttttggtagcagttatttggatggggaaaagatttttgacatgttgatgaagttgtctgtcataacaaacagaaacatgtttaaggctagatttcttgtcatcagcaagttctggaaaagtgctgttcaaattgaagcagacaaacttgagaaagagatacacaattgcgtgatgaagatagtgaagaaaagagaagagaaagtagctaatggaggtgccaacagcttcggcactgatttttttggattacttttaaatgcttaccatgatacagacaagaaaaacaacatttcacaacaagaactggttgatgaatgcaagacattttactttgct

SEQ ID NO: 12895 - DNA, 574 bp, Gossypium hirsutum
  unsure (1)..(574): unsure at all n locations
  Clone ID: AI054806.1
agaccatcaaaatgaaacaggaagccttgagaaaccccatgcctactttagcacatgatatactgcccagggttcaacctcaaatttggtcaaggatcaagttatatggtgagctttaaacacccttttttttttccgtatgtcgttttctttttatttggggaaataagttaaccttcttttactactgtggggttagggaaaaactatctaagttggacaggttctagagctatgcttgttattacagaaccggaacttatcaaagagttacttaaaaatagtgaaagagctttcccaaagaggactagcagagaaaggaagaaagaagacgatttcgttcttaagatactaggggatgggcttgtgacatcanaaggtgagaaatgggcaaagaaaaggaaattggcaaaccatgcttttcatggggagacttgaaagtatacttctaaacaantctggaatatctctcttataaatgtntattgagatctttatnaacttattggtgatgatggttttgcaaacatgaccctgcatgatgctatgttagagatgctganagtggaactct

SEQ ID NO: 12896 - DNA, 708 bp, Gossypium hirsutum
  Clone ID: GOSHI-09MAY01-C5235_2
cttcaagtaaaagtttcaagtttttaagaattaatctgcctgctggaggtcatccaatagctgttgcattttctgatgatgcatcttccatagttgtggcttctcaggctatgactggttgttcctcggacgcgtgggcggacgcgtggccaaaaacggccaatggacccaagcaacagacgaagctccctccgcaaattaagtgggaacaccacaaaatccatgagaaacaagcaatcctgaccctaactggatctactgcaacttatggaactgcagatgggagtaccattattgcctcttgttcagaaggtactgatatcacactttggcatggaagaactgggaaagttttagggcatgtcgacactaatcagttaaaaaataacatggctactatatcaccaaatggccgttttcttgctgctgcagcctttactgcagatgtcaaggtgtgggagattgtgtactcgaaggatggttcagtcaaggaggtttcaaaagctatgcaacttaaagggcacaagagtgcagtaacttggttatgcttttctccaaactcagagcaaattattacggcatccaaggacggttcaatacgaatttggaacatcaatgttcgataccatcttgatgaggatccaaaaactctgaaggtgttccccataccccttcaggattcaagtggctctactttgcactatgatc

SEQ ID NO: 12897 - DNA, 703 bp, Gossypium hirsutum
  Clone ID: GOSHI-09MAY01-C5235_1
cccacgcgtccgaatggtggtaaattactgttatttcgtcccttggtaatggatccgattctgtcaactgcggttctttcacttgttattggagctgtgatcgctttcgttttcttcagaagctaccttctcaaacaaagatccgaagtgcagaccattgcgaaaccggatcttcattcagatccgaaaaagcattcaaagcctcctcagcatgtctctagaaagtctcactctaaatctcacgctcatgcccctgacaaggattcaaataagcgtcatcatccattggacttgaatactcttaaaggtcatgcggattcggtcacaggactctgtttctcccctgatgctcgtaacttggcaacagcttgctctgatggcgtggtgaggatatttaagctggaggatgcttcaagtaaaagtttcaagtttttaagaattaatctgcctgctggaggtcatccaatagctgttgcattttctgatgatgcatcttccatagttgtggcttctcaggctatgactggttgtccttggatatgtatgaggaagaaaaacaaaaaccggcaatggaccaagcacagacgagctcttcgaaataagtggacacccaaatcatggaacagcatctgcctactgattatgactatgactggatgagacatatgcttgtcaaagctgttaacttgctgagactggagtt

SEQ ID NO: 12898 - DNA, 403 bp, Gossypium hirsutum
  Clone ID: GOSHI-09MAY01-C6945_10
ccctctcgtccgtccacgcgtccgcgcccacccttccccgacttctggaggggatgcatttattagataaaaggtcgacgcgggctttgcccgttgctctgatgattcatgataactcgacggatcgcacggcctttgtgccggcgacgcatcctctcttatttttttccatcggctggtgcgtttcgtggggacgttaggtcgtatttggaccctatcataggccacttagcatgggctagaacacccttgcttgccaacatttacacttacttcagctattcaggcaatccaagggatatctcacttccatatgctcttttcacatccccttcacctgttgtatgggatcaaggacgtggataccaaaacctattcgatgcaatgttggattcattatact

SEQ ID NO: 12899 - DNA, 616 bp, Gossypium hirsutum
  Clone ID: GOSHI-09MAY01-C6945_3
ctcgtgccgaattcggcacgagtatctatataaagagctagctcagctgtaatggagaaaccagaaacaaacagtccaattatgcaaacgatggctatcttttctacatcaagggctgctatgctccttcttctagggctcttcgctgcaaacttggatcctactgctgcacagattggtgtttgctatgggatgcttggctataatctcccaaattcatgggaaggcattcaactttacaaatctaacaacatcccgcgattgaggctctacgatcctaatcaacaagcattacaagctcttagaggctccaacattgaagtaatgttaaggtgttccaaatggtcaacttcaaaacctcgctgacccttccaaagcacgaatcatgggttcaatcaatgttgtagcttactgccgatgttcggttccgatacattgctgtcggaatgaagtccctattatcttggagctcaattcgtttgccgcttatgaatgatcacgcgttcgacggcggttggagatcatcagtctcatcgcatgattgacttgacgtgctcgatctcatcgctggcgttctggacgtagtcgattgaccttatagcactacatgctaaca

SEQ ID NO: 12900 - DNA, 918 bp, Gossypium hirsutum
  Clone ID: GOSHI-09MAY01-C6945_2
ccacgcgtacgcccacgcgttcgcacgcttacgccttacgccatacgcatttgcccgccacgttgttttgtgctctgtgtttctcaataaattccttattcctacaaaacccccaaaattaaagaaggatcaaaccgaccctttgcaattccaagacacaagaaccaagagacataccacgatggcaacaacgacggagaagcaagccatggttgttggaatcgacgacagcgagcacagtacgtacgcgctgcagtggatcctcgatcacttctttgctcctttcgcttccaatcctcctttcaagctcgtcatcgttcatgccaagcctactgcttcttctgctgttggtctcgccggacctggagctgctgatgtattgccctatgtggatgcggatttgaggaagatcgctgccagggttgttgagaaagccaaggaactctgccttagcaaatcggtacatgatgccgtagttgaagtggtggaaggtgatgcaaggaatgttctctgtgacgctgtagaaaaacaccatgcctccgttctcgctgttggtagccatggttatggagctataaagagggctgttcttggcagtgtgagtgattattgttctcaccatgctcattgctctgtgatgattgtgaagaggccgaagatcaaacattaatctcagcaataaaattgaacaaacaactggggttgctgcatatttttagtcgcctaataacaccatggtgttgcacactgggactgtaataccaatcatgctgaatattagatattggtgtaaataagcagagtttacacgattcttatgtcttaatgttttttaattagcttgtacaagtgttactggaatattctatacttaaatctatcatgcgagtgttggcatataaaaaagatagcatgtac

SEQ ID NO: 12901 - DNA, 1253 bp, Gossypium hirsutum
  Clone ID: GOSHI-09MAY01-C6945_1
cccacgcgtccgcccacgcgtccgcccacgcgtccgcccacgcgtccgtccaaacgatggctatcttttctacatcaatggctgctatgctccttcttctagggctcttcgctgcaaacttggatcctactgctgcacagattggtgtttgctatgggatgcttggcaataatctcccaaattcatgggaagtcattcaactttacaaatcaaacaacatccggcgattgaggctctacgatccaaatcaacaagcattacaagctcttagaggctccaacattgaagtaatgttaggtgttccaaatgatcaacttcaaaacctcgctgacccttccaaagcacgatcatgggttcaatcaaatgttgtagcttactggccgagtgttcggttccgatacattgctgtcgggaatgaagtccctcattcatcttggttagctcaattcgttttgcccgccttagtgaatgtattcaacgcggttcgatcggccggtttggagagtcaaatcaaggtctcaatcgccattgatatgaccttgatcggtgtctcgtatcctccatcggctggtgcgtttcgtggggacgttaggtcgtatttggaccctatcataggccacttagcatgggctagaacacccttgcttgccaacatttacacttacttcagctattcaggcaatccaagggatatctcacttccatatgctcttttcacatccccttcacctgttgtatgggatcaaggacgtggataccaaaacctattcgatgcaatgttggattcattatactcggctctcgagaaagccggacagggagggctcgaagttgtggtatcagaaagtggatggccttcagccggtgggttcgggacatcgatcgataacgcggccacttatctatcgaacttaataagacatgtccaaggaggtaccccaaagaggccaggaaaagccatagagacatatttgtttgctttatttgatgaaaacttcaaaccaggtcctgaattagagagacactttgggttgttttcaccaaacaagcaaccaaaatatcagcttcattttggtggaggaaggcatttgggatattgcttctgaggaatatatggaacttttcctcttaagtctgatattgtaaaatctaccaagcttgagaaatttggtccctttcattggggttttcgtttttattttcctatgtgtttttgtctttaataagagaaaatcccatggtgtttatttgtt

SEQ ID NO: 12902 - DNA, 602 bp, Gossypium hirsutum
  unsure (1)..(602): unsure at all n locations
  Clone ID: AI055402.1
gcaaacgatggctatcttttctacatcaatggctgctatgctccttcttctagggctcttcgctgcaaacttggatcctactgctgcacagattggtgtttgctatgggatgcttggcaataatctcccaaattcatgggaagtcattcaactttacaaatcaaacaacatccggcgattgaggctctacgatccaaatcaacaagcattacaagctcttagaggctccaacattgaagtaatgttaggtgttccaaatgatcaacttcaaaacctcgctgacccttccaaagcacgatcatgggttcaataaatgttgtagcttatgccgaggnttcggttccgatcattgctgtcgagatgaagtccctcatctcttggtagctnattcgtttgcccgcttaggaatgtataacgcggttcgacggccggttgnagagtcaatcaagtctcatcgcattgattacctgatcgggtctcgatcctcatggtggtcgtttcggggaccgtagtcgattggcccttatagccattacatggctgacacctgctgcacattacctactagtattagcatcaggatttactcatagccttacacc

SEQ ID NO: 12903 - DNA, 608 bp, Gossypium hirsutum
  unsure (1)..(608): unsure at all n locations
  Clone ID: AI054799.1
taaagagctagctcagttgtaattgagaaaccagaaacagtccaattatccaaacgatggctatcttttctacatcaatggctgctatgctccttctagggctcttcgctgcaaacttggatcctactgctgcacagattggtgtttgctatgggatgcttggcaacaatctcccaaattcatgggaagtcattcaactttacaaatcaaacaacatccggcgattaaggctgtancgatccaaatcaacaagcattacaagctcttagaggctccaacatttgaagtaatttaanngtgttccanaatgaatcaacttcaaaccctcgctgaccctttccaaagcccattattgggttaattaaatggtggaagcttaattgccnacggtntggtttccaacaatnggttgccggaaccgaaatcccttcttaatctttggtaagtcaaattcggttggccgccctagtggatgtgttaacgcgggttcgatcaaacggtttgtagagagcaaatcaaggtctcaatggcattgtttgaccctgtacgtgtctcggattcctcatcgctggtgcgtttctggggcgttagtcatatttgacctatca

SEQ ID NO: 12904 - DNA, 643 bp, Gossypium hirsutum
  Clone ID: AI054513.1
atggctatcttttcttcatccatggctgctatgctcattctagggctcctcactgcaaacttggatcctactgttgcgcaaattggtgtttgctatgggatgcttggcaacaatctcccaaatgcaagggaagtcatcaatctttacaaatcaaacaacatcaagcgaatgagactctacgatccaaatcaacaagcattacaagctcttagaggctcaaacattgaagtaattttaggtgtcccgaatgatcaacttcaaaaccttgctaacccttccaaagcacaatcatgggttcgatcaaatgttgtagcctattggccaagtgtcccgttttcataccattgttttgggaaacaaaacccctcttttatacttcattaagcttcattttgtgttgcctgccttaatgaatgtattcaatgcggtgcgatcggctggtttagagagtcaaatcaaggtcttaatcgccatcgatatgactttgattgggtgcctatacccttcgtcgactggtgcatttcgtggtgacgttaggtcatatatcgaccctattataggcaacttgcatgagaaccacaccattgttgccaaattaaactaattttgttttaggtattcagggacattttttcattgttct

SEQ ID NO: 12905 - DNA, 525 bp, Gossypium hirsutum
  Clone ID: LIB3829-036-Q1-K6-F11
gcacgttgttttgtgttctgtgtttctcaataaattccttattcctacaaaaccattccttttttataaccccccaaaattaaagaaagatcaaaccgaccctttgcaattccaagacacaagaaccaagacacataccacgatggcaacaacgacggagaagcaagccatggttgttggaatcgacgacagcgagcacagtacgtacgcgctgcagtggatcctcgatcacttctttgctcctttcgcttccaatcctcctttcaagctcgtcatcgttcatgccaagccttctgcttcttctgctgttggtctcgccggacctggagctgctgatgtattgccctatgtggatgcggatttgaggaagatcgctgccagggttgttgagaaagccaaggaactctgccttagcaaatcggtacatgatgccgtagttgaagtgggggaaggtgatgcaaggaatgttctctgtgacgctgtagaaaaacaccatgcctccattctcgctgttggtagccatgg

SEQ ID NO: 12906 - DNA, 399 bp, Gossypium hirsutum
  unsure (1)..(399): unsure at all n locations
  Clone ID: LIB3146-025-Q1-K1-A1
ggaanngcaggggcgacccacgcctcccgggccgcgtgggcggacacgtgggcggtacgcctggggaaaaacaccatgcctgcatgcttgctgttggtagccgtgggtatggagctataaaaaaggctgttcttggcagggggagggagtattggtctcaccatgctcattgctcagtgaagatcgtggagaggccgtagatcaaacattaatgtgtgcaataaaattgaacccacaactgggggtgctgcatatatttagtcgtctaataacaccatggtgttgcacactgggactgcgataccaatcatgctgaatattacatattggtgtggataaggagaacttacacgattcttatgtcttaatgctttttaattagcttgtacaagcgttact

SEQ ID NO: 12907 - DNA, 366 bp, Gossypium hirsutum
  Clone ID: LIB3166-006-P1-K1-D11
gcatttattagataaaaggtcgacgcgggctttgcccgttgctctgatgattcatgatggccccccaaaattaaagaaagatcaaaccgaccctttgcaattccaagacacaagaaccaagacacataccacgatggcaacaacgacggagaagcaagccatggttgttggaatcgacgacagcgagcacagtacgtacgcgctgcagtggatcctcgatcacttctttgctcctttcgcttccaatcctcctttcaagctcgtcatcgttcatgccaagccttctgcttcttctgctgttggtctcgccggacctggagctgctgatgtattgccctatgtggatgcggatttgaggaagatcgc

SEQ ID NO: 12908 - DNA, 338 bp, Gossypium hirsutum
  Clone ID: uC-gsflnu33B138h01b1
gttcggcgcttgtgttaaggaaatagtggggggggttgtttgatcttttgacctgcaatggaaaagtgactctattgatatgtatgaatctacgaaaatgtccagactgatgtgaatccccgtataactgagttgatacggcaattgccaatggagaaataccatgaccacgtgcttctatccccgacttctggaagggatgcatttattagataaaaggtcgacgcgggctttgccgggtgctctgtctatagattcacaaccttactacgcgtacatgctatgtgccagctactcattagtgacacctaaatcctatccactgtccgtggttttac

SEQ ID NO: 12909 - DNA, 959 bp, Gossypium hirsutum
  Clone ID: GOSHI-09MAY01-C6965_1
acccgtccggaagcaatcagtctggatttgtttattgacttataagttggcgctaatggtctcttcttctgtcattttatggattctcgaagatgattgagtactgagagagaaaagggactccccccccctttctttgtgtagaattaaggaaagctattgacgttattgacttcttgctgatagaagtatggtgttagtttcgccaaccggccgccttcatattcctcacagggcacctgatctgcctccaaagttcaaggccatgcctggtcctggcaagattcagcacatcatttgcactggcaatctctgtatcaaagaagttcatgattacttcaagactctgtgtcctgatctgcatattactcgaggtgaatatgatgaagattcccgttatccagagaacaaaacactgacaattggtcaattcaagcttgggatatgccatgggcatcaggtcattccatggggggatttggattcactagcaatggtacaaaggcaattggacgtggatatccttgtaactggtcacactcatcagttcaaagcatacaagcatgagggtggcgtcgtcataaatccaggctcggccactggtgcatatagtagtttcacctacgatgttaacccgagctttgtgctcatggacatcgatggcttgcgtgttgtggtatatgtgtatgaactcatcgatggtgaagttaaggtcgacaaaatcgattttaagaagacagccactgccccccccccccattaaacaattcttgttgttggatcttgctctgttgagctatttgagccaaatgtgaatctcaattaattaatctgctttagaagcaagacttgtaatttggaatctgtccgttgaggaaaataattattttgagtggttccccttatcataacctctcgtttcattataaaaaaaacggacggcgtgggtcgacaccggg

SEQ ID NO: 12910 - DNA, 828 bp, Gossypium hirsutum
  Clone ID: GOSHI-09MAY01-C6585_1
cttttccaacaaacctaatctgaaattcacttcttttgatcaaaactatttggtccaaaacttaaagtatccaaaaacctcaggaatcccattgttttccttttccattttttgtttgtttctaagggaaatgagggatgttttcatggttggcaaggatagctctggcttgttggagaccagtgagtcgatatgcccgtatgaacaaggattacaacaatagcaatagtgaggaacttgaagaagattcttcttctttacgtgactcgcttctttggtgtagagaccttgaaaaacactcttgtggtgatttttcatttgctgttgttcaagccaatgagatcattgaagatcatagtcaagttgagactggcaaagatgcaatttttgttggtgtctacgatggacatggtggccctgatgcttctcgctttatctctgatcatctctttcaaaatttgattacagggcttgctcgagcaaatggaaccatttcggaagatattcttagaaatgctttctccgcaaccgaagatgggtttcttgcgcttgtgcgtaggtcttgtggaataaaaccattaattgctgcaatcggatcttgttgtctggttggagttatatggaaggggacgttatatgtcgctaatttgggtgattctcgagcagtaatccggtatttaggtaggttcaataaaaatattgctgagcattgactaaagatcttatgccagtattaaagaagttagacagactgaagtcttgcctcctgatgaatctcatatccttgttattaagccatggagtgttgggcttattaaaggcttcctt

SEQ ID NO: 12911 - DNA, 800 bp, Gossypium hirsutum
  Clone ID: GOSHI-09MAY01-C6485_4
cggacgcttgttagaaaagcagtttccgaatcttttacgactcgtaaaatagttgaattgactcatggcttccgccgttgcttccgttgcgaagaagaaaactgctggctctaagaagtctaaatcagctccttcacatcctccatttcttgagatgatttcagatgcaatcgtttcgttgaaagagaggacagggtcgagccaatatgcgatcgcgaaattcatcgaagagaagtataagcaattaccggcgaatttccgcaaagtcttacttgttcagacgaagaagtttgttgcttctggaaagcttgtcaaagtaaaagcctcttttaagctgccttcggcttctgccgcagctaagaaaccgaaaccgaaggctactacaactaaggccaaagctaaaccagcggctaagccaactaaggtagcgaagacggccaaggagtctgacatgtgtgcgagtcgccgggctagaaagtaaaggctccagcaaagaagacagtcgctgtcaagaagcccaagagtgttaaatctccggctaagaaagcggcgccaaagaaggcaaagaagtgaatcgaaaggagtgtttgtttgtaggaggttgttcttttttatttttgttccttcctttttttcctttgcagatggtgtaaatttgatggcgaggtaggggtagtcgtggaatttagatccatatatgtagtatgtattgattatataaagcagtgtacgggttttattaaaaatattattttattttttttttttattttattatttttaatatatttctttttttt

SEQ ID NO: 12912 - DNA, 983 bp, Gossypium hirsutum
  Clone ID: GOSHI-09MAY01-C6485_1
cccacgcgcccgagaaaagaaaacagtttccgaatcttttacggctcgtaaactcgttgaattgactcatggcttccgccgttgcttccgttgcgaagaagaaaactgctggctctaagaagtctaaatcagctccttcacaccctccatttcttgagatgatttcagatgcaatcgtttcgttgaaagagaggacaggatcgagccaatatgcgatcgcgaaattcatcgaagagaagcataagcaattaccggcgaatttccgcaaagtcttacttgttcagacgaggaagtttgttgcttccggaaagctcgtcaaagtgaaagcctcttttaagctgccttcggcttatgccgcagctaagaaaccagccgccgtagctaagaaacctgccgccgcgaagcctaaatctgcagctaccactaccgccgcaaagtccaagccgaaggcgactaaaaccgcgtcgaaaccgaaagccaaagctaaagttgcaacgcctgtgaaggcaaaggctaaagttgcggcgaaaccgaaggctactacaactaaggccaaagctaaaccagcggctaagccaactaaggtagcgaagacggcgaagaagagttcgccagggaagaaagtaaaggctccagcaaagaagacagtcgctgtcaagaagccgaagagtgttaaatctccggctaagaaagcggcgccaaagaaggcaaagaagtgaagagaaagcagtatttgtttgtaggaggttgttcttttttttttttccttccctttgcagatggtgtaaatttgatggcgagctaggggtagtcgtggaatttagatcgatatatgtagtatgtattgattatataaagcaggttacggttttattaatttatcctatgttactctgttttatgaaaaaactcattagtcaggtttcaatcgtggttggatatttatttatatgttttatttaataaaaatttaatatttatgt

SEQ ID NO: 12913 - DNA, 396 bp, Gossypium hirsutum
  Clone ID: LIB3145-024-Q1-K1-G9
cgggtccgaccgcacgcgtccgcccacgccgtccgagaaatgcagtcttccgaatcttttacgactcgtaaaatagttgaattgggtcatggcttccgccgttgcttccgttgcgaagaataaaactgcattcgacttcccggaagagccaaagaaggtattgcatgaataagtagaggatctagaaacaccctaccttttgtttctgcaaattcaatttgtataattcagttagtctttagggctttacaccttaatgataggagcagagcagataacatatgatgttgtactgttttcatacaacggcccgtatgtatagacacttcttgacttaaatatataaaagtagcagttcatatctcaattattaaaaaaaaaaaaaaattaataaaa

SEQ ID NO: 12914 - DNA, 551 bp, Gossypium hirsutum
  Clone ID: LIB3829-024-Q6-N6-B2
ggagaatgaactgctacttttatatatttaagtcaagaagtgtctatacatacgggccgttgtatgaaaacagtacaacatcatatgttatctgctctgctcctatcattaaggtgtaaagccctaaagactaactgaattatacaaattgaatttgcagaaacaaaaggtagggtgtttctagatcctctacttattcatgcaataccttctttggctcttccgggaagtcgaatgcagttttcttttcttgtttcttcggggtgatttttgccagatgtcgcttcacagaattctggtttatttcaaagacaaaagccatgtccctaatctcaatcaaactgcttgaaacaagacccatcagctgtccggtagaaacttccttcccatttaagaatatcgaactcttgcccagattcttcaaagagaaggaaccatctccctccatttttataattgcctgtcgtctagatattttgttagcccgcccttctcttcctaagtcaatatcaacatcaacatccatggttgccctgccaagtacaacctca

SEQ ID NO: 12915 - DNA, 325 bp, Gossypium hirsutum
  Clone ID: LIB3147-052-Q1-K1-C1
cccacgcgtccgatataaagcaggttacggttttattaatttatcctatgttactctgttggagtgaaaaactcagtattcaggtttcaaaataaaacaaaaaaaaaacacgaacagaaaaaaaaaccaaagaacaagactaaaaaaaatcagctgccgctcaggagcgtgctaaagactaagaagatggacacttgaaaaacgaaagagggggggaccgttttaaggaaccaaggtttccgaccccgagacgcccaagatatgctttttcaaaagggtcacaaaaaaaaaattactgggccggtatttcacaacgccggatctg

SEQ ID NO: 12916 - DNA, 673 bp, Gossypium hirsutum
  Clone ID: GOSHI-09MAY01-C6445_7
gtttgatctcttttagcgtaagaaatggctggagactcttatgcatgctttacaatatgacagctatggcggaggcgctgctgctttgaagctagtgatgtagcagcgagaagtcgtaaaggttggaccaggagttacaaatttcaaagctggggataaagttgtagctacgcttcatcattttgccggagggggactagctgaatatgctgtggctaaggagaatctgacagttgcaaggccaccagaagtatcagctgccgaaggtgcacgtttgcctgttgctggtctcacagctcaccaggcactcacccaggcagctggggtcaagcttgacggaagtggccagcaagtaaacctcttgattactgctgcttcaggtggtgtaggtcattacgcagttcaactagcaaagcttggaaacacacatgtaacagccacttgtggggctcgtaatctggattttgtcaaaagccttggagcacgagggtcttgactacaagactcccgacggggcgggtctaaaaagcccttcaggtcgcaaatatgatgcagtgatccactgtgcaacgggcattccttggtctacctttgaacctaatctaagttcaaatgggaaggtaatcgatataacccctggtcctagcgctctcctaacttttgctatgaaaaa

SEQ ID NO: 12917 - DNA, 547 bp, Gossypium hirsutum
  Clone ID: GOSHI-09MAY01-C6445_5
gtgtttctctccgccaccacgtcttcatcatcatcgttccctacttttgctactttaagctcctcttcttcttaaccaccgtctttgtttttctctcgtttatccggtcggtgtatttttcaggaaaatccaaattttcccaaaagatttcccgaaagattcagccatggaagccgatgatgttgacacaccgggatcttcgacgaaggcgtcatcgcttccgacaacaagctcgccgatgccgatttcttcaacaacttcgaagacgattttgatgactccgatatccactaaaaaaacaaagaagaatcgtttcaagtactcatctatcttttttttcccttcttactttcgctttttagggtctgaaatttcttaaaactttgttcaatttagttgaatctgaactgcactatggatgcttatctgtatgcaaatcaaaatagtgtagtttataagtttaaatcgttttaaataaatataattttccttttagttcgtttctcttttacttgcttctttctttaataccatctcttcttcttct

SEQ ID NO: 12918 - DNA, 571 bp, Gossypium hirsutum
  Clone ID: GOSHI-09MAY01-C6445_4
cccacgcgtccggaaatccctagaagcctaaagaaaaggggggaaagatgaggccgatgccgatggaattcgtgacggacccagacgaccaaggttcagccgtggaagtcgacgatgttgacacaccggagatcttcggcgaaggcgtcgtcgcttgcgacgattttgatgactccgatatcgactaaaaaaacaaagaagaatcgtttcaagtactcatctatccttttttttccccttcttactttcgctttttagggtctgaaatttcttaaaactttgttcaatttagttgaatctgaactgcactatggatgcttatctgtatgcaaatcctgtgaatcgtcacaggtcctcgggttcaactacataatacaaattccacctctgaacttcatttttccttcaaaataaagcttcgatttgatctctcttagtgagacaaatggctgaaaatcttatgcatgctttacaatataacagctatggcggaggcgctgctgctttgaagcgtcttgatgttccgaccccgtctccaaataaagaaaaccaacttcccttctttcccata

SEQ ID NO: 12919 - DNA, 1015 bp, Gossypium hirsutum
  Clone ID: GOSHI-09MAY01-C6445_3
ccttctcgtccgaacgccatccttaaaaaaaaacaaaaagcttccatttgatctcttttagtgaaaaaaatggctgaaaatcttatgcatgctttacaatataacagctatggcggaggcgctgctgctttgaagcatgttgaagttccgatccccactccaaataaaggtgaaattttgcttaagctggaggcaactagtctaaacccaattgactggaaaatacagaaagggattctgcgcccagttttacctagaaaattcccccacatacctgcaagtgatgtagccggagaagtcgtaaaggttggaccaggagtcacaaattacaaagttggggataaagttgtatctcttcttgatcatttgactggtggactagctgaatatgctgtggctacggagaatctgacagttgcaaggccaccagaaatatcagttgccgaagctgctggtttacccatggctggtctcacagctcaccgagcagtcacccatggggctggggtcaagcttgacggaagtggccagcaattaaacctcttgattactgctgcttcaggtggtgtaggtcattatgcagttcaactagcaaagcttggaaacacacatgtaacagctacttgtggggctcgcaatctggattttgtcaaaagcctcggagcagatgaggttcttgactacaaaactcccgacggtgcagctctgaaaagcccttccggtcgcaaatacgatgcagtgatccactgtgcttcgggcattccttggtctacctttgaacctaatctaagttcaaacgggaaggtaatcgacataaccccgggtcctagtgctctcctaacttttgctatgaaaaagcttaccttctcaaagaagaacctggtaccactgctattgtcacctaagaaggagaaccttgaatatctcgttaacttagtgaaagataagaagcttaagacggtaattgattcaaagcatcccttaagtaaggctgaagaagcatgggctaagagca

SEQ ID NO: 12920 - DNA, 798 bp, Gossypium hirsutum
  Clone ID: GOSHI-09MAY01-C6445_2
taagaaatccctagaagcctaaagaaagggggggaagatgaggccgatgccgatggaattcgtgacggacccagacgaccaagggtcagccatggaagttgacgatgttgacacactggagatcttcggcgaaggcgtcatcgcttccgacaacaagctcgccgatgccgatttcttcaacaacttcgaagacgattttgatgactccgatatcgactgaaaaaacaaagaaggatcgtttcaagtactcatctatcttttttttccctttttactttcgctttttagggtctgaaatttcttaaaactttgttcaatttagtcgaatctgaactgcactatggatgcttatctgtatgcaaatcaaaatagtgtagtttataagtttaaatcggtataaataaatataattttcctttttaaaaaaaaaaaaaaaaaaaaaaaaaaaaaaaaaaaaaaataaaaaaaaaaaaaaaaaaaaaaaaaaaaaaaaaaaaaaaaaaaaaggggcggccgggggcccccttttttttttttttttaaaaggggaacatttttttttttttaaaatgggcccctcctaaaaaacccctgcggaaaaactgtttttttttttaagtttttgacaccttttttaacccccattgggggtttaaacttgggaaatttataaaacttttcccgggtttttacccctaaaaaaaacccctcctgccttcccctttggggggcaatttttttttcccccggcaaaaccaagggtttttgaaaggaaaaaggtctttggctttggttgtt

SEQ ID NO: 12921 - DNA, 520 bp, Gossypium hirsutum
  Clone ID: GOSHI-09MAY01-C6445_1
gtttatctggtcggtgtatttttgaggaaatccaattttcttgaaagattcccgaccgacgattattccatgtttatcttttcgtcaaaatctcgaaaatcaaaacaattccggtgtttttgtttttgaagctaaagagtcatcttgttttccttctccggatcgcttgattttgccgctaaacctcttctgattttgcagctaggtacactgtgagattttttggaatcaggcgtaatgagaagattgcttgctacgtgactctgaatatttcaagtacgaaagttgaaaaataaagaagaatcgtttcaagtactcatctatcttttttttccttcttactttcactttttagggtctgaaatttcttgaactttgctcaatttagtcgaatctgaactgcactatggatgcttatctgtatgcaaatcaaaatattatagtctataagtttaaatcggtatgatgtaaaacattgtatatcttcataatgttacttttgtacccatccttttagacc

SEQ ID NO: 12922 - DNA, 597 bp, Gossypium hirsutum
  Clone ID: uC-gsronu33B038e08b1
ccctttcgtccgccctagaagcctaaggaaaagatgaggccgttgccgatggaattcgtgacggacccagacgaccaaggttcagccatggaagccgacgacgttgacacaccggagatcttcggcgaaggcgtcgtcgcttccgacgattttgatgactccgatatcgactaaaacaacaaacaagaatcgtttcaattgaatctgaactgcgctatggatgcttatctgtatgcaaatcctgtgaatcgtcacaggtcctcgggttcaactacataatacaaattcgacctctgaacttcatttttccttcaaaataaagcttcgatttgatctcttttagtgagacaaatggctgaaaatcttatgcatgctttacaatataacagctatggcggaggcactgctactttgaagcatgttgaagttccgatcccaactccaaataaagactggtcaagctatggcaagtgctctcaatgttgtacaaacatttcattcgtttggggattaatgcttttatgaaagctgctgaactgaacaggtgtgtgcttttttgtggttttttactacattttagtgataaactatgttact

SEQ ID NO: 12923 - DNA, 374 bp, Gossypium hirsutum
  Clone ID: LIB3493-054-P1-M1-C8
gaaaaagggagaaaggtgagggcgatgccgatggaattcgtgacggacccagacgaccaaggttcagccatggaagtcgacaatgttgacacacgggagatcttcgacgaaggcgtcgtcgcttccgacaaccagctcgccaatgccgatttcttcaactaaaaaaacaaagaagaatcgtttcaagtccttgggttcaactacataatacaaatcccacctctgaacttcatttttccttcaaaataaagcttcgatttgatcttttttagtgagacaaatggctgaaaatcttatgcctgctttacaatataacaactatggcggaggcgctgcttctttgaaaggacttttttataacgctgggaattttt

SEQ ID NO: 12924 - DNA, 451 bp, Gossypium hirsutum
  Clone ID: uC-gsflnu33B064d11b1
tggacgcgtgggtggatctgtcgttcaaaggggcatattcaaaagaaagttcgatggtatctcttttaatgaaaaaaaatggctgaaaatctgatgcatgctttacaatataacagctacgggggaggcgctgctggttcgaagcatgaagagagttccgatccccactccaagaaaaggtgaaattttgcttaaactggaggcaactagtctaaacccagctgactggaaaatacagaaagggatgctgagcccatttttacctagaaaattcccctacatacctgctactgatgtagcgggagaagttgtaaaagatggaccgggagtcacaaattacaaagctggggataaagatgagtctatgctccatcattttactggaggaggactagctgaatatgcagtggctaatgagaatctgactgttgcaaggtcattagaagtttca

SEQ ID NO: 12925 - DNA, 325 bp, Gossypium hirsutum
  Clone ID: LIB3146-010-Q1-K1-G7
gtttcaagtactcatctatattttttttccttcttactttcactttttagggtctgaaatttctaaaactttgttcaatttagttgaatctgaactgcactatggatgcttatctgtatgcaaatcaaaatattgtagtctataagtttaaatcggtataaataaatataattttccttttagctctctgggtttttgtccttttgattgttttataacagactcttcttaaaggataagtgatatacgaaatccatacgaaatccgggagttgaatcctggagttgaaatccaagagttgaatcccttataaagtttaaattta

SEQ ID NO: 12926 - DNA, 315 bp, Gossypium hirsutum
  Clone ID: LIB3584-043-P1-K1-G3
cggacgcgtgggcggacgcgtgggcggacgcgtgggcggacgcgtgggcttttaacgaaaaaaatggctgaaaatcttatgcatgctttacaatataacagctatggcggaggcgctgctggtttgaagcatgttgaagttccgatccccactccaaatcaaggtgaaattttgcttaaactggaggcaactagtctaaacccagttgactggaaaatacagaaagggatgctgcgcccatttttacctagaaaattcccctacatacctgcttctgatgtagcgggagaagttgtaaaagttggaccgggagtt

SEQ ID NO: 12927 - DNA, 1440 bp, Gossypium hirsutum
  Clone ID: GOSHI-09MAY01-C6465_1
cggggcggaccaacgcgtccggttttctgctctgtttttcagtgacaagtttcactggcaaaaccagtttccattgaagtgtggaacccaaatgggaaatacagagttattagcaccaaacctatgcctggaactcgatggatcaacctcttaatcgagcaagattgccgtgtcgaaatatgtactgagaagaaaacgattttgtccgttgaggatatcatttctttgattggcaataagtgcgatggggtgattggacagttgactgaagactggggggagactttatttgcagctttaagcagagcaggaggcaaagcatttagtaacatggctgttggttacaacaatgttgatgttaatgctgccaacaagtatggtgttgctgttggtaacactcctggtgtactcacagaaacaacggcagagctagcggcttctctttctttggcagctgctaaaagaattgttgaagcagatgagttcatgagggctggcttatatgatggatggctccctcatctgtttgtgggaaacttgcttaaaggacaaacagttggtgtaattggagctggtcgtattggatctgcatacgccagaatgatggttgaagggttcaaaatgaacttaatttactatgatctttaccaatcaacacggctagagaagtttgtcacagcttatggtgagttcttgaaaagcaatggagagcaacctgttcactggaaaagagcatcaagtatggatgaggtgctccgggaggcagatgtgataagtcttcacccggtcttggataaaaccacctatcatctgatcaacaaagaaagccttgcaacaatgaagaaggaagcaatacttgtaaactgtagcaggggcccggtgattgatgaagtagctcttgttgagcatctgaagcaaaatcctatgttccgagttggtcttgatgtctttgaggatgaacctttcatgaaacctgggcttgctgagatgaagaatgctgtcatcgtaccacacattgcttctgcttccaagtggactcgtgagggaatggcaacgttagctgctctaaacgtcttgggcaagatcaaaggatatccaatttggggtgattcaaatcgcgtcgaaccattcttgaatgagagtgttccacctcctgctgcatgtccaagcatcgttaatgcgaaagcgttaggtttacctgtttcaaagctataagcaccaacggtcggtccgggttgcggtccgagtagtttctcctatgaatgtgaagtttggggttgtactgagtttagtttatgctagactgacaatggcaattaccatgtatatgttgcatggggaaagtactccttttatttacttacattttgctgtcttgtatgtaatagagaacagctttataatttcatcaaaaaaaaaagaatagtatatgtacattta

SEQ ID NO: 12928 - DNA, 237 bp, Gossypium hirsutum
  Clone ID: LIB3120-021-Q1-K1-B3
ggcataaccagtttccattgaagtgcggcacccaaatgggaaatacagagttattagcaccggacctatgcgtggaactcgggggatcaacctgttaatcgagcaacattgccgtgtccaaatatgtactgagaataaaacgattttgtgcggtgaggatatcattcctttgactgccaatctcaccaacgggtaaaaagaacgggtatctggatgaccatattgcgactttatttg

SEQ ID NO: 12929 - DNA, 241 bp, Gossypium hirsutum
  unsure (1)..(241): unsure at all n locations
  Clone ID: LIB3165-031-P1-K1-H12
ggcaggccttacgtaaaaacagttttaatttaaatgtttaatttaaattgggaaataaaaantaagggccggtaaattttttagttgggggcgatggatcaacctcttaatcgagcaagattgccgtgtcgaaatatgtactgagaagaaaacaattttgtccgttgaggattatcatttctttgattggcaataaatgcgatggggggattggacagttgacttaaaacttgggggagac

SEQ ID NO: 12930 - DNA, 456 bp, Gossypium hirsutum
  Clone ID: GOSHI-09MAY01-C6415_1
cccacgcgtccgcccacgcgtccgtttttcttcggtttctctgcctgtccctccttgaagacaagaatcagagagcatggcagccacactcagcctcctgaaatccccgttattaccccaaaagcctcaccttctacaatctaaactccccctcctttctaaccccacaaagcaatttatctgcaatgagtcttttaaccctccaaaactcttcgctgagactgttcatcacctaaaatcagcttctcttccccttacaacactcgcatttcccttcttatttgacgccgaggatgctcttgctgttggtggagagtttgggattttggagggtagaagttttgcacttgtacaccccattgtcatgggtggtctcttcttttacactttgtgggctgggtatttgggttggcaatggaggcgagtgaggaccatccagaatgagattaatgaact

SEQ ID NO: 12931 - DNA, 805 bp, Gossypium hirsutum
  Clone ID: GOSHI-09MAY01-C6405_1
cccacgcgtccgcccacgcgtccgcccacgcgtttgcaacaacaacccccatcagaaataacattttctcctttcttcttatttcttcattataaaaaaagaaaagaaaagacatggctgctgttactgctgcagtctctgttccttctaccaagtccacctctctccctgctagaacctctcttgtctttcctgataggatcaccttcaagaaggtgcccgtttactacagagatgtttgcagtggggggagagtggtttctgtcagggcccaggttacaactgaagctcctgccaaagttgtaaaggaatccaagaaaaacgatgaaggtgttgtggttaacaagttcaggcctatcaacccttacattggtagatgccttctaaacactaagatcactggcgatgatgctcctggagagacttggcacatggtcttcagcaccgaaggagaggtcccctacagagaagggcaatccattggggtgattccagatggcgttgacaagaacggaaaaccacacaagctgagattgtactctattgctagcagtgctcttggtgattttggggactccaaaactgtatccctatgtgtgaaacgactggtatacaccaacgagaaaggagagcttgtcaaaggagtctgctccaatttcttgtgtgactgaaactctgggcggaagttaaaataactggacctgttggaaaagaaatgcttatgccaaaggatcccaatgccacaatcatcatgctcgctactggaactggaatcgctccctttcgatcatttctgtggaaaatg

SEQ ID NO: 12932 - DNA, 369 bp, Gossypium hirsutum
  unsure (1)..(369): unsure at all n locations
  Clone ID: LIB3165-030-P1-K1-G6
aagggcccgcccacgcgtccgcccacgcgtccggacatggctgcttttttagctgcagnctcttttccttctacgaaggccacctctctccctgctagaacctctattgtctctcctgataggatcaccttcaagaaggtgcctgtttactacagagatgtttgcagtggggggagagtggtttctgtcagggcccaggttacaactgaagctcctgccaaagttgtaaaggaatccaagaaaaatgatgaaggtgttgtggttaacaagttcaggcctatcaacccttacattggtagatgccttctaaacactaagatcactggcgatgatgctcctggagagacttggcacatggtcttcaacacc

SEQ ID NO: 12933 - DNA, 671 bp, Gossypium hirsutum
  Clone ID: GOSHI-09MAY01-C6625_1
ttcaattttcactagctacttgacttcattgcttaattattatttgcagaaagatggattcaattaaatcgcatgcagtatgtcttccaagcccagcacaaggtcatattaaccccatgatgcaactggccaagctcttgcactctagaggcttccatataacctttgtcaactccgagttcaatcatagacgatttatacggtctagaggggaagaagctgttaagggtctgcctcatttccggttcgaagccatacccgacgggctgccaccttccgattctgatgcgactcagtctgttccggcactatgcaattccacacggaaaaattgtttggctccattcttggagctactatctaagcttaattcctcaccccacctgccgcctgttacatgcatagtttgtgatggaaccatgaactttggtaccaaggcagctcaactcattggggtgccttatgttcaactctggacttcttcaaccgttagctttctgggatttctgcactacaaagaactagctcaaagaggcattgttccattcaaagatgaacgcttttgtagcgatgggacacttgagatgcccattgattggatccctggtatgcctaacatgcgttaaggacataccaagcttcataagaaccaccgaccctgatgacttcat

SEQ ID NO: 12934 - DNA, 804 bp, Gossypium hirsutum
  Clone ID: GOSHI-09MAY01-C6185_1
attggagcatacgaccaaaaacacgggcgggtagaaatgaatatctaaatcctcactagaatcctaattcacgtttgaacgcgtcgataaaacgcttgcgctctctaagttatcgtccgtccggctccgattataataagtaaaaaacgaaaatttagctaactcttcattttcgttgcttttcatctatttgtttttatttaggccgacgcacatggagaataataatagctccgacgaaaggccgacggtgatggtgacgaacgacgacggaattgacgccccaggactccgagctctagttcgcgtcctaatctcctccaatctatttcgcgtccttgtttgcgctcccgtttcggagcaatcagctgttagtcatagtatcacatggcgtcaccctgtttctgtaaagcaagtagatatcaatggagccattgcttttgctgttttcggaaccccagctgattgtacttctttgggtatctcaaaagaactattctcttttgttcctgatctggtcatcagtggcataaacatgggcagcaactgtggttatcatgttgtctactctggcacggttgctggtgctcgagaagccttcttcaatggcatacctgctgtttctgtatcatatgattgggttggaggtaagaacagtgttgatgactatatgcttgctgccgaggcttgcttgcaaatctttagggcaatactagctgagattaagaataaagttatcctctaatggctttttgaatatagatatcccgacagatattgccaaccacaaggggtattatttgt

SEQ ID NO: 12935 - DNA, 477 bp, Gossypium hirsutum
  Clone ID: LIB3585-048-Q6-K1-D9
atcagctgttagtcatagtatcacatggcgtcaccctgtttctgtaaagcaagtagatatcaatggagcgcattgcttatgctgtttccggaaccccagctgattgtgcttctttgggtatctcaaaagaaccttctttgggtatctcaaaagaactcttctcttttgttcctgatctggtcatcagtggcataaacatgggcagcaactgtggttatcatgttgtctactctggcacagttgctggtgctcgagaagccttcttcaatggcatacctgctgtttctgtatcatatgattgggttggaggtaagagcagtgttgatgactatacgcttgctgccgaggcttgcttggcaatctttagggcaatactagctgagattaagaataaaagttatcctctaaatggctttttgaatatagatcctcccacagaatattgccaaccacaagggggttaagttgaccacacat

SEQ ID NO: 12936 - DNA, 710 bp, Gossypium hirsutum
  Clone ID: GOSHI-09MAY01-C6155_2
ataaaatcaaggtagtcgccactcgccaccaggaaggggaaaattcccttgtaaaacactttgctttcgatctgagaatttgccaagagaaatcaaatcctatatcttcaatttctgctgatagaaaattcacgccacgaggcataggttattgaaaaatctgcaagtacttgaatttgtgtgaaggaaagatgcaaaatcaggatggagcggtagctgatagggaaaaggaatctgctgtatccattcccatttctgaagttgatgactgggcaaatttcgcagatgatgatatcatgcagcaacaatctgccattcatgctgaggaggccaagaaaattccatttggtggtgacaagggaccactctctatgttggcagctgaatatgattcatgaagtcctatattgctagaaaaaataaaggtgccttgatcagcaatatgctgccattagaagccgcgaggagatggaaactgcttttccggagttttatgttttcataccttgacatattttggaatctcaagacccgctgagttggatcgtatcagggcatgttgaagaatgtagaagacgctcaagctagccaccagatttacattgagactttttcgtacctatatatcttcatctttcttctaactgatagtatttattcacttctagatttggcaataaaggctgtttttcatttgcccatttaacaag

SEQ ID NO: 12937 - DNA, 1354 bp, Gossypium hirsutum
  Clone ID: GOSHI-09MAY01-C6155_1
cccacccccccgcccccccgggagggggaaatcaaatcctatatcccccttgtaaaacactttgctttcgatctgagaatttgccaagagaaatcaaatcctatatcttcaatttctgatagaaaattcacgccacgaggcataggtcattgacaaatttgcaagtacttgaatttgtgtgaaggaaagatgcaaaatcaggatggagcggtagctgatagggaaaaggaatctgctgtatccattcccatttctgaagttgatgactgggcaaacttcgcagatgatgatatcatgcagcaacaatctgccattaatgctgaggaggccaagaaaattccatttgttggtgacaaggaaccactctctatgttggcagctgaatatgaatcaggaagtcctatattgctagaaaaaataaaggtgcttgatcagcaatatgctgccattagaagaacgcgaggagatggaaactgctttttccggagttttatgttttcataccttgaacatattttggaatctcaagaccgtgctgaggttgatcgtatcaaaggcaatgttgaagaatgtagaaagacgcttcagagcttaggccacacagattttacatttgaggactttttttcgttattccttgagcagctggaatgcgttcttcaaggaaaagaagattccataagtcaggatgagttaatactaaggagtcgagatcagtcaatttccgactatgttgtaatgttcttcaggtttgttacttctggtgaaatacgaaagcgatcagagtttttcgaaccctttattttgggagtaaccaatgccaactgtggaacagttttgcaagtcatccgtagagccaatgggtgaagagagtgatcatgtgcacattactgccctttcagatgctctgggtgtgccaattcgtgttgtgtaccttgatcggagctcttgtgacattggcggtgttagtgtaaaccatcatgatttccttcctacttcgggcgataagtcaaatgctaaaggtggtagcactgttcctgtcaagccttttatttccttgctatatcgtccaggccactatgacattctctatccaaagtgatgcatttgcattttctggttgttaacaatgtcctaatcagtggtcctttgggggaaaatttaccttgcaggctgacgtgtgactgtaatgcaaacgcatagactcgttattcggatgttactcatgcttctgaactctttatgtgcttcttaactgtgtggtatgaacaaaaggtttcctcaagacttggaactttgtatcttcctattgagaatagcctcacccagaatctatgtgaaattgcatccatcc

SEQ ID NO: 12938 - DNA, 523 bp, Gossypium hirsutum
  unsure (1)..(523): unsure at all n locations
  Clone ID: LIB3585-006-P1-K1-D1
attccgggcgaccacgcgtccggaagatcataaggtgtgtacatatttttactttgccttgatattttcctggtttaagtggcttgctcttttcataccacatgtactgataaccatgaccgactgatagccgtgtagcttgaatttagttgcctacatctattggtaattaaactagactgatcttctgaacaaggatttccccatttttcagtcaggatgaattaatactaaggagtcgagatcagtcaatttccgactatggtgagtgtgttataagattttgaggtattgatctgtctttctccttggtatatttcataacaagtttggttggttagttgcaatgttcttcaggtttgttacctctggtgaaatacgaaagcgatcagagtttttcgaaccctttattttgggattaaacaaatgcaacaggtggacagttttgcaagtcatncgtagagccaatgggtgaagagagtgatcatgtgcacattactgccctttcagacgctctgggcgt

SEQ ID NO: 12939 - DNA, 1483 bp, Gossypium hirsutum
  Clone ID: GOSHI-09MAY01-C6145_1
cccacgcgtacggttaaattcagagaagaattagaggccaatctgctcggggagagatcgagatctgctcgggcttttagacgcggcggtgcacatggggaccagtgttgggcaaatcgacggtgctactgcgcaagctaacgtcgcaagggactattacggctttgattaatggggatgacgtgtttattgtcccacataccacccagtgaccatattgtgatcctttttgctaataaaaagactgggtggaacgtctgttctcttttttccgccccgtgggctttagaagcctgagctgaagagcatccaagccatcttgaatctgtttttcgcccgtatttatatcttgatatctaagaaggcccgataatggatcgtaaagagagggtatgtggtgagctacaaaaggaatgttcccaaaggcgcgtcttctacttatgtcattccccaccatcagcagaagtgggaagatccatcatccactttagattacagcaccaggatcgaacctcctttccaggcattcaaccagacctgtcaaactcaatctttgttgttgtgtaataaccaaatcaaagtccctatgcaagatggttccatgttccgcctgctcctgcttcccccttaaatccaagattgggatccaagtgctatgctaaacaatctctcattccttgggcagaagatccatcagcttcaggatttggtgtatttaatcattgcgcggaagggtcaagtgttggggcgaccagacgaacttcttgttcagcagcaacagctagttactgcggatctcacttcaattatagttcagctgatatctactggctggtagtcttctcccgtctgtaaagcaaacactttctgcagccactacgtctctgggacagtgtggggagtttggtggagttgtcttcccttcttctgcacaagggctgaatgatggggttcagccacaaaatgctggtggaagcaaagtctctgagccgccaaattctgttgatattactagtaacaatggaaatgagcaaagtaatcatataatcgaggagcatgaattgaaagatgaggaagatgcccacgcggccgaaaaccttttgcctggcacgtctgagatactgcagttagaaaaggaagaaatccttgcggcccacactcatttctgcactatatgtggaaaaggattcaagagagatgcaaatttacgaatgcatatgaggggtcatggagacgagtacaaaacaccaggggcccttgcgaaacccactaaagaatccagctctgaaccaactattattaagaggtattcctgcccttatgctggttgcaagcggaacaaggatcacaaaaagtttcagccactgaagaccatgttatgcgtcaaaaaccattacaagagaacccactgtgacaagagctacatttgcagcagatgcaataccaagaaattctcagtaattgctgatctgaaaactcatga

SEQ ID NO: 12940 - DNA, 490 bp, Gossypium hirsutum
  Clone ID: LIB3582-019-P1-K1-A11
aatctgctcgggcttttagacgcggcggtgcacatggggaccagtgtcgggcaaatcgacggtgctactgcgcaagctaacgtcgcaggggactattacggttttgattaatggggttgacgtgtttattgtcccacataccacccagtaaccatcttgtgatcctttttgctaataaattgactgggtcgaccgtctgttctcttttttcctctccgtctctttagaagcctgagctgaagagcatccaagccatcttgaatcttagagggtatgtggtgagctacaaaaggaagttcccaaaggcgcgtcttttactaagttcaatacacagcatcagcagaagtgggaagatccatcatccacttcagattacagcaccaggatcgagcctcctttccaggcattcaaccagacttctcaaactcaatctttattgttgtgtaataaccaaatcaaagtccctatgcaagatggttccgtcaatgac

SEQ ID NO: 12941 - DNA, 1121 bp, Gossypium hirsutum
  Clone ID: GOSHI-09MAY01-C6105_1
gttctagatcgcgagcggccgctcgcgatctagaactagcccacgcccctttttgttcaaggaccacttcttcccttccattttactttgttttagttgccataacgtcaccttccaatacaacccacaatgaggcaacaatatgtcttcactactctcacgttgctcatcctgttttccctcagttgttcaacaacattagcccaatctccggcactggccccggcaccttctggcccgacaaacgtcaccaagatcctcgaaaaagccggtcaattcaccctcttcattcgtcttctaaagtccactcaagtggccaaccagctgctcggtcagctcaacaattccaacaatggtatgaccgtttttgcaccaacggacaatgctttctccagccttaaatcgggcacattgaattcactcaccgatgaacaaaaagtgcagctggtgcaattccacatcgtcccaacatacctcacctcgtctcagttccaaaccattagcaaccctttgagaacccaagctggtgatagtggcgatggcaagttccctctcaatgtcaccacttcggggaactctgtgaatataacaacagggttgacaaacaccagtgtttccggcactatttacactgatggtcagcttgctgtttatcaaatcgatcaagttcttcaaccattgcaaatatttgcacctaggcctccagctccagcaccggcaccggcaaagtcgaagaataagaaggctaccaccgttgctgatagccccgatgttaccccagctgataactccaaagcggccaccttgcaaaatgttggtttgtttggagttgctgctctagttattgcactttctttgtgaccatgaaaatggagaaaagaagaagacagtgattttgatggtgatcaagatggcgagtgttttttattttttcaataattatcatttaaaaaatttatgttctgtatgaagattgaattttgagttcgtgttgttgatttcatttatttttgttttgaaattttctttgttatctcttacttctcaattgtaattgtgaattttgtgtcactttcttcatcctttctctttttaagattttgcatcattgcttgtttttg

SEQ ID NO: 12942 - DNA, 381 bp, Gossypium hirsutum
  Clone ID: LIB3083-064-Q1-L1-G2
tggtcacatatccactccaaaatctactctgtgttccctgcttttccaagcaatgtagttgctcatcaatttctttcctttcaaataaacatcccaacagagtttgctaaagttgataagtatgtcttctagttaactaaagtagcatattttacctaacttcaccctccaatatcctaaataaaaagctcccatttcttatccaatcaaaacatccataaatttttgttcaaggaccacttcttcccttccattttactttgttttagttgccataacgtcaccttccaatacaacccacaatgaggcaacaatatgtcttcactactctcacgttgctcatcctgttttccctcaattgttcaacaacattagcccaat

SEQ ID NO: 12943 - DNA, 304 bp, Gossypium hirsutum
  Clone ID: LIB3189-021-P1-K1-H5
acggattccggttcgagccacgcgtcacgcgtgctaacaacattagcccaagctccggcacctgctcttgcaccttctggtccgacaaacgtcaccaagatcctcgaaaaagccggtcaattcaccctcttcattcgtcttctaaagtccactcaagtggccaaccagctgctcggtcagctcaacaattccaacaatggtatgaccgtttttgcaccaacggacaatgctttctccagccttaaatcgggcacattgaattcactcaccgatgaacataaagtggagctggtgcaattccaca

SEQ ID NO: 12944 - DNA, 792 bp, Gossypium hirsutum
  Clone ID: GOSHI-09MAY01-C6095_1
ttttgttttgacagaaacgagaatgagtgtgaagtggaaggtaaaatacctagtgcctacttagaaaatgcagccactgccattttttcttcccacgccaaccgtatttccatgccttattcaagttattttccacttccttttcctttattataacaccaccaccatcatatatatatataaatctttcaattcactttagtgtagtttatgccgtctctctttgtggtttcttcatatgaaataacgaagagggaaaaacccagacatgagtgacataaaacccaagtttctggaggtctactctgcacttaaatcagagcttcttgatgacccggcttttgagtttactgataattctcgccaatgggttgagcgtatgctagattacaatgttcctggaggaaagctgaacagagggttgtctgtcattgatagcttcaagttgttgaaagaagggaaagagctgagtgatgatgaattttttcttgcatgtgcccttggttggtgcattgaatggcttcaagcatactttcttggtctcgatgatatcatggatggctctcacacacgcagaggtcatccatgttggttcaggcttcctcaggttgggatgattgctatcagtgatgccttaattctgcgaaaccaaatcttcagaattctcaataagcactttagaggaaagccttattatgtatatttactagatttattcaatgaggtgagtttgtgttgcactgacttgagactgccgatgttcactcgcatttgatataatcaagtgctgct

SEQ ID NO: 12945 - DNA, 1112 bp, Gossypium hirsutum
  Clone ID: GOSHI-09MAY01-C6075_1
atcaaacacgttacaagtcacggcaattgttatctcatggtatgtttgagattccctaggaagcaaatttcaccaacattgagcagttcctggaacctcttaaactttcttataaatcactttgctcttgtggtgatcggccaattactgatggaagccttcttgatttcttgaggcaagtgtcaacctttgggctctcacttgtcagacttgacattaagcaagagtctgactgtcatatagatgtcttagatgccattaccaaacacttagaaattggttcctaccgagagtggtctgaagaacaaaagcaggaatggctattatctgaactaagtggcaagcgtccattgtttggttcagatcttcctaaaacagaagaaattgctgatgttttagatacattcaatgtcctagcagagctcccagcagataacttcggagcgtacatcatttcaatggcaactgcaccttctgatgttcttgctgttgagctcctgcaacgtgaatgccatgtgaagcaaccattaagagttgttccactgtttgagaagcttgcggatttggaggctgcacctgctgctttggctcggctcttctctatagattggtacagaaatcggatcaatggcaagcaagaagttatgattgggtactcagattcgggtaaagatgctgggcgtttctctgctgcctggcagttatacaaagctcaagaggagcttataaaggttgctaagcaattcggtgtgaagctaacgatgttccatggtcgcggtggaactgttggaagaggaggtggtcccacccatcttgctatattatctcaaccaccagaaactattcacgggtcacttcgggttacagttcaaggtgaagttattgagcaatcgttcggagaggaacacttgtgctttagaacactccagcgttttactgctgccacacttgagcatggcatgcacccaccagtttcaccaaaaccagaatggcgtgcactgatggatgaaatggcggtccgtgctacggaggagtaccgttccattgtcttcaaagaacctcgatttggtgaatatttccgcctcgtaagtgaacttgcatactcacattct

SEQ ID NO: 12946 - DNA, 537 bp, Gossypium hirsutum
  unsure (1)..(537): unsure at all n locations
  Clone ID: LIB3825-004-Q1-N6-G3
agcttccaaaccacaattaatattaaatgctttcagcactagnnaatcctgaaaaatgaatgtgtttcatcaccaactgtctgtatccaaatccttcagcaataacaaagtttatgctacatcaatattttaaagtagcaacaatggccatttcatccatcagtgcatgccattcaagctttggtgaaactggcggatgcataccatgctcaagtgtggcagctataaaacactggagtgttctaaagcacaagtactcctccccaaatgattgctcaatagtttctggtggttgagataatatagcaagatgagttggaccacctcctcttccaacattcccaccacaacatggaatattgttagcctcattccaaattgcttagcaacctttataagctcatcctgagctttgtataatttccaggcagtagagagatgcccaacatctttacctgaatctgaatacccaatcataacttcttgctttctattgatccgatttttgtaccaatctactgagaatagccgtgccaa

SEQ ID NO: 12947 - DNA, 511 bp, Gossypium hirsutum
  Clone ID: LIB3829-034-Q1-N6-H8
gaaaaagaatgcgttttatcaccaaccgtgtgtatccaaatccttctgcaataacaaagtttatgctacatcagtcttttaaaggggtaaatgcatcaccaccagcaataacggtactcctcagtagcaacaatggccatttcatccatcagtgcacgccatttaggctttggtgaaactggcggatgcataccatgctcaagtgtggcagctgtaaaacgctagagtgttctaaagcacaagtgctcctccccaaacgattgcttaataacttcagcttgaactataacacgaagtgatccgtgaatagttttaggtggttgagataataaagcaagatgagttggaccacctccttttccaacagtcccaccacgaccatgaaacattgttagcttcattccaaattgcttagcaacctttataagctcctcctgagctttgtacaattgccaggcagcaaagagacccccagcatctttacctgaatctgaatacccaatcataactt

SEQ ID NO: 12948 - DNA, 1102 bp, Gossypium hirsutum
  Clone ID: GOSHI-09MAY01-C6025_1
gacttgtctttgacagaaccggagatctctagactgggtgctattgttaaaattctaaaagacaaatcacattaccatacaagccagtttgctgatgttgacattgcgttgttgctgaaattgttgaaaacatggccagttgccatgatatttcctgttattgacatgctgaggatgaccgttctgcaccctgatggggcaacagtacttttcaggcatgttgaagtcaatgatgcggtaatggaaatgattatgaaagccacgactgatcctgcacttcctgcaaatcttttaaccagcatccgtgctgtaactaactttttcaagaattcaagctactatggctggctgcaaaagcatcgtagtgatattcttgatgcattttcaagttgtcttgcatcaccaaacaagaatttacagttggcttattcaaccctgatactaaattatgcggtgctgctaattgaaaagaaggatgaagaaggtcaatcccatgttctttcagcggctttagagattgctgaacaggaaactctagagattgattcaagattccgagctttagttgccattggatcactgatgcttgagggtctggtgaaaaaactagcaatggactttgatgttgggaacattgccaaagcagcaaaggcttctaaggaagccaagattgcagaaattggagctgacattgaactgttaacaaaacagagttgaaagctggtggttcctagatgagagagaatggtcgagagtttggacagatcttctgtgtagggatcaaattggagattgcggagaaaggtgggtcggaaaaattcattttaaccaatcatatattccggggaacttggggcatcatctcataaaacccaaccgtttgcagcatattttgcttgctttatattactgtttacggatggtaagacagcttgggtggttgatctttaggcttcatttgttcacagaaaacaggcaaagcaaaatgatgcaaaaatggatcaaattgctggttttcatttgatttaatgatgcgtagtttatggtcacttgccaataactggcgacatgaatgcacacataaataattgaatatttctgc

SEQ ID NO: 12949 - DNA, 670 bp, Gossypium hirsutum
  Clone ID: GOSHI-09MAY01-C6395_1
gcggcacagcaagccaatgagtggagcgcagattttattctcaaaaaaccaacttcacttcccatttcctagtcttccacgatgactcccctccacttcttcctcctcctcctcgtccgcctcctttcgtcagctgctttaatctccgccgccgccgccaccaccgcatatccttccatcccgggcaccgattccacaactgattgtggcctatccggaggagacgagaatccagttcccatccgtcgcgaagtctacggtaacggcaagatattcgacatcagccataggtacaccgtcgacatgccgtcttgggaatccaaggacggcgtgggacagttcctatggttgcctaaaagcatgaagaacggttccctcgctaataattcggagatgaaactcccaactcacaccggcacccaccttgacgctcccggacacgtcatcgatcggtacttcgatgccggcttcgatgtcgataccctagatttggaagtacttaatggtcctgccctgttgatagatgttccaagggataaaaacattactgccgaggttatggagtctttgaaaataccaaagggagtacgtagagttcttttcagaacattaaatactgacaggcggctaatgtttaagaaagagtttgatacaagctacgttggattta

SEQ ID NO: 12950 - DNA, 1186 bp, Gossypium hirsutum
  Clone ID: GOSHI-09MAY01-C6385_1
gcgtccgcccacgcgtccgcccacgcgtccgcccacgcgttcttcatttcaaagattctctcaaaacagtgagggagtagtagttcgagttatcgacgacgttttttttcaacacgaaaaaaaatggataacttttacgcaccagggaagaaccatctcttcgttccgggtccggttaacataccggaacccgttattcgagccatgaaccggaacaacgaggattaccgttccccggctattccggcgatgacaaaaacccttctcgaagatgtcaagaagatattcaagactacgaccgggactccttttatgatcccaacaacaggaaccggtgcatgggagagtgcacttactaatacgttatcccccggtgaccgaatcgtatcgttcctcattggacaattcagtcttctttggatcgatcaacaacaacgtctcaaattcaacgtcgacgttgtcgaaagtgagtggggacaaggtgctaacctcgacgttttggccgaaaaactcgcggccgatcgtacgcacaccattaaggctatttgtattgttcacaacgaaaccgcgactggagttaccaacaacttggccacagtgagaaaactactagatcattacgggcacccagcactgcttctcgtcgatggagtttcctcgatttgtgctctcgatttccgtatggatgaatggggagttgacgtagccttaaccggctcgcaaaaggcgctttctcttccaaccgggatcggtattgtttgcgctagcccgaaagctctcgaggcgaccaaaaccgcgaaatcagtccgggttttcttcgattggaacgattaccttaagttttacaaattaggaacattttggccttacactccttcaattcaactcttgtatggactaagagcagctttggaccttatttttgaggaaggacttgacaatgtcattgaaaggcatagtcgtttaggcaaagcaacaaggcttgcagtggaagcatggggcttgaagaattgcacacaaaaggaggaatggttcagtgacacggtgacggcggtgcttgttccaccatatattgatagttcggaaatcgtttaacgggcatggaagagatacaatttgagcttaggtcttggccttaacaaagtggcaggaaaaagttttcagaataggacatctttgaaaccta

SEQ ID NO: 12951 - DNA, 422 bp, Gossypium hirsutum
  Clone ID: LIB3165-050-Q1-K1-D4
gtcatttcaaagattctatcaaaacagagaggttttttttataacgagttatacacgacgtggtcgttgaacacgaaaaagaatggatgacttttatagaccagggaggaaccatctcttctttactgcaacggttcacataccggaacctgatattcgagccatgaaccgtgataacgaggattaccgttccccggctattccgcgaatgacaaaaacccttgtcgataatgttcagaagatatgaaagactacgaccggtactccctatatgaacccaacaacaggaaccgacgcatgagagagagcacttactaatacgttatgccccggagaccgaatcatatcgggactcattgaacaatgcattcttctttggatcgatcaacaacaacgtctcaaggacaacgtcgacgttgacg

SEQ ID NO: 12952 - DNA, 390 bp, Gossypium hirsutum
  Clone ID: LIB3120-014-Q1-K1-E6
ccgggcgaccacgcgtcgaaggtgctaacctcacgtttggccgataactcgcggccgatcgtacgcacaccattaaggcgttgggtgttgtttacaacgaaaccgctactggagttaccaacaacttggccacagtgagaaaactactatatcattacgggcacccagcactgcttttcgtcgatggagtttcctcgatttgtgctctcgatttccctatggatgaatggggagttgacgtatcattaactggcttgcaaaaggcgcttttctctttcaacctggaatcggtatttgtttgcgctagctcctaaagctcttgaggctaatcaaaactgctaatatttcttcgggtttttttactatttggtactaataacctttaatgtt

SEQ ID NO: 12953 - DNA, 781 bp, Gossypium hirsutum
  Clone ID: GOSHI-09MAY01-C6335_2
tttgtgtggatcacaaaggtcttttctcgatgtcttgagaactttgaaagactgcaatatcaagatagcttatggtcgattctcattgaactccaaggttatcgtgatctagacttatttattcagcaaaatgatgggaaaaagattgtggatcccgataagcaagacggattatgttctcgtttgaggatggaaatgcttcatccattgcgtgttatcatttcgaaccgagggccagatactgaacttctggttgctaatccggttgagttatctggaaagggaagaccaagggttttctatgatgttacacaagctttaaagtctcttggaatttgcatattctcggcagaaatcggaagacattcaagttcggaacgggaatgggaagtgtacaggttccttttggatgataactgcaaattcaaattctcaagtattggaggtagaaatcagattgtagatagagttagaagattactcatgggatggtaagaatggtcttcttctttgtatcttatgattcctagcatcacctgggtgtccaaacccgaccgagaccacaagcgcaaagttccgatccgcgtttgtattttgacgcatttagcttctttgtattgtcaaataaaccttttaaaatacctaccaagtgaacatatctcaccgaacaccctgaactttctagctgtaaatttgtagggaggttagattgtgttaacattgtgactaaagctgttcatttgcctagttacccgttcgaaatttgaaaaaatttgcgtac

SEQ ID NO: 12954 - DNA, 650 bp, Gossypium hirsutum
  Clone ID: GOSHI-09MAY01-C6335_1
caatacttgtgttgatcacaaagtcttctcttacgatatcttgagaaactttgaaggactgcaatatcaagatagcttttggccggttctcaccaaattccaaaggctaccgtgatttggacctctttattcagcaaaaggatggcaaaaagtttgtggatcctgagaagcaaaatgggctatgctctcgtttgaaggtggaaatgcttcacccattgcgtgtcatcatcgcaaaccgggggcctgatacagaacttctggttgctaatccagttgagttatctggaaaggggagaccaagagttttctatgatgttacactagctttaaaggctcttggaatttgcatattttcggctgaaattggaagatattcgagttcagatcgagaatgggaagtctacagattccttttggatgagaactgcggattccaattattgagtacgttagctagaaatcagattgtagatagagttagaagaatgctgatgggttggtgagtgcagtcaatcttctttgtacatgtcttatgagtccctccataactaagatgttattttctcctggtttctactattgagctttaataatctccgagtcttgtttccccaacaacaccccccagggcggccatcgcgttagaacaa

SEQ ID NO: 12955 - DNA, 921 bp, Gossypium hirsutum
  Clone ID: GOSHI-09MAY01-C6325_1
cttagattcatagcacttgtaaatttattattttttatttatttcttcttttggcgaaattcctatttgcaacaaagatgatagcttgcttgggtcgaatagtacacgacagcgacgccgagtcgaagctggacgacgacgtttccaccatattcaactctctcaatttacaaggcagcatcgaaaacggcgacgtttccggcatagccagtaaagatttcggcggtctttattcggttaagcccttgtatctaattagaccatcgggagccgaggatatatctcgggtcgttaaggccgccgccgggactccccacctgacggttgcggctaggggtaacggccactcaatcaacggtcaggctatggccgacggtggttacgtgatagacatgcgttccactggggaaaaccatttcaatctcttgaccgtcaatggctccccttgcatcgacgtctccggcggggcattatgggaagacgtcttgagacggtgcgtttcgaggttcgggttggctcccaggtcgtggaccgattacttgagcttgaccgttggtggaaccttgtctaacgccggcgttagtggacaagccttccgttatggtccccaaacatcgaacgtaacggaactggaagtcgtaacgggggaaggagatataacggtttgctccgaaacccaaaacccggaactctttttcggagccctcggtggactcggtcagttcggtattattacccgagcaagggttaagcttcagccagctccggacatggtaagatggataagggtggtgtacgccgagtttgaggaattcactcgggatgctgagtttctggtgagtcagaaagaagacgagtcgttcgattacgtggaagggttcgtattctgcaacaacggacgatccagtcaatggctggccc

SEQ ID NO: 12956 - DNA, 421 bp, Gossypium hirsutum
  Clone ID: GOSHI-09MAY01-C6295_3
cccatttccagcaacacccagtcaatacacctacactaattgccggaagtccgtagcttggagcttgtcctgactgcttcctccactaattgccggaagaagccggctgtaaaagaaagatcttttacttcaacctggcttcggttgaccctctttcggtggtagtaagagcagaatcttgggttggtgcttgaagtaagggtcatcaaagagacggatcagtttccttttaatttcaccggtgatttctatggccatggaaaccctagatgaccagaaacccgaggaagaggaggtgatagataaagaaaatgaagagggaagtgaaaagttgaatcgttcaagtgccgtatctgcaaatacaccctccaaaatttgtcatacttttcctggaaatggaagatgtcaaaggttaagtttc

SEQ ID NO: 12957 - DNA, 641 bp, Gossypium hirsutum
  Clone ID: GOSHI-09MAY01-C6295_2
acaaagtcaatacacctacactaattgtcgatggtttttttattaatacagttgttcttcaatttctttttctttttcttttggtttgcagttgaatcgttcaagtgccgtatctgcaaatacaccctccaaaatttgtcatacttttcctggaaaagctcctgaaatcagtccacaatcttcccagtttcactttaggaactttaaaaatctccacaaaagaaaaaagaaaagaaaaaaggaagaagacgaagaagaagaatcagctttgcttcctttttgctgggtgtctatttacatggcagctcacattgccacagcaatgaagcccaagaacaataacagcaacagtaacaacaacagcaactgttgcagcaatggctacagcagcgatgtcagtaacgggagcgacaacaactctccaagcccacctccatcgccaccgaagcctcgtcttactctgtccctgtcgcagtgccgccgtcggctgcgttccaagaccaagtccttcgtccgccgtgaaaaccttggttccggcctgaacttccggcgtaatctccgttacttgttgctgctgccactttcgtacatttccggcttgttaatgtgtggcgggcccgttttcatgaattttgagaatt

SEQ ID NO: 12958 - DNA, 688 bp, Gossypium hirsutum
  Clone ID: GOSHI-09MAY01-C6295_1
gtttaacttgcagaggttcaaaacaagtgtaacatttaagggaacacgagaacggattaacagaaagagattgaagctccgcgatggcctctcttctcagtccctctgcagcaatttctcttcgactcaagttgaatcgttcaagtgccgtatctgcaaatacaccctccaaaatttgttgtacttttcctggaaatggaagatgtcaaaggttaagtttcaagaccaaagctgcgggttcagttgaaggaaatgtactggacaaagaatcggctagtatcagtgacaagatagattatggagttgttggtattcaccatgttggaattctatgtgaaaaccttgaaagatcgcttgaattttatcagaatattttaggtcttgaaataaatgaggctaggccacatgataagcttccatacagaggtgcttggttgtgggtgggttctgagatgatacatttgatggaacttccaaatccagaccccttaatcggaagacctgaacatggaggccgagaccgtcatgcttgtatttcaattcgagatgtatctaagctgcaagcaatccttgacaaagccggtattccctacacacttagccgatccgggaggccagcaatatttacacgagatccagatgcaatatgcactagacttcacacaagtctgaagcctgtgataatact

SEQ ID NO: 12959 - DNA, 383 bp, Gossypium hirsutum
  Clone ID: LIB3493-018-P1-M1-B10
cgcagttgccttggtgccttagttcatagtttgccacattacggtggactttacaagcaaaataaagtgtatattatatttgttgctttctcctacatctgatgcttcttcaattttggatggaattacatttaagtattgtcattgatgtagattatggagttgttggtattcaccatgttggaattctatgtgaaaaccttgaaagatcgcttgaattttatcagaatattttaggtatgtaatctcttttctatactcatattatagatattgatttatttttgcaagaaagaaagagagaaactgagcatctgcttctaaatgttaaattaggtcttgaaataaatgaggctaggccacatgataagcttccatacaga

SEQ ID NO: 12960 - DNA, 451 bp, Gossypium hirsutum
  Clone ID: GOSHI-09MAY01-C6285_2
gttttgaaaccaaatatatacttttctccccatcacaaacatatctcagaaattttaatcacgcgctcaaacaatgctggtaatgtcaagtaccagcgtttcaaccagccatgttgtgaacttgaagagagatcaccctttactccattttcaagctcaagggttaaagcctaaaccctcctctcatttcttattcaatccacactctaacactgttgctgcttcatcatctaaagctttcaccacttttgcactcttcaaaccaaagaccaaagcagctcctaagaaggctgcacctaaaccaaagccaaaggttgaagatggaatctttggcacctctggagggattggttttaccaagcaaaatgagctctttgttggacgtgttgccatgattggctttgctgcatccttattaggtgaagcaataacagggaaaggaattctagca

SEQ ID NO: 12961 - DNA, 536 bp, Gossypium hirsutum
  Clone ID: GOSHI-09MAY01-C6285_1
taaaatctaagaagaaagagatagcaattgtcctcaaatatctcatacaaggaattaaattgaatcaatggctcaaaccatgttgctcatgtctagccatgcagtgagcttgaagagagatcaccctttactccatttccaagctcaagggctcaagcctaaacctgcctctcatctcttcttcaatccattgtctaacggtgtccatacttcatccaaagctttcaccactttagctatctttaaatcaaagaccaaagcagctcccaagagggttgagccaaagtcaaagccaaaggttgaagatgggatctttggcacctctggagggattggttttaccaagcaaaatgagctctttgtgggacgtgttgccatgcttggttttgctgcatcattgctaggcgaagcaataacagggaaaggaatcctagcacagctgaatttggagactggaattccaatttatgaagctgaaccccttcttctcttcttcattcttttcaccctccttggagcaatcggagctttgggcg

SEQ ID NO: 12962 - DNA, 766 bp, Gossypium hirsutum
  Clone ID: GOSHI-09MAY01-C6245_1
gaagagaggagaggaaaataatggtgggaaagaagagttatttggcaatgaggagtgagcgagaagcaactgatctcatcgcatctgacttccaagatctaatctttgctactaagaagcttgctaaccatgctatcaaattgggttcttggggatttgggaccacccttcttgaatggatcgcttccttcgctgcaatttatctattgatattggaccgtacaaactggaaaaccaatattcttacagcactgttaatcccatacatcttcttgagcctgccttccttcctgttcaacatcttgaggggagaagttgggaaatggattgcttttattgcagtcgttttgcgcttgttcttccctacacgtttcccagattggctggaacttcctggagcattgatacttctaatagtggtggcaccgagcttattttcaagcacaataaggaacgactggattggtgtggtgatatgcctaggcatagcttgttatctacttcaggagcacatcagagcatcgggtgggtttcgaaattcattcacccaagccaatggaatatccaacacaattggcataattattctgttggtttaccctgcttgggctttggtcactgccatcctctagattcagctgagctcagcttctggattgtgtgtgttttagtttcgtcaagttcatgatttgttttttctgcaccattaatttgttgagacttaccaaaattcattgttattgttgttccataacacttgtttact

SEQ ID NO: 12963 - DNA, 375 bp, Gossypium hirsutum
  unsure (1)..(375): unsure at all n locations
  Clone ID: LIB3149-024-Q1-K1-F3
cggncgaatattcttacagcactggtaatcccatacattttcttgaaccttcctttctttctggtcaacattttggggggagaaagtgggaaatggattggttttattggaagccgtttgcccctggtctttccttccccgttaccaaaatggcttgaaccttctggaaccatggttccttttattagggggggaaccgacctaattttcaggcccaataaggaacgactggatgggggtggggatatgcctaggcataccttgttatctacttcaggaccacatcaaagcatcgggtgggtttcgaaattcattcaccaaagccaatggattatccaccacaatgggcataatatttctgttggttaaccctgc

SEQ ID NO: 12964 - DNA, 391 bp, Gossypium hirsutum
  unsure (1)..(391): unsure at all n locations
  Clone ID: LIB3149-024-Q1-K1-F4
ttacagnactgttaatcaaatactttttattgagtttgacttagttgctgtntgggaggttgtggggagaagttgggaaatggattgattttattggagttgttttgtgcttgttcttccctacacgtgacccagattggctggaacttcctggagcattgatactggtgatagtggaggtaccgagcttattttcaagcacaataaggtacgactggattggtgtggagatatgcctacgcatagcttgttatctacttgaagagcacattacagcatccggttggtttcgaaattcattgagcataggcaatggggtatccaacacaattggtataattattgtgttggcttaccctgcttgggctttggacactgacatactgtagat

SEQ ID NO: 12965 - DNA, 608 bp, Gossypium hirsutum
  Clone ID: GOSHI-09MAY01-C6265_1
gaaaattctcgggctgcaactgtacaggcaaaatcccatcttgtgaaagctgcaaagactcagagatcaaattcttccctgacctgtttgctactggtgatatttgcaattgtgattctgatcgtgatcatagtactggcagcctgatcaacaagctcatccaatgtgtttgaagaaccatttaggtagtgttcggaaagtcacctagttcggtgtaattgtttgtaattacacaatgatgacatgtttgggtaaccattgtaattgataagtctcaccaaattgggtgaccttaaagatccttaagatcttctcgggaagaggagggtgaactttttggtaatgcatttgatcatgttgttttgtgaggatgatgtctgactggagtttcactaaaattcttagtatatagcatgtggttatcggtcattcattatgatgtttttgtttatcttcgggtaggttctttttagtgtaagttgtttttgggtttgttgaggctgtgttacagctttcttgcgttgcgtgctccctatagttttcttgaaatttcgtgtaataaccagttataatgctttgtttgtcaatatacatgcatattacatagt

SEQ ID NO: 12966 - DNA, 537 bp, Gossypium hirsutum
  unsure (1)..(537): unsure at all n locations
  Clone ID: AI728830.1
caaattggtttctgccaaatggattcaagcactaatgacgtaatccgtgattgtcccccgttctttaaagtctacaaagatggccgagttgagagatactttgtcacacaaccggttccggcggggctggaccggacggccggcgtccaaactaaagatgtggtgatttcaccggctgtcaaggccaggattttcatgccacaaagtacaaccccaggtcagaagcttcccctgcttgttcactaccatggcggtggcttttccattggatcggccttcgacaccgtcacctataaagtggttgccccacttgtaaaacaagccaatatcgttgtggtttcgattgattacaggctagcccccgagcatcctctaccgattgcgcacgatgattcatgggtatggctacaatgggtcgcttctcacgcaaacggacaagggcccgaaccatggctcaatgacaatgcggatcccanccgaattttcttggcaggtgaaagcgccggagccaatattgcccacttcgtggcagtccta

SEQ ID NO: 12967 - DNA, 225 bp, Gossypium hirsutum
  unsure (1)..(225): unsure at all n locations
  Clone ID: LIB3585-048-Q6-K1-G10
tcccgctcgaccacgcgtccgcaccggttccggcggggctggaccggacggccctctaccatactaaagatgtggtgatttcaccggctgtgaatgccaggattttcatgccacaaantacaaccccaggtcataatcttaccctgcttgttcactaccatggcaaactgttgttttttaaatcacactttaaaaaacatcaatttatcctaatgtcctaaccta

SEQ ID NO: 12968 - DNA, 532 bp, Gossypium hirsutum
  Clone ID: GOSHI-09MAY01-C6235_2
caccccccgactctgaaactcatccttccccttctctctcaaatcctcctcccctccttcttcaccacacaccacaactactatactcccaaaatgtctcttacaatccccactaacctctccaaatcccttttgaagccaaagctaaactccaaactcacccccaaagtttcacgatcattggtggtatgctccaccgacaagacttcatcgccaccatcatcagcttcaccactccaagccttctcagcagctcttgctctttcttccattcttctctcagccccgcagcctgccgtagctgatattgcaggcctcacaccatgcaaagagtccaagcaattcgccaaacgtgagaagcagcagatcaagaagctggaatcgtcgttgaagctatacgcccctgacagcgctccagctctcgctatcaaagcaaccatcgagaaaaccgagagacggtttgacaactacgggaagtacgggctgctgtgtgggtctgatgggttgcctcatttgatagtgagcggtgatc

SEQ ID NO: 12969 - DNA, 1036 bp, Gossypium hirsutum
  Clone ID: GOSHI-09MAY01-C6235_1
caaccacaaccatccatctcagctttcttatccttcctcccaccactagtctctcccttacccgaatctaaaagaataaaaccgatccctcaccttccccgcgggcccccccacgcgcccggaaatataccagaaaatcaaaaagaagaagaaaagagatccccatgatgtctcttacaatcccaactaatctctcaaaatcaattttgaagccaaagctggagacccaagtgatccccaaggcttcatccagatcattgattgtatgctcctccagcaatccttcctcctccgacaaatcggcttcatcactccaggccttctcagcggctctcgctctttcttccatccttctttcggctccactccctgctgttgcggacattgcggggctcactccttgcaaagagtccaagcaattcgccaagcgcgagaagcagcagatcaagaagctggaatcctcgttgaagctttacgcccccgatagcgcaccggctctcgccatcaaagccaccatcgagaaaaccaagagacggttcgacaactacggcaagtacggcttgctctgcggctccgatgggttgcctcatttgatagtgagcggcgatcagaggcactggggtgagttcatcacgcccggtctgttgttcttgtacatcgctggatggatcgggtgggtcggaaggagctacctcattgctattagcgatgacaagaagcctgccatgaaggagatcatcattgatgtgcctttggctaccggtcttatatttagaggctttatttggccagtcgctgcttacagagagcttatcaatggtgaccttgctgtcaaggacgtttaatctcctcagggatcgaatggaaggacttgaactccaacgaatagctagggaagaagatgggagtgcttttagactgaatattcttggtgggaaatttcttgtacttaaaaatgttgtttaaaaaaacatacttttgagtcttatgtaatgctaatgttgaaacatttgttaactgaacgactttccatttc

SEQ ID NO: 12970 - DNA, 410 bp, Gossypium hirsutum
  Clone ID: LIB3165-012-P1-K1-C6
ggattacccgctgagtttaagcatatcaataagcggtgcaaagaaatataccagaaaatcaaaaagaagaagaaaagagatccccatgatgtctcttacaatcccaactaatctctcaaaatcaattttgaagccaaagctggagacccaagtgatccccaaggcttcatccagatcattgattgtatgctcctccagcaatccttcctcctccgacaaatcggcttcatcactccaggccttctcagcggctctcgctctttcttccatccttctttcggctccactccctgctgttgcggacattgcggggctcactccttgcaaagagtccaagcaattcgccaagcgcgagaagcagcagatcaagaagctggaatcctcgttgaagctttacgcccccgatagcg

SEQ ID NO: 12971 - DNA, 342 bp, Gossypium hirsutum
  unsure (1)..(342): unsure at all n locations
  Clone ID: LIB3165-004-P1-K1-H2
gttagtcgatcctaagagaccgggtaagcccgttcaacagcgcaagtaatgcgtgcaaataaagggtatagccataaaattgacacacaagtgatccccaaggcttcatccagatcattgattgcatgctcctccagcaatccttcctactgcgacaaatttgctttataactccaggccttcttagcggctgttgctctttctttcatgcttatttcggctccactccctgctggtgcggacattgcggggctcactccttgcaaagagtccaagcaattcgccaagcgcgagaagcagcanatcaagaagctggaatcctcgttgaagctttacgccccc

SEQ ID NO: 12972 - DNA, 602 bp, Gossypium hirsutum
  Clone ID: GOSHI-09MAY01-C7895_1
ctttctctcttaaatctttgaaaaaaaatccatctctctgcaatccccgatctggtgaaatattaaaatggaaacaattctttcttctcactcccttcatccaatcttgaatcccaaagcatccggttccaagaaccttttgttaccttcacagcaaccaagaccagcctctctctttctctcaaaacccattacttgtaccctcaagaaacccacttcccaatcagtaaaaccatctttggcagaacccagaaattggtttgttcatgcacagcaagggctagcagcattagctatctctttggcactcaatttttctccagttctatacactggcaatgcaattgcatcggaatttgatgtgataaatgagggaccaccaaaggaatcttatgtagttgatgatgctaatgtgcttagtcgagtgacaaaatctgatttgaagcgccttttgtctgatttggagtcaaggaagaacttccacatcaattttattactgttagaaagctcactagcaaagctgatgcttttgagtatgctgaccaagttctggagcgttggtatcctacacttgaagagggtagtaataaagggattgttg

SEQ ID NO: 12973 - DNA, 394 bp, Gossypium hirsutum
  unsure (1)..(394): unsure at all n locations
  Clone ID: LIB3165-022-P1-K1-E9
ctcaaaccccattacttgcaccctcttttaatttactgcccaaccagaaaaaccggggccggtcttaatccataaatgggctgcgcacatacacancaagggctagcaccattagctatctctatggcactcaatttttctccagttctatacactgccaatgcaattgcatccgaatttgatgtgataaatcatggaccaccaaacgaatcttatgtagatgatgatactaatgcacttagtccagtgacaaaatctgatttgaagcgccttttgtctgatttggagtcaacgaagaacttacacatcaattttattactgttagaaagctcactagcaaagctgatgcttttgagtatgctgaccaagttctggagcgttggtatcctacac

SEQ ID NO: 12974 - DNA, 946 bp, Gossypium hirsutum
  Clone ID: GOSHI-09MAY01-C7805_2
aaaaaacaactgctattcccactctatgtttccattcttatttgtagttctgggtataatctttgttggtcacttacctggaagcaataaaaacgttcctggagttggccattttccctcttgtaatcttatcttctacttatcagcttttgaccctttccatttttgcttttcaacacacttttaaatcccaaagtttctctctacctttgaaactctataattttctctttgttttctgggaatccttgatcaaatcgttaatggcaagaacaagcaacaagaacgtacaagccaagctggtactgcttggggacgtgggaactgggaaaacaagcttggttttgagatttgtcaaaggccaattttctgattttcaggaatccacaattggagctgccttcttcactcaggttctgtctctaaacgaagccacggttaagtttgatatatgggacacagcaggacaggagagataccatagcttggctcctatgtactatcgaggtgctgcagctgccatcgtggtctacgatatcacaaactcggaatcctttgagcgtgccaaaaaatgggttcaagaactgcaaagacgaggaaatccgaatctgataatgttcttggtagcaaacaaggttgacctggaagaaaagagagcggtgggaaatgaggaaggtgaagtatatgccaaagaaaatggtttgactttcatggaaacatctgcaaagaccgcacagaatgtctgcgaactcttctacgaaatagcaaagaggttggcaaaagctgctccttctcggacaagtggaatgaaattgcataccgacggcaagaaagcggaagaaggctattctgttgctcctcgtgatacaaaggtcatcaaactgaagattatgctggttcctggctgaatttgcttcaatgaatattggctgtgcctatatgcacc

SEQ ID NO: 12975 - DNA, 812 bp, Gossypium hirsutum
  Clone ID: GOSHI-09MAY01-C7805_1
aaaataattatttacaaaatggcatccgcttttgcttttgcttctggaacctcaccttcattcttaccctctaacagcctcaaacccaaacattcaccgcttcgtcgtcctttggcgcctattaacataagatccgaaagcatggctactgagaaactcggcatcaaagttgaaaccaacccctcagaatccaagctttctcagcttggtgtacgccagtggcccaagtggggttgtcctcctagtaaattcccatggacatatagttcaaaagagacatgttatctattggaagggaaagtcaaggtataccctgaaggtagcaatgactttgttgaaattggtgctggtgatttagttgagtttcctaaagggatgagttgcacttgggaagtttcagtggctgttgacaaacactataagtttgagtgagtgcttttataacctcatgctcttcttttaccttcttttctccattgttattatgaaataaaatataaatgcttggggtgatgtaagatacctctatattgttcaagtttgattatgatttggagctcagtacttcatgtttatttagcttattaaatatggtcttattctattcggcggccgcccccgctcctggctgaatttgcttcaatgaatattggctgtgcctatatgcacgtacactgctgaaacacaggaaaagctttattgtgaatttcaaatgcgctcatttcgtgtaaaagatgatcatggatctctaatgaataaggttcaacaaaaaaatgactttgattactgaataataatgtgtttatgtccag

SEQ ID NO: 12976 - DNA, 539 bp, Gossypium hirsutum
  Clone ID: AI727928.1
caaagtttcccttttgaaattttctatctctaaagctctttggatttttttttcctctattgttttctgggaaatttcatcaaatcgtgaatggcaaggtcgagaaataagaacatacaagccaagctggtacttgttgggcacatgggaactgggaaaacaagcttggtattgagatttgtcaaaggccaattctttgatttccaggaatccacaattggagcagccttctttactcaagttttatcacttaatgaagccaccgtaaagtttgatatatgggacacagcaggccaagagagataccatagtttggctccgatgtactatcgtggtgcagccgctgctgtcgtggtctacgacgtcacgagctcggaaacgttcgagcgagccaaaaaatgggttcgggaactgcaacgacaaggaaatcagaatttgataatgttcttggtagcaaacaaggttgacttggaagacaagaaaaaagtgggaaatgaggaaggtgagcaatatgccaaagaaaatggcttgactttcct

SEQ ID NO: 12977 - DNA, 526 bp, Gossypium hirsutum
  Clone ID: GOSHI-09MAY01-C7595_2
cccacgcgtccgcccacgcgtccgcccacgcgtccgcccacgcgtccgcccacgcgtccgcccacgcgtccggtttttgttttttgttttttcgctttcacaccacattcttcagtgcaggcaccatggcagcttcctcagctttgttcacccctatcttctccaccgtccaaaagaagaatggcattgttaccccctccagcatctcattccacggccttagacccctaagcaagggcaaatcttcatccaacgccatctccttctcaagaaactcagctgctagtgccaggcttgcaatcaaagcagagctgagcgcccaagttgtgataagcgtcagcactgctctctcccttttcttgggtagatttgtgttcttcaacttccaaagagagaacgttgccaagcaagtgcctgagcaaaatgggttgacccactctgaggctggggacgcacgagccaaggagtatgttagccttctcaagtccaacgaccctgtgggattcaacatcgttgatgttcttgc

SEQ ID NO: 12978 - DNA, 561 bp, Gossypium hirsutum
  Clone ID: GOSHI-09MAY01-C7595_1
ctgaatctcaattaatcaaccacacactcaggcagccatggcatcagcctcagctttgttaacccccatcttcaccaccaccctccaaaacaaacatggcagccgccacaacatcgccactccatcgttccaaggcctcaggcccctacgcaaggccccctcctccaagctcgcccccttgtcttgtggtagaaaggttggtggtgtgaaggctgagctaagcgccccagtggtgataagcctaagcacaggcctctcccttttcttgggtcggttcgtgttcttcaacttccaaagagagaacgtggcgaagcaagtgcctgagcaaaacgggttgacccatttcgaagcgggtgacactcgagccaaggagtatgttagcctcctgaaatccaacgatccggtgggattcaacctggtggatgttctggcttggggatccctgggtcatattggtgcttactatatcttggccacctccagcaatggctatgatcccaagttctttggctgaacatcagcttcgccttcgtaattatgtctctatgttgtacaagatta

SEQ ID NO: 12979 - DNA, 430 bp, Gossypium hirsutum
  Clone ID: GOSHI-09MAY01-C7505_2
gctgatctcctcgacaagttgagtgttggagaaagtaaaagtgacggtaaagaagaagatacggtcgttgcttccgacaccaaggaagccgtcaaagatgaagcaaaaacagaggaagataagaaggatgaggctgcttcaaaagcatagacctgaaagagaaagcaacaatatactcgagtaagtttattataaaaaaattaatatttagtggtttaaggagagaattatataaatatattcccactcaggttacgtagttttattaatatttgcaaaaaaatcaaattatgttggaacctgtggatgggagggtttgtttgttttgtctgcatggaattgtaagagttttaatttggaaaatctaaaggtatcacgcttggtttgaaggccaaaccgatgttttgatgcaaaaaaaaaaaaacaaaac

SEQ ID NO: 12980 - DNA, 1103 bp, Gossypium hirsutum
  Clone ID: GOSHI-09MAY01-C7505_1
cttttcttttcaatttctttctttatatttatatatttttttgcttgtttagctgcaccaatggcgaccgatgctaaagcagatccagagccgcactgcagagaagacgatgacaacgctcccgccaccgccgcagacgatgaggacaccggtgctcaagtagctcctatcgtcaagctcgaggaagtcgctgtcactactggtgaagaagacgaggatccgattctcgatctgaaggcaaagctgtatcgtctcgcgtccgcccgcgcgcccgggaaggagagaggagttggaaatgtgaagctcttgaagcacaaagtcaatggcaaagtccgtcttgtcatgcgccaatctaaaacccttaagatctgtgctaaccatttcgttattccaacaatgacggtgcaagaacattctggaaatgataaatcatgcgtttggcacgccgctgatttcgctgatgggaatttgaaagaagagatgttctgtatcagatttccttctgttgagaattgcaagaccttcatggagacagttcaagaggttgctgaaagtcagggaaagaaagaggaaaacaaagacgccacagtcactgctgatctcctcgacaagttgagtgttggagaaattaaaagtgatggtaaagaagatacggtcgttgcctccaacaccaaggaagccgtcaaagatgaagcaaaaacagaggaagataagaaagatgaggctgcttcaaaagcatagacctgaaagagaaagcaacaatatactcgagtaagtttattatatataattaatatttagtggtttaaggagaaaattatatatatattcccactcaggttacgtagttttcttaatatttgcaaaacaatcaaattatgttggaacctgtggatgggagggtttgtttgtttgtttgtttgtctgcatggaaaatctaaaggtattacgtttggtttgaagggcaaaccgatgttttgatggaaatttgctttctagttggatttaaaatcacaattctaaaagtaatttcaatgtagaattgaatgaatcctttattctggtttaccattattaatacagaggtattcaatttgaacaat

SEQ ID NO: 12981 - DNA, 409 bp, Gossypium hirsutum
  Clone ID: LIB3165-017-P1-K1-C9
ctttatatttatatatttttttgcttgtttatttgcaccaatggcgaccgatgctaaaggagatccagagccgcactgcagagaagacgatgacaacgctcccgccaccgccgcagacgatgaggacaccggtgctcaagtagctcctatcgtcaagctcgaggaagtcgctgtcactactggtgaagaagacgaggatccgattctcgatctgaaggcaaagctgtatcgattcgataaggaagggaatcaatggaaggagagaggagttggaaatgtgaagctcttgaagcacaaagtcaatggcaaagtccgtctagtcatgcgccaatctaaaacccttaagatctgtgctaaccatttcgttattccaacaatgacggtgcaagaacattctggaaatgataaa

SEQ ID NO: 12982 - DNA, 624 bp, Gossypium hirsutum
  Clone ID: GOSHI-09MAY01-C7445_1
cggacgcgtgggcggacgcgtgggcggacgcgtcctttcctttccttttctctctctctagcaatggagtcgcgattgttatcacgcgcttctgttatcaccggcttacctcagctcaggccgaagctttcgccggggattgtcaacgtttcgtatgcttcggctaagccgatcggagccgtcggtgaaggcgggaacgtcatatggcggaggcaactaaggccctccttgctactcgaatgctcgtcggttagcaagcgagaggttctgaaaccggtttcggctgccgcgtcgtcaccggccgagggaggaagcgattccgccggggaggggaagatcgctccggttggattcttcgagaagtatcctgctcttgttaccggatttttcttcttcatgtggtacttcttgaatgtaatattcaacattctcaacaagaagatctacaattacttcccttatccctattttgtatcggtcattcacttgttcgctggggtagtttactgtttggtgagctgggccgtaggcctccctaagcgggctcctattgattcaaacctactgaagttgctgattcctgttgctgtatgccatggacttggtcatgtaactagcaatgtc

SEQ ID NO: 12983 - DNA, 450 bp, Gossypium hirsutum
  Clone ID: GOSHI-09MAY01-C7475_1
cccacgcgtccgaactcattccccgcaaaaccttaacatttcttgatctcaccttccctcatttcgtcaaaaaaatatctccccgcccacgcctcggaatctctctccattcaccgtggcaacttctacttcttctttgctccaatccaacactttgaacttgaaacactatttcccccttcatttgcctcttccttcccctcctcgcctatctcatttcactggaactttggctttcaacggtcaacgttcggcaaagttcactgttaaatgcttcttctcgtcggagcagaggaaacatttgacgagctcgagtttgggctccaacaaccagttgagttccagctcaaatgacaaaaacccattcgacattattgctcaaacaatgttaaaagctttgaacgcgttaaaaaagcccgctatagccgcggttttatcgcgtttgttgct

SEQ ID NO: 12984 - DNA, 817 bp, Gossypium hirsutum
  Clone ID: GOSHI-09MAY01-C7795_1
cccacgcgtccgagattccaaaaaccaaccatggcatccactgataaaactgctgtcccactgtcatcaccaaagtctgaagctaccccaccatccgcagtggcggctgcggctaagtcccctgtcaactattcttttgtcgatgttgttcttcgggtcttattatttgccgctactctaacttcagtggtggtcatggctaccagcaaggaaaccgagctggttccagtgccaggcttccctttagttaggatccaactccaagcaaagttcaatcattcacctgccctcgtatatttcatagcagcattatcagtaacaggcttctacagcattatcactacgttggcatcactttcaatcgtccttaaccctacctattccaaaaccttcttgctcttttttgctttcttcgatgtggtatttgccgggatcgtggcctctgcaaccggtgcagcaggggccgtcggttatatcggagtagggggcaacactcacgttcgggtggaccaaaatctgcaatgtctacgacaagttctgtcgatacacagcgagctcgcttgcgctctcactgtttgctgccatccttctggtgttgctctcaatgatatcaaccttcacactttacaaaaagatccgcgactagacatatccctccatgtcccaagtttacagcttaaagaacatttgaaaatgtcaatctgtgtgtagcttaaatgtttttcttttggtctgcaaatgatatgtttttaatttgcttttgttatctgttggtcttcattgcgtatttcatgtagtaattcaattgaatgatatt

SEQ ID NO: 12985 - DNA, 661 bp, Gossypium hirsutum
  Clone ID: GOSHI-09MAY01-C7655_1
cggaaaaccggggccgaccacacgcgtccgcccacgcgtccgattttctctacctttggttgttccttttcttgtctcttctaatcttttatatttccatatatttttttagaaaaaaaattgtaaatccctcttgctgtttttctgccatgggtgttgctgttctaaaaccagaagactgtttaaagctacctaatcccatgaaacaacctcaaaacccttggcataatcctaatcccaacactaaccgcacgaatcgttcacaagggaaccgtaagaagcgttctcccaacacctcccctccttctcgtcccaccgtcggtcgccccaaagctccggccaagaatctcgtcatgggtcaagtcaagatcctcaaacgcggcgaagatcttaaaccatctaagccggataagcatgtgaggttcgcgaaggaaaacgttgatgtagatctggtttccaccgactgtttgggtccagatcccgggtccgtcccgacccagatccgactcaccgagtcagaaaacaacggaagtaaggtcctcccggtctcgttctacgctgggtctgcctttataacatcgccccctccaagttctgttccgtgcgccgtttcacaagaggacgggttgcttgaagatacgtctacatgcctgagagattt

SEQ ID NO: 12986 - DNA, 660 bp, Gossypium hirsutum
  Clone ID: GOSHI-09MAY01-C7635_1
ctcataactgcgttctttcttttccgttgacgcaactttttcctcctttaagtaaacctttgtccaaaccccaaaaacatggcgcctcaacgtaccaagccctccctccctttgaagactagggtcttcatctcccttatctccgccgtcactgacgcctcctgccgctccgatggctctgtcaaccgccgtctcctccgcttactcgactaccaagcccctcctaatcccaagccttctaactccgtctcttcttctgaccccaccgtcgatgcttcccgcaatctctggtttcgcctcttctctccttccctcccttccgatctcctccttcccgtcgtcgttttcttccatggcggcggattcaccttcctcagccccgcatcccaggcgtacgacgccgtttgtcgtaggttcgcccgtaagtttcctgctttcgttgtctccgtcaattaccgtctagctcccgaacatatctacccatctcaatacgacgacggattcgacgttcttaagtttttaaacgacaacttcgccacagtcttaccggaaacgctgactatcacgggtttctagccggagatagcgcggcggaccatcgctcaccacgtagcagccgggcttgggagctgggttgaacattgaggtgatggactcgtt

SEQ ID NO: 12987 - DNA, 444 bp, Gossypium hirsutum
  Clone ID: GOSHI-09MAY01-C7135_1
cccacgcgtccggccatggattccctcacttgcacggcctctgacctcgtccccctcctctcctcctccgccaatgcaaccgccctcgcctccttcctttgcgcccgtttctccaccatctccagccaactctctgacgccactcacgccgttgacaacacttacctcctcttctccgcttacctagtcttcgccatgcaactcggctttgccatgctttgtgctggctctgtcagagctaagaacaccatgaacatcatgttgactaacgtccttgacgctgcagccggtgctctttcttattacctctttggttttgcctttgcctttggtgccccttctaatggtttcattggacgtcatttctttggtcttaaagcatacccttcacccgacggtgattataggttttttctttatcaaagggcttttgctatagctgct

SEQ ID NO: 12988 - DNA, 568 bp, Gossypium hirsutum
  Clone ID: GOSHI-09MAY01-C7125_1
cccacgcgtccgaaaacactgaaaaagcaaaaagcttttcaaaaaccaaaacaatggtgtttttattttaacattcgaaccatatttctactttttctttccttaaaacatcgaaaattcgactaaaaccaaacatcaaatctctaatttacattcttagcagcttttttttttgttcccttcagaaaatgagtccaaggcaagaccttctcaaaatgacggcgttcttcatctcgccggagaaaccgcgagacatatccgtactcatcacccgaaccgctctcctcctctgccttttcacctccattactctcgtcctttgcgtatctttctcgaaccggcctcacccgttctctcggttcacttcccctaacaggaaagctttcccccgaccgcccgataattcaccgaccaacatctcccacctcctcttcggcatcggcgggtcagccaagacgtggcaagagcgacgcgccttgagttcactatggtgggacgtgaacctcactcgcgggttcttttggctggatgaaaagcccgaagcgacggcggttaacagttatggtac

SEQ ID NO: 12989 - DNA, 422 bp, Gossypium hirsutum
  Clone ID: GOSHI-09MAY01-C7045_1
cccacgcgtccgggacatttggtcttggatatgtgagcctcctaacaatgacgattggggtgaatcagacccacacccaccgctcgcctttacaatggcgagttctgaggaaggcgactcaagctcaactcgttcgatccaactcaaagccgagcgtaccatggggtccgattcagaggtctgtataaccttcacaataagcttccaagggttccaatcttcacctctttgggtctctgacccctgttctctatcttcagagcaacctttcctccctttagtacttcagcttctccaagaaaccatcagccgttcaccagcaatgcccaacaccatttgcccgaggtctcagcttcaaaaactcaaacccgaacccatttcttggatcattgagtctcactcacccgaatcattctcgagtt

SEQ ID NO: 12990 - DNA, 682 bp, Gossypium hirsutum
  Clone ID: GOSHI-09MAY01-C7015_1
cttttccaaaccctaaatcccctttgaaactgccaattctccttcccctagcagcgggcggcaggtttagactggagagaacacctttcagcctttcaatctcctcttaacttcgatattaactaagcaagaggagatccacggcgtgctttcaagataaactccctcttttcccttttttattcatgccttagagtaaaaaacaacagatggacaaaatatcaagccgaaaaaaaaggaacgcctccgagatttcagttggaaaatcacctttaagaatcgattgttttctattgcttttgtttttgtatgtgtatttctgtgtttatgtggcgtttgagtgtgtaatatgcgtgtatatattgcattcgtcaccaaaatacactgatttttgaggtctttatagccgaaaagaaagaataataaaaatacaattttcattcctttccatttgctactctgctgtcgttttttttttgtatgtatttgctgctgtggtttgtccatttcttcgcaggtacaggtgcgttggcgctcgggtacggggctgggctggcgtacggagacgcgtgtgtgtggctgctggagggtacggaggccagggctgaggcttggctgcggcgcgagagtgggaactgctagggtttctgaagttttaatgttctgggcctatcgagccttg

SEQ ID NO: 12991 - DNA, 865 bp, Gossypium hirsutum
  Clone ID: GOSHI-09MAY01-C7395_1
ttcacgcgtccgctcacgcaagaagcgagctttgcacctgcaggaaaacagccacaaagataaagctgaattccaagaagcaaagatgttgagcgtctcaattgcgtccccagctaccttaactctccctccaaaacccaaatcctcaattcccaaaacttccttcaccggcgttagaatccagcacttatgtccccaacggttgccttctcaggcgacctgcttttggcaaccgtcaccttcgtcctccgtggtcatgatggctaagagagaagaagaaatgaaggaaataagagccaaaaccactgaggaaatcaacgatgaagtggttgaattaaaaggtgagcttttgatgcttcgtctccagaaatcggttcgtaatgagttcaagtctagcgagtttgggcgaatgcgcaaaaggattgctcgcatgcttactgttaaacgggaaagagagctcgaagagggcatcaacaagcgattgtcaagaaagctcgatcggcaatggaagaaaagcattgttgtgaaaccacccccatctttgatcaagttgagagagcaagaggcagcagaagaagctgagaaatcggctgcttgagtgatccagtgtttgatactttcacattttcatggctttgtgaagtgctcttttaagttgttgcagtttctatttcagacccattttgtgcataatgttttggtgttgaagttaaagctaggattccttcaatgttttgtttttaacctcaaaactttcttcctctcgtggggaaacacttgacaaaattcaattttaccatttctggttttttctagctttcgacaaagcttgtgacaagagttgggataacatcatcttattctt

SEQ ID NO: 12992 - DNA, 400 bp, Gossypium hirsutum
  Clone ID: LIB3145-040-Q1-K1-C3
cccacgcgtccgcccacgcgtccgcccacgcgtccgcccacgcgtccgcacaaagataaagctgaattcaaagaagcaaagatgttgagcgtctcaattgcttccccagctaccttaactctccctccaaaacccaaatcctcaattcccaaaacttccttcaccggcgttagaatccagcacttatgtccccaacggttgccttctcaggccaccttctttcggcaaccgtcaccttcgtcctccgtggtcatgatggctaagagagaagaagaaatgaaggaaataagagccaaaaccactgaggaaatcaacgatgaagtggttgagttaaaaggtgagcttttgatgcttcgtctccagaaatcggttcgtaatgagttcaagtctagcgagtttg

SEQ ID NO: 12993 - DNA, 448 bp, Gossypium hirsutum
  Clone ID: GOSHI-09MAY01-C7375_2
ctggaatggatctcagttctttatttgtaccgctaataccgagtggcttgatgtgatgcatgtggtgtttggtcaagttgttgaaggtatggatgtggttaaagccattgaaaaagtcgggtctagcagtggaagaactgctaagcctctcgcccgtgcagattgtggacagctttgttaagaacaagaacacgaacaagaaatggaataatgttgactctggtctatgaatggtgattcatgtctgaaatttattcatttttatgtcgtttttctttgctgtctcctgcatctgcctcagattggtctcttacaacctgcccgcccttaataatgtacgctatttatcatcatatttgaccatataattgagttattacaaaaaaaaaaaaaaaaagaaaataaaaaaaaatactaaaataaagaaaatataatatatatatatatg

SEQ ID NO: 12994 - DNA, 979 bp, Gossypium hirsutum
  Clone ID: GOSHI-09MAY01-C7375_1
agccctcccccaaaacaaaatccaaaaattaagccaattttcagtatttttttaactatggcttcaaatcccaaggttttcttcgacatgacgatcggaggtcaaccggccggccggatcgtgatggagcttttcgcagacgtcactcctcgtactgccgagaacttccgggcactctgtaccggtgagaaaggcgtcggtcgttccggtaaaccactccactacaaaggctctaagttccaccgcgtgatccctgatttcatgtgccaaggaggtgatttcacagccggaaacggaaccggaggtgaatcgatatacggatctaagttcgccgacgagaacttcatcaagaagcacaccggacccggcatactatccatggcgaacgccggtcccggaacgaatggatctcagttctttatttgtaccgctaagaccgagtggcttgatgggatgcatgtggtgtttggtcaagttgttgaaggtatggatgtggttaaagccattgaaaaagttgggtctagcagtggaagaactgctaagcctgtcgttattgcagattgtggacagctttgttaagaacaagaacaagaacaagaaatggaataatgttgactctggtctatgaatggtgattcatgtctgaaatttatcatttttatgtgtttttctttgctggttactggatttggcttaggttgttctctaagaacatgactgccataaataatgtacgctatttatcatcatatttgaccatataattgagttattacataccccttttgttgttttttcgcaactatatttattttattgtattattgatttcgacatattttaatatctaatatatttttatttttattctattttatattatatattttataaattattctacttatttttactatatttggtactggctgtcattgctcttaattttttatacattatagtcatttaatttttattt

SEQ ID NO: 12995 - DNA, 725 bp, Gossypium hirsutum
  Clone ID: GOSHI-09MAY01-C7325_1
ggcgcaacgattatgcgttgctctgtgaattgattttcagattcggactccaatcaagtgaagtgctacatccagcggcaaaggtttttcatttcttgagatcccaactctgatcccttctgaaatctttccttttacagttctcaccaagatgttcaaaaaattttcatctgaagatgtgtcttcacaaaaccaagtcaaagcatctgtgcagcggaaaattcggcaaagcattgctgaggagtacccaggacttgagcctgtgttggatgatttgcttccgaagaaggcccctttaattgttgtgaaatgtcaaaaccatttgaatctggtattggttaatagtgttccactattcttcaatattcgtgatggaccatacatgcccactctcagactccttcaccagtatccgaacataatgaaaaagtttcaagtggatcgtggtgcgataaaatttgtccttgctggtgcaaacataatgtgtcctgggcttacatcccctggtggtgctttggatgatgaactggaagcagaaactcccgtggcaataatggctgaaggaaaacaacatgctcttgccattggctttaccaaaatgtcagctaaagacataaaggcgagcgacgagggatttggggttcacaacattgcattatctcaatgatcgcctatggaagatggagaagctagaatgagtaaatctcgggggaaaaaaacagcac

SEQ ID NO: 12996 - DNA, 846 bp, Gossypium hirsutum
  Clone ID: GOSHI-09MAY01-C7205_1
cccacgcgtccgcccacgcgtccgcaccatagctgaaaaagaaaaagaagggatgggagttttaggcaaagtggtggatgggattctattgctaacattcgtgtccatgtcggtggtgccagcgtgcttggacgcccaggtacttttgcctaaagcgcttttccccgatgtgctgggtcgtgtatattcatggtatacgaccacataccaagattatttgctgttggatgagcctcattttttcatggcacttatgaaattggagcttgttttagtattgccgcttgctatacttaacacttatggcttgttgacctccaagccctggttcaacaccacctgcctcatcttcggttctgctcttgttacctccacgacagctatggtgggagacatgctgggatccgacaaaccatcagcaggtaaactggcgtcgatgtactcgccttttataggatttgggttcctagccatactgcgagggctgctttcggaatcccccaacgcttccaaaaccatggccaacggaccaacgtcggctttgaaaaagaaagcctgaagttgacacatgaattataaaacatcatcttcttccttgaaatgcgatatccatgttacaacaataaggatcaaaattcaaagtacaaaaaattacaaatactactagcaatctaatagtacttgtagttgtttctttgtcatgtttagaaagtttttattttaaaaggtgtgattatgagtaataattttaatgcattgcctttttttccttctctaacttctacttttcctccttttctctttctctcctctcccctgggtccttctttttttaggttccacttt

SEQ ID NO: 12997 - DNA, 1231 bp, Gossypium hirsutum
  Clone ID: GOSHI-09MAY01-C7235_1
gttaacaccagccagccaccctgtctgcgaagccaagtttcagagagtacattggttttcatgccaagccaggaaaaaggtagtactacatagttgttgagttaagtcttgaatcttgagtccgatcatgagttgcaacggctgccgagtcttacggaaaggatgcagtgagtcttgtatattacgtccttgtttgcaatggattgagagccctgaagctcaaggccacgccactgttttcgttgccaagtttttcggccgtgctggtctcatgtcttttatttcagccgttcctgaatctcaacgccctgctttattccagtcgctgttgttcgaagcttgtgggagaacagtgaaccctgtgaacggagccgtggggcttttgtggaacggaaactggcacgtttgccaagcggcggtggaaaccgtcctgcgaggaggatctctacgttccatgcctgaattcatggctccgacgccagcatccgacgaagcgtccgaagccacgtgcacggacatgtggaaattgcgggagacatccacgaatctcaactccaactgtcgattctcaaattcgagatccagggtttcacccaagcgtaaaagagtcgaagaagaattcaagaaactacagccctctgatctagatcttggcttgaccccgagcttttcgggcaagcgagttaccgataatcgtcgaccagggactccgtctatgaactcggaggaatctgtgacgacgacgtgcttcgaaagtgtttttgcagatcaacaagggcaaggcagcagaggaactgataaaaaattactcaagttgtttgtttgaagaggagggtttttttttttttggaatgatctagtttcgatgtaatattcttcatttctaccactaccaccagtttagattatttttggatacttctggggaggggtttccccggaaatgaattttccggcgagtttgtgtattaccggcacatgggatttctctctttttttttacttttttttgggattattttttggtgttaaaagctgtgaaattagagagaaaaatgagaatctgtcggtgatcctttaaaatcaattttatttggctactatgtaacccttctcttttcatgatctttgtgtttaagtcatgaatgtatgcatggcatgaataaatcagacttatatttttccccgtttttaaaaaaaaaaagggcgggcactcgcgcccacgcgtccg

SEQ ID NO: 12998 - DNA, 333 bp, Gossypium hirsutum
  Clone ID: LIB3272-009-P1-K1-C11
cggacgcgtgggctcatgtcctttatttccgccgttcctgaatctcaacgccctgctttattccagtcgctgttgctcgaagcttgtgggagaacagtgaaccctgtgaacggagccgtggggcttttgtggaccggaaactggcacgtttgccaagcggcggtggaaaccgtcctgcgaggaggatctctacgttccatgcctgaactcatgtctccgacgccagcatccgacaaaacgttcgaagcccacttccccggccttgtggaattggcgggggccatcaccgattttaacctccacctgtggattttaaaattcaggatccagggt

SEQ ID NO: 12999 - DNA, 1660 bp, Gossypium hirsutum
  Clone ID: GOSHI-09MAY01-C1985_1
cccacgccctcgcacctcttcctttgttcctcatcctctgatccgtctcttcccgcattcgtcccgccggatttaacaagttttcaaacgaaaaatgagggaaatccttcacgtacaaggcgggcaatgcgggaaccagatcggatccaagttctgggaagtggtttgcgacgagcacggcattgaccctaccggacgctataccggaaactccagtctacaattggagcgcgttaacgtttactacaatgaggcttcttgtggaaggtttgtcccacgcgccgtgctcatggatcttgagcccgggaccatggatagtgtgagaaccgggccttatggtcagatctttaggcccgataactttgtcttcggccaatctggagctggtaataattgggctaaggggcattatactgaaggagccgagcttattgattctgttcttgatgttgtcagaaaggaagctgagaattgtgattgtctccaaggttttcaagtttgccactctcttggagggggaactggttcgggtatgggtactctgttgatttctaagatcagagaagaataccctgatagaatgatgctcacgttctcagtcttcccatcaccaaaggtttcagacactgtggttgagccgtataatgccaccctttctgttcatcagcttgtcgaaaatgcggatgagtgtatggtgttggacaatgaagctttgtacgatatctgtttcaggactctcaagttaactactcctagctttggtgatttgaaccatctaatctctgcaaccatgagcggtgtgacatgctgccttaggttccctggccagctcaactctgacctccggaaacttgctgtcaacctcattcctttccctcggctccacttttttatggttggatttgctcctctcacctcacggggatcacagcagtatcgttctttaaccgtcccagaactcactcagcagatgtgggatgctaagaacatgatgtgtgctgcagaccctcgacatggttgttacctcacagcctcagccatgttcaggggtaagatgagcaccaaagaggttgatgagcaaatgattaacgttcaaaacaagaactcatcctacttcgttgagtggattccaaacaatgtcaagtccagtgtttgtgatattcctcctcggggcctgtctatggcatctacctttgtcggcaactcaacctccattcaggagatgttcaggcgagtgagtgagcaattcactgctatgttcaggaggaaggctttcttgcactggtacactggtgaagggatggatgaaatggaattcactgaggctgagagcaacatgaatgaccttgtttctgaatatcaacaataccaggatgcaacagctgaggatgaacttgaatacgaggatgaagacgaggaagctgttcatgagatgtaaaggtggtatgctacttgatactatgtcatgtggtaatgcctcgttatactagagagcgaagtttggcgattatgtgctgttttgtgtagtttaatatatgtgaaaagcttgtgtgtattactcgttatgtttgcattccagccttgttccattggtttacaataatgaaaattagtagtattggcttaaaaaaaaaaaaaaaaaaaaatgtcgacgcggccg

SEQ ID NO: 13000 - DNA, 658 bp, Gossypium hirsutum
  unsure (1)..(658): unsure at all n locations
  Clone ID: AI726113.1
gtcgaccagaactcactcagcagatgtgngatgctaagaacatgatgtgtgctgcagaccttcgacatggttgttacctcacagcctcagccatgttcaggggtaagatgagcaccaaagaggttgatgagcaaatgattaacgttcaaaacaagaactcatcctacttcgttgagtggattccaaacaatgtcaagtccagtgtttgtgatattcctcctcggggcctgtttatggcatttacctttgtcggcaactcaacctccattcaggagatgttcaggcgagtgagtgagcaattcactgctatgttcaggaggaaggctttcttgcactggtacactggtgaagggatggatgaaatggaattcactgaggctgagagcaacatgaatgaccttgtttctgaatatcaacaataccaggatggaacaaggctggaatgcaaacataacgagtaatacacacaagcttttcacatatattaaactacacaaaacagcacataatcgccaaacttcgctctctagtataacgaggcattaccacatgacatagtatcaagtagcataccacctttacatctcatgaacagcttcctcgtcttcatcctcgtattcaagttcatcctcagctgttgcatccgtcgacgcggccg

SEQ ID NO: 13001 - DNA, 608 bp, Gossypium hirsutum
  Clone ID: LIB3825-021-Q1-K6-G2
acaaagtcatttaggagcatctaaacatattttggtgatggataatgtagcgatgcaaataaagtttgccatgtagatctttaatttttgaagggaaatttttaaatttaaacactaaaggctctagatttttacaggaattaacgttggttaaatataagattatttgtttgtgtgaataggttttcaagtttgccactctcttggagggggaactggttcgggtatgggtactctgttgatttctaagatcagagaagaataccctcatagaatgatgctcacgttctcagtcttcccatcaccaaaggtttcagatactgtggttgagccatataatgccaccctttctgttcatcagcttgtcgaaaatgcggatgagtgtatggtgttggacaatgaagctttgtatgatatctgtttcaggactctcaagttaactactcctagctttggtgatttgaaccatctaatctctgcaaccatgagtggtgtgacatgctgccttaggttccctggccagctcaattctgacctccggaaacttgctgtcaacctcattcctttccctcggctccacttttttatggttggatttgctcctctca

SEQ ID NO: 13002 - DNA, 468 bp, Gossypium hirsutum
  unsure (1)..(468): unsure at all n locations
  Clone ID: LIB3585-008-P1-K1-G1
ttcctttgttcctcatcctcnnnnccgtctcttcctgcattcgtcccgccgtatgattcaatcactagatttgtttcctctttgttactagattattctttttttgaatttttagttaccatttcttgattttcgcagggatttaacaagttttcaaacgaaaaatgagggaaatccttcacgtacaatgcgggcaatgcgggaaccagatcggatccaagttctgggaagtggtttgcgacgagcacggcattgaccctaccggacgctataccggaaactccagtctacaattggagcgcgttaacgtttactacaatgaggcttcttgtggaaggtttgtctcacgccccgtgctcatggatcttgggcctcggaccattgatagttgtgagaaccgggcctttatggtcaatatctttaagccccaataactttgtgcttcgggccaattttggagctggttaa

SEQ ID NO: 13003 - DNA, 371 bp, Gossypium hirsutum
  Clone ID: LIB3149-026-Q1-K1-F12
ctttgttcctcattctctgatccggctctttccgcattcgtcccgccggatttaacaaggtttcaaaccaaaaatgaggggaatccctcaccttccaagggggccatgccggaacccaatccggtcccaagtcttggaaaggggttgggaccaaccccggatttgcccttcccgacccctttcccggaacctccatcctccattggaacgccgttaccgtttactccattaaggctcttgggggaaggttggcccaccccccctggctcttggttcttaaccccgggaccatggttagtgtgagaaccgggccttatggtcagatctttaggcccaataactttgtcttcggccaatctggagctggtaat

SEQ ID NO: 13004 - DNA, 580 bp, Gossypium hirsutum
  Clone ID: GOSHI-09MAY01-C1945_4
ttttttttcttttttgcttttttatatttttggtttttttttttaggcatttaggataaagtacccatggtttgtcgtaggttttgcctgttgccgccacggttacttggtgcttgccaatagatcgagggaagtactaatatttacttgtttttctggccagtgtgagcatttttgctttctaaggatatattgggactattacataattaatggaaggaagtgagtcacattcataatgaatgaaaagaagctcctatttcggttgctcaaaaaaaaaaaaaaaaaaaaaaaaaaaaaaaaaaaaaaaaaaaaaaaaaaaaaaaaaaaaaaaaaaaaaaaaaaaaaaaaaaaaaaaaaaaaaaaaaaaaaaaaaaaaaaaaaaaaaaaaaaaaaaaaaaaaggggcgccccttttaaagaacccaattttacttccccttccatccaaattaaaattttttttatagggcccccaaaattaaattcactgcccgctttttaaaaactttggaattggaaaaaccctgccttacccaaaataaattcttttgaaaaaaatccccttttccccagttggc

SEQ ID NO: 13005 - DNA, 694 bp, Gossypium hirsutum
  Clone ID: GOSHI-09MAY01-C1945_3
ccggttcgaccccgcgtcctactctttacccctttcttactcgaatgcggcgttttcttttcactgaaaatgtcttgctgtggtggaaactgtggctgcggttctggctgcaagtgtggcatggctgtggaggatgcaagatgtacccaacctgaacgttgcccaatgaccacaactatactctggttcttggtgtacaccccaaaagcacactttgagggatctgatatggaattcgcttaaaccgctgcaagtgtggaaacaactgcacctgcaccccttgcaattgtaaatgattagagaccaaagccaaagctccctggaagcagaggcgcctttgtctttaagaaataatatgttttgttgtttatgtgtttttagaataaagtagccatggcttgtcgtaggttttgcctgttgccgccacggttacttggtgcttgccaatagatagagtgaagtactaatatttacttgtttttctgtccagtgtgagcatctctgctatctcaggatatattgtgactattacataattaatgtaaggaagtgagtcagattcataatgaatgaaaagaagctcctatttcgtttaaaaaaacaaaaaatccaacaacgcaattcgatagccgatcatcttatgtaagaaaagaaaaacttactttaaaaatttggggcggccgttttaaaggat

SEQ ID NO: 13006 - DNA, 652 bp, Gossypium hirsutum
  Clone ID: GOSHI-09MAY01-C1945_2
ccgggtcgacccttcgttttgtgtttttgtttttcatactcatttagcgcggggggggggggcgaaatcactccagttttctttatcactgaaaaagtcttgctgtggtggaaactgtggctgcggttctggctgcaagtgtggcagtggctgtggaggatgcatgtatgttcccagacctgaacgttgccgagatgaccgcggctgagactctggttcttggtgtagcaccccagaaagcacactttgagggagctgagatggaattcggggctgagaacggctgcaagtgtggagacaactgcacctgcaacccttgcaattgtaaatgattagagaccaaagcctaagctccctggaagcagagacgcctttgtctttaagaaataatatgttttgttgtttctgtgtttttagaataaagtagccatggcttgtcgttggttttgcctgttgccgccacggtttcttggtgcttgcccttggcttgcgtgttgttctaatattcacttgtttctctgtcctgtgtgagcctctctgctttctcggggtatattgtgactattacataattaatgtaaggaagtgagtcagattcctttgaaagaaataaaataatgaatccattatggttttacaatttttgcggtta

SEQ ID NO: 13007 - DNA, 678 bp, Gossypium hirsutum
  Clone ID: GOSHI-09MAY01-C1945_1
cccacgcgtccgcccgcgcgtccggcgtgttttgtatttcatactcatttagcccctttcattagcatcgaaatcactccagttttctttatcactgaaaaatgtcttgctgtggtggaaactgtggctgcggttctggctgcaagtgtggcagtggctgtggaggatgcaagatgtacccagacctgaacgttgccgagatgaccacaactgagactctggttcttggtgtagcaccccagaaagcacactttgagggagctgagatggaattcggggctgagaacggctgcaagtgtggagacaactgcacctgcaacccttgcaattgtaaatgattagagaccaaagccaaagctccctggaagcagagacgcctttgtctttaagaaataatatgttttgttgtttatgtgtttttagaataaagtagccatggcttgtcgtaggttttgcctgttgccgccacggttacttggtgcttgccaatagatagagtgaagtactaatatttacttgtttttctgtccagtgtgagcatctctgctatctcaggatatattgtgactattacataattaatgtaaggaagtgagtcagattcctaatgaatgagaagaagctcctatttcgttttgcaaacaattgggcccttatttcatgatcggaaaaaattta

SEQ ID NO: 13008 - DNA, 358 bp, Gossypium hirsutum
  Clone ID: LIB3272-004-P1-K1-E9
gtgtgttttgtatttcatactcatttagcccctttcattagcatcgaaatcactccagttttctttatcactgaaaaatgtcttgctgtggtggaaactgtggctgcggttctggctgcaagtgtggcagtggctgtggaggatgcaagatgtacccagacctgaacgttgccgagatgaccaccactggaacttttgttcttggtggagcaccccaaaaaggcccctttgagggagctgagatggaattcgggctgagaacgctgcagtgtgagacactgccctgcacctgcaatgaatgtagagccaagccagctctgagcaaacccttgcttaaaatattgttgtgtatggttta

SEQ ID NO: 13009 - DNA, 360 bp, Gossypium hirsutum
  Clone ID: LIB3145-008-Q1-K1-B6
tggaaaacccgggccgacccacgcgtacgcccactcttacgctaatatttacttgtttttttgtccagtgtgagcatctctgcggtctcagtatatattgtgactattacataattaatgtaaggaagtgagtcatattcctaatgaatgagaagaatctactatttctctttaaaaaaaacaaaataaaaaaaatttgaaaagaaatacatagtattgtgtaaaaaataaagatagggatggaacttgtgagagtttgtcttgaagaaaacaatgatgatctttcatcaatttcaccatgttttgagcctcgagcattgtttaccttaaagagtgaggcacaggatactaaaatacatg

SEQ ID NO: 13010 - DNA, 364 bp, Gossypium hirsutum
  Clone ID: uC-gsronu33B134h03b1
cttattcgtccgggcttgtcgtatgttttgcctggggccggatagatacttggtgcgtgccaataaatagagtgaagcactaatatttacttgtttttctgtccagcgtgagcatctctgctatctcaggatctattgtgactattacataattaatgtaaggaagtgagtcagattcctaatgaatgagaagaagctcctatttcgttttaaataaaaaaaagtaattttacaatccgaaagcgaatctaaaagatccaacaataacctccttccatttccatgaattgtgaaagctctccttcggccttctggggctgcccttatacaggatccaattttccttacactgattctggaatga

SEQ ID NO: 13011 - DNA, 279 bp, Gossypium hirsutum
  Clone ID: LIB3148-038-Q1-K1-F8
gcttgccaatagatagagtgaagtactaatatttacttgtttttctgtccagtgtgagcatctctgctatctcaggatatattgtgactattacataattaatgtaaggaagtgagtcagattcctaatgaatgagaagaagctcctatttcgtttaaaaaaaaaaaaaaaaaaaaaaaaaaaaaaaaaaaaaaaaaaaaaaaaaaaaaggaaaaaaaaagatatacaaatactatgataaacaaaacaagatagaaaaaaaataaaaaaaaataatgg

SEQ ID NO: 13012 - DNA, 837 bp, Gossypium hirsutum
  Clone ID: GOSHI-09MAY01-C1975_1
tcgcaaggttaactcaacacgggggttggactacactatgcccccgatgaacgaaggtttgttttaaatgaaaaagtaaaatccccccgtccgccccgcctccgccccgcgtccggcttgaaacctttgaaacacttttgtactcctcggatagtgataaagatcgtgttgatgaacactgagatcgaaacgtgcttgactgtcctattttatttattgatgatctatctgttttgatggttgataaaaagattcttgtttttgataatgcatgtgtgagtgaatctatagaccgtcgattaatgcatggtatgattatgcaactctgtgaaccatgtaaatcttttcaaatacctacttgtgacgattatgtttaccatttgatttattactcgcaatttattcatggtttgtgggaacaatgtgagacgactgaatgccttaaaacatgtccatctttgtttcaaatatttgacgaggcagtggtgagtaaattagattgtttgcatggtaatctgaatctgtccattcacatgcgttatacctgttctgttatgcttatgattggactacaagcttgtttccgttgctatttactatctcatggctattcttttcagtggactcaattgccattagtcccgttcgatagaggaaagtcgagttcatttgatttttcagattcgaggacgaatctttttgaggaaggggggaatgatacgagtcacaaaagcccaaattcttgaaggcgaggcccaataagcaaattcccagcccaatcaagaaatccatccatacttagttgaaaatcaggccaaattgtcaaagtggcccaag

SEQ ID NO: 13013 - DNA, 673 bp, Gossypium hirsutum
  Clone ID: LIB3583-017-P1-K1-H3
cccacgcgtccggtcgaatgccaaggcatattggagctaatgtcatgatgtattcacaggtatatccccacactgaccaggtgaagatatgtgatttcggtagtgcgaagaagctggtatgtgcaactttttgggatgtttgaatgtctctctcccccgttcccccccccccctgttttgtaaaacttatggagatttactctgctatctttaggtcccaggggaacccaacatatcatatatatgctcacgatattatagggctccagagcttatattcggggtgacggagtgatacgagtcacaaaagcccaaattcttgaaggcgaggcccaataagaagattccaagcccaatcaagaaatccacccatacttagttgaaaatcaggccaaattgtcaaagtggcccaagttgtaaagttttatttttatttatttatttatttattttatttagtttaaatttttattttcagtccaagaggcccaaataaaaggacccttggcccaatttccatattaaaaatattaggagttttttttctagttttagttttagtgttctaattaaattagaaaaaactttgaaaggcctatttatatgggcttggccagccacccttcaattccattacaattacattgaaaattctagattttgttttgagttg

SEQ ID NO: 13014 - DNA, 545 bp, Gossypium hirsutum
  Clone ID: LIB3825-017-Q1-N6-B5
gaagaactcaaagagaattttcactcaaatcaaatctgaaattttcaatgtaattgtaatgtaatgtagggtggctggccaagccatataaataggccattcaaatgttttcctaatttaattagaacactaaaactaaaactaaaaaaaactcctaattattttaatatggaaattcggccaagggtcttttatttgggactcttggactgaatataaaaatttaaactaaataaactaaataaataaaaataaaaatttacaacttgggccactttgacaatttggcctgattttcaactaagtatgggtggatttcttgattgggcttggaatcttcttattgggcctcgccttcaagaatttgggcttttgtgactcgtatcactatttctctgagataaaattggaatagaagccccagatagaattgctgtacaaagttggagaaaaatgtcaaaagaaaaaaaatagtatacaaaagttcaatataatactcctatcatttactccaacaaattcatgtatacagactagaagcaaga

SEQ ID NO: 13015 - DNA, 975 bp, Gossypium hirsutum
  Clone ID: GOSHI-09MAY01-C1925_1
tttcacgcgtccgaagaccttgaaatctactcgatcaggtacaatgccaagcacgagaccgtgaatgtcccaggtactggttccctctggccactttctgcccaatctcccattgggaagtgtggagagcctaacagatgcgctccacaccttgagtggaatcctgacttggactgctcctgcagggatggcgagaagtgtgcccaccattctcatcacttctccttggacatcgatgtgggatgtactgacctgaatgaggacctcggagtctgggtcatcttcaagatcaagacccaagacggacacgcaagacttggcaaccccgcgcgtccccccgcgcgtccgcccgcccgtccggctctcgctcgtgtgaagagagcagagaagaagtggagggacaaacgtgagaaactcgaatgggaaactaacatcgtttacaaggaggccaaagagtccgtggatgctttgttcgtgaactcccaatatgatcagttgcaagccgacaccaacatcgccatgatccacgccgcagacaaacgtgtgcacagcattcgtgaggcttacttgcctgagttgtccgtgatccctggtgtgaacgctgccatcttcgaggaacttgagggacgtatctttaccgcattctccttgtacgatgccagaaacgtcatcaagaacggtgacttcaacaatggcctcagctgctggaatgtgaaaggtcatgtggacgtggaggaacagaacaatcagcgttccgtcctggttgtgcctgagtgggaagctgaagtgtcccaagaggttagagtctgtccaggtagaggctacattctccgtgtgaccgcttacaaggagggatacggtgagggttgcgtgaccatccacgagatcgagaacaacaccgacgagcttaagttctccaactgcgtcgaggaagaaatctatcccaacaacaccgttactttgcaacgactacac

SEQ ID NO: 13016 - DNA, 648 bp, Gossypium hirsutum
  Clone ID: GOSHI-09MAY01-C1895_5
caaatttctttttcctttctactctcaaaatttgcccccaaatttcttttttccttttcatttcactgcactaaattcacccaccatagctactccttttcttcttctttttctttcttagtattatttcttttctctttttattttttttggcctactgtgtaatgtatttaccggtaactttttataggcggatgtagagacggaggttgcggcggctggagtgcccaagaagagaacattcaagaagtttagcttcagaggtgttgatttggatgctctccttgatatgcccactgatgagcttgtcaagctctttcctgcccgtgctcgcagaaggtaataagaaaacagaagcaagtttcattttgtttttgcaaaatatgtttgtttaattgctattagtgaaaaatatgaaatggggtttccttattactattaccactatcattattattattattattattattatcatcatcataggttccagaggggtctcaagagaaagcccatggctttaatcaagaaacttcgcaagggcgtaatttgtcttccctttcctcttttcatttcttatgtttatcaattttggatttatcttagatctaaaatttgatgtgaaagttgagaattttgacttaattt

SEQ ID NO: 13017 - DNA, 815 bp, Gossypium hirsutum
  Clone ID: GOSHI-09MAY01-C1895_3
cccacgcgtccgcccacgcgtccgcccacgcgtccgcccacgcgtccgccacaatcgaaacccttaggcggcgactactactcgagcttcataacacccgaagcttttaactatggcgggtgtagagacggaggttgcggcggccggtgtgcccaagaagagaacattcaagaagtttagcttccgaggtgtcgatttggatgctctccttgatatgtccactgatgagcttgtcaagctcttccctgctcgagctcgcagaaggttccagaggggtttgaagagaaagcccatggctctaattaagaagcttcgcaaggcgaaaagggaggctccacctggtgagaagccggaaccagttagaacccacctgcgtaacatgatcattgtacccgaaatgattggaagcattatcggtgtgtacaatggcaagacattcaaccaggttgaaatcaagcctgaaatgatcagccattaccttgccgagttttccatttcgtacaagcccgttaagcatggtagacctggtattggtgccacccattcttctaggttcattcctctgaaatgaagtccatttctgcatctttacttggaagagacattttggttgctgcacctctagtatttttatttaatgacagtgtcatatgctttaagttatgttagatactgagacttacgcttgctcatttattattaaggttgttaaggatgaggattttggtaatttgatacatcttttgttgatcccaccaaaaaaaaaaaaaaataaaaaaaaaggaaagcgctcgcgatatagacgaacgcgtggg

SEQ ID NO: 13018 - DNA, 790 bp, Gossypium hirsutum
  Clone ID: GOSHI-09MAY01-C1895_2
cccacgcgtccgcccacgcgtccgaatctatcttatttcttcaacctccgtcaatcgaaacccttaggcggcgactactcgagcttcataacacccgaagcttttaactatggcggatgtagagacggaggttgcggcggccggtgtgcccaagaagagaacattcaagaagtttagcttccgaggtgtcgatttggatgctctccttgatatgtccactgatgagcttgtcaagctcttccctgctcgagctcgcagaaggttccagaggggtttgaagagaaagcccatggctctaattaagaagcttcgcaaggcgaaaagggaggctccacctggtgagaagccagaaccagttagaacccacctgcgtaacatgatcattgtacccgaaatgattggaagcattatcggtgtgtacaatggcaagacattcaaccaagttgaaatcaagcctgaaatgattagccattaccttgctgagttttctatttcgtacaagccagtcaagcacggtagaccaggtattggtgctacccattcttccaggttcattcctctaaaatgaagtcttatccttgcaactttggatactttatttggtgtttgtatgaagagatattttatgttgatcaaattttgattgatgcactgtgacatttttatatcgttccgaatgttatattagataatacaacttgttttgcttttggagttgaaaaaaaaaaaaaaaaagaaaattaaaaaaaaaacttatagaaaaattaataattaaaatataattacttag

SEQ ID NO: 13019 - DNA, 1185 bp, Gossypium hirsutum
  Clone ID: GOSHI-09MAY01-C1895_1
cccacccgtccgaattttcactaacctcccccaaacaaaaccctaacggctacagctctagaattcaagcctttcgaccatggcggatgttgagacggaggtagcggcggctggagtgcccaagaagagaacattcaagaagtttagcttcagaggtgttgatttggatgctctccttgatatgtccactgatgagcttgtcaagctctttcctgcccgtgctcgcagaaggttccagaggggtctcaagagaaagcccatggctttaatcaagaaacttcgcaaggcgaaaagggaggctccaccaggtgagaagccagaaccagtcagaacccacctccgaaatatgatcatagtacccgaaatgattggtagcattatcggtgtgtacaatggcaagacattcaatcaggttgagatcaagcccgaaatgatcagccattaccttgctgagttctctatttcgtacaagccagttaagcacgggagacccggtatcggtgctactcattcttcaaggttcatccctctgaagtgaagccctttcatgctgcttggagcctcaatttggggtttactatttgagagttaaattttgtttgttgcactcttagtaatgaaaatttcacacccttttggttgcttctttagataatgagacttgacaatgttttaaagagtgttttgtttcatctattagttatggtagctggagatgtctttagattttgtggtgaagatgaagtttgtttattttgtcgattgaaccatagttggactagtaaaagatattaaatcttcaattacacagactttaacaaccaaaaaagggcggccggtttagaaaaaaaaaaaaaaaaaaaaaaaaaaaaaaaaaaaaaaaaaaaaaaaaaaaaaaaaaaaaaaaaaaaaaaaaaaaaaaaaggggggggcgttttaaaagaaccaaattttacatcccgtgcattgaaaagtaaaattttttttttgggggacctaaaataaaataaatgggccgggttttaaaaacgtgggaaggggaaaaaccttgtgttaccaaaattaaatggtttggagaaaaatccctttttacaaagttggcttaaaaaaaaaaaggcccaaccaattaccttttccaaaaattggtaaccttaaattggaattggaatcccccctttaagggta

SEQ ID NO: 13020 - DNA, 491 bp, Gossypium hirsutum
  Clone ID: uC-gsronu33B124h11b1
tttctcgcgtccgcccacgcgtccgcccacgcggccgcttcttgatatgtccaccgatgagcttgtcaagctcttccccgcacgtgctcgtagaaggttccaaaggggtctcaagagaaagcccatggcattaattaagaaactccgcaaggcgaaaagggaggccccaccgggagagaaaccagaaccagtcagaacccacctgcggaatatgattattgtacccgaaatgattggaagcattatcggtgtgtacaatggcaagacattcaaccaggttgaaatcaagcctgaaatgatcagccattaccttgccgagttttccatttcgtacaagcccgttaagcatggtagacctggcattggtgccacccattcttctaggttcattcctctgaaatgaagtccatttctgcatctttacttggaagagacattttggttgctgcacctctagtatttttatttaatgacagtgtcatatgctttaa

SEQ ID NO: 13021 - DNA, 335 bp, Gossypium hirsutum
  Clone ID: LIB3149-008-Q1-K1-B10
ggaaaaactggggcggggggagcgaacgaaagaacccaagcggagactacaccaggggtaaaaccctaagctgtcaacaaaggcgaggggggagacagaggtggcgggggggggagtgcctaaaaagagaacattcaagaaatgaagcgtcagaggcggggagtaggatgctcttctagagatgaccaccgatgagcgtgacaagctcttccccgcacgtgctcggagaaggttccaaaggggtctcaagagaaagcccatggcaggaagaaagaaactccgcagggcgaaaagggagggcccaccgggagagaaaccagaaccaggcagaaccc

SEQ ID NO: 13022 - DNA, 490 bp, Gossypium hirsutum
  Clone ID: GOSHI-09MAY01-C1855_1
gcgctgaagctcccctctaaaaaaaaaaacccttaatctgctctgctagggttggttcagcacgctgccgccaaaccaccatcagttcgatggccgacggcgcgaaataccagactctgccgacgggggtcgcaaccacggagatctggtaagtcgcttctttccctttcttttttttaaaaaaaaatcttcaaatcgtatttcactctttcaaaaaaaaaagagcaaaacttcaaagtggaacgttcgaccctcgcccgaatctccttattttcgagatacttgggtgttcattggtgttgtttcaggtgtttctttcttttatgctaaaaaaaaacacaagcaaatgaggagagaaacaaatgactaaacagacttgaaaaatcacctcttgatttgtgatttctgccttttctatttctttcgtggatgtgcgctcgtaaccgtttaccaggactgtgctctcggctctataaccgaaatcccaaaa

SEQ ID NO: 13023 - DNA, 516 bp, Gossypium hirsutum
  Clone ID: GOSHI-09MAY01-C1805_4
cccacgcgcccgcacttttctattaggtatagactgagagggaaaaaaatgagctattcacataataccatgggctcaggtagtagaactgctagaaggacatttgattttggaaggacacatgttgttcgacctaaagggaaacaccaggcaactatagtatggcttcatggccttggtgacaatggctcgagctggtcccagctcttggaaagtcttcctcttccaaatataaaatggatttgcccaactgctcctactcgtcctgtggctttacttgggggatttccttacacagcatggtttgatgttagtgagctgtcagaaaatggtccagatgattgggagggtttagatgcctcagcagctcatattgcaaacttgttgtcaacagagccatgtgatgttaaggtcggaattggaggcttcagtatgggtgctgcaatggcactttactctgcaactgcttgtgctctgggaagtatgggaaatggcatcatacacatcaactaaggc

SEQ ID NO: 13024 - DNA, 737 bp, Gossypium hirsutum
  Clone ID: GOSHI-09MAY01-C1805_2
aaaaactacgggggggggaaatatataaattgcacttaattataatgaagcattttccaatcctcattttgttcctgttttgttacagctggtcccagctcttggaaagtcttcctcttccaaatataaaatggatttgcccaactgctcctactcgtggggggggtgtacttgggggatttccttacacagcatggtttgatgttagtgagctgtcagaaaatgggtccagatgattgggagggtttagatgcctcagcagctcatattgcaaacttgttgtcaacagagccatgtgatgttaaggtcggaattggaggcttcagtatgggtgctgcaatggcactttactctgcaactgcttgtgctctgggaaggtatggaaatggcaatccatacaacatcaacctaagggcaattgttggactaagtggatggcttcctggttcaaggtgcttaaggaacaaaatagaagtatcacatgaagctgcacggcgcgcagcttcattgccaattatgcttggccatggaacttgtgatgatgttgtcccttacaaacatggagaaatatctgcccattccttgaatgtagccggatttcgaaacctcacttttaaagattatgaagggattggtcattacacaatccctaaagagatgaatgaggtctgcaattggcttacagcaagactggggcttgagggataacgctaaatatagctgagtcggggagcaat

SEQ ID NO: 13025 - DNA, 542 bp, Gossypium hirsutum
  Clone ID: LIB3829-020-Q6-N6-G1
acaactaaaaatataaaatataaaattaaaataaagattgaatattcgctacaaaaatcgatccaacaatcaaaatacactaacgtttagccgaaatgtataccaccaacattcaacccaatgtacaaaagtaaataaataaaaaagtacctaagatgtggatattgatattgatgttgtactacataaaagctaatacagtttgaaactgcaactttaattccaagaaactctgctgatctcttatttctacaaaggtagccccaagtagtgaaacatctccagatccaagtataccatataccctaagaatccattttgtttactacctacttgtaacatatgcagttttctctcttatgacctttattgcttctcgactcttcgctatatttagcgatatccctcgagccccaaccttgctgtaagccaattgcagacctcattcatctctttagggattgtgtaatgaccaatccttgcaacatttctgatttcgtttgttgctccttgaattttcttcttcatcgatttaaaaccac

SEQ ID NO: 13026 - DNA, 461 bp, Gossypium hirsutum
  Clone ID: LIB3583-040-P1-K1-D1
cgatactcccttagtggattcgacctcgagattgcctcgtatgtcggaggttctcaagcgaagcacctcaattcgctggaacaagaaacgacaaagtagttttaaatcgatgaagaagaaaattcaaggagcaacaaacgaaatcagaaatgttggaaggtaatgtagctgcaaaatcatgtttgcatatagggctttatttatatcttcatcaaatctcaatagagcattttagctgtctccttgtgcttagaaaatgagctgggtccctaaatccaatttatttatagttgcatgaaagtaaagaaggccaatggtggtaacactaattagagacttaggcatcatgcatacaacttatttatgaatgtaatgttctgtcggtacaaattcgtgtaaatctaccctccaaaccaagaataccgagagaaacgaggcctaccccaataactaaataccta

SEQ ID NO: 13027 - DNA, 448 bp, Gossypium hirsutum
  Clone ID: LIB3493-038-P1-M1-C6
atcgatctcattctttaacgatctactgtcccctaaatggtgtgatctcaaaaaagtcgatcctgcaatcacttcgtctatactgcttcaacactattttcttttccaagcacacatatgcacagcacctacacccaaacactagctaccatataatatcctttcatggcctatctcacaatcgctctagactctccaacctctaagaccgtcttcctatttcaagctctaatacaaacgcaaaactactcctactcgtactgtagatttacttgcgggattcacttacacaatatggcttgatgttagtgatctgtcataaaatcctccagatgattgtgagggtttacatgcctcatcagctcatattgcaaacttgttgtcaacagagccatgtgatgttaaagtctgaattgcaggctttagtatgggtgctgcaatgtcactt

SEQ ID NO: 13028 - DNA, 378 bp, Gossypium hirsutum
  unsure (1)..(378): unsure at all n locations
  Clone ID: LIB3146-055-Q1-K1-B12
ttttagtggatttcgaccatagttggagttaccttgcaattgttggctcggatgtgagagcaacttgtgtcaaattcggctcanatgcaaagtacttggcagtaggatcaatggatcgtaacctctgcatgtttggcgttcccgaaggcgatgcttcaatggaatcataaaaaggctccttctgttcaacttatttggcaagttggttgttaaaacattctttaagattgctaattgcgactgtcatgttttgtggtcggcataatcggagatttcgaggattggtcattacacaatccctaaagagatgaatgaagtctgcaattggcttacagcaaggttggagctcgagggataacactaaatatagcgaaaagt

SEQ ID NO: 13029 - DNA, 1060 bp, Gossypium hirsutum
  Clone ID: GOSHI-09MAY01-C1595_11
aataatatgaattaaaaaagcaaaccctagtagtgctgactcctcactggctttgctgatcatttggaacagcactagaagcagctcgtagccagccatggatgaagagtacgatgtcatagttctaggaactggtctcaaggaatgcatcctcagcggtcttctttctgttgacggactcaaggttctgcatatggataggaatgattactatggaggagagtctacatcactcaacctcattcagctctggaagaagtttagaggaaatgataagcctcctgctcatttgggctctagcagagattataatgtggacatggtccctaagtttatgatggcaaatggcactcttgtgcgtgttcttattcatacgggtgttacaaagtatctttacttaaaagctgtggatggtagctatgttttcaattaagggaaggttcataaggtgctcagcgactgacatgggaggctctcaaggctccaacttttgggaatatttgagaagcgtcgtgcacggaagttcttcatatatgttcaagattatgatgcaaaggattctaaaactcacgagggaatggacttgacaagggtgtcaactagggcactaattgcgaaatatgggcttgatgataacactgtggacttcattggtcatgcattggcacttcacagagatgaccgctacctggatgaacctgcattggatactgtaaaaaggatgaagctttatgcggagtctcttgcccgttttcaaggtggatctccatacatatatccactgtatggattaggcgagctgcctcaggcttttgcacggcttaagtgctgttatggtggaacatatatgttgaataaacccgagtgcaaggtggagtatgacgatgaaggcaagtttgtggtgtcacattgaaggtgaaactgcaggtgtaaaaagttgttgcgacccttctactgccaacaggttagaagacgcaagttgctaggcaagctatatgagtacccaatccaacccaagaatctatcgtgcgatatccgcacaaagcatgggctaaacgat

SEQ ID NO: 13030 - DNA, 766 bp, Gossypium hirsutum
  Clone ID: GOSHI-09MAY01-C1595_8
cttatgagtacataaatgaggatatctttggcaacacgagcgatgtactttggaaatacaatgcggctcataagaaagtcccagctcttcttcacaacggacaatcaatggtagagtctgttgttattcttgaatacattgaggaaacttggaagcataatctttatttgccacacgatccttatgacaaagctaccgctcgattctggatcaagttcatcgacgaaaagctgcatggagccccgagaatgagcgagaaaaagtgacgaacgaagcttgcgagtatatgaaaacgcttgaaagtgcgcttaatggaaagaaattctttggtggagaaaccattggaatggtagatattgttgctagctctgttgggtatttcattagggtcactcaagaaattatggggctaaatctgctgtcagctgacaaatttccccaattattccaatggtctgaagatttcgcaaattgcagcattgttgacgaaagtttacctgcaagagacaaactacttccctttgtcaaaggtctcattgccaaatatcagcaagataatgctaaggcctaagcccgcccaatgaacgcctgtcacaatgattgtcgcatgcaattcgccttttttgtatttgctgcttttgtgtgtaatgagctacttgctcttattttcgagtgaaaaaataaattaactcattgtacccttaaaaaaaaaacaactaactattaaaaaatcctatggagtaaattctattattttaataagaac

SEQ ID NO: 13031 - DNA, 482 bp, Gossypium hirsutum
  Clone ID: GOSHI-09MAY01-C1595_4
caagtaatataaagtggggtagcatcaatattgatatgggtgaagaggtgaaggtttttggagcatgggcaagcccttttagccgtaaggtagagctggctttgcggttgaaaggtgttccatatgactacatagaagaagacttgaataacaagagctctttgcttttgcaatacaactcggttcataagaaagtcccagttcttcttcacaacgggaaatcaattgcagagtcgattgttatacttgaatacattgaggaaacttggaaaacctatcccatcttgccacaagatcctaacgacaaagccatggctcgattctggatcaatttcattgatggcaagtgctcgtctgccattaggaaagttgcatttagccctgaggaggagagagagaaggcagtggaagaagcttgtgagtgtctgaaaacacttgcaagggcactgaatggaaagaaattctttggtggggatacaatt

SEQ ID NO: 13032 - DNA, 1729 bp, Gossypium hirsutum
  Clone ID: GOSHI-09MAY01-C1595_2
gcgcccacgcctcacctcgtcgttgaagcgaaagcttatctcttttcgtctctgaatctgatcaatcaacacctgaaaaggaaaacttacaaacaacaactactactagtctactacccagcactagaagcagctcgtagccagccatggatgaagagtacgatgtcatagttctaggaactggtctcaaggaatgcatcctcagcggtcttctttctgttgacggactcaaggttctgcatatggataggaatgattactatggaggagagtctacatcactcaacctcattcagctctggaagaagtttagaggaaatgataagcctcctgctcatttgggctctagcagagattataatgtggacatggtccctaagtttatgatggcaaatggcactcttgtgcgtgttcttattcatacggatgttacaaagtatctttacttcaaagctgtggatggtagctatgttttcaataaagggaaggttcataaggtgccagcgactgacatggaggcactcaagtctccacttatgggaatatttgagaagcgtcgtgcacggaagttcttcatatatgttcaagattatgatgcaaaggatcctaaaactcacgagggaatggacttgacaagggtgtcaactagggcactaattgcgaaatatgggcttgatgataacactgtggacttcattggtcatgcattggcacttcacagagatgaccgctacctggatgaacctgcattggatactgtaaaaaggatgaagctttatgcggagtctcttgcccgttttcaaggtggatctccatacatatatccactgtatggattaggcgagctgcctcaggcttttgcacggcttagtgctgtttatggtggaacatatatgttgaataaacccgagtgcaaggtggagtatgacgatgaaggcaaagtttgtggtgtcacatctgaaggtgaaactgccaggtgtaagaaagttgtttgcgacccttcctacttgccaaacaaggttaggaagatcggcaaggttgctagggcaattgctattatgagtcacccaattccaaacaccaatgattctcattctgtgcagattatcctgccacaaaagcagttgggtcgtaaatcggatatgtatgtcttctgttgttcatattctcacaatgttgctccaaagggcaaattcattgcatttgtttcaacagaggccgagacagatcaccctgagagtgaactaaagcctggaattgaccttctaggtcccgttgatgagatattctttgatatctatgacagatatgaaccagtcaacgaaccttctcttgacaattgtttcatatcaacaagttatgatgctacaacacattttgaatcaactgtcagtgatgtacttaacatgtataccatgataactggaaaggttcttgacctcagtgtggatttgagtgctgctagtgctgcggaagaataattaccctgaagcatggtatttgccaatgtttgtgcttgtttaagcttcttaacagtgttgaatgttgctggtgggatttatgtctattacaccatgtttttttttactactcaagacactatatttaatgatttgatgatatttaaacgtttgttggagctctgtgtttttagatgaaatacatgaaaacgtctctgctaagcctattttaaatgacgacttgctgcctgcttgctcgggtgtcattc

SEQ ID NO: 13033 - DNA, 942 bp, Gossypium hirsutum
  Clone ID: GOSHI-09MAY01-C1595_1
cccccttttctcattaaaacagggaaagaaaagcagcgtaatgggtgaagaagtgaaggtttttggatactgggcaagcccttacagctacagggcagagcttgctttgaagttgaaaggtgtttcttatgagtacataaatgaggatatctttggcaacaagagcgatttgcttttgaaatacaatccggttcataagaaagtcccggttcttcttcacaacgggaaaccaattgtagagtctcttgttatacttgaatacattgaggaaacttggaagcataatccctatttgccacaagatccttatgacaaagctaccgctcgattctggatcaagttcatcgacgaaaagtgctttcctaccctttggctagctgcatggagcgccgagaatgagcgagaaaaagtgacgaatgaagcttgcgagtatctgaaaacgcttgaaagtgcgcttaatggaaagaaattctttggtggagaaaccattggaatggtagatattgttgctagctctgttgggtatttcattagggtcactcaagaaattatggggcaaaatctgctgtcagctgacaaatttccccaattattccaatggtctgaagatttcgcaaattgcagcattgttaaggaaagtttgcctccaagagacaaactacttccctttgtcaaaggtctcattgccaaatatcagcaagataatgctaaggcctaagccctcccaatgaacgtctttcacaatgattgtcgcatgcattttgccatttttgtatttgctgcttttgtgtgtaatgacctacttgcttttatgttcgagtgaaaaaataaattaactcattgtactcttaaataaaattggttattaagttatcaatgagtttttccataatcccaaaaacaaaaaaaaaaataaatatataattttttataaaaataaaa

SEQ ID NO: 13034 - DNA, 520 bp, Gossypium hirsutum
  Clone ID: uC-gsronu33B124a06b1
gctttttgcttcacctaatgagccataagcggggggggtctatgcaatgaagtactgtagcctggtggctgaaaactcaggaagaggttggaagctattagcattaatactttctgcagacaggcggttcaaagatgctgaaaccatacttgagttcgctttagatgaatccagtggatcagatcaattagaacttctaagactgaaagctgtgcttcagattgctcaggaacggcccaagcaagcaattgaaacttacagcatattgctatctctgattcaagcacaaagagaagctcagtctaataactctggtcatgcaaagagttcccatacagagaatatagctggaagaaatatggaaatggcggactggcaagatctagctactgtttacaccaagtttggttcgtggcccgatgcagaaatttgtttaaacaaagccaagtcaattgatttttattcaccccaaggttggcatacaacaggtttgctatttgaagcccatcactttataaag

SEQ ID NO: 13035 - DNA, 373 bp, Gossypium hirsutum
  Clone ID: uC-gsronu33B147h09b1
ataaatgcagcgtaatgggtgaagaagtgaaggtttttggatactgggcaagcccttacagctacagggcagagcttgctttgaagttgaaaggtgtttcttatgagtacataaaatgaggatatctttggcaacaagagcgatttgcttttgaaatacaatccggttcataagaaagtcccggttattattcacatcgggaaaccaattgtagagtctcttgttatacttgaatacattgaggaaacttgaaagcataattgctatttgtcacacgatccgtaaggctaaattaacgctttgattttgaaaaaaaagaaagcagcaaaaataacaggcctctgtaaggatatatggataaggaggatgaatg

SEQ ID NO: 13036 - DNA, 592 bp, Gossypium hirsutum
  Clone ID: uC-gsronu33B042e09b1
tatttgcttttgaaatacaatccggttcataagaaagtcccggttcttcttcacaacggaaaaccaattgtagagtctcttgttatacttgaatacattgaggaaacttggaagcataatccctatttgccacaagatccttatgacaaagctaccgctcgattctggatcaagttcatcgacgaaaagtgctttcctaccctttggctagctgcatggagcgccgagaatgagcgagaaaaagtgacgaatgaagcttgcgagtatctgaaaacgcttgaaagtgcgcttaatggaaagaaacttttttttgggagtatactcttggtcatggtttattattgttgatagctatcctatttctttcatttcatataactttatttttttctttacttcctttattttttttaggtttttaatttttttttacatatctattatattattttatttctcttattatttttatatttaatttataatattttcttatctttttttatattttaatctataatcttatatttcattttaaccttattattttctacattgtaaaatgtccacttctagtcttttaatatatttt

SEQ ID NO: 13037 - DNA, 379 bp, Gossypium hirsutum
  unsure (1)..(379): unsure at all n locations
  Clone ID: uC-gsronu33B111e07b1
tcttttcccgcccgatattttagagcaaaatctggtggccctgcaaatttccgcattcatagcaccggactggacatttctccaattgcaggattgttaaggaaagcttgccttcatgagacaaactactttcctttgtccaaggtgtcattgcccaatatcagcaagataatgctcaggccttatctctctcaatgagcgtctttcacaatgattgtcgcatgcattttgccatttttgtatttgctgcttttgtgtgtaatgacctacttgcttttatgttcgagtgaaaaaataaattaactcattgtactcttaaataaaattggttattaagttatcaatgagtttttccatannaaaaaaaaaaaaaaaatac

SEQ ID NO: 13038 - DNA, 383 bp, Gossypium hirsutum
  Clone ID: uC-gsronu33B111e01b1
tccttctgcctacgaaattatagagaataatttggtggcacttgggcaaatttctgcattcatagaccaggagtggacattcttccgattgtggagtggataaggaaagctcgctttcataagagaaagaactattatgtgtacaaggagtaatcctactgaaaaagcaattgcatgatcaagcactctctttctatttgtgcgtatttcacaatgattgaacgaatgcattttgccaataaaagaatttgctgcttttgtgtgtaatgacctacttgcttttatgttcgagtgaaaaaataaattaactcattgtactcttaaataaaatggttattaagttatcaatgagtttttccataaaaaaaagaagacactcttat

SEQ ID NO: 13039 - DNA, 490 bp, Gossypium hirsutum
  Clone ID: uC-gsronu33B031g01b1
tttcattcgtccgcttttgaaatacaatccggttcatgggaaagttccggttcttcttcacaacgggaaaccaagtgtagagtcttttgttatacttgaattcatagaggaaacggggatgcataatgcgccaatgatacacgatccttatgacaaagctaccgatcgattctggatcaagttcagtgactaaaagtgctaaacgaccctttgaatgggtaaatggatcgccttgattgagccagaggcagggacgaatgacccttggggtgaactaaagcctggaattgaccttctaggtcccgttgatgagatattctttgatatctatgaccgatatgaaccagtcaacgaacctttttttgacaattgtttcatattaacaggttttggaggttcaacacattttgataaaatgtcagtgatgtacttaacatgtataccatgataactggaaaggtttttgaccttaatgtggatttgggtgctg

SEQ ID NO: 13040 - DNA, 289 bp, Gossypium hirsutum
  unsure (1)..(289): unsure at all n locations
  Clone ID: uC-gsronu33B124a12b1
gctttttgcttcacctaaggagccatatgcggggggggtctatgcaatgaaatactgtagcctggtggctgaaaactcaggaagaggttggaagctattagcattaatactttctgcagacaggcggcccaaagactcccaatgaacgcctgtcacaatgattgtcgcatgcaatttgccttttttgtatttgctgcttttgtgtgtaatgagctacttgctcttattttcgagtgaaaaaataaattaactcattgtacccttaaataaaattgattattaagttntc

SEQ ID NO: 13041 - DNA, 247 bp, Gossypium hirsutum
  unsure (1)..(247): unsure at all n locations
  Clone ID: LIB3145-025-Q1-K1-D9
agtgctgctagtgctgctgaagaataattaccctgaagcatggtatttgccaatgcttgtgcttgtttaagcttcttaacagtgttgaatgttgctggtgggatttatatctattacaccatgttttttttactactcaagacactatatttaatgatttgatgatatttaaacgttnaaaaaaaaaaaacaaataaaaaaaaaaaaaaaaaaaaataataaaaaaaaaaaaaaaaaataaactaaa

SEQ ID NO: 13042 - DNA, 624 bp, Gossypium hirsutum
  Clone ID: GOSHI-09MAY01-C1585_1
tttcggggaaaaactttctccttttttgggaggggggaagccagtaggattgttcgatcttgagaatcattttgcattctatggggcatatcacagtaacccaatcaacattttcatacatactttgtttgtttggccaatatttttcacttctcttggtcctttctactttacacccaccggtgggggatttttctcaatctgggaatcttgccctctgggtttaatcatgttttggtttttaattatgggtttctttttgctctaatttatggattgttttatgtgattttggataagaaagctggttcgttggctgctttgatttgtttagtttgttgggttggtgctacttttcttgctgcacaccttggatattctctcgcttggaaggttgtgttggctgctcagttgttctgttggactggacggtttataggccacggagtctttgagaaacgtgcaccggctctgttggacaatcttgttcaagcttttctaatggctccattctttgttttgctcgaggttcttcaatcgctctttggatacgaaccatatccgggtttccatgcacgcgtgaaagctaagatcgaagctgaaatcaaggaatgggaagacaag

SEQ ID NO: 13043 - DNA, 685 bp, Gossypium hirsutum
  Clone ID: GOSHI-09MAY01-C1545_1
atctcaatttccagtatccaaatcagaagaagagaggaagaagaagaagccagaaagagaagaaattatgtcttcgcttgcagctgctagagcagataacttttactatcctccagaatgggatccaagtcagggctccttgaacaagtttcatggacaacatgctttgagagagagggcgaggaaaatagatcaaggcattttgattataaggttcgaaatgcctttcaatatatggtgtggggggtgcaattctatgatagcaaaaggtgtacggttcaatgctgagaaaaagcaagtgggaaattattattctacaaagatatggagctttaccatgaagtctgcgtgctgcaaacatgagatagtcattcagacggaccccaaaaattgtgagtatgtgatcattagtggggctcagcggaaaactgaagtgtttgatgttgaggacgcagagacattagaactccctgctgatgaaggttatatttgttctgcagaaagaggcaagcttgctgatccattttatcgtcttgaacaccaggaggaggatttgcagaagaagaaagaagctgagccagtactggttcgccttcagcgtgtatctgatgccaggcattcagatgactatgccctcaacaaagctctgcgtgccaaacttagaagtcaaaagaagagggttttt

SEQ ID NO: 13044 - DNA, 507 bp, Gossypium hirsutum
  Clone ID: LIB3583-008-P1-K1-E4
gcgcccacgcgtccggagaagaagaagaagaagccagaacgagaagaaattatgtcttcgcttgcagctgctagagcagataacttttactatcctccagaatgggatccaagtcagggctccttgaacaagtttcatggacaacatgctttgagagagagggcgaggaaaatagatcaaggcattttgattataaggtttgaaatgcctttcaatatatggtgtggggggtgcaattctatgatagcaaaaggtgtacggttcaatgctgagaaaaagcaagtgggaaattattattctacaaagatatggagctttaccatgaagtctgcatgctgcaaacatgagatagtcattcaaacggaccccaaaaattgtgagtatgtgaaccattagtggggctcagcggaaaactgaagtgtttgatgttgaggacgcagagacattagaactccctgctgatgaagaaagaggcaagcttgctgatccattttatcgtcttgaaca

SEQ ID NO: 13045 - DNA, 400 bp, Gossypium hirsutum
  Clone ID: LIB3197-013-P1-M1-A11
ctcaatttccagtatccaaatcagaagaagagaggaagaagaagaagccagagggagaagaaattatgtcttcgcttgcagctgctagagcagataacttttactatcctccagaatgggatccaagtcagggctccttgaacaagtttcatggacaacatgctttgagagagagggcgaggaaaatagatcaaggcattttgattataaggttcgaaatgcctttcaatatatggtgtggggggtgcaattctatgatagcaaaaggtgtacggttcaatgctgagaaaaagcaagtgggaaattattattctacaaaggtatcttctttttactaatagcataatctactcagtaaggttcattttaatctgtcttgggcaagtgttttcctatgatc

SEQ ID NO: 13046 - DNA, 393 bp, Gossypium hirsutum
  Clone ID: LIB3147-027-Q1-K1-E3
ccacgcctccgagagggagaagaaggagcccggaaggggaggaattatttttttcgttggcacttgttaaaccaaatacctttaactatcctccaaaatggaatccaggtcaggcctccttgaccaggtttaatggccaccatcctttgaaagaaaggccaaggaaaataaatcaaggctttttgattataaggtccgaaatgcctttcaatatttgggggggggggggcaattctatgatagcaaaaggtgtacggttcaatcctgaaaaaaagcaagtgggaaattatttttctccaaagatatggagctttaccatgaagtctgcgtgctgcaaacatgagatagtcattcagacggaccccaaaaaatggtgagtatgtgatcattagt

SEQ ID NO: 13047 - DNA, 937 bp, Gossypium hirsutum
  Clone ID: GOSHI-09MAY01-C1575_1
ctcggctttcattttctcttcgggctggcagagatgggttatctgcacactcccttagggttgggaaaatatgtaacagacaatctggtgaggggtcatcagatgaaaattcactcccgtctatgccgtctctctatgtgatatccttcttatgtcaagcatgtgcagaaattcatagaatcggaggccatgcgcttgacaaacccatggcgcaaaggtttgcatggagccttattgaaaaggttatttcaatttataagaactgtctctctactagagaagcctctggagctcaagtgtcagagaaaggaattttgcaggtcttgttggacataaggtttgctgctgatgttctttctgggggtgatttcaatgtaaatgaagagttatctataaaaccgaagtctaaatcagcattcagaaggaagcaggaccacattcagacaaagtctgctgttagagacagtgttgatgggcttatctattctttttcacaaaagttggatcccattgattggctgacgtatgagccatacttatgggagaatgagaagcagtcatacctcaggcatgctgtgctctttgggttctttgttcaacttaatcggatgtatacagatactgtacagaaactgcctactaattctgagtcgaatattatgagatgttctgtggttcctcgtttcaaataccttccaatcagtgccccagcattgtcttctagagggaataatgggaaacctattatggctgcatccaatgatgttacttcaagaagttcctggaaagcttatacaaatggagagctttcccagaaaggtgatttggatgatcaccagagttttggtgttgcaacaccattcttaaaaatctttcattgcagggtgggagcagattcggagagagcacgttaaaactgggatcaatgtttacggat

SEQ ID NO: 13048 - DNA, 760 bp, Gossypium hirsutum
  Clone ID: GOSHI-09MAY01-C1565_2
gctcaagttggatttcaaatcccctagggatcggttggattgcttgaaaccctgtagcttgcagtagtctattttgttagccataataagtagttttgaggcataatacatgcctttattcaatagcgctactgagtgtacttttatttggcagtgctttctttctttttgtcttgctgctccagtaccttatgtttggtagtgtttaagtaagccttaatagtttatatatcttaaatttgtgttgtcttgctattttcaatattttgttggttatctcactctaggaaaatttgacaatagatgattatgcttgatttgatatgatcagtagggtatggagatttaccaaggatttttattcatagcagtggagctatgggccacttgggttgatcactcgtagtgatagcgataaacgtagtggtagttgacacttgaggatggcataatcatttttcccctgtatttgcccttgtgttgtacaggcggagagatgctcaagagttcaaaggtggagtcaagtgtccactcatggctgaacccgagctttgtggtgggggttgttcagtgtggggtttgttcggcagaggacttgctcagttcatattttgaattaacttgagatgggaggggcccttccccacccaggtcccgcccctacgctgcgaattcttggcttttgaagtcaaaaggtttcctgatcttcatcctggtttctgtggggtttttattcaagatggagttggattagtgatgc

SEQ ID NO: 13049 - DNA, 724 bp, Gossypium hirsutum
  Clone ID: GOSHI-09MAY01-C1565_1
ggtggttatggtggtaatgatgggtgtgtgtgggaatgctggctatggggctgctggaggtcgttctggtggtactccaaatagtaatgctggtgcaggtgggggagatctacaagggagtggtggtggttacatgggaagtgggtatggtgatgtaaatggaagttcagggtatggaagtgcaacatggtggtctgattcatcccaaggttctggaaattatgggggtgctcaggcaaatggtcctcatggtggacaaggtggttatggtggtgggtatggcggtgcccagggccgacaagctcagcaacagtgattctatcacaagaaagacaacttgatctcaaactcttctgcgcatggccttctctttgctcttgtaattgtgatggtttcttactcgagcagcaacaggagaggttcaagttggatgataaatcaccttgggaccggttggattgcttgaaaccctgtagtttgcagtatctgttttgctagtcataataagtagttttgaggcgtaataggtgcctttcttcagttgtgctactgagtgtagttttaatttggcttgctttatatttttttcttgctgctccaataccttcatatctatggtagtgtttaagctatattagtttatataatcttaaatttgtattatcttgctgttttgagccattttatatgtatatatatatcatcctagaaaaatttcctgatt

SEQ ID NO: 13050 - DNA, 324 bp, Gossypium hirsutum
  Clone ID: LIB3148-051-Q1-K1-H12
gtgatggttcttactcccagcagcaacaggtgaggctcaagttggatgtcaaatgcccttgggatcggttggattgcttgaaaccctgtagtttgcagtatctattttgttagccataataagtagttttgaggcataatagatgcctttattcggttgtgctactgagtgtagttttatttggcgtgctttctttctttttgtcttgctgctccagtaccttatgtttggtagtgtttaagtaagctttaatagtttatataaaaaaaaaaaaaaaataataattaatattttattaaattttaattttaaaataaattaatg

SEQ ID NO: 13051 - DNA, 313 bp, Gossypium hirsutum
  Clone ID: uC-gsflnu33B085a05b1
tgttttatttggcgtgctttctttctttttgtcttgctgctccagtaccttatgtttggtagtgtttaagtaagctttaatagtttatatatcttaaatttgtgttgtcttgctattttgaatattttgctgtttatatcaatctaggaaaatttggcagtaaggaaaaaaacaaaaaataaataaaaatacaaaaatgaactaccactatgaatgagatgctggctgaaatagaactcatgacgacagtgaacgatgaagaggctcataagttatctgcatgcgttttcgaaactgcactcttgactacctg

SEQ ID NO: 13052 - DNA, 1090 bp, Gossypium hirsutum
  Clone ID: GOSHI-09MAY01-C1505_1
cccacgcgtccgcccacgcgtccgcccacgcgtccgcccacgcgtccgcccacgcgtccgccagaaacccttctctggaaatcactgaaccacaacggccgcacggttttcatcgaagaaaaccgatactacgccgcttatttcgaagagatacatcctgaaatcgatgtcttcgacgtccaatacacgaccaagatgaatgaaacaaaggagctcatagcgtccgccaaagaacaaatccacaacgaatgtcggccggtccaaaacctgttgttctcagattgtaagctcggaatcaacgatttgccgaaccacgtttacgaagtggattgggatgtgatattaatcgatgggccgagaggcaacggaccagaaagtcccggcagaatgcaaccgatcttcaccgccggcgtgttagcgaggagcaagaaagggggcagccttaaaacacatgttttcgtacatgattattacagagatgtggaacagatgtcaggggatgagtttttgtgtagagaaaacatggtggaacgcaatgatatgcttgcccatttcatggtcgaaagaatggaagagagtagcttccagtactgtcgcaataagaacaatgcatcatcgtcaacaaaagcttcagtttcgtagtcgttgttaattcaagttcatgaaaaagataaatcttttgtactatttatcatcatttgaaatttgtgtgcggataggggaagcgtgattgtaaaaaataacttttttttttgtcaatgaaaaaaaaggtaaattcattttaaaaaaaaaaaaagaatacattaatgaaaaactagataataacaaacaaaagtatcataaaaaatacaataataaaaagataaaataaaaaaaactgaaaactagtaaacttaaccaggggggggccgttttaaaggtccaaagtttacttacccttgtttgcgacgttatactttttatttagggccaccaaaattaaatttcttggccggggtttaaaaacgtatatattggaaaaaccttggtgttaccaaattaaatcgttttgaagaaattccccttttcccaagttggctaaataccaaaa

SEQ ID NO: 13053 - DNA, 2235 bp, Gossypium hirsutum
  Clone ID: GOSHI-09MAY01-C1495_1
cccacgcgtccgcccacgcgtccgattttagagacctttggtgccgaaaaagccgttgaaatcaagaaattggagaagacgttgaacaagaaagaagctgaaatctcagaattgagtgaaactgttgagaagttacgcaatggactaaatggtgtcaaagatttgaacgaccaattaaattatcaagtcgttatcagaagtgatttgctaaaacagaagaccatcgagctttcagaagcagatgaaaagcttcaggccgcacataacttgaatgcggaactgtaccagactctcgaggaactgaagagggaatatgaggaatctaaacagattagagaaaacttagagaggcagattgttgaactatcggaagataacaaagaacagaaaatggaaatcgaacaccttcgtgaagcaaatgacaatttgggttccaaagttgttacattacacaagggaaatcgaagaaaaaaagatgtatggaccaaaaccctgggtctggagctacaggaaaaaagcattgagttcaagctgtgggaagctgaggctgcatcattttactttgatttccaagcttctgccgtttgtgaagttctgcgcgaaaataaggtgcacgagcttactgaagtttgtgagacactcgaagaagaaagtgctgtaaagagtgcacaaataggacagatgaaggaaagggttgagttcttggaaagtgaaattggagggttgaaggtctcgacgtctgcctatgttccggtcatagcttcattgaaagatagtataatatccctcgagcaaattgcccttcttcagccaaagctttgtgttccaaacggggacgaagataaggatgtagaaatggttgatgaactttatgtgatgagctcggagaaactcgaagaaggacaaagtgcgtttttgacagctgggatttcagacttgcaggagatgtgcactaaggttaaagcagtcgaaaaggctgtggtgcaagagatgaataggcttgtgaagcggaaaagtaacaagaacagccacgatattgatgcttcatctaaagccatcaacccctctaattcagaaatgaagaaaggtatgcaagttggtgatgaggttgctcgaaaactcaagtcgaagaagatgaaacctgaaatttctgaattgagaaatgggatattgttgaaagatattcccctggatcatgtctctgattcttcattatacaggaggagcaagagtaagaaagagaccagcacagctgatgatcaaatgcttgaactatgggagtctgctgagcatgaatgtggtgttgattcaaaaaccaatgacatgcaggtacgggcgtttgtaccgggggagatcattgcctgtcatcagtccagtgatctagaaccggaaaaccagagttctttgggagcattggtggagaaagagttgagcgttgataagttagagatatctaccagcattagagagccaaagaaacgagctaaaaaccgaaaggtcttagacagacttgcttctgatgctcataaattgatggctcttcaaacctctgtcaaacaactgaaaaagagaatggaaatcaagaagaggaagaaggcattcgatttagaatacggacaagtcaaagaacaattgcaagaggtggaggatgcaatcaaggagttgtgcaacgtcaatggtgaattgaccaaggatgtcgaagggagttcatctttagacggaacaaactcaatggaattggaaggacctggaaagggcaacttgaaaaacgtacgtgagcaggcacaaaaagggtctgaaaagatcggaaggttgcagttcgaggtgcagagcattgagtacgttatgctgaaactagaagatgaaaggaagaacaaagggaaaacccgaaccggtgtcctcttaagggactttatctacaatggtggaagacggggtggaagacgaaagaagggttgtttttgtgggtgtgcaagaccttcttccagtatagactgaggctaagcatatacagaaaaaaaaaggccctgttgttgcttgataagattcaaagcatgcctaattttcaaggaatttatatgcttagaaactgtttttagagcaaattatcacttctagaattaggccctgatgtaatcagttaacaagctgtatacagcactctatctagtaattttgaataaacaatgtcaaactagtagaacttgttatatatccagttccattttaaccagt

SEQ ID NO: 13054 - DNA, 914 bp, Gossypium hirsutum
  Clone ID: GOSHI-09MAY01-C1455_1
tatctatccgcccttcctatttttcttaagactgtttcttacatacctgtgtttcaccactcggattatctcttcggcaacgtcttcctggtggtggaagtggtgaacactgacggctaagtaacaagttagcaaaatgggacctggtggaccgggaggagggccgggaggaccaggtggaccgggaggatggggaggaggacctggtggttggggtcctggccctggaggacctggcggatttgggcccggaggtcctggttggggtccgggacctggaggtccctggggccctggatttggaggtcctggtttttggcctggtgggttctttggcggctttgcagatggtttgtgcaatatgatatcttcctgcttctactgtctttgctgttgttggctactacaagactgctttggtcgacgccctggctatggtcctcgccctttctaatcatctgctggctgctgttgctatacatgtgttttctgtagtgccttgtaataaatttaataatctagttttaagctttttttcgttgctcttgcttccgccactattttcatctattaccatccaaactttatcaaagtataatgtgactgatttctaggggaagttcatttctttttctagaaaaaaaaaaaaaaaaaaaaaaaaaaaggggggggagccgaattaagcccgaagggcaagcgcctaatttggttgcttgctgaaatttcagtatccataatgtttacccactgttttaggcgaaactaattggggattattctcctttattcctttaacttgataatttatacttctttaaaaaaaaaaactcagggggccccgtccaatcgctatgggtcgatacattactgccggtttcacgcggatggaaactggtaccaatatcgctgagcat

SEQ ID NO: 13055 - DNA, 515 bp, Gossypium hirsutum
  Clone ID: LIB3585-024-P1-K1-C12
cccggaggacctggcggatttgggcctggaggtcctggttggggtccgggacctggaggtccctggggccctggatttggaggtcctggtttttggcctggtgggttctttggcggctttgcagatggtttgtgcaatatgatatcttcctgcttctactgtctttgctgttgttggctactacaagactgctttggtcgacgccctggctatggtcctcgccctttctaatcatctgctggctgctgttgctatacatgtgttttctgtagtgccttgtaataaatttaataatctagttttaagctttttttcgttgctcttgcttccgccactattttcatctattaccatccaaacttttatcaaaagtaataaatgtgactgatttccattagggaagttcattttctttttctagaaaacctttacatccaccttagcatgcccaaatgacacagtccaattctttgttcaaaagcaaaaacaaataaatccacaaaatgttttccctt

SEQ ID NO: 13056 - DNA, 1166 bp, Gossypium hirsutum
  Clone ID: GOSHI-09MAY01-C1445_1
cccacgcgtccgcccacgcgtccggaggtcttggacaatagccgagacaaataccatgagcttctttttgagagagtgccgtcagcaaattagcaatgttctatctaatgattcctataacatgatggtaatgaataaggattctgactatgaaaataatgttttggcatttcatcttcagacttcagatgtaatgccagcttttccatatattgcaccattctcttctatggtgcctgattgctgccgcattgttcgatcattcatcaaaagctcagttgattacttgtcttttggagtgaattctaatttttatgatgcagcaagaaagtatttggacaagctcttgattgatgtgcttaatgaagttgtagtgactacggttcagagtgacggcattgctgaaactcaagccatgcagattgctgaaaatataccatttcttgaaagatcttgtgactttttcctccaacatgctgcacatctttgtgggattccagttcgatcagttgagaggccccaggccagtttgactgccaaggtggtctttaaaacttcaagacatgcagcttatctggctgtcgtgaattcggtaaatagtaagttagataatttcttggcgcttacagaaaatataaactggacggccgaagagatatccgaaaataatagtgagtatatgaatgacgcggtcttttgccttcacactggtttctccacagcacggcagattctgccattggatgctttatacacggttggttgtggggctcttgagcatatttccaactctattgtggctgcatttctcagtgatagtgtgaagaggtttaatgccaatgcagtcatggttatcaaccaggatctacagaagttagagagttgtgctgatgagaggtttcacagcacacgcctaagtgaggtatacgaggaaggtagttttcgaagtagcttgatagaagcccggcagttgataaacctattgtccagcagccagccggagaatttcgcagatcttgtaattcgggagaagtcctacaatgcttggatcgtaagaaagcggctagcattgtcgaaatactcatggactcagcagatgggatctatgggagcctttcaatccagaatacataaacaagttcacggaagaaatcaatggacatgct

SEQ ID NO: 13057 - DNA, 643 bp, Gossypium hirsutum
  Clone ID: GOSHI-09MAY01-C1465_1
agagggttttttttttctaaagtttgacaagtttcagggtcaggtgggtgcgagcctaggcaataggtagcgaactatatatatagtcaattacaagctttgatttaacattaatggagttgatgaaatcagagaatatcgttcaagacaggcaacctcaacctcaagaagaagaagaaatcatgcagcaagaggaagaagaagaacagcggtttcatgtattggcagttgatgacagtgtgattgacaggaaattattggagaagctcctcaaagcttcttcataccaagtgacgtgtgtggagtctggggaaaaagcgttggaatatctgggtttgcttcatcactcatctcctgcttcttcttcttcccaacatcatcatcagggacataaagtcaacttaataatgacagacttttctatgccaggaacgagcggctatgatttactcaaacgtatcaagggatcttcttggaaagacgtaccggtggtggtgatgtcatcagagaatgtaccttcaagaataagcatgtgcctagaaggaggagcagaagaattcatgttaaagcctcttcaattatcagacctacacaaaattcaagctcaccttctcaaatcccttcctcactcttagctctacta

SEQ ID NO: 13058 - DNA, 590 bp, Gossypium hirsutum
  Clone ID: LIB3585-024-P1-K1-D10
cgaagaaaaaaaagagagagtttctcatttaaattttgacgagtttcgggatcaggtggatcggcctaggaataattagcgaactatatatataatcaattacaaggtttgatttaacattaatggagttgatgaaatcagagaatatcgttcaagacaggcaacctcaacctcaagaagaagaagaaatcatgcagcaagaggaagaagaagaacagcggtttcatgtattggcagttgatgacagtgtgattgacaggaaattattggagaagctcctcaaagcttcttcataccaagtgacgtgtgtggagtctggggaaaaagcgttggaatatctgggtttgcttcatcactcatctcctgcttcttcttcttcccaacatcatcatcagggacataaagtcaacttaataatgacagacttttctatgccaggaacgagcggctatgatttactcaaacgtatcaagggatcttcttggaaagacgtaccggtggtggtgatgtcatcagagaatgtaccttcaagaataagcataaaatgaaagcaggtgcctaagaagaggagcagaaaaatcatgttaaag

SEQ ID NO: 13059 - DNA, 674 bp, Gossypium hirsutum
  Clone ID: GOSHI-09MAY01-C1415_1
gagaatcgttgaatgggaagggggtgaaaagattggtgaaaaggcagcttcagaatggctttacattgtcccttggggcctccggaaggttctcaattatatagcgcgaaaatacaataatcccccaatatacatcaccgagaatgggatggatgatgaagaggacaacagtttgcccctcaatgagattcttgatgacaaattaagagttcactactttaagggataccttgctgcagtcgctcaggcaatcaaggatggagcagatgtgaggggatactttgcatggtcattattagacaattttgagtgggctcaaggctataccaagcgctttggtttggtttatgtagattacaagaacggtctcactcggcatcccaaatcttcagcatattggttctcacggttcttgaaaggcggtgaaaagaaaaatggcaaggaaaactaaattgtctgaagctgaaattgccaagctacaaaactagtcttttcatctcgaatccatggtgttgtagccaagaagaataaaaaagtttgcttaagtggttggcaagggtctaactttaaagaactgaaatggaacgtttctgatgctatttctggtttctgtaaagcagatatgatgaggtacattaagtgcctggtatgctttctttgcagcctttttgttc

SEQ ID NO: 13060 - DNA, 1037 bp, Gossypium hirsutum
  Clone ID: GOSHI-09MAY01-C1405_1
atgttacagtacatttctaccctccaagacaccctcaaatcacggacgcctggccgggcgcgggacaacaaggatattggcttggacaggaaggaaggggctcaaaattcaagaaaaactgatttgatctctaatgaagaggagtggtcaattgttcaaggagccttgcagatactcactgttgcagactgtctaacaagcaggtcttcggtctttgaagcatccttgagagctactctggctagattgggcgcaactttgtcactttcggtatttggttcaagtttggataataaccagctacatgttgcaaatgacgatggaaatggggagccaccattaggtggaagagctgccttagatgtcgcagctgtgcggcttgttgatgttcctgagaaggcccagaaactgtttaaccttttagatcagtctaaagatccccgattccatgcacttcctcttgcatcccaaagggtcgctgcatttgctgaagcagtgaatgaactagtgtatgacgtcctcatatccaaagtacgacaacgtctcagcgaggtatctcgtatgccaatctggtctgcagccgaggaacaaaatgcttttcgtctaccaaccttcagtgcataccctcaaccctacgtgacaagtgttggcgaatatcttcttactttgcctcaacaattggagccacttgctgagggtatttctaatagtgacgccaacaatgatgaagcacagttctttgcaacagaatggatgttcaaggttgctgaaggctccaccgccttatacatggagcagctacgtggaatccagtatataacagatggtggagcacagcagctgtcggttgatatcgagtacttgagtaatgtgctttctgctctttcaatgccaattcctccggtcctggcaacctttcaaacctgtcttgggactcctaaagatcagttaaaaaacctgttgaattccgataatgggaaccaacttgatattcctactgctaaccttgtgtgcaaaattcgacgtctgaattggat

SEQ ID NO: 13061 - DNA, 332 bp, Gossypium hirsutum
  Clone ID: LIB3083-116-Q1-L1-E4
tgcaattgttcaaggagccttgcagatactcactgttgcagactgtctaacaagcaggtcttcggtctttgaagcatccttgagagctactctggctagattgggcgcaactttgtcactttcggtatttggttcaagtttggataataaccagctacatgttgcatatgacgatggaattggggagccaccattaggtgtatgttctgcactagattgtttttttgtgcatctttgtttttttatttttttatggctcttttttttttttttttttttttttttttttctttttatttttttatttttatttttttttttttttttttttt

SEQ ID NO: 13062 - DNA, 593 bp, Gossypium hirsutum
  Clone ID: GOSHI-09MAY01-C1435_2
gcgttcgaaaaacaaaaaaaaatcatattcccaaattattttattttattttattttttttaagatccttactgttggagtaccctagtggctttaatctacactgtttaatttattatctttcagatcctttcgattttcctttacttaaattctcttcattcacggattcatgaagttttgatttgtcgcacgctttacgagagtatgatggattctgaagatgtcttgcctgttgaggggcttgaggttgcccttcaaaatggtgttaataggaaacttcaggtgtctgaggacgaccatggtttttcagataatgtgactgggaatgttgagaaaactttggagacttgtttgcagaatgaaatggatgataatggaataacttacgaagatagagaaggaatgagtggcttcgtggatagcaatggattgattgattctaaggaaggggaagttaaagataatgtgaagcaatccaaatctcacaaggttcaagggaagaccaagaatgagaagccctcatgtcccagaaatgtttcttcagctctagtgaagaaaagtaaagatggaaaaagtgcagaggcgacttt

SEQ ID NO: 13063 - DNA, 791 bp, Gossypium hirsutum
  Clone ID: GOSHI-09MAY01-C1435_1
atattcccaaaccctcgcgtccgcccgcgcgtccgccctcgcgtccgatccttaccgttgagtaccctagaggctttaatctacactgtttaatttattatctttcagatcctttcgattttcctttacttaaattctcttcattcacggattcatgaagttttgatttgtcgcacgctttacgagtgtatgatggattcggaagatgtcttgcctgttgaggggcttgaggttgcccttcaaaatggtgttaataggaaacttcaggtgtctgaggacgacgatggtttttcagataatgtgactgggaatgttgagaaaactttggagacttgtttgcagaatgaaatggatgataatggaataactaaggaagatagagaaggaatgagtggcttcgtggatagcaatggattgattgattctaaggaaggggaagttaaagatactgtgaagcaatccaaatctcagaaggttcaagggaagaccaagaatgagaagccctcaggtcccagaaatgtttcttcagctctagtgaagaaaagtaaagatggaaaaagtgcagaggcgactttgacagcttcaaagggtggttctctagctacaaattcacgtccaaaacaacctcttcaaagtagtagatcatttaatgaaaaacatggcaatgcatccaagcattctgagaaatctggggcagccttcactaaaggcactatggagaaacccaagctgaagcctctgaagaaaggacctattcataaaactgaagtagacacagaattgtcaagccc

SEQ ID NO: 13064 - DNA, 518 bp, Gossypium hirsutum
  Clone ID: LIB3583-043-Q6-K1-A10
tccacgcgttcggcgagttctatcgtgtaaagtcactgattagaggcattgggggcgcaacgacgttgaactatgtatctgactgtatattggtgatacggcgcctgttgtggggcttgaggttgcccttcataatggtgttaataggaaacttcaggtgtctgaggacgacgatggtttttcagataatgtgactgggaatgttgagaaaacttggagacttgtttgcagaatgaaatggatgataatggaataactaaggaagatagagaaggaatgagtggcttcgtggatagcaatggattgattgattctaaggaaggggaagttaaagataatgtgaagcaatccaaatctcagaaggttcaagggaagaccaatattgagaagccctcaggtcccagaaatgtttcttcagctctagtgaataaaaagtatagatggaaaaagtgcataggcaactttgacagctttaaagggtgtgtctattagctacaaattcacgtcctaaaacaatc

SEQ ID NO: 13065 - DNA, 439 bp, Gossypium hirsutum
  Clone ID: LIB3197-047-Q1-M1-C4
aaaaaatcatattcccaaataatttaatttaatttgattttttttaagatccttactgttggagtaccctaaaggctttaatctacactgtttaattaattatctttcaaatcctttcaattttcctttacttaaattctcttaattcacggattcatgaagttttgatttgtcgcacgctttacgagagtatgatggattctgaagatgtcttgcctgttgaggggcttgaggttgcccttcaaaatggtgttaattaggaaacttcaggtgtctgaggacgacgatggttttcagatatgtgactgggatgtgagataactttgagacttgttgcagatgaaatggtgatatggatactaagaagatgagaagatgattgcttctgatacattgattatgatctaaggaaggagtaagatatgtaacatcaatctaa

SEQ ID NO: 13066 - DNA, 311 bp, Gossypium hirsutum
  Clone ID: LIB3583-028-Q6-K1-C1
cccggtcgaccacgcgtccgccacgcgtccggaaagagtgagaatttcatgttggatttaagtgtatgatggattcggaagatgtcttgcttgttgaggggcttgaggttgcccttcaaaatggtgttaataggaaacttcaggtgtctgaggacgacgatggtttttcagataatgtgaatgggaatgttgagaaaactttggagacttgtttgcagaatgaaatggatgataatggaattactaaggaagatggagaaggaatgagtgggtttgtggatagcaatggattgattgattttaatgaatgg

SEQ ID NO: 13067 - DNA, 548 bp, Gossypium hirsutum
  Clone ID: GOSHI-09MAY01-C1785_1
ggggaattcaggggagggggctctaaagattccttttatttttttaaaagtatgtaaataaagttgtgcattctacatttgtgattctctgatcattcatataattgcaaagacagagtaaacaaatacccttttttcttgctgaagggagaattaaaaaagcaagagaggaacattggttaatccaagatctcaaatttctcaaaagaaactatattggagatgaacatgagcttttcacatgacatgggtgatgaatatgaaaaattcattagaagaatgaatccgcccagggttgtgattgataatgaagcttgcaagaatgcaactgtgataagggttgactgtgcaaacgaacatgggatccttcttgaagttgtacaaatcctgactgatcttaaccttatcattaataaagcctacatatctgctgatggcaattggttcatggatggtaacatatctcgtcttcttacttttggacttgtctagtaaaattgattctcatttttttgcttttgggtttttgcaatacccagtttttaatg

SEQ ID NO: 13068 - DNA, 1146 bp, Gossypium hirsutum
  Clone ID: GOSHI-09MAY01-C1755_1
ttataactgacacccaaattcccgcattttctgtaaaaagaaaaacctccccgtcctttgagaaaccctagatgtcaacgtcaagccaaactcagttccgctatacccagacaccatcgaaggtcctgcatctccgtaatctcccatgggagtgtacggaagaggaactcgttgagctttgtaaaccctttgggaagatcgttaacactaagtgcaatgtcggcgccaatcggaaccaagcttttgttgaatttgtagacttaaatcaggctatttcgatggtttcatactatgcttcgtcatcggagccggcacaggttcgtggaaaaacagtatatattcaatattcaacctcccatgaaattgtcaacaacaaaagtcctggagataccccaggaaatgttttgctggttaccattgagggtgtggaagctaatgatgtgaccattgagacaattcacttggtattttctgcatttggttttgtgcataaaatcgctacttttgaaaaggctgcgggattccaggcattaatccaattcactgatgctgaaactgcatcttcagcaaggaatgccttggacggtagaagtattcccaggtacttgcttccaggccatgttacttcttgtcacctgcgaatttcgtattctgcacacactgatctgaatatcaagtcccacgcgtcccatcggagcagggattataccaatccataccttcctgtcaatccaacgtgcgatggagggactcatgcagcctgtagttggtcctgatggaaaaaagcaagaacctcagagtaatgtgctacttgcttcaattgaaaatatgcagtatgctgtgacagttgatgttcttcactcggtattctctgcatttggcactgtccaaaagattgctatatttgagaagaatggcggaacacaggcactaattcaatatccggatgtcacgactgcagctgtcgccaaagaatccttagagggacactgcatatatgagggtggctattgcttacagtgataaaagtagagattacacaatcttagacctaagcttgcttgcgacacaaggtccaagtatgccttgcactccaaatgcttggcagaatcctcagaatgctccattataccctgggactgacta

SEQ ID NO: 13069 - DNA, 552 bp, Gossypium hirsutum
  unsure (1)..(552): unsure at all n locations
  Clone ID: LIB3582-044-P1-K1-H11
ataaaattttccctagaaaattcccgtatttttctatctaaacaaatactccctccttgcgagagccctagatgtcaacatcaagccaaccccagttccgttatacccagacgccatcgaaggtcctccatctccgtaacctcccatgggagtgtgcggaagaggaactcgtcgaactttgtaaaccctttgggaagatcgttaatactaaatgcaatgttggcgccaaccgaaaccaagcttttgttgaattcgcagacttaaatcaggctatttcaatggtttcatactatgcttcatcatcagaaccagcacagattcgtggaaaaactgtgtatattcaatattcaaacagacatgaaattgtcaacaataaaagtcctggagatacccctggaaatgtgttgctggttaccattgagggtgtggaacctaatgacgtgaccattgagaccattcacttggtattttctgcatttggttntgtgcacaagattgctacttttgaaaaggctgccggattccaggcattaatccaattcactgatgctg

SEQ ID NO: 13070 - DNA, 518 bp, Gossypium hirsutum
  Clone ID: LIB3584-047-P1-K2-F11
actgtccaaaagattgctatatttgagaagaatggcggaacacaggcactaattcaatatccggatgtcacgactgcagctgtcgccaaagaatccttagagggacactgcatatatgagggtggctattgtaagcttcatctatcatactctcgtcatactgatctcaatgtaaaggcttacagtgataaaagtagagattacacaatctcagacctaagcttgcttgcgacacaaggtccaggtatgcctgccactccaaatgcttggcagaatcctcagaatgctccattataccctgggactgactatgcagcttcagcagcaatgcaagctcaaccctctgctggacaagttcctgcttgggatccaagtttacaggctagaccatcatatggatcagtgcctgggactgttcctggtcaagcatatcaagcgtctgcagtccctacatacatgaatgctgcgccacctgctggttcatcacccctttcccaacctggtgcaacttccatgag

SEQ ID NO: 13071 - DNA, 1121 bp, Gossypium hirsutum
  Clone ID: GOSHI-09MAY01-C1705_1
gtgaaattcgtctccaccccacacccccaatcatctctctcatcaccaaatagattccattaccactctatttcacttcatcaaaatttcatttcatttttcttctataaattctcccctcgcgtcccccataaacctctccccctttcccgcaaaaatctctctcttctcttcctctgtgttatttgaagtcttatgtgttatgaaatttttcatgtttgagactcatgtctccggttgttagtgaaatcctccgttctgggtttatgataaattcttcacttagacgaaggactcatcttgttcaatctttctctgttgtttttctttactggttttatgttttctcataaataaattgtcctattttaccatatatacatatatatatataataagtagttatttagcttacaatttagtctctctttttttcttttttaatggcttcttctagtggaaactccatgtccaattcaggatccgaagaggatttgcacaatcaaaggaaacggaaaaggatggaatccaaccgagaatcagcgaggcggtctaggatgaggaaacaaaagcacttggacgagttaatggcacaagtgactcagttggttaaagataataatcaaatcttaaccaccatcaacttcaccactcaacactacatcaacatggaagctgagaactcggttttgagagctcagatgatggaactgagtcaaagactggagtcactcaatgaaatcctcaattatcttaatagtggtaccaatagcaacaacagcaacgatgggtttgaaacgagtgagggatttgaaacaacaagtgatgaaagcttcaccaccattatcagcaaccacaacaacaatccttttgttattatgaaccaacccattatggcatcaagtgatatgatgatgtttcaatactaaattttattgaaaaaaattgggtgaaaatgtatatttgcaatgatttgttggtgttgagatgttgtttttattgtcttctgttttgtgttggtggtgttcattgaaatttgtagtaaaaacgttttggtggtgccaagcaaatgagatgatgatgtacaagacgactgtaagtgaatttgacatctagtaatt

SEQ ID NO: 13072 - DNA, 561 bp, Gossypium hirsutum
  Clone ID: GOSHI-09MAY01-C1695_2
aaaagaagcccactctttcatctcacgctctggccttctgcctttttcttcttcagcagtgatcgtggcaatgtcttatcataaagagctggctgctgcaaagaaagcagcttctcttgctgctcgtctctgtcagaatgtacaaaaggctttgctgcaatcagatgttcaatccaaaactgataaaactcctgtaacagtagctgattatggctcacaggcactggttagttttgtgctgcagcaggaacttcatgctgaattctcattagttgccgaggaggattctaaagatcttcgcaaagatggtgcccaggaaatagtagagcgcattacaaaacttgtgaacgattctttaactagtgatggatcatacaatgttactttatccacagaagacgttctcacggccattgacagtggcatatctgaaggtggttgccaaggtcgacattgggttttagatcctatagatggtactaaaggttttctgagaagagatcagtatgcaatagcattggctttgctggatggaggaaaaagtgttcttggtgtgctggc

SEQ ID NO: 13073 - DNA, 622 bp, Gossypium hirsutum
  unsure (1)..(622): unsure at all n locations
  Clone ID: LIB3828-016-Q1-K6-D5
gaagattagtcncacgaaaattaattagggtgtatttgtttgcctggaaaacattcttgattttctggtgtttgtttgactgaaaacattttacatgggngaaaatgttttcaaaatctcgggtaaaatgcctatgcttttagggaaaatgtcttacagattttttttccctaagacattttccaattctcactagtctttcccccttgcgcagttctccatcttcctttttctccatccagctgctttgccataaaccaagtgggtgcttccatctatgaatatcaaaaccaaagctttcttcaccgttctagttctttcttcttgcatggtggaaacgaaagcctttatgcttcaaagcttcacgctgatactgacaaaaagccttctcctgaggaaaatcatctcaatggcaagtcttttatcaggctcccaggcagtggttagttttgtactgcagcgggaacttcatgctgaattcttattagttgccgaggaggattctaaagatcttcgcaaagatggtgcccaggaatagtagagcacattacagaacttgtgaacgattctttaactagtgatggatcatacaatgttactttatctacaaaagacgttctca

SEQ ID NO: 13074 - DNA, 426 bp, Gossypium hirsutum
  unsure (1)..(426): unsure at all n locations
  Clone ID: LIB3584-027-P1-K1-F5
cccacgcgtccgttcagtttaggcttttcgttgacaattgctatacttaatttcaaaaggaaaatatacagatgattttatcatttggtttgaatgtacaaaaggctttgctgcaatcagatgttcaatccaaaactgataaaactcctgtaacagtagctgattatggctcacangcactggttagttttgtgctgcagcaggaacttcatgctgaattctcattagttgccgaggaggattctaaagatcttcgcaaagatggtgcccaggaaatagtagagcgcattacaaaacttgtgaacgattctttaactagtgatggatcatacaatgttactttatccacagaagacgttcttacggccattgacagtggcatatttgaaggtgggtgccaaggtcgacattgggttttaaatccta

SEQ ID NO: 13075 - DNA, 386 bp, Gossypium hirsutum
  Clone ID: LIB3196-027-P1-M1-D9
gcccaactctttcatcctcacatcagcttagcgcttgcttcacttgtttgcattcattactagcgagctgcatcagtaggcaaagtgatcattactcattaaacgaggcttggactgcatgcaacagaaagcacgcttctcttgctgctcgtctctgtcagaatgtacaaaaggctttgctgcaatcagatgttcaatccaaaactgataaaactcctgtaacagcagctgattatggctcacaggcactggttagttttgtgctgcagcacgaacttcatgctgacattctcattagttgccgaggaggattctaaagatcttcgcaaagatggtgcctcagaaatagtagagcgcattacataacttgtgaacgactctttaac

SEQ ID NO: 13076 - DNA, 651 bp, Gossypium hirsutum
  Clone ID: GOSHI-09MAY01-C1675_1
cccacgcgtccgaacgcagcaaagcaatagcagcagggattgaaagcgagaattcgaaatggcgcccagggccaccaagcgaaaggcgatggagggggacggcgacggcgaccaacccaagccccaagttaaggggaaacgttgaaaagagtgactaggagcatggcaaagcagccgcaccccgagtctctgcccaccaaggagaagccaaaagcgaaggccaagaagcagaaaaaatctgcagatgaggatggagccaaagccgaagctgcgcctgaggagttggccgtcgctgacggtgggtctcacaacaagactgtagtggttgaacactgcaagcaatgcaattcattcaagacaagggcctttcaagtcagagatggtttggagaaaggtgtcccatgggtcaaagtgttgctcaaccctgaaaagccaagaagaggttgctttgaaatccgagaggaaggtggcgaaacattcataagtctgctggacatgaagagaccatttaaaccgatgaaggagcttgacatggagaaggtaatctcggatatcattgagaagattaaatgaggtgaccatgggtgtgtagacgtagaagcctagttctgattgttttgcctgattaactgtcttgtgttggtaaaaagg

SEQ ID NO: 13077 - DNA, 566 bp, Gossypium hirsutum
  Clone ID: GOSHI-09MAY01-C1665_1
gaatccctcagttacagtgtcctgttctccccacactttggtttttttctccaatcacgaacttgtttgtttccctagaaaaaaaaagaagagaggaaaatcaggaaagaaaatatgagcagctggagaaatcttcttctgcgaattggcgataaaagctcagagtacagttcctcttccgatttcaaagaccacattgaaacttgctttggagctttacggagagagttggggcattcttctgctgaaattttatctttccttctccaatgtgcggaacaattgcctcacaagattccattgtatggaacattgattggtttgttaaatttggaagatgaagacttcgttaaacaaatagttgagaatacacaaaatagttttcaggatgctctggattctggaaattgtgacgggattcgtattttaatgcggtttctgactgctttgatgtgcagcaaagttctccaacccacttcacttgtagttgtttttgaaactctattatcgtcagctgccataacagttgatgaagagaaaggaaatccttcgtggcaagcacgtgc

SEQ ID NO: 13078 - DNA, 693 bp, Gossypium hirsutum
  Clone ID: GOSHI-09MAY01-C1615_3
aaaaataccaaaaatttcagccaaaaaaacattaatccaagctgctaagaacacagaggcttaaaaatggggggtcaaccataagtaagttgctgcgtgagcagtgatacattatcagaggcaaagaagaaaggtcaaaaatgggtcccctcgcgttcgccctcgcgtccgatgagatcaaaccaggagatcatatttacacttacagagctgttttcgcttactctcatcatggtatctttgttggtggaagcaaggtggttcattttagacctgaacgtaacttggattccagcattgatacatcttctaatctattagatccgacattccctcaatcaacttgtccaactttccctgattgcggcttccggcagccaaacagtggggtagtactctcatgcctggattgtttccttcgaaatggatctctctactgttttgaatacggggtgaccccatccgttttccttgccaaagtgcgaggaggcacatgcaccactgcagcctctgatcctcttgaaacagttatccaccgggcaatgtatcttcttcaaaacgggtttggaaactatgacatattcgagaataactgcgaggattttgctctgtattgcacaactggtcttctgattctagacaatctaggaattggatgagtggtcaggcctcttccgtgataggtgccccatt

SEQ ID NO: 13079 - DNA, 573 bp, Gossypium hirsutum
  Clone ID: GOSHI-09MAY01-C1615_2
cccacgcgtccgcccacgcgtccgcccacgcgtccgggatgttgatgatgcttgaatcaagctcaatattgtgcatatgcttgttgaatgtcaaaaccacgcgtcgcatcttggtatctctgttggtggaagcttggtggctcattttagacctgaacgtaacgtggattccagcagcgatacatcttctaatctattagatccgacattccctcaatcaactggtccaactttccctgattgcggcttccggcacccaaacagtggggtagtactctcatgcctggattgtttccttcgaaatggatctctctactgttttgaatacggggtgaccccatccgctttccttgccaaagtgcgaggaggcacatgcaccactgcagcctctgatcctcttgaaacaggtatccaccgggcaatgtatcttcttcaaaacgggtttggaaactatgacatattcgagaataactgcgaggattttgctctgcattgcaaaactggtcttctgatgctagacaatctaggaattgggagaagtggtcaggcctctcccgagataggtgccccaat

SEQ ID NO: 13080 - DNA, 592 bp, Gossypium hirsutum
  unsure (1)..(592): unsure at all n locations
  Clone ID: uC-gsronu33B012c02b1
ggtcatccagggcataactgaatcgttaggaatatgaaaggaaatcacagctagcttagctcttagttcagaccatatctcaacaacttaaatcagtactttcaggcattagatgaggttgggggatgttttacttgagcagttccttgtatggttgaatcatgtaggtatctttgttggtggaagcaaggtggttcattttagacctgaacgtaacttggattctagcactgagccatcttctgatctatacaatcctatatctcctcgatcaacttgtccgacttttcccgattgtggcttccggcagccgaacagtggggtagtactctcatgcctggattgctttcttcgaaacggattgctctactgctctgagtatggggtgaccccatctgttttccttgccatagtgcgtggcggcacatgcaccacagcaatgtctgaccctcctgaaacagttatccacagggcaatgtaccttcttaaaatggatttggaaatatgacatattccagaataactgtgaggacttgcactgtatgcaaaactgtcttcgattatgaaagcaggngctcgaagagcgtcagct

SEQ ID NO: 13081 - DNA, 324 bp, Gossypium hirsutum
  Clone ID: uC-gsronu33B081f12b1
ccctctcgtccgcccacgcgtccgcccacgcgtccggtcaaccataagtaagttgctgcgtgagcagtgatacattatcagaggcaaagaagaaaggtcaaaaatgggtcttcttacaaatagagttgagaggaatgagatcaaaccaggagatcatatttacacttacagagctgttttcgcttactctcatcatgatccgacattccctcaatcaacttgtccaactttccctgattgcggcttccggcagccaaacagtggggtagtactttcatgcctggattgtttccttcgaaatggatctctctactgtcttgaata

SEQ ID NO: 13082 - DNA, 608 bp, Gossypium hirsutum
  Clone ID: GOSHI-09MAY01-C1635_1
aagcaaataccctaaaatcttttgctttctgattgcttttacaatcggcattcactctttcatttcaatcgggactccctaatgccgaaacccaaaatcttatcccctttccttctactctgaacaaccaaggcaatttggctccgattcatcccaaatcgatcttaaggtctctccctccaggtactgttcttctttcttcttaagtgatctttttgctaatctatgcgcttctatattttcaaaccttgggatgaaatagaatctgactttttgaaagaaatcttttaagctttgaatgtcactgataattggtcctatttctgatttgtctcgattttcactttgacattttgttatcactgctcttgaatctcctattatgtctaaagtgtgatatcccaactgggcccctaacattgttgcttgaaatcctgcatgtgcttctgccgcaaacggagatgcaacattgtcatgaaggattgattttgctccaacgattctaccctcctcatttttaacgatgaggcctgacgctgatctgtggttctgtgagtcaaatgccgcatcgaaaaagatggccgtagtcgccctttgtagcctctgtc

SEQ ID NO: 13083 - DNA, 480 bp, Gossypium hirsutum
  Clone ID: GOSHI-09MAY01-C1155_1
gcgcccacgcgtccgcttgctttgctctaaggttaataggaaagaactccaagatttaggcttgaaactcttgtagatataaagcaatggaaatttgatgaatatataactagaaggtgagagacagtccctttaatgaacagtacaataccggtattcattggaaacaaagacgtggtaggtagatatgtatagtctgcaaggtgaccatgtttgtttttattggatgattaacccccagcaaagttgatcatatatagaagttcatatatacatctttatgtaacttccaagtggtttaacaacaataaggtccagtaatgaaagtgggcagatgatccacatgttctggattgatgagtttttatgatttctgaaacagattttgccccttaaagattgtttatctctaggctgtatgcttttaaattggcttttgtctaaatctactccgcatttatctggctggtaattgcttta

SEQ ID NO: 13084 - DNA, 474 bp, Gossypium hirsutum
  Clone ID: uC-gsronu33B018b08b1
gcgatctgaggtggcacttgatgatgtgatcctctttctcctgattacagccattttttgccattttcttgctaacttgataagcttcttagcattgaccatattgctttgctctaaggttaataggaaagaactccgagatgaaaggaaaaagagggatgatttaggcttgaaactcttctggatataaagcaatggaaatttgatgaatatataactagaaggtgagaaacagtccctttaatgaatagtacaatgccggtattcattggaaacaaagacgtggtaggtagatatgtgtagtctgcaaggtgaccatgtttacttttattggatgattaacccccagcaaagtttgatcatatatagaaggtcatatatacatctttatgtaacttacaagtgatttaacaacaataacggccaggcatgaaagcggttagatgatccacatgttttggattgatgagtttt

SEQ ID NO: 13085 - DNA, 597 bp, Gossypium hirsutum
  Clone ID: GOSHI-09MAY01-C1145_2
gtttatgtctggctttacagcacgatggaaatattattttatctggtcaatttcagaggcctccattcttatatctggcctgggtttcaggggatggacagaatcttcaccaccaaaaccaaaatgggatcgcgcaaaaaatgttgacatcccaggggttgagtttgcaaagagtgcagttgtgttaccacttgtctggaacatacaagtcagcacctggcttcgtcactatgtttatgagagacttattacaaaggggaagaaacctggttttttccagttgctggctacacagactgtcagtgctgtttggcatggattatatcctgggtacatgcttttctttgttcagtcagctttgatgattgctggttcaagagttatttatcgatgggagcaagcttcaaatgtaggtcttgtgaagaaaacacttgtcttcatcaacttcgcttacacactgttgattctcaactactccgcttgcggatttctggtattaagcttgcatgagtcacttgcggtggatgggagtgtgtattatgttggaaccattcttccaataacattgattctccttggctatataatacctgcaaa

SEQ ID NO: 13086 - DNA, 807 bp, Gossypium hirsutum
  Clone ID: GOSHI-09MAY01-C1145_1
ccggtttacgagatgaaggactaccttgactggactgaagggaaggggatttgggctcattcagataaaggaccatcaccatctccatatgtagcaactctacgagcgcttgtccaagcttctttttgtatggccatgtttctttacctttcaccatctcatcccttgtcctggtttactgatcctgcctaccaagaatggggattctggaggaagttgagttaccagtatatgtctggttttacaatgcggtggaaatattatttcatctggtcaatttcagaggctgctttgattatatctggcctgggtttcagtggatggactgaatcttcaccaccaaaaccaaaatgggttcgagcaaaggttgttgatatcctaggatttgagttagcaaagagttcagtgctgttaccacttgtctggaacatacaagtcagcacctggcttcgtcattatgtttatgagagacttgttaagaaggggaagaagcctggttttttccagctactggccacacagaccgttagtgctgtttggcatggactgtatcctgggtacatcatattctttgttcagtcagctttgatgattgctggttcaagagttatttaccaatgggaaaaagctgtacccacaaacatggctcttgtgaagaaagcatttgccgtggtgaactttgcttacacacttctggttctgaactactcctgtgttggctttatggtattaagcaagcacgagacacttgcatcatatgggagtgtgtattatattggaaccatcattccgatagcattgattatc

SEQ ID NO: 13087 - DNA, 486 bp, Gossypium hirsutum
  unsure (1)..(486): unsure at all n locations
  Clone ID: LIB3585-020-P1-K1-D4
atcctgcataccaagaatggggattctggaggaagttgagttaccaatatatgtctggttttacaatgcggtggaaatattatttcatctggtcaatttcagaggctgctatggttatatctggcctgngtttcagtggatggactgaatcttcaccaccaaaaccaaaatgggatcgagcaaaggttgttgatatcctaggatttgagttagcaaagagttcggtgctgttaccacttgtcttgaacatacaagttagcacctggcttcgtcattgtgagtgtttctagctgctattcatttctgtgttttgttggtcagttttgcttaaatatgctgttggtgtatattgtacatgtaaatataatgcttaacaatatgaacaactnttggaattggtttctgatttcattaanggtgatcctctggctnnttattatattattattnatattcttgatggctagatgctgtccggtggtaggt

SEQ ID NO: 13088 - DNA, 659 bp, Gossypium hirsutum
  Clone ID: GOSHI-09MAY01-C1165_4
aaaaggcataaactacattggccttattccagcgtgcgtgctcctgcttatcctggggcggagcatgttggtggagacatgtttgaaagtgttccaaaaggagacgccatcttcatgaagtggatatgccacgattggagtgatgagcactgctccaagtttttgaagaagtgctacgaagctttgccggacagcggaaaagtaattgttgcagaatgtattctcccagattacccagatcctagccttgccacaaagttagttgtccatattgattgcatcatgttggctcacaatcctggtgggaaagagaggactgagaaagaattcgaggccttggcaaggagtgctgggtttcaaggtttccaagtaaaatgctgcgcgttcggcacatacatcatggagtttgtcaaaagggtttgaactttgaatctacgtgtcttggttacatgcttcacactgttacttgggcgattgtctcaaaggtggcttgcaaataaggacgagattttgtgctgcttatgtatgataaatactgttgttttatacgtatgctcataattctatcccggcctcaatgtaaagtaatacgcaaatgttgattaatgtcataaaacctcgagtttgagcaaaaaaaatcatgaagaagctgattgtat

SEQ ID NO: 13089 - DNA, 734 bp, Gossypium hirsutum
  Clone ID: GOSHI-09MAY01-C1165_3
caaaaatcaacccatactaaattgcaatattcagaaatgaggacaaaatatgaaaacccatgtcaaatttaaagagaaaacaatgccattaacataataaaaggtaaatccatgtgtaataacataaatccagcatccattgtgcttaataaagcatgaccatacggcaaatatcaccaccatatcttaaaataaattcaaaaatgacaaaaaagaagaagagaaatttaaatcttatcgatgtcctcatcctcgaactcgatgtagtcatcgcctgcaccatcatcttcctcatcaatgccgccagcaatcccttcattcaacctggtattctcgggtagctcaccataagctttgagaagcctagcttcatcgggcatgtatttcaagatgacgtcagccttgtcatcttgataatccctaaggccgacgaggatgatgtcgccggcggcgatccagaccttcttgtgcatcttcccccggatgtggcagaggcgcttggtgccgtcgatgcacatagcttcgcagcggccgttacccaacatgcgtgagacttgggcgtattcttggccatcttctttgaagataagctcacgtttctcgtcatcggcctcgttctttcccctcttacggttctttcctccctttcctttgttcttcggcatctttggttcttcgcaaagattgctcttcccccttcttcagatggaaaagtaaacccggacgcatccgtc

SEQ ID NO: 13090 - DNA, 966 bp, Gossypium hirsutum
  Clone ID: GOSHI-09MAY01-C1165_2
cggtacgcgtgggcggacgcgtgggcggacgcgtcgccggacccgtctctttgtcagcgtttcacactttctaaaactccaatatcccaaaacaatgggttcaaccggtgaaacccaaatgactcccacccaagtctcggatgaggaagccaacttattcgccatgcaactcaccagtgcctcagtccttcccatggtcctcaagtcggccatagaacttgacctgctggagatcatggccaaagctggcccaggtgctttcctctccccaaaagaattggcttcccagctccccaccagcaaccccgatgcacctgtcatgctagaccgcatcttgcgcctcctggctacctactccatcctcacttgctccttgcgcactcttcctgatggcaaagtggagagactctatggtcttggccctgtctgcaaattcttgaccaagaatgaagatggcgtcactctttccgccctcagtctcatgaatcaagacaaggtccttatggagagctggtactacttgaaagatgccgtgctggaaggtggaattcccttcaacaaagtctatggtatgaccgcattcgagtaccatggcacggatcctagattcaacaaggttttcaacaggggaatgtctgatcactctaccattaccatgaagaagattcttgagacctatgatggctttgagggactcaaaacactggtcgatgttggcggcggtactggagctacgcttaacatgattgtcaccaagcacccttctataaagggcatcaactttgatttgcctcatgtcattgaggatgctcctgcttatcctggtgtggagcatgttggtggagacatgtttgaaagtgttccaaaaggagacgccatcttcatgaaagtgagtttgaattaatcaactgaaaacactaacaacttcacttttggaattggctggtacattaaccatggtgaaaa

SEQ ID NO: 13091 - DNA, 1511 bp, Gossypium hirsutum
  Clone ID: GOSHI-09MAY01-C1165_1
gcgagcacgcatacgcccacgcgtgcgccctctttcccacgcgtccgctttattctctgcaatctcttcttttttgagtttcatcacaccagatattacaatgggttcaatcggtgaaactcaaatgacacccacccaagtctcagatgatgaagccaacttattcgctatgcaacttgccagtgcatcagtcctccccatggtcctcaaatcagccattgaacttgacttgctcgagatcatggctaaagctggtccaggtgctttcttgtccccaaaagaagtggcttccaagctccccaccaccaaccctgatgcacccgtcatgctggaccgtatcttgcgtctcctggctagctacaacgtcctcacttgctccttgcgtaccttccctggtggcaaagtggaaagactctatggccttggccctgtctgcaaattcttgaccaagaacgaagatggtgtcactctttccgcccttagtctcatgaatcaagacaaggtccttatggagagctggtactacttgaaagatgctgtgctggatggtggaattccattcaacaaggcctatggtatgactgcatttgagtaccatggcactgatcctagattcaacaaggttttcaacaggggaatgtctgatcactctaccatcaccatgaagaagattctcgatacatatgatggcttccaaggactaaaaacattggtcgatgttggcggtggtaccggtgccacgcttagcatgatcgtctctaagtaccccaccataaaaggcattaactttgatttgcctcatgtcattgaggatgctcctagctgtcctggtgtggagcatgttggtggagacatgtttgtaagtgtaccaaaaggagatgccattttcatgaagtggatatgtcatgattggagcgacgaacactgcgccaagtttttgaagaactgctatgaagctttgccagacaacgggaaagtgattgttgccgaatgcattcttcctgattaccccgaccctagccttgccacgaagttggttgtccatattgattgcattatgttggctcacaaccctggtgggaaagagaggaccgcaaaggaattcgaggcactcgcaacgggtgcgggatttcaaggcttccaaattacatgttccgcttttggcaccaacatcatggagtttctcaaaagtgtttgaatcttacatgcttttggattctgaagcttggtgattgttgtctcaaaggtggattttctggaattacatactttttgtctgacagaaaacaataaagaacgaaatttcatggtttttacgtagaagaaataccatactatatccactaccttactgtaactattaaacaaagttaaaaggcctaaagcctctactttgagaatgattcatggagaagatgattgtttaatcaaaatgaaaaaaaaaaaaaaaaaaaaaaaaaaaaaaaaaaaacaaactttataaaaacaaaaaaaaaaaaaaaaaagggcgg

SEQ ID NO: 13092 - DNA, 507 bp, Gossypium hirsutum
  Clone ID: uC-gsflnu33B016b04b1
tttatgtcaaaattctctatctgagcttcaaatgcaaccgtctaataaaagtaacaaatctatgttactaaaatttgggtgttagtgtattgatatatgttagagacggatgtgtttagtttatgtttttctaagatttatatgtatttggagggtcacgtcaattccagatatgtaatgacggtgactgaaaaaatgacattcagtaagtataagcctgaagtttgaaaatcagtagtgtatacgcaagaaacggtcgcatgagaaaggggttcattaagcaattcattaaaagatgtatactgtgaaacttatatagtttatgccgtgaacttcaattatcattcataagctgcaatcttcattgtattatatgtacgagtttatatgagaaagacgacgtctctacttggagctcgaatgagcacatataagcgttgttgtctggtggaattccattcaacaaggcctatggtatgactgcatttgagtaccatggcactgata

SEQ ID NO: 13093 - DNA, 487 bp, Gossypium hirsutum
  Clone ID: LIB3584-045-P1-K2-A1
ggtactcaaatgcagtcataccataggccttgttgaatggaattccaccatccagcacagcatctttcaagtagtacctggaaacagtccaacatgaaggttcaattattacctcccctgaaaattgtgaaacagagaatcggatcccctgaatattatccagcactgcatcttttgtatgttgaatacatattataaaaattaaagtttgacatagctgatcaagataacgacaaaaaataaataaataaacgcaatcattctacttttcccatatggaggttgaaccaacccacttatccaataacatgattgaaatatatattctctcctatttattaacaatgccttggttttcaatttctagatttaaatctaaacaaacgttgggagttggctaaaatacgctgtaaagctgacatttttaagcaagcagagcatattcatatttgaacactatgtaaaaactacatgtagtcatgaatga

SEQ ID NO: 13094 - DNA, 499 bp, Gossypium hirsutum
  Clone ID: LIB3585-059-P1-K1-G12
aaggagaaaacaatgccattaacataataaaaggtaaatccatgtgtaataacataaatccagcatccattgtgcttaataaagcatgaccatatgccaaagccggacagcggaaaagtaattgttgcagaatgtattctcccagattacccagatcctagccttgccacaaagttagttgtccatattgattgcatcatgttggctcacaatcctggtgggaaagagaggactgagaaagaattcgaggccttggcaaggagtgctgggtttcaaggtttccaagtaaaatgctgcgcgttcggcacatacatcatggagtttgtcaaaagggtttgaactttgaatctacgtgtcttggttacatgcttcacactgttacttgggcgattgtctcaaaggtggcttgcaaataaggacgagattttgtgctgcttatgtatgataaatactgttgttttatacgtatgctcataattttatcccggccctaatgtaa

SEQ ID NO: 13095 - DNA, 553 bp, Gossypium hirsutum
  Clone ID: uC-gsflnu33B112e12b1
aacactactattggggggctgctcgcctcctgagcggccgggccggactggctggacccacccacgcgtgcggttataattggtttatgacgatttatcacaccaggtattacaatgggttcaatcggtcaaactcagatgacacccacccaagtctcagatgatgaagccagcttattcgctatgcaacttgccagtgcatcagtcctccccatggtcctcaaatcagccattgaacttgacttgctctagatcatggctcaagctggcccaggggctttcttgtccccaaaagaagtgggtttcgagcttcccaccaccaaccctgatgcacccgtcatgctggaccgtatcttgcgtctcctggctagctacaacgtcctcagtggctgctttgcgtaccttccctggtggcaaagtggaaagactctatggccttggccctgtctgcaaattcttgaccaagaacgaagatggtgtcactctttccgcccttagtctcatgaatcaagacaaggtccttatggagagctggtactacttgaaagatgct

SEQ ID NO: 13096 - DNA, 396 bp, Gossypium hirsutum
  unsure (1)..(396): unsure at all n locations
  Clone ID: LIB3148-046-Q1-K1-C2
ggaanncnccgggnncgaccccacgccgtggcgagaatacccaggtnntgaatgaagggggattgcnntggcggctattgttatgagnngaagatnganntggtgccaggccgaatgagttacgagtcgtagttgcgagggagtgagggaccatnncgataagaatttannaatttctnncttctcttttnntttgtcattnntttgaatttaattttaagaaatatggnntggtgatatnnnttggcgtnnatggtcatgcctttattatagcaccaatggattgctggatttattgttattacacatnggatttanccttttattatgttaatggcattngtttctctttaaaaaaaaaaaaaaaaaataaaaaaaaaaaaaaattataatttt

SEQ ID NO: 13097 - DNA, 403 bp, Gossypium hirsutum
  Clone ID: LIB3165-039-Q1-K1-B1
ctctctcgtaccgtgatacactttgtaaacctccactatccgacaacaatgggttcaacgggtgaaaccgaaatcactcctacccaaacctcggatgaggaaaacaatttattagccatgcagatcaccaaggactcactccttgccatgggcctcaattctgacatacaaattgacctgctgactatcatgtccgaacctaagactaatgctaccctctaccaaaaagaattgtcttaccatttcctcaccataaatcgagatgtaactgtgatgcttgaccgaatgtcgctcattatgggtatctactgcatactgacttgctccttgcgcactatctctgatggcgaacgcgagagactctatggtcttggccctgtctgcaaattcttgaccaacaatg

SEQ ID NO: 13098 - DNA, 355 bp, Gossypium hirsutum
  unsure (1)..(355): unsure at all n locations
  Clone ID: LIB3585-045-Q6-K1-C1
gtccgcccacgcgtccggcaattttttntttttggaagttccatcacaccagatatcacaaggggttcaatcggtgaagctcaaatgacacccacccagttttaaataataaaccaatttttttctctgtaaattgtgccagcataagacctccccatggtcctcaaatcagccattgaacttgacttgctcgagatcatggctaaagctggtccaggtgctttcttgtccccaaaagaagtggcttccaagctccccaccaccaaccctgatgcacccgtcatgctggaccgtatcttgcgtctcctggctagctacaacgtgctgacttgctacttgcgtaccttccctggtg

SEQ ID NO: 13099 - DNA, 1597 bp, Gossypium hirsutum
  Clone ID: GOSHI-09MAY01-C1105_1
ggagcttcatcttactctcacgacagtttggcgatagcaacttttggagcaatggagatgggtgtttttgtctcttgctcagctggcaatggaggaccagatcctgtcagcctcactaatgtatcaccatggatcactacagtcggtgctagcaccatggatagagattttccaggtagtgttaagctagggagtgggagaaccatatctggagtttcactctacaaagggcggaggttactgcaggcaaacaagcaataccctcttgtttatatgggtagtaactcaagcagccctaatccaagttcattatgcttagagggaactttggatccacatgttgtttctgggaaaatcgtgatatgtgatcgaggaataaatcctagagtgcaaaagggtcaagtagtgaaagatgctggaggagtagggatgattttgacaaacactgcagcaaatggggaggagcttgttgcagattgtcacctacttccagcagttgcagtgggagagatggaagggaaagcaatcaaacattatgctttaacaaatgggaaaccaaccgcaactctagcctttttaggtaccagattgggtgttaggccatcaccagtggtggcagcattttcatctagaggaccaaatttcctcacacttgaaattctcaaacctgatgtggttgcgccaggggtgaacatccttgcagcctggactggagaattgggtccgtcaagtcttccaacagatcataggagagtgagattcaacatattatcagggacttcaatgtcatgccctcatgttagtggaattgctgccttgatcaaggccagacacccagattggagtgccgcagcagttaaatctgctctaatgacaaccgcttatgttcatgataacatccataatccactccaagactcttccactgcagcagcttccactccctatgatcatggagctggtcatatcaaccctttgaaagctctagacccaggtttgatctatgacatttcagcccaggattactttgtattcctctgcacacagaaattgactgcaatgcagctaaaagcttttagcaagcattccaatatgtcttgccatcacaacacccttgccactccaggagatttgaactacccagcaatctcagttgtcttcccagaagatacagccatttcaactttgactctccatagaacagtcacaaatgttggtcctcctgcttcacattaccatgttgtagtttcaccatttaaaggcgtcaccattaaagttgagcccaaaactctaaatttcactagaagaaaccagaaactgtcttacaagatcagtttcacaagaaaatccccacaaacaatgcctgagtttggagggctggtgtggaaggacggagtgcacaaagtaagaagccccattgctatcacatggttaccaccattttaaactagattttcagtcacctatgattccaaataaacactatgtttttatataaggtcaaggggatctttagttttatctgcatttctttctggtttttacaacaattttgtagccttcacatgatatagagtaattaaaaaccaattgccgt

SEQ ID NO: 13100 - DNA, 430 bp, Gossypium hirsutum
  unsure (1)..(430): unsure at all n locations
  Clone ID: LIB3146-034-Q1-K1-B5
caccggnccggaatccgcgcggctcgacagcacgcgtccggtggaattgctgccttgatcaattccagactcccagattggagtgccgcagcgggtaaatttgctctaatgacaaccgcttatgttcatgataacatccataatccactccaagactcttccactgcagcatcttccactccctatgatcatggagctggtcatattaaccctttgaaagctctagacccaggtttgatctatgacatttcagcccaggattacttttttttcctctgcacacataaattgactgcaatgcatctaaaagcttatagcaagcatttcaatatgttttgccattacaacacctctgccactacatgagatttgacattacccagcaatcttaattgtctttctcagatgatacattcattttaacattgat

SEQ ID NO: 13101 - DNA, 404 bp, Gossypium hirsutum
  Clone ID: LIB3189-021-P1-K1-H11
ttccagggacgacgccacgcgttcgaccacgcgtacggaacatccttgcagctttgtctttagaattgagtccatcaagtcttgcaacagatcataggagagtgagattcaacataccatcagggacttcaatgtcatgccctcatgtgagtggaatcgcttgcttgatcaaggccagacacccagattggagtcctgcagcagttaaatctgctctaatgacaaccgcttatgttcatgataacatccataatccactccaagactctttcactgcagcaggcttcactccctatgatcatggagctgggtatatcaaccctttgaaagctctagacccaaggtttgatctatgacatttcaacccagggattactttttaatttcctttgtacacagaaatt

SEQ ID NO: 13102 - DNA, 538 bp, Gossypium hirsutum
  Clone ID: GOSHI-09MAY01-C1125_6
ctgacgcgtgggccaaaactcaaatccctaggtgaccaccacttccaccgtccagttgtccgtcggccgatccacctcctagcctcaagctcagctcagcagcttcttcatttttgcttcttcatttgcagtctcggtagccgatccagttatctttcagcttcttcatttgctgtcttcttcaacttttggcaattccaatatcgactgtagcttccgaatcggcttttagcatgggcaagaaagttatcacacctttgaggagttcacttaagccaaaaacggttcaagccgttgtttgcttggatgattggatgcgagctaagggattttcagcagaaattggttccaaaaatgacgatgacgacgcatgaggacgatgtttcttcggttgctttttgatgtttcttcggttgctttttaagatactctctttctaaatgtttaaaatttaatttagcttacaatttatattttgttataaaattaaatatgttgatggattaatatatgaatattatggttttttgcttattgc

SEQ ID NO: 13103 - DNA, 674 bp, Gossypium hirsutum
  Clone ID: GOSHI-09MAY01-C1125_4
ccgatccatcgatccagtgtctgttggccacctccagctagcctcaagctcagctcaacttcttcatttgtgtttcttcatttgtagtctcggtagccaatctcggtgctccctaaagtttggtccttactccttagtccttactaaggctccccataggcctataccactggctgctgctgttgaagactgctgctgtgcctttatcgcagaaagccccttcttcacgtcccccacgcgtccgcttgagttttatgactatggctagttcgaacactcctatacctgtggacgatgggtttaatgagtatgaaagtgctgccaaacgtcaaaagtctaccacttcaaaggtgggggatgaaatgacaaagcttgaatgcgagaacaaaaatgaattgaaggcacaatgtaatcactgtaagactatcttctctgctaaatcttctagtggaacctctcatttaagacgtcatctaaatagctgtttgaaaaaagttaataaggacatcactcaatacaccatagccactcaaccatcactaggaggtgttccatctataaaaaactacaagtttgatgctgatgagtgccgtcaagctgtttctacttttcttgtgtgtggcaagcattcatttaggacagttgaagaaccgggatttagatacatgatgaga

SEQ ID NO: 13104 - DNA, 739 bp, Gossypium hirsutum
  Clone ID: GOSHI-09MAY01-C1125_2
aaatccctaaccctttccctccctttttttcccccaaatcggaaatccacctccaccgatccaccattccacctccggtcctccacgactccacctccgctctaacggtgcttctagccttcttcgtcttctacctttgaatttcaaagaaacaatcgacattgaaatcgatttggcttaccttagcttcctttcccgacttgaatttttatgactatggctagttcgaacactcttatacctgtggacgatggatttaatgagtatggaagtgctctcaaacgtcaaaagtctaccacttcaaaggtgtgggatgaaatgacaaagcttgaatgcgagaacagatccgttggcaaggcccattgcgactatcgcttccgaatcggcttttagcatgggtaagaaagttatcacacctttgaggagttcacttaagccaaaaacggttcaagccgttgtttgcttggatgattggatgcgagctaagggattttcagcagaaattggttgcaaaaaggacgatgacgacggtgaggccgacgacgacgatgaggacgatgaggatggtgatgtttcttcggtagctttttaagatactttctttctaaatgtttaaaatttaatttagcttacaatttatattttgttatgaaattaaatatgttaatggattaatgtatgaatattatgttttgttgcttaattttccaaagtcattttggactttggaggtatgtgt

SEQ ID NO: 13105 - DNA, 1190 bp, Gossypium hirsutum
  Clone ID: GOSHI-09MAY01-C1125_1
cgctatcttctttttgtcacttccgctcttctctgttaaacgtttagccgtcgttgtctgccatcgatttgctaagaaaatagattgacgatgggattaccaaatgcgagcggtgacttgtcaactgaagttgaggtagatgctttcagacgcctctttccccttcgtttctacaagaaacatcttttagagtctatacgtcctgatgctcgtccgcttggaagagcaagagaaactaccattgcccttggggctgttgcatctgctaatggttcacacttgcaaaaattggttcaactactatgttggctgctatcaaaatggaggtcatgaccccttcattggaaacaccggatgagggttgtatagcgattgatttccacatgcctccaatttgttctccaattgttaggcctggcagaccggctgaggcagcaccagtcgtggcaaagcaattgtcagacactattttaagctctggcatgatcaatttgaaggaactgtccttggttagtggaaaagctgcttggatggcatatttggacatatactgtttggatgctgatggtgctctttttgacactgcattactctcagcggttgctgccttttctcatttggaaatccctgtggtatctctcaacgatgatggaaagaatcgttttatcagaggaacaaggactatctgacagggaaccagtcaataaggagaagagaaaaattaatctgagcagcgttccgttttcattgacatgtgtactttacaagaactacattttggcagatcctactgccgaggaagaatctattatggacactattgtaaccgtggttttagattcatctagtcaactcgtctcgcttcaaaaaccaggtggaacagttctagcatatacatcagctatccaggactgcattgcattaacacggcaaagagtgaaggaacttcaaaagattctagaggaagccatttctggtatggaggttgactaatcttgcacctactaattaaatgctagtaattgatcttttaaaattattgttgtttgttctattgcgtttgtttagtgacattattagttcagggactggtttttggagggtgtaaggaaccaattctagtatgcttaaaagtggcaaattttgtttattgccttttggtatgttaaaaatgtttccgttttgttcta

SEQ ID NO: 13106 - DNA, 498 bp, Gossypium hirsutum
  Clone ID: uC-gsronu33B130f10b1
tctgcggtgcttctacgtcttctacctttaaatttcaaagaaacaagtgacattgaaatcgatttggcttaccttagcttcctttcccaaaatagattgacgatgggattaccaaatgcaagcggtgacttgtcaactgaagttgaggtggatgctttcagacgcctctttccccttcgtttctacgagaaacatcttttagagtctatacgtcctgatgctcgtccgcttggaagagcaagagaaaccaccattgcccttggggctgttgcatctgctaatggttcagcacttgcaaaaattggttcaactactatgttggctgctatcaaaatggaggtcatgaccccttcattggaaacaccggatgagggtttgtatagctaattgatttccacatgccttcaatttgttcttcaattgttagggctggcaaaccggcttgggcagcaccagtcgttgcaaagcaattggcagacactattttaagctctggca

SEQ ID NO: 13107 - DNA, 399 bp, Gossypium hirsutum
  Clone ID: LIB3272-020-P1-K1-B10
ctcctttacccttcttcatctccagccttcgtctgcttctccttgacccgagaaaatagattggcgatgggattatcaaatgcgagcggtgacttgtcaactgaagttgaggtagatgctttcaggtgcctctttccccttcgtttctatgagaaacatcttttagagtctatacgtcctgatgctcgtccgcttggaagagcaagagaaaccaccattgcccttggggctgttgcatctgctaatggttcagcacttgcaaaaattggttcaactactatgttggctgctatcaaaatggaggtcatgaccccttcattggaaacaccggatgagggttgtatagctattgatttccacatgcctccaatttgttctccaattgttaggcctggcaga

SEQ ID NO: 13108 - DNA, 409 bp, Gossypium hirsutum
  Clone ID: LIB3197-001-P1-M1-F9
ttcccttttttatcttcagagacaaatccctaacacattcccttcccttttttttccccaaatcagaaacccacctcgcccgacccaccattccacctgcggtgaccggtcctccacgactccacctccgctctaacggtgcttccatcgaatctagccttcaacgtcttcaaagaaacaagttttttagtgaggcagaaaaaatagcaagcccaggcaggacttgagttttatgactatggctagttcaaacactcctatacctgtggatgatgggtttaatgagtatgaaagttctctcaaacgtcaaaagtctaccacttcaaaggtgtgggatgaaatgacaaagcttgaatgcgagaacaaaaatgaattgaaggcacaatgtaatcacttgtagactatcttc

SEQ ID NO: 13109 - DNA, 630 bp, Gossypium hirsutum
  Clone ID: LIB3543-053-Q1-K6-F6
catatccctagcccgctgccctcctttttttctcaacctacaccttcacctccggcagcagtcctccaccgatccacctctagtcctctacggaccacggctccacccatttcccccatttcctgtttcccctcttccacaaatccctaaccccgtgtccgatccacctcctgtcctccacggctccacccatttccaaaatcaaagaaacaagctattgaggcagaaaaacagcaggcccaggcaggttgctatcacttagaggacttgaatttttataactatggctagctcgaaaactcctatacctgtggacgatgggtttaatgagtatgaaagttctctcaaacgtcaaaagtctaccacttcaaaggtgtgggatgaaatgaaaaagcttgaatgcgagaacaaaaacgaattgaaggcacaatgtaatcactgtaagattatcttctctactaagtcttctagtggaacctctcatttgagacgtcatctaaatagctgtttgaaaaaagttaataaagacatcactcaatacaccataggcattcaaccatcaccagaacgtgttccatctataaaaactacaagtttgatgctgatgagtgtcgtcaagctatttctact

SEQ ID NO: 13110 - DNA, 297 bp, Gossypium hirsutum
  Clone ID: uC-gsflnu33B075b11b1
tataatgaattgaaggcacaatgtaatcactcttcctaatcggcttttagcatgggtaagaaagttatcacacctgtgaggagtccgcttaagccataaacggttcaagccgttgtttgcttggatgattggatgcgagctaagggattttcagcagaaattggttgcaaaaaggacgatgaggacgatgatgatgatgtttcttcagtagctttttaagatactttatttctaaatgtttaaaatttaatttagcttacaatttataatttgttatgaaattaaatatgttgatgg

SEQ ID NO: 13111 - DNA, 254 bp, Gossypium hirsutum
  unsure (1)..(254): unsure at all n locations
  Clone ID: LIB3197-014-P1-M1-B2
atcattcttnancttgggggagtgtttgacagtttgaaggaactgtccttggttagtggaaaagctgcttggatggcatatttggacatgttgtgttgaggttgttggtggngnnnagggtgacactgcattactctcagctgttgctgggttgtggggtgtgtttgttggctatgttttgagctcggggatcgtcaaggatcatcgtcacactatcaactattatttggtacttttgaagtttgtnatttaga

SEQ ID NO: 13112 - DNA, 449 bp, Gossypium hirsutum
  Clone ID: LIB3585-067-P1-K1-C12
cttctctgttaaacgtttcgccgtcgttgcttgccatcgttttgctaaggggctattgcatctgctaatggttcagcacttgcaaaaattggttcaactactatgttggctgctatcaaaatggaggtcatgaccccttcattggaaacaccgaatgagggttgtttaggtttgctgccgttagctgcacgctttcctgtttctctttctcttcctaaaacgtatatcttatctctcgtaatttgtcataatttctttttcattttcaacgattgatttccacatgccttcaatttgttcttcaaatgttaggcctggcagaccagctgaggcagcaccagtcgtggcaaagcaattgtcagacactattttaagctctggtatgatcaatttgaaagaactgtccttggttagtggaaaagctgcttggatggcatatttggacatat

SEQ ID NO: 13113 - DNA, 337 bp, Gossypium hirsutum
  unsure (1)..(337): unsure at all n locations
  Clone ID: LIB3197-037-Q1-M1-D1
gtttcgccgtcgttgcctaccatcaatttgctaagaaaatagattgacgatgggattaccaaatgcgagcgatgacttgtcaactgaagttgaggagaatcctttaaaacccctttttccctttggtttttttaaaaaccatctttaaaagtctttccgtcctgatgctcgtccgtttggaaaaccaaaaaaaaccacctttggccttggggctgtggattttgctaatggttcncaacttgcaaaaattggttcaactgcaagtttgtcgctttttctaaatacatatactgctttgatttggcaagcaattaaccttgagtttaataattaattc

SEQ ID NO: 13114 - DNA, 515 bp, Gossypium hirsutum
  Clone ID: GOSHI-09MAY01-C1045_11
cccacgcgtccgcttcaattgttaaaaaaatatctgtttttgttttgaggttgtatttgttgtatatttcatattaagtttcgtcttttcccagcatttttagtacaaatcataaggaaaaaaaaagtttgctttcggtatgtaagaaatgacatgtttccattctgtctttttgtgattcgaacagtatttaatgaatcaatttcttgctttcttgtttaaaaaaaaaaaaaaaaaaaaaaaaaaaaaaaaaaaaaaaaaaaaaaaaaaaaaaaaaaaaataaaaaaatatattaaaaaaaaaaaatataaaaaaaaaaaaaaaaacaacaaaaaaaaaacaaaaaaaaaacaaaaaaaaaaaaaaaaacaaaaaaaaaggggcggcccttttaagggaccaaatttttactcccaatactttgacccttatacatcttttttgggtaccccaaatattaatttttgggcgctgttttaaaaacggattagtcggaaaacccttgcgttttcca

SEQ ID NO: 13115 - DNA, 694 bp, Gossypium hirsutum
  Clone ID: GOSHI-09MAY01-C1045_8
tttactcgtccggggaaagaagaagaagggggggggtttatgaagagaagagggaagaaagaagaggacacctcagttccagtagagaagtgcgatgagccagtagtccagccagagacgccagagaagaaaggtttcctcgagaagatcaaggagaaacttcctggacaacacaagaaagctgaagaggccagtagcccggctccagccccagcagctgagccccatcacgaagaggtgtcaaaggaaaagaagggaattttggagaaaatcaaggagaagctttctggttaccactccaaatcagatgaagaaaaagaaaaggcttgagattcaagtttacataaaaaccctcgcggccgcccgctgcgtccgaaattggtcaaaatttatctgcttttgatttttgaggttgtattttgtggtatatttcatttttaaggtttcttcttttcccagcatttttagttcaaatcattacgggaaaaaaaagtttgctttcggtttgtaagaaatgacatgtttccattctgtctttttgtgattcgaacagtatttaatgaatcaatttcttgctttcttgtttattaaaaaaaaaaagcaaaaatactaaaaaaatgaacaagcatactaaatgataaaaatcaaactatgatcaaagaactgaaattcgaatgtacatatgaggaaaaca

SEQ ID NO: 13116 - DNA, 607 bp, Gossypium hirsutum
  Clone ID: GOSHI-09MAY01-C1045_7
cccacgcgtccgcccacgcttccgcccacgcgtccgcccttgcgtccggttcgatttcatggggaagaaagaagaggagaagcctcaagaggaggtgatcgtaaccgagtttgaaaaggttaatatcgaagagacaaatgcagaggaagaaggtgaggcgcggccgaagcatggtctcctggagaagcttcaccgatcagatagcagcagctccagctcttcaagcgacgaggaagaaggtgaaggagaagtgacgtagacgaagtaaatgaaggagaagaagggactggaagaaaagattgaagagaaattagaaggggaaaagaaagaagaggacacctcagttccagtagagaagtgcgatgagccagtagtccagccagagacgccagagaagaaaggtttcctcgagaagatcaaggagaaactccctggacaacacaagaaagccgatccgggcaaattcttccgggaaaagttgttgaagcagggaaccgtgatgccaatgccggacattaaagataaaatgcctgtaaggtcatttttgccccggactattgtttcaaaattaccattttctttctccaagtttggtgaattgaaagcg

SEQ ID NO: 13117 - DNA, 556 bp, Gossypium hirsutum
  Clone ID: GOSHI-09MAY01-C1045_4
aattgtaatgcgactcactataggggtaattgggaccggggtcccccctggagaagatcaaggagaaactccctggacttcacaagaaagctgaagaggccagtagcacagctccagccacagcagctgagccccatcacgaaggggagtcaaaggaaaagaagggaattctggagaagatcaaggagaagcttcatggtaaacactccaaatcagatgaagaaaaagaaaaggcttgagattcaagttcacataaaaatactgatgggattgtgtgtttcttcaattgttaaaataatatctgtttttgttttgaggttgtatttgttgtatatttcatattaagtttcttcttttcccagcatttttagtacagatcataagaagtaaaaagtttgctttcggtatgtaagaaatgacatgtttccattctgtctttttgtgattcgaacagtatttaatgaatcaatttcctgctccgcttgtttattatttggagtgccacttgtatttgctacctattctaaatgaattatggccagtaatgaggcctaag

SEQ ID NO: 13118 - DNA, 1062 bp, Gossypium hirsutum
  Clone ID: GOSHI-09MAY01-C1045_3
caactgtgaataagtgaattgatatccaagcgttccattccatttccgtatagttcgaaaacacttaagtaccggcgatcatattttagtgtcaaaaaatggccgaggagcataccagcaaggcccctgagttggagagcaacgttagcggtgaaggagcagtggagagcaaggagcgagggttgttcgatttcatggggaagaaagaagaggagaagcctcaagaggaggtgatcgtaaccgagtttgaaaaggttaatatcgaagagacaaaggcagaggaagaaggtgaggagaagaagaagcatggtctcctggagaagcttcaccgatcagatagcagcagctccagctctgtaagtacactaatcctccgcgtccgccctcgcggccgcttggttgtactataattatactaacatgaaatctgttgcctgaacgtgcagtcaagcgacgaggaagaaggtgaaggagaagagaagaagaagaagaaaaagaaggagaagaagggactgggagaaaagattgaagagaaattagaaggggaaaagaaagaagaggacacctcagttccagtagagaagtgcgatgagccagtagtccagccagagacgccagagaagaaaggtttcctcgagaagatcaaggagaaactccctggacaacacaagaaagctgaagaggccagtagcccggctccagccccagcagctgagccccatcacgaagaggagtcaaaggaaaagaagggaattttggagaaaatcaaggagaagcttcctggttcccccgccaaatcagatgaagaaaaagaagaggcttgagattcaagttcacataaaaatactgatgggattgtgtgtttcttaaattgttcaaaaattatctgcttctgtttttgagggtgtatttgttgtatatttcatatttaagtttcttcttttcccagcatttttagtacaaatcataaggaaaaaaaaagtttgctttcggtatgtaagaaatgacatgtttccattcaaaaaaaataatagaatttttcttttgtccattcctttatct

SEQ ID NO: 13119 - DNA, 1086 bp, Gossypium hirsutum
  Clone ID: GOSHI-09MAY01-C1045_2
gattctttccaatcttacgccaaaaattccaatggagagaaagtcgatttttcaaactatggccaatctttcaatgaaggaaccgataaattcacggggtacggccaaggagccgtgggtcaatccattgggttcaaaatctatggaagaaacaacactttcaaggattatgcaaaaaaggagggcatcgttttcggtagatacaacaatggcagctcctctgaaactgctcaagttaagggcggtagcagtgccgtgagtaaatgggtggagccgggcaaattctttcgggaaatgttgttgaagcagggaaccgtgatgccaatgccggacattaaagataaaatgcctgtaaggtcattttggcccggactattgttcagaataccatttttttatccaagtttgggaatgaagcgatattcacgcgggggtaactcacactggaaaccgtaatgttgacgctttaaagaggcgagcgagcgctgagcccggtcgagaccaaacgatgcgtggtgtcaacggtagacatgatcgatttcgccacctcggttctggggcggaacgtggaggttcgcacgacggagaacgtaaaagggtcaaagcagaacataaagatcggaagcgttaaaggaatcaacggtgggaaagtaacgaaatcggtttcttgccatcagagtttgtacccgtatttgctttactattgccactcggtccccgaggtccgggtctatgaagcggatattctggatccgaagtcactggagaagatcaatcatggtgttgccatctgtcatttggacacatccagttggagttcgaatcatggagcgttcttggcattgggttcgggtccgggtcggatcgaggtgtgccactggattttcgagaatgacatgacttggaccatctctgattcttaaactagaaaagcttctggatgggtaaaatttactaaatttagttaagaagaaaccattggctaagataacttatccattggtgaaactaagaatttgtccattttgtttctctgttaatttaagattatgggatgaaatacccaaatatgaattattttttctt

SEQ ID NO: 13120 - DNA, 1081 bp, Gossypium hirsutum
  Clone ID: GOSHI-09MAY01-C1045_1
gcgatcccacgcgtccgcccacgcgtccggtagccaactgtgaataagtgaattgacatccaagcgttccattccatttccgtatagttcaaaaacacttgagtaccttcgatcatattttagtgtcaaaaatggccgaggagcataccagtaaggcccctgagttggagagcaacgttagcggtgaaggagcagtggagagcaaggaccgagggttgttcgatttcatggggaagaaagaagaggagaagcctcaagaggaggtgatcgtaaccgagtttgaaaaggttactatcgaagagacaaaggcagaggaagaaggtgaggagaagaagaagcatggtctcctggagaagcttcaccgatcagatagcagcagctccagctcttcaagcgacgaggaagaaggtgaaggagaagagaagaagaagaagaaaaagaaggagaagaaggggctgaaagaaaagattgaagagaagttagaaggagaaaagaaagaagaggacacctcagttccagtagagaagtgcgatgagccagtagtccagccagagacgccagagaagaaaggtttcctcgagaagatcaaggagaaactccctggacaacacaagaaagctgaagaggccagtagcccagctccagccccagcagctgagccccatcacgaaggaggagtcaaaggaaaagaagggaattctggagaagatcaaggagaagcttcctggtaaacactccaaatcagatgaagaaaaagaaaaggcttgagattcaagttcacataaaaatactgatgggattgtgtgtttcttcaattgttaaaaaaatatctgtttttgttttgaggttgtatttgttgtatatttcatattaagtttcttcttttcccagcatttttagtacaaatcataagaaaaaaaaagtttgctttcggtatgtaagaaatgacatgtttccattctgtctttttgtgattcgaacagtatttaatgaatcaatttcttgctttgttgtttataaaacatcttaagatattacattttgacgccatgtttctaaaaagaaataataaaaatactcg

SEQ ID NO: 13121 - DNA, 493 bp, Gossypium hirsutum
  Clone ID: uC-gsronu33B178h11b1
tttttcgcgtccggcaacgttagcggtgaaggagcggtggttagcaaggagcgagggttgttcgatttcatggggaagaaagaagaggagaagcctcaagaggaggtgatcgtaaccgagtttgaaaaggttaatatcgaagagacaaaggcagaggaagaaggtgaggagaagaagaagcatggtctcctggagaagcttcaccgatcagatagcagcagctccagctcttcaagcgacgaggaagaaggtgaaggagaagagaagaagaagaagaaaaagaaggagaagaagggactggaagaaaagattgaagagaaattagaaggggaaaagaaagaagaggagaagcctcaagaggaggtgatcgtaaccgagtttgaaaaggttaatatcgaagagacaaaggcagaggaagaagggtgagagaagaagaagcatggtctcctggagaagctcaccgatcagatagcatcagcttcagctctttaag

SEQ ID NO: 13122 - DNA, 678 bp, Gossypium hirsutum
  Clone ID: AI054625.1
tggagagcaacgttagcggtgaaggagcagtggagatcaaggagcgagggttgttcgatttcatggggaagaaagaagaggagaagcctcaagaggaggtgatcgtaaccgagtttgaaaaggttaatatcgaagagacaaaggcagaggaagaaggtgaggagaagaagaagcatggtctcctggagaagcttcaccgatcagatagcagcagctccagctcttcaagcgacgaggaagaatgtgaaggagaagagaagaagaagatgatttagaaggagaataatggactggaagataagattgaagataaattataaggggaaaagatagaatatgacacctttattccagtagattattgtgaatgagccattacttcatctctgagacgccatatataaaatgttttctttattatatttagataatctttctttgttaattctttaattttttaaagtctttataccttatttactctcttttcttattcctttatattatgtttttatatattttttatttttataaatctttgtaatatttatggttctctcttatctattattttgtatgtgtttattattatttcatatatatgtgttattttttcttttttaatcttattaattatttatttatagtttattgtatttctaatctctctttactaag

SEQ ID NO: 13123 - DNA, 439 bp, Gossypium hirsutum
  unsure (1)..(439): unsure at all n locations
  Clone ID: uC-gsronu33B148e05b1
gtcaaagtttaataaagaaaaaaaataaaaagaagcaaaagcagaagagatatttaagagaggaattcgaggaagaaggtgaaggagaagagaagaagaagaagaaaaagaaggagaagaagggactggaagaaaagattgaagagaaattagaaggggaaaagaaagaagaggacacctcagttccagtagagaagtgcgatgagccagtagtccagccagagacgccagagaagaaaggtttcctcgagaagatcaaggagaaactccctggacaacacaagaaagctgaagaggccagtagcccggctccagccccagcagctgagccccatcacgaagaggagtcaaaggaaaagaagggaattttggagaaaatcaaggagaagcttcctggttaccactccaaatcagntnnnnnnnnnnnnnnnnnnnnnnn

SEQ ID NO: 13124 - DNA, 440 bp, Gossypium hirsutum
  unsure (1)..(440): unsure at all n locations
  Clone ID: LIB3147-005-Q1-K1-H11
atctagtcaagatcaagctagaaaataccaaaaaaagagaagagaagaagaagaagaaaaagaaggagaagaaggggctgaaagaaaagattgaagagaagttagaaggagaaaagaaagaagaggacacctcagttccagtagagaagtgcgatgagccagtagtccagccagagacgccagagaagaaaggtttcctcgagaagatcaaggagaaactccctggacaacacaagaaagctgaagaggccagtagcccagctccagccccagcagctgagccccatcacgaaggggagtcaaaggaaaagaagggaattctggagaagatcaaggagaagcttcctggtaaacactccaaatcagatgaagaaaaagaaaaggcttgagattcaagttcacataaaaatactgatgggnatgtgtgttctttaattggt

SEQ ID NO: 13125 - DNA, 355 bp, Gossypium hirsutum
  Clone ID: uC-gsronu33B029e09b1
tcgaactgtgaataagtgaattgacatccaagcgttccattccatttccgtatagttcaaaaacacttgagtaccttcgatcatattttagtgtcaaaaatggccgaggagcataccagtaaggcccctgagttggagagcaacgttagcggtgaaggagcagtggagagcatggaccgagggttgttcgttttttttgagtagtatgtatttaatacctatactattatattttaattcttttttcaattataatttaacattcttattttatctttctttttacttttttctttttctaattttttctcaatattcttatttttatctgtacatttttttctctatctatatt

SEQ ID NO: 13126 - DNA, 1207 bp, Gossypium hirsutum
  Clone ID: GOSHI-09MAY01-C1035_1
gtgagtcaaaacgacaaaaagacgtttaagtgatacgacaccggcgaaaaaggctacggagaaaagaaaaacagaagccagaatattgttttcgcgcaaagatcagaaaataggatccagcgatggcggaagatctggttctcgatacggcgatcagagattgggtgttgatacccctttcagtggtgatggtcctcatcggcatcctccgctacttcgtctccaagctcatgcgctcctttcaagttcctgatcctaagatcgtcaaagaagggcaagtaatcgttagggctcggaatttacgaggtgctgcaaattttatccctcccaagtcttttcgatctcggagggtttatttcagcaatgaggaaaatggattactgtttgtccccaagggccaggctcaaaatgcgcaagcacaaatgttctctgaccctaacatggctatggacatgatgaagaaaaacctctctatgattatacctcagactctcacttttgcctgggtcaactttttcttctctggatttgttgcagccaaaatacccttcccattaactcagaggttcagatcaatgttgcagaatggaattgaccttagcacagttgatgtgagctatgttagtagccgctcatggtatttcctcaatttgtttggtttgaggggtttatttagtctgattctgggagaggaaaatgcaatggatgatacacagcgaatgatgcagatgggtgggtttggctttgatccatcaaagagcctgactgctgagaaagatggtcttgacatagtccaacatgaatgggcactccctaaatttgagcatcgggccgaagcagtattgaaaaaactcgtcagctgaacatcgggagcgtataaacagctgtcaaaaagggggtagttcgattgaagttttcatcttacaagcttttcgatgggtaaaagatgaaactcctttagataccaagtctaggtttgtagtttagattagagtcctacgagaagcaagaggaaaactcccacattcccaagttctttctgctcttgttaattttatgtcgaattttgggccggccaggcagcctaggctaggccgatcagttcagttctagctcattgccggtaaacaaaactcttaatcgcattgatttagtgttgaatatgaaaatttgttttcaataaattaattatgtcgcatctagcact

SEQ ID NO: 13127 - DNA, 408 bp, Gossypium hirsutum
  Clone ID: LIB3585-019-P1-K1-A8
gcggaaagcagaagccaagaatctttcttttttccctcggaggcggagcagagatcagagtaggatccagcgatggcggaagatctggttctcgacacggcgatcagagattgggtgctgatacccctctcggtagtgatggtcctcattggcgtcctccgctacttcgtctccaagcttatgcgctcctttcaagttcccgatcctaagatcgtcaaagaagggcaagtaatcgttagggctcggaatctacgaggtgctgcaaattttatccctcccaagtcttttcgatctcgtagggtttatttcagcaatgaggaaaatggattactgtttgtccccaagggccaggctcagaatgcacaaacacaaatgttctctgaccctaacaatgctatggacatgatg

SEQ ID NO: 13128 - DNA, 1074 bp, Gossypium hirsutum
  Clone ID: GOSHI-09MAY01-C1025_1
cccacgcgtccgaacaaaagaaaaagaaaaacctttcctagttgtgatcactatccccctattcccatacaacaacatatccttcaaattcccgcaacttttcaaccaatcaaaaatcctttgtttcagatcataactttgacgcaattctcacataacccagaattttctttttcttttttggttttcggtgctcaaaaagaaagtcggtcttttttttttgtttgtttgtttgtttgtcactgttgatttcttgttttgcaagttgatttttattatttctgctaatttttaactttctttttgttcccttgggagattctggttgtgattatgaataataactggagaagacaaaaaggtgaaattcatcatcatcatcaaggaatgcaggggacaagatcatattcccgaaagccatctcttgctacgtggcagccgactgttccttcatgggagaagaagttttgcactctggtaggcgctgtaccgtggcggaaacttctcgaaaccaagagatttatgtatctttatgacaacgtagtccagtggaatgactcagctggtgaagaggcgtttcataatgctaagaaccgattttgggccgagattaatggccttccttgtgacataagacttcctgatcctgatagttatatcgataaaatcgattgggactctgaaattgatcctgaactgcttctggacttggagagaaagcccaaggtgcccgacacgaaagattaaaatgaaaagttgcaaatttcggaatcccctcttttgaaaaaacattcctttgggggtttgggggatctttaaacattgttcaggggaaaaatctgcttttaattggaaaccttatattgtaaatttctggtgccctattgggacctcatatatctgtcctgtacttgaggaacactttagtaatggcctaatgatacatatttccttgggacaatcctattgtctcgtcgttataaacatggactagagaataggtttcctataaaacatagagctcgactcattgagcgataatcatagttacggatctttatccactacgggacg

SEQ ID NO: 13129 - DNA, 795 bp, Gossypium hirsutum
  Clone ID: GOSHI-09MAY01-C1395_1
cccacgcgtccgcccacgcgtccgcccacgcgtccgggagcaaggaaaccaaaccaaactagtgagccgcagcttctcttcttctgtatcccaaaatggttgcttttaggtttcatcaataccaagtggtgggcagaggtcttcctacagacgcagatgagcatcccaagatttaccgtatgaagctttgggccactaacgaagtccgtgccaaatccaagttttggtattttttgaggaagctgaagaaggtgaagaaaagcaatggacaagttttggccatcaatgagatctttgagaaaaaccctaccaagatcaagaactatggcatttggctgcgatatcaaagtcaaactggttatcacaatatgtacaaggaataccgagacacaaccctcaatggtgctgtagaacagatgtacaccgagatggcgtctcgtcatcgggtgaggtttccttgtattcaaatcatcaagacagctaccatcccagcaaaactttgcaagagggacagcaccaagcagttccacaactccaaaatcaaattcccactggtatccaagaaggtcaggccaccaactaggaagctcaagacgacatacaaggcaaccaaacccaacttgtttatgtagttgtctttcatggctggtggtggtaggtctaatgccttatagtttgattacttcccttgttagattgagaggggttatcaaattttgaacactctatgtttacttttatagctcttttatgtttcgaagattgtgttttgatgactttactttttaatttaat

SEQ ID NO: 13130 - DNA, 521 bp, Gossypium hirsutum
  Clone ID: GOSHI-09MAY01-C1385_1
tcaatttccatttaaaaaagaaaatatttactatctcaaatttctcgccgtggtggttttgcagttgctaatcaagtctgaagcttaagttcagatgatttgaccgagaagaaacggtaaactcccgcattcagaatcatgggccattgctgtagcaaaaacgtgtccgtcaacaatgaagcaacctccacagtcaatcagtctcagccgcgaccggttccggcctcggcaaccccatccgttgagacaaactcttatgctgttagtccatttgctagtccacttcccgctggagtggcgccgtctccatcaccagctagaacaccgggaaggaagttcaggtggcctttgccgcctccctctcctgccaagccgatcatggcggcaataatgagacgaaaggggtcgaaccaggcggctccgacggaaggaacaattcccgaggatggggaaggagcggtgctagacaaaaatttgggatacgggaagaatttagggctaaatttgagctaggcaaggag

SEQ ID NO: 13131 - DNA, 648 bp, Gossypium hirsutum
  Clone ID: GOSHI-09MAY01-C1355_1
ctctctctctcatatctctctgtttatttattttttttgttttccttttgtcgtccttttctcacctgttgttcttccattttttaatcaagttccccccaccccgctcaacacctctccctctaacaagccaaaggccccaagcagattctatttgttctaacatggagaaaagccatgaacttgaactgacccagatgaggaaatcagtagagaaacttgggttttcaacagagaaatacggggatccgacactcatgagattcttgattgcaagatcaatggacacagataaagcttcaaagatgtttgtccagtggctgaaatggaggtcttctttagttcctaatgggtgcgttgtagaatctgaagtgcctgaccaattagaagccagaaagatttttttgcaaggtttgtcaaagacaggatatccagtgatgattgtccaagcttgcaagcattatcctcccaaggaccatctccagttcaagaagttcgtggtttatctgctagacaaaaccatagcaagtgccgtcaaaggaagagaaataggaaatgaaaagttgattggcgttcttgattttcagaatattacatacagaaatgttgatgcacgtggattaataactggatttcagttcttacagg

SEQ ID NO: 13132 - DNA, 942 bp, Gossypium hirsutum
  Clone ID: GOSHI-09MAY01-C1345_1
cccacgcgtccgcccacgcgtccgcaagcagcttttttattttttatcccttggcttagtcgtctcctctctctgtttcctcactttcagtctctctcatacacttgtatataagcactgccccgcctcccccccgcgtccccggccgcggcgggttttaaagacacaaaatcccagatgggtttcggttgcaaaacactgttgtgtttgtttttcacagttgtggttgtgttattgcaagaagcaagtgcaaggcagcagcaatattattacaatgtgagtgggttaagaaaccgaaagcaagtgagtggatgtaatttgtttcaaggccaatgggtgtttgatccttcttatccttactatgattcctcgggatgtcccttcatagatgctgaatttgattgccttaaatatggcagaccagacaaacagtaccttaagtactcttggaaacctgacggctgtaacttgccaagatttgatggggcgagttttctggcaaaatggaggggaaagaaaataatgtttgtaggtgactcactgagtttgaacatcgggcgcgcgggcgctcgcgtgggtcatgcttctgtgcccaactccaagaccacatttgtgaggaagtcccctttgtcttttgttatctttgaggattatggggtaacactctatttgtatcgaacaccatatttagtggatatagttaaagaaaatgttggtgatgtgcttaatctaggctccatcaaaggtggcaatgcatggatagggatggacctcttgattttcaacagttggcattggtggacccacaaaggaaaatccgaaggatgggattacattagagatgggtctgcattatacaaagatatgaaccgtttagaggcctacaacaaagggcttgcaacatgggctaattgggtcgacaccaatgtcgatcaaaccaag

SEQ ID NO: 13133 - DNA, 415 bp, Gossypium hirsutum
  Clone ID: LIB3135-047-Q1-K1-C10
cccacgcgtccgcccacgcgtccgcccacgcgtccgggtggacccacaaaggaaaagggcggggatgggattacattagagatgggtctgcattatacaaagatatgaaccgtttagaggcctacaacaaagggcttgcaacatgggctaattgggtcgacaccaatgtcgatcaaaccaagaccaaggtcttcttccagggaatttcccctacccactacgagggtagggagtggaaccaaccaaaaaagagttgttatggagaacaagagccactatccggtaccacataccaagcaggggctccaccagctgcttccattgtgaacaaaatattggggtcgatgaacaaaccgggttacttgcttgatattacgacgttttcacaggtgagaaaaagagctcaatctttgac

SEQ ID NO: 13134 - DNA, 494 bp, Gossypium hirsutum
  Clone ID: GOSHI-09MAY01-C1375_8
cccacgcgtccgcccacgcgtcgcggacgcgtgggcggacgcgtgggcgaacgcccattacttcgggggttgagagttcagataccatcgaccatgtcaaggctaagatccaggacaaggagggtattcccccagaccaacagaggttgatctttgccggtaagcaacttgaagatggccgcactctcgctgattacaacatccaaaaggaatccaccctccacttggtacttcgtcttcgtggtggtatgcagatttttgtgaagactcttaccgggaaaaccaccgcctcgggggttgagagctccgacactattgacaatgtcaaggccaaaatccaggacaaggaaggtatccctccagaccaacagaggttgattttcgcggctaagcagcttgaggatggcatgatactttgtagattactacattctttttgttgtctacccttctttttgttttttagtatttgttattaaattttttattttttt

SEQ ID NO: 13135 - DNA, 483 bp, Gossypium hirsutum
  Clone ID: GOSHI-09MAY01-C1375_7
cccacgcgtccgcccacgcgtccgcggacgcgtggggcaaatttttgtgaagactctgaccggaaagaccatcactttggaggttgagagctcggacaccattgacaatgtcaaggccaagatccaagacaaggaaggaatccccccagaccagcagaggttgatcttcgcagggaagcaacttgaagatggaaggaccttggcagactacaacatccagaaggaatcgactctgcaccttgtcctccgccttcgcggtggtttccgaatggtcttttgaagaagtgtcttttatgatggggttcaacattatgtttctagttttatgtttgtctaattaagcctgctgtgatgcagtggctaaatgctacaagttgtaatttataaacccttttttagttctctgcttatgtttaaggtttcatggctgccagcactttggtcattgaaataatttatcatataaagtttctaagctaaaaa

SEQ ID NO: 13136 - DNA, 568 bp, Gossypium hirsutum
  Clone ID: GOSHI-09MAY01-C1375_6
aatacaaggggccacagtgcacttgcagctccaaactgttggagggatgcacatatttgcgaagacacttactgggaagaccatcaccctggaagttgagagctctgacacaatcgataatgttaaggccaaaatcctggacaaggaaggtatccctccagaccagcgggggctgattttcgcgggtaaggcagcttgaggatggcaggacccttgcagactacaacatccagaaggggtccaccctccacttggttctttgactttgtggtggtatgtatattttcttcatcctttatctttttattatttttatttttgttttttttctattttttcttttttattctttttttttttttctatctttatatctacttcactctttttttttatttttttcttatttctctttcttttttttttacttaatcttcttttactttattttttattttctttttttatcttttcttttcttacttatccttttttttttctttttattttcattctctttttctattttttgtatttctattttcttcttttttcatatatttctttt

SEQ ID NO: 13137 - DNA, 686 bp, Gossypium hirsutum
  Clone ID: GOSHI-09MAY01-C1375_5
atgggaggacccttgcagattactccccccgcgtccggtccaccctccacttggttctccgtctccgtggtgggatgcaaattttcgtgaagaccctgactggaaagaccatcaccctggaagttgagagctcagacacgattgataatgttaaggccaagatccaggataaggaaggaatcccaccagaccagcagaggctgatttttgctgggaagcaacttgaagatgggaggacccttgcagattacaacatccagaaggaatccactttgcacctggtccttcgcctccgcggtggttttaagtgttgtgccgaacacctgtccagttattgttgatgtgttaagtttgttatgtttgtgggtcgtatgctgatgtgagctggccactaggcaggggaagcttacaagtaaaaataattgctttttataaacgcttttagttgttttttaggtttgaataagttcgtttttgcattcaagtttctctcttgttcgaatttacatgaaggtgctaataatctattattaagttattaatggaatacagttttgttctatatttttttagtctctgttggttctctgaaaaattgttttcatgtaaagtgtttttaaaattttttttagtttttttatcttgtgttattttttattatattaccttgtgtataattttttttg

SEQ ID NO: 13138 - DNA, 922 bp, Gossypium hirsutum
  Clone ID: GOSHI-09MAY01-C1375_4
cccacgcgtccgaatttcccacgcgtccgcaaagcttcaagatgcaaatttttgtcaagaccctcaccggcaagaccatcacccttgaggtggaaagctccgacaccatcgataatgtcaaggccaagatccaagataaagaaggaatcccaccagatcaacagaggcttatctttgctggtaagcagctagaggatggtcgtacacttgctgactacaacattcagaaggagtccaccctccacttggtccttcgtttgaggggtggtatgcaaatctttgttaagaccctcaccggcaagactatcaccctcgaggtggaaagctcggacaccattgataatgtcaaggccaagatccaagacaaagaagggatccctccagaccagcaggggcttatctttgccggtaagcaactagaagatggccgtaccctggctgattacaacatccaaaaggagtccaccctccatttggtgctccgccttcgtggaggaatgctaatctttgttaagaccctgaccggaaagccaattactttggagggtgagagttcagataccattgacatggccaaggctaagatccaggataaggagggtattcagccagaccagcagaggttgatctttgctggtaagcaactagaagatggccgcaccctggctgactacatcatccaaaaggaatccaccctctatttggtgcttcgtctccgtggtggtatgcaaatgtggtggtatgcaaatatttgttaagactcttaccggaaagaccattactttggaggttgagagttcagataccattgacaatgtcaaggctaagatccaggacaaagagggtattcccccagaccaacagaggttgatctttgcaggtaagcaacttgaagatggccgcactctcgctgattacaaca

SEQ ID NO: 13139 - DNA, 734 bp, Gossypium hirsutum
  Clone ID: GOSHI-09MAY01-C1375_3
agccgatgttctgcactaattcaacacgaggctttatcaattggagcccttctccgaaattcctctttcaagatgcaaattttcgtcaagaccctcactggcaagaccatcacccttgaggtggaaagttctgataccatcgacaatgtaaagaccaagatccaagacaaggaagggatcccaccagaccaccagaggcttatctttgctggtaaacagctggaggatggccgtacccttgctgactacaacatccagaaggaatccacactccatttggccctccgatggaggggtggtttccaaattttggtcaggaccctcaccgggaagaccatcaccctggaagtggagaggtctgataccattgaccatgtcaaaggcccagattcaagacacaaggagggcatccccccagaccagcacaggctgatcttcgctggttaagcacctggaggatggccgcaccttggctgactacaacttccagaaggattcccactccattggtcctccgatgagggtggtttgcaaattttgtaagaccttaccgaaagacatacattgaggtgaagtctgatcatgacattgtaagccaaatcagacaggaggcatccccgaccgcaaagctgactgtgtagcactgagatgccgccatgtgatcacatccaagtccctctcatggttctctgagaagcaattgtagactgctgaaacttcctgaggaagcaacc

SEQ ID NO: 13140 - DNA, 672 bp, Gossypium hirsutum
  Clone ID: GOSHI-09MAY01-C1375_2
cccacgcccccactcgccttgagattatcaatttgaagccttcttcgaatttcctcattcaagatgcaaattttcgtcaagaccctcaccggaaagaccatcacattggaggtggagagttctgatactattgacaatgtaaaggccaagattcaggacaaggaaggcatccccccagaccagcaaaggttgatcttcgctggtaagcaacttgaggatggccgcacgttggctgattacaacatccagaaggagtccacactccacttagtgcttcgcctccgtggaggaatgcaaatttttgttaagactttgactgggaagaccattacattggaggtagagagttcagataccattgataatgttaaggcaaaaattcaggacaaggagggaattcccccagaccaacagaggctgatttttgctggtaagcaactggaggatggccgtaccctggctgactataacatccagaaggagtccaccctccacttggtgctccgtcttcgtggtggtatgcagatttttgtgaagacacttactgggaagaccatcaccctggaagttgagagctctgacacaatcgataatgttaaggccaaaattcaagataaggaaggtttccctccagacccgccgaggctgatgttttgctcgaaacccgcttcc

SEQ ID NO: 13141 - DNA, 1672 bp, Gossypium hirsutum
  Clone ID: GOSHI-09MAY01-C1375_1
gcgttcgcccagcgtccggagccttgggattatcaatttgaagccttcttcgaaattcctctttcaagatgcaaattttcgtcaagaccctcactggcaagaccatcacccttgaggtggaaagttctgataccatcgacaatgtaaagaccaagatccaagacaaggaagggatcccaccagaccaacagaggcttatctttgctggtaaacagctggaggatggccgtacccttgctgactacaacatccagaaggaatccacactccatttggtcctccgattgaggggtggtatgcaaatttttgtcaagaccctcaccgggaagaccatcacccttgaggtggaaagttctgataccatcgacaatgtaaaggccaagatccaagacaaagaagggatcccaccagaccagcagaggcttatctttgctggtaaacagctggaggatggccgtacccttgctgattacaacatccagaaggagtccacactccatttggtcctccgcctgcggggaggaatgcaaatttttgttaagaccttgaccggaaagaccatcacattggaggtggagagttcagataccattgacaatgtcaaggccaaaattcaggacaaggagggcattcccccagaccaacagaggctgatctttgctggtaagcaacttgaggatggccgcaccctggctgactacaacatccagaaggagtccaccctccacttggtgcttcgtcttcgtggtggtatgcaaatttttgtgaagactcttactgggaagaccatcaccctggaagttgagagctctgacacaatcgataatgttaaggccaaaattcaagataaggaaggtatccctccagaccagcagaggctgatatttgctggaaagcagctagaggatgggaggacccttgcagattacaacatccagaaggagtccaccctccacttggttctccgtctccgtggcgggatgcaaattttcgtgaagacccttactggaaagaccatcaccctggaagttgagagctcagacacgattgataatgttaaggccaagatccaggataaggaaggaattcctccagaccagcagaggctgatttttgctgggaagcaacttgaagatgggaggacccttgcagattacaacatccagaaggagtccaccctccacctggtccttcgcctccgcggcgggatgcaaattttcgtgaagaccctgactggaaagaccatcaccctggaagttgagagctcagacacgattgataatgttaaggccaagatccaggataaggaaggaatcccaccagaccagcagaggctgatttttgctgggaagcaacttgaagatgggaggacccttgcagattacaacatccagaaggaatccactttgcacctggtccttcgcctccgcggtggcttttaagtgtggtgccgaacacctgtccagttattgttgatgtgttaagtttgtatgtgtgtgggtcgtatgctaatgtgagctggccactaggctggggaagcttacgagtaaaaataattgcttttatcaacgcttttagttgttctttaggtttcaaggttctatggcattgaataaatatgtttttgcattttgcagtcaaaaaaaaaaaaaagtagatcgtacatttaaat

SEQ ID NO: 13142 - DNA, 345 bp, Gossypium hirsutum
  Clone ID: LIB3166-053-P1-K1-G12
ggatggccgtacccttgctgactacaacatccagaaggaatccacactccattgggtcctccgattgaggggtggtatgcaaatttttgtcaagaccctcaccgggaagaccatcacccttgaggtggaaagttctgataccatctacaatgtaaaggccatgatccaagacaaagaatggatcccaccagaccatctgaggcttattttttgtggtaaacagtttgtggatggccgtacccttgcttgctatcacattcagaaggattccactctccatttggttcttccgattgaggggaggtcattcaaaatttttggtaatgtaccctttacttgtaaatg

SEQ ID NO: 13143 - DNA, 366 bp, Gossypium hirsutum
  unsure (1)..(366): unsure at all n locations
  Clone ID: LIB3493-052-P1-M1-H8
gttcagataccattgataatgttaaggcaaaaattcaggacaaggagggaattccgccagaccaacagaggctgatttttgctggtaagcaactggaggnnatggccgtaccctggctgactataacatccagaaggagtccaccctccacttggtgctccgtcttcgtggtggatgcagattttgtgaaacactactgtaagaccatacctggaagtgaagcttgcacantcatatgttaggcaaatcaagatagaagatcctcaaccacaagctgtttgtggaagactgagatggaggccttgaatacacatcagaagatcaccctcattggtctcgtctcgggggatgcaattttgtagacct

SEQ ID NO: 13144 - DNA, 583 bp, Gossypium hirsutum
  unsure (1)..(583): unsure at all n locations
  Clone ID: AI054644.1
natagagtcaacagatatatttaggcagatnagatagnaggattctccagccacaaggtgatttgctggaagcaactgaaatggagacctttcaatacacnatccagagagtccacctncactggtcttcgctcgcgggcggatgcaattttcgtaagaccntgactgaaagaccatcacctggaagttgagagctcagacacgattgataatgttaaggccaagatccaggataaggaaggaatcccaccagaccagcaaggctatttttgctgggaagcaacttgaaatgggaggacccttcagattacaacatccaaaggaatccactttgcacctggtccttcgcctccgcggtggcttttaagtgtggtgccgaacacctgtccagttattgttgatgtgttaagtttgtatgtgtgtgggtcgtatgctaatgtgagctggccactaggctggggaagcttacgagtaaaaataattgcttttatcaacgcttttagttgttctttaggtttcaaggttctatggcattgaataaatatgtttttgcattttgcagtcaaaaaaaaaaaaaaaaaac

SEQ ID NO: 13145 - DNA, 309 bp, Gossypium hirsutum
  Clone ID: LIB3189-028-P1-K1-G4
cagaaatgggttttcccgatgcattcgcaatctttgtgattttttaacccaaccctgaaaactccctactggtcatgacaatccaataggagggggagagatcttgatctattgacaatgtaaaggccaagttgtaggtaaggtaaggattccccccagaccagcaaaggttgatcttcgctggtaagcaacttgaggatggccgcacgttggctgattacaacatccagaaggagtccacactccacttagtgcttcacctccgtggaggaatgcaaatttttgttaagactttgactgggaagacca

SEQ ID NO: 13146 - DNA, 296 bp, Gossypium hirsutum
  Clone ID: AW186875.1
ctggtccttcgcctccgcggtgcaaagtggattccttctggatgttgtaatctgcaagggtccactttgcacctggtccttcgcctccgcggtggttttaagtgttgtgccgaacacctgtccagttattgttgatgtgttaagtttgttatgtttgtgggtcgtatgctgatgtgagctggccactaggcaggggaagcttacaagtaaaaataattgctttttataaacgcttttagttgttttttaggtttgaataagttcgtttttgcattcaaaaaaaaaaaaaaaaaaaa

SEQ ID NO: 13147 - DNA, 701 bp, Gossypium hirsutum
  Clone ID: GOSHI-09MAY01-C1315_1
cgagttctgcgaaatgctatccaaaggtattggaacaatggcagcaagatctttatccattgttcacgttcccgcgtttaaacctaaatgggttttctctcccttatcattttgttcttcagaatccaaaccaaggaagctggttctctactccaagcctggttgctgtttgtgcgatggcctcaaagaaaaacttcacgccgccttctcactttccggcccggaccccctccatgacgtcgttttgcaggtgagggatattaccagcaatcctgagtgggagaaggcttatcaatatgagatacccgttttagccaaagtgctctctgatggctctgaggaaatactacctagattatctcctcgacttggggcggaacttgtccataagaagatagcagctggttttaaacagtaagagtgctgtaagtctttgttatgtgatggaatggataccgaagttcgtgtacgactacaagggaatatgatttttgataaacatcatgtcattgttagtatgctctgactaggttttatctacccggcatcactgaccctggggctttactacgatgaacaaaagattcttttcatatctttgcgtatcattaattccatggaaacaaacgcaggccaccttaaggtcttgaaactgatgaaatgaaagatagcattaatcatggttctttaatgtcatattc

SEQ ID NO: 13148 - DNA, 1058 bp, Gossypium hirsutum
  Clone ID: GOSHI-09MAY01-C1325_1
ggggaaatgaccgaggaaatgccttctctccgatgtataatagcaacccttttcttcgcccttttgctcccaccaggatcctttccagccaccacattgagtccatcattttatgatgaaacatgccccacggtatttagcatcattcgaggaatcatcgaacaagctttgctctctgatcccaggattggtgccagccttcttaggcttcacttccatgactgctttgttaatggctgtgatgcatcgattttattggacaacagcgctaccatagaaagcgagaaagaagctgcgccgaataataactcagcaagaggatttgaggttgtcgatgccatgaagatcgcactagaatttgagtgtccaggcatcgtttcctgtgctgatattcttgctattgcagctcaagaggctgtcaatctggcgggaggtccttcatggctagttctattgggaagaagggatagcacaacagcaaatcgaacactggccaatttagctattccagctgcctttgaaactcttgatattctcaagtccaagtttgcagccgtggggctcaataccagtaccgatctggttgcactttcaggtgctcacacatggggacgggctcaatgtacaattgtcattgaaccattatataatttcaatggtaccggaaaagcagacccgacattgaacgcaacatacttagagacgctacgcaaagtatgccctcaaggccgaaatggtagtgttttggtgaatttagatcctacaacacctaatacattcgacaggtactactacactaacctttcaagctcaagaaggactgctccaaagtgatcaagagctgttttctactagtggagctgataccgttgaaattgtggagaggttcagcagcaatcaaattgctttctttgaaagctttgtggtttccatgctaaaaatgggaaatatcagtccagtaacaggtacggaaggagagattagattgagttgtagaagggttcatatggattacacaagttcaaacaaatggagctctagctaaggtgtgtctgttg

SEQ ID NO: 13149 - DNA, 714 bp, Gossypium hirsutum
  Clone ID: GOSHI-09MAY01-C1295_1
caaaaagcacccagaaatctcctggcttgttcaaatgcaatctctaatctcagcacagcaaaactgatctcggcagcgattcaaacaacgcgtcaaccgagacctgttatctctttcccctgatttaatcaactcaaaaggtattattatttactaaaggcagaaacttcttctgcttgaggaaacaaagcagagggcaacaatgaagtgggtcaaagtcatagtatctttcatcctcacactctcgttcttgtcgtttccttcatgcgcgttccaatccgatgagcttctcgttgacgacgaagagttcggactcgagggggctccgcaacatcgttcccctgaacccatccccactcgatccccaccagtcacatccccgacccgaaagaggcattcggatctagattccgattctaagatccagttctctcttgaccacgcttttggcgactccgatttctctcccgctggcactttctccgcccgcctcaaaacatggagccacggcggccagactcttacaaagctacggttttcgaggaacagtttctctgatgtggagaaggagaagttcaaaaatctgctcgaaagtgatgacttctataggataagactcccatctaatgttttgaatccgcctgggagggattttattatttcatcagtgaaagcaagatgttttcctagagaaagtttgtattagcattttgt

SEQ ID NO: 13150 - DNA, 761 bp, Gossypium hirsutum
  Clone ID: GOSHI-09MAY01-C1285_1
atagggtagtcacattgagagtaatcaatttgtcatgacagttaaccaaccataaacactcgctataaaaccatggtttattgcccccctttgtatcgtcaatttcttcattccctctccccctcctgttttccgatatggcttcagctgatgttgagtaccgatgcttcgtcggagggctcgcttgggccaccgatgaccgggctctcgaagaagccttcagtgtgtatggcgagatcgtcgaatcgaagattatcaatgaccgtgaatctggaagatcccgaggctttgggttcgtaactttccgtgacgagaaatctatgagagacgctattgaaggaatgaacggtcagaatcttgacggaaggaacattaccgtaaacgaagcccaatcacgccgaagcggtggaggcggcggtgaaggatacggaggaggaagcggaggctacaaaagaagtggaggaggcggaggatatggtcgccgtgaaggaggctatggaggtggccgtcgtgagggtgtattcgggaatggtggaggatatgacggcggaggcggtggtggcggatatggcggaggcggtggcggatatggaggcggtggcggatatggcggcggtggcggtggtggaatgggggttgacgctgagatggtgggtctcgttactcgaggaggcggagcgtctgatgtgagctggaagacttaggtcgtagggttagcatttaagtgagctttgggctttgctttttcagttggatgatga

SEQ ID NO: 13151 - DNA, 326 bp, Gossypium hirsutum
  unsure (1)..(326): unsure at all n locations
  Clone ID: LIB3135-005-Q1-K1-G7
tccactcctacatttctctatctaatgttttatacccatacttcatctaatgccgtgcgctgggccacctatgaccgggctctccaanaagccttcagtgtgtatggctacatcgtcgaatcgaagattatcaatgaccgtgaatctggaacatcccgaggctttgggttcgtaactttccgtgacgagaaatctatgagagacgctattgaaggaatgaacggtcagaatcttgacggaaggaacattaccgtaaacgaatcccaatcactccgaatcggttgaggcggccgtgaatgatacggtggaggaagcggatgctacaa

SEQ ID NO: 13152 - DNA, 838 bp, Gossypium hirsutum
  Clone ID: GOSHI-09MAY01-C1275_1
cccacgcgtccgaatggctggaggaggatgcatggtaaagctctgattattgtagtattatgaaacagacccacggctgactgattacaacacactgcttgaaaatattcacggtttaaaagcggggaaacctgttcaagttccaatttatgacttcaagtctagctctcgcataggatacaggacacttgaagtgcctagctcccgcatcgtgattattgaaggaatatatgccttaagtgacaaattgcggcctttactagatcttcgcgtatctgtcactgggggtgttcactttgaccttgtcaagagagtgttacgggacattcaacgtgctggccaagagcctgaagaaattatccatcaaatctctgaaacggtttctttatcttacctattttactttataggtgtctgatttagctggtttgtgaaatcgtacctagttatagcctttaagtgctttatcaaatccctccaaaacaaagagtagttatagtagttctcatgcccttctttttcacacaggtatatcctatgtacaaggcttttattgagccagatctcgaaacagcacatattaaaatcatcaacaagtttaatccgttcactggatttcagaatcctacttatattttgaagtctacaaggttggtgacactggatcaaattaaggaagttgtatctgaggaacacaaagaaactatagaggaaacatacgacatttatcttctaccccctggtgaagatcccgaagcatgtcagtcatatctgaggatgaggaacagggatggcaaatacaatctcatgtttgaggttagatgtttcatttttaagc

SEQ ID NO: 13153 - DNA, 521 bp, Gossypium hirsutum
  Clone ID: GOSHI-09MAY01-C1265_2
cttgtgttattgctcttcctttttcctctttctgttattctctctctttcccctctgctctttacctttaatttctatgatttaaagctatatacatatatatatatatctgcaaggaaaatcccagtttctctcctgtttagctaatgtcagaagacatgaatctatcaataaatgggcagtctcaggtccctcctggttttagatttcatcccacagaggaagagctccttcactattatcttagaaaaaaagtggcttacgaaaagattgaccttgatgttatccaaggaagttgatctcaacaagcttgagccttgggatattcaaggtacatactaatcaacctaaccctctctttttaatgcaattttttttggctaatttgtgggttatatgcagaaaagtgtagataggatccactccacaaaatgaatggtatttcttcagccacaaagataagaaatacccgaccgggactcgaaccaatcgtgctacggctgccggattctggaaagcaa

SEQ ID NO: 13154 - DNA, 552 bp, Gossypium hirsutum
  Clone ID: LIB3585-041-P1-K1-G5
tgtgctcttcctttttcctctttctgttattctctctctttcccctctgctctttacctttaatttctatgatttaaggctagatacatatatatatatatctgcaaggaaaatcccagtttctctcctgtttagctaatgtcagaagacatgaatctatcaataaatgggcagtctcaggtccctcctggttttagatttcatcccacagaggaagagctccttcactattatcttagaaaaaaagtggcttacgaaaagattgaccttgatgttatccaggaagttgatctcaacaagcttgagccttgggatattcaagaaaagtgtaggataggatccactccacagaatgaatggtatttcttcaaccacaaggataagaaatacccgaccgggactcgaaccaatcgtgctacggctgccggattctggaaagcaaccggccgtgataagattatatatagtgggtttaggagaattgggctgaggaaaacattggtgttttataaaggcagagctccacatggtcaaaaatctgattggattatg

SEQ ID NO: 13155 - DNA, 837 bp, Gossypium hirsutum
  Clone ID: GOSHI-09MAY01-C1215_2
ttttagatttcactttttaaaaaaaccccctttctttcacttgttttgcatttaagtaatgggaaaagctacaaggtggctaaagagcttatttgggataaagaacaccaaagaatgcccaagttccggtgaccggaaagataagaaacggtgtagcattgggcattcagggcgggggtcaacccgccccgtccctcgcgtccccccacgcgtccgaccaaatatatcaccggcagaggtggtttggctgagatcattctacaatgaaacggagaaagagcagaataagcacgcaattgcggtggcagctgccacggctgctgctgcagatgccgctgtcgccgccgctcaggcagctgtggcggtggtgaggcttacgagtcatggaagaggtaccatgttcggcggtggtggacatggaaagtgggctgccattaagattcaatccgttttcagaggctatctggctaaaaaagcattacgagctttgaaaggattagtgaaaattcaagcacttgttagaggatatttagtgagaaaacaagcttcagctacacttcatggcatgcaagcattgataagagcacaagctacaatcaggtcccaaaaagcacgaaaatctatggagcaatatgatgatacaaggagtgaacgcactgtttcttttcatagtagaagattatcggcttctctcgatacactcaacattgaagaaagtcccaaaattgtggagattgatacgggtagacctaaatcgagatcccgaagaaccaacacatcagtatcagatttcggtgacgacccatcatttcaaatcctgtctacttcggttccagc

SEQ ID NO: 13156 - DNA, 879 bp, Gossypium hirsutum
  Clone ID: GOSHI-09MAY01-C1215_1
cggtaccggccaattcccgggtcgacccacgcccgtccgcctaaatcgagatcccgaaaaccaacacatcagtatcagatttcggtggacgacccccatcatttcaaatccctgtcttcttcggttccagctcgacttccggccgcctcgtttctcgggtccggatagtcacactgattggggactaaccggagatgaatgggtaggttctcaacccagcacaaagtacccacctcggttcatcaattgttgtgtgtctaatggcaccggtcacaccccagccaagaagtgtatgtgctgataactttttttaggcacctatgggattgggaaccttgaaatttccctttaattacccatggctaaacacacaatccattcaagggctaaattgaggtcacatagtgccccgaaacccaaaggccggaaaccgggaccaaaaaaagcagctttccgttggtcgaaacccgacggagtctagaagtagtttgagtggtgttaggatgcaaagatcatgttcacaagctcaagaagctattagtttcaagaatgtagtgatgggaaaaaacttgatagatattccttagaatttggtagagatagtgaaaggacctgtttgcaaagaaaacggtgatgttgtgtaagaaaaaaggactgcctctgccatggtagtgaacaaagataggtgatgaaacaaggtaaattgaaaattttcccataatgaattcaaatctcagtgttatctccaggaattcgccttattgtcaatgaaattaaattccatttgtagaattatattaccgcaaaaaaaaaaaaataaaaaaaaaaaaaaaaataaaaaaaaaaaaaaaaaaaaaaaaaaataaaaaaaaaaaatat

SEQ ID NO: 13157 - DNA, 350 bp, Gossypium hirsutum
  Clone ID: LIB3196-032-P1-M1-H10
cccacgcgtccgatttctacttcccaaagctatcgtataaaaatgggccacttttagatttcacttttaaaagaaccccctttctttcacttgttttgcatttaagtaatgggaaaagctacaaggtggctaaagagcttatttgggataaagaacaccaaagaatgcccaagttccggtgaccggaaagataagaaacggtgtagcattgggcattcagggcgggaatcaagcggcggattatgtcacaaccctacaacgataccaccaaatatatcaccggcagaggtggtttggctgagatcattctacaatgaaacggagaaagagcagaataagcacgcaattgc

SEQ ID NO: 13158 - DNA, 564 bp, Gossypium hirsutum
  Clone ID: GOSHI-09MAY01-C2995_6
acgcaaaaaggcttttgattcctccaatactgtgtcagttgctgaagttaatgctcaagcacgtgctgggggagtccgtacggggattgcctatgaaagagcttaagagcttggagagtcgtttagaaaaaagaattagcagaatccgttccaaaaagaatgagctgttgtttgctgaaatagagtatatgcagaaaaaggttaaaatagtgaaatgcactgtgaatgacattcccggggacatctctttcaatcaaacggctgggctatctgcactttgctttctggagaaggtttgagtttttggtggatgcatactccacgattagctgaattcatgcatagtgacttgtttaagctaactgattatcttaaagtgtgcattctatcattattttgttctatttgtattttgtattttgtattttgttatatttctggtgtagtatgataagtgcggtattttgtttggcgggatatatttatatcatagattattattcttttcaatagtaaaattaaaaaattaactattttctcagaaaaaaaaaaaaaatattaaaa

SEQ ID NO: 13159 - DNA, 996 bp, Gossypium hirsutum
  Clone ID: GOSHI-09MAY01-C2995_3
cctgcatctcttctggtcagagatttgcagctaaaatgagaaacaaagagaagtaaataaaaaacccttctctttctttttctgcctttaattatcatacttgcctttttcttttcttttcctttcaagttaggaagcatggtgtaccccaatgaatcccttgaagactctccccagaagaaaatggggagaggaaagatcgagatcaagcggatcgaaaacacgacgaaccgccaagttaccttttgtaagaggcgcaatggtttgctcaaaaaggcttatgagctatcagttctttgtgacgctgaggttgctttgattgtcttctccaaccgtggtcgactctatgagtatgccaacaatagtgttaaagcaacaattgagaggtacaaaaaggcttctgattcctccaacactgggtcagttgctgaagttaatgctcagttctatcagcaagaagctgacaaactccgaaatcaaatccggaatttgcagaatacaaacaggcacatgctgggggagtccgtagggggattgcctatgaaagagcttaagagcttggagactcgtttagaaaaaggaattagcagaatccgttccaaaaagaatgagctgttgtttgctgaaatagagtatatgcagaaaaagtgtagatgtaagagttgttgcagtaggacttgcaggaggactttgatcatcactttggtcaccttgattgatgaagtcatcatctttattatcattgaaaagaaattgacttgcataacaataaccaacttcttcgagccaaggtctgatctctcttctttctttgcgctaatttagcattgttgtcgcggttgaaaaaaaacacctatatttcgctcgtccatttactgtatgttgcagatagctgaaaacgagaggaagcagcagagcatgaatttgatgcccggaggttcaagtaataacttcgaggccatacattctcagccatatgactctcggaactacttc

SEQ ID NO: 13160 - DNA, 666 bp, Gossypium hirsutum
  Clone ID: GOSHI-09MAY01-C2995_2
tagttcctttaagattattaattattattgctactgacaaattttcccttctcctttgatttagccccttccgtccctaccagaatgagctgttgtttgctgaaattgagtatatgcagaaaagggaaattgacttgcataacaataaccaacttcttcgagccaagatagctgagaacgagaggaagcagcagagcatgaatttgatgcccggaggttcaagtgctaacttcgaggccctacattctcaaccatatgactctcggaactacttccaagtcgatgctttacaacccgccaccaattattataaccctcagctgcagcaagaccagatagctcttcaactagtctaatgttatgggggcgtgcatggttcattgctgctgtttcagttttagtgaagaacatcttagcattgtgtcagatgaaagctactatataaggcaggaatattatgttaactttccttaaatggaggaccctagatctgatcgtctgccatgtttaagatgcgtagagtgtgtaagaatgataagtttgattttcagacaagaatgtcctcttccatttgcttagaacatgcattaagatcctacaagattatcccccatgaatcatggcatttccacttactatgaaatatataatatacatattctaggt

SEQ ID NO: 13161 - DNA, 1155 bp, Gossypium hirsutum
  Clone ID: GOSHI-09MAY01-C2995_1
gacacaacaaaaaggttttctggtttatttacatttataaatagaaacctctcaacccttctttgcttccattttctgcatctcttctggtcagagatttgcagctaaaaggaaaaacaaagagaacagagatttgcagctaaaatgagaaacatagagaattaggaagcatggtgtaccccaatgaatcccttgaagactctccccagaagaaaatggggagaggaaagatcgagatcaagcggatcgaaaacacgacgaaccgccaagttaccttttgtaagaggcgcaatggtttgctcaaaaaggcttatgagctatcggttctttgtgatgctgaggttgctttgattgtcttctccaaccgtggtcgactctatgagtatgccaacaatagtgttaaagcaacaattgagaggtacaaaaaggcttctgattcctccaatactgggtcagttgctgaagttaatgctcagttctatcagcaagaagctgacaaactccgaaatcaaatccggaatttgcagaatacaaacaggcacatgctgggagagtccatagggggattgcctatgaaagagcttaagagcttggagagtcgtttagaaaaaggaattagcagaatccgttccaaaaagaatgagctgttgtttgctgaaattgagtatatgcagaaaaaggaaattgacttgcataacaataaccaacttcttcgagccaagatagctgaaaacgagaggaagcagcagagcatgaatttgatgcccggaggttcaagtgctaacttcgaggccatacattctcagccatatgactctcggaactacttccaagttgatgccttacaacccgccgccaattattacaaccctcagcagcagcaagaccagatagttcttcaactagtttaaggatctttgcagaagaaatgtctatgtattgcccaatatattttcatcttagatgaagctatataacatgttgtttcctatggtttgggcagctaatgttgtgggggtgggcatggttcattgctgctgtttcagttttagagaagaacattttagtattacgtcagatgaaagctactatataaggcaggaatatttatattaactttccttaaatggaggaccctagaactcattttttgcc

SEQ ID NO: 13162 - DNA, 606 bp, Gossypium hirsutum
  unsure (1)..(606): unsure at all n locations
  Clone ID: LIB3829-027-Q6-K6-E11
gcgttcgcggncgcgtgnnggtccgaaatcaaatccggnatttgcagaatgcaaacaggcatatgctgggagagtccatagggggattgcctatgaaagagcttaagagcttggagagtcgtttatgaaaaaggaattagcagaatccgttccaaaaagaatgagctgttgtttgctgaaattgagtatatgcagaaaagggaaattgacttgcataacaataaccaacttcttcgagccaagatagctgagaacgagaggaagcagcagagcatgaatttgatgcccggaggttcaagtgctaacttcgaggccctacattctcaaccatatgactctcggaactacttccaagtcgatgctttacaacccgccaccaattattataaccctcagctgcagcaagaccagatagctcttcaactagtctaatgttatgggggcgtgcatggttcattgctgctgtttcagttttagtgaagaacatcttagcattgtgtcagatgaaagctactatataaggcaggaatattatgttaactttccttaaatggaggaccctagatctgatcgtctgccatgtttaagatgcgtagagtgtgtaag

SEQ ID NO: 13163 - DNA, 645 bp, Gossypium hirsutum
  unsure (1)..(645): unsure at all n locations
  Clone ID: LIB3829-002-Q1-K6-G10
gngatttgcagnctaaaagnaaaaacaagnagaattaggaagcatggtgtaccccaatgaatcccttgaagactctccccagaagaaaaggggagaggaaagatcgagatcaagcggatcgaaaaccgacgaaccgccaagttaccttttgtaagaggcgcaatggtttgctcaaaaaggcttatgagctatcggttctttgtgatgctgaggttgctttggttgtcttctctagccgtggtcgactctatgagtatgctaacaatagtgttaaagcaacaattgagaggtataaaaaggcttctgattcctccaatactggatcagttgctgaagttaatgctcagttctatcagcaagaagctgacaaactccgaaatcaaatccggaatttgcagaatgcaaacaggcatatgctgggagagtccatagggggattgcctatgaaagagcttaagagcttggagagtcgtttagaaaaaggaattagcagaatccgttccaaaaaggtatctgataataatttatgtaattaaaaatagttcctttaagattattaattattattgctactgacaaattntcccttctcctttaatttatcccctttaaactctaccagaatgagctgttgtttgctgaaat

SEQ ID NO: 13164 - DNA, 858 bp, Gossypium hirsutum
  Clone ID: GOSHI-09MAY01-C2985_1
gcggagcaaacgaagctggtttctggtttctttgtttccgaattttttccttcacttcaatgcctggatgttgcttcgggtgtgaagtttagagttgaaaagactcatgcagaagctgacaggattcttcggagcattgttaatgatcacaaagaaagtagagcaaaaggcagaagtgaagatgaagaccaggaagatctggttgatgttcttttaaggcttcaggaggatggcgaatttcccttaactgacaacaacgtcaaagccgtcctccttgacgttttcactgccggaagtgagacatcagcaacagccgtagaatgggcattgtcggaaatgattaaaaacccaagagttatgacaaaagcacaagcagaggtaaggcaggtgtttgaaggcaaaggaaatgtgaatgaaacaggcgttcatcaacttaaatatctcaagtgtgttataaaagaaaccttaagactgcaccctgttgtacctttattgattccaagagaaagtagcaagaattgtgtggttaatggatttgaaatacctgcaaagaccagagtcattgtgaatgcatgggcaatcgggagagatcctaatcattgggttgagcctgaaaagtttgagcctgaaaggtttgtcaacagttcagttgatttcatggggacaaatttcgagctcatcccatttggggcaggaaggaggatatgtccaggcatattattcgcactgcccaaatgtagagctgccacttgcccaactgttgttccattttgattgggaaattccggggggaatgaagcaagaagatatggacatgactgagaagttcggcgtatctatgaaaaaaaaaaaaaaaat

SEQ ID NO: 13165 - DNA, 306 bp, Gossypium hirsutum
  Clone ID: LIB3148-015-Q1-K1-H9
ccccgcgtccatgctaattgtcaatcttatcacagcacaatccgtgctgccaagacaatctgacttcagtccgggaatttttgttaacgatcacactgaaagttgtgcaaagggcacttgtaacgatgaaaacaaggaaaatctggttgatgttcttttaaggatccagaaggatggcgaatttcccttgactgacaacaacgtcaaagccgtcatcttagacattttcagtggcggaagtgagacatcagcaggagctgtagagtgggcattgtcggaaatgattaataacccaagagttatgac

SEQ ID NO: 13166 - DNA, 718 bp, Gossypium hirsutum
  Clone ID: GOSHI-09MAY01-C2975_1
gtacaattcattggattctcagcctgatgttttgaagtcattatattctccccttcaaccatcaagtcctttggaagatttgaggtatcatgacggtggtcgactctctgatcagcaaatggctttactgcagtatcagcgtgaaaaccttcattttctaagtgaggagattcttcgattgcaagagtgcttgagcaaatacgaaggatctaatgatggaagcacacctcaggttgatcttgcccatctattagcagctcgtgatcaagaattacgaacagtttcagctgagatgaatcagctgcagtccgaactaagacttgctcgatctttaatagctgacacagaagcagaggtccaatgcgttcgaacaactaacaatcagtatgtcgaagagaatgaaagactgagagctattctaggagaatggagcactcgagctgcaaagctcgagcgagcattggaagttgagcggatgtcgaacctcgaattacaaaagaagatttcaacatttagaaaccaaacatgtacatcttcaactgaatcaagcgagcagcgtggagcctaaatttactccttccacaccaatatgtatagacaaatcccaacacttttggagtggaattagttttttttttcttttttgttctatgcttaaatgaagaattcaagacgtttttagaaaaagaccaatcttatatcagtaaattacaccatt

SEQ ID NO: 13167 - DNA, 1385 bp, Gossypium hirsutum
  Clone ID: GOSHI-09MAY01-C2965_1
cccacgcgtccgcgtctttccaagaactcagagaaggattttgatatctaatttgcagccctgtactgagtacacgtttcgaattgtttcttacactgaagcgggtgatttgggccattctgaggctaaatgtttcaccaagagtgtagagataattcacaagaatcctacttcagcagctgtgatgtgtcagaagaatgtgaatcaccttactgaaggaagttcgaaggagctcacagcagttggttcttctggatttaaagttcgagaccttgggaaaatcctgcgtcttgcttttgctcaagagcaaggctgctttgaaggattttgcagtgctgatatagaaaaatgctgtggagcaataaaaaatattaagcctgaaactcgagaagaggatcatatgccatctgtttcacgtggacttgacttaaatgttgtctcagtacctgatctaaatgaagaactaactcctccatttgaatcctcgagggatgaagataatggttgcactttagagctggctgtggaggcggatgacgatgctgcttcgcttgaaatagagaagaacaggctagcaagatcacatggtagtggagattcccagacctggactaatggggcgacaggggaagtgcctgctgtggattctcataccgagttgtgcaggataagagcagcatactcaaatgaagagacacatgactgtgatagtactcttattaatggctcgccattccgaatcaccaatgattcaggttccttggatgagaatttcgagtactgtgttaaggtaatcagatcactagaatgcgagggtcatatcaaccaggaattcagactgaaattactaacatggtttagcttgaggtcaacagagcaagaacgcagggtggtcaacacattcattcaaacactgatcgatgatccaaatagcttggcagggcagttagttgactcattttcagatatcatatctagcaagaggcctcgaaatggattttgtagtaagctatggcactaaattagtgcatgccattctaaaacaagaatgtcaatttgcttcatgattattcttttctcttgcgatacactttccccctgattgtttcaccaaccttttacaggcattttcagttttacctaatcactttctgaaggtgggtctttgtatttggttccacaggggccttgcccttggggtacgtacgtcagatttcatctttgtagaaggcaactttcatttcctaaaacatcctagttacttttgaagcagtagactttttaagcatggataaaaatatatatgtatttatatggatgcttttgatattgccttctgaaattcaatgaagggtatatgaattaatcttgaattttattcagtt

SEQ ID NO: 13168 - DNA, 516 bp, Gossypium hirsutum
  Clone ID: GOSHI-09MAY01-C2905_12
taaaaacatgtgttgcatgctttaactggcccctccaaatgcaaaattatcaatttttgttagtgttataggctgaaggataagagcccaagaatgtatttgataatattgaattgcaagttgatgcgaatcataattaaatttatgtatcattgctataaatgtaaattgtttgacatgcagagatgctcttgatgctttgggattggttcggtactgctgtaggagaatgcttatgactcatgttgacctcattgagaagcttctgaactacaacacattggagaagtcggagaccagttgaggaaacatgtagaatctaagggtttgttgcagtttgtttgagtgcctgtcaatgattctcagttttgtttaagtggggccgtgtttgaatccagaagaagggaaggaaaggacttaaatagtactagtctagtttgttttctttagctctatgatggatcgctgtatgtacgaaattagtgggatttgaaatgctgaaagtgattggaatgc

SEQ ID NO: 13169 - DNA, 658 bp, Gossypium hirsutum
  Clone ID: GOSHI-09MAY01-C2905_11
gcgaggcaagataagaaggaagggtggtgaagagaaagaggtaacgcaaaaatcgaagtcgaggcgagaccaagaagtagcggagcaagatgataattccagttcgctgcttcacctgcggaaaggtcattggtaacaaatgggacacttatcttgatcttctccaggccgattataccgaaggagatgctcttgatgctttgggattggttcggtactgctgtaggagaatgcttatgactcatgttgacctcattgagaagcttctgaactacaacacattggagaagtcggagaccagttgagggaacatgtagaatctaagggtttgttgcagtttgtgtgagtgcctgtcaatgatggccgtgatctgaatccagaaaaagggaaggaaaggacttaaatagtactagtctagtttgttttctttagctctatgatggatccctgtatgtacgaaattagtgggatttgaaatgctgaaagtgattggaatgctttgctgtttgctgggataattgtgtgatcaaagacttaacttttgttagttgcattgctacagatgtgttagtaagtgtaggatgaaccgagcattttaaaattaataataatgacatgtcctctggtaaaaaaaaaaaaaaaaaaaaaaaaagggcgg

SEQ ID NO: 13170 - DNA, 653 bp, Gossypium hirsutum
  Clone ID: GOSHI-09MAY01-C2905_10
ccattttctcaaaaaattcaccatctaaaacgtgattttctccagatagagaagctgaaaatttcaccatctaaaaagcttgaagtgcttttggctgataaatgaccaaattaacctgtcttctcccccttggaaaaacgttctttcctctgctgtgaaagttctatacccatttttttcacattttcgctgtgaaagctccttcctgttctttggtcctcttccgctgaaatcatggaacaaaagcttgctacacagcatgtggaaatggagagacttggtacagaaaaccagagaactgctgctaccaatgggacattgagacaggaacttgctgctgcacagcatgagttgcagatcttgcatgctcagataggagctgtaacatctgaaagagaacaacaaatgacgagccttacggataaaatagctaagatggaagcagaactgcaagctggacattgttataatagaatgttctttcaattttaaaactgtatgagcaaaatgaaatggactaggatactgcaaagaagtaatcactttgataataagtcattgagtttaagttggattataggttcaattgtatttattgttctagaggctacactaggtatcaacttagcacccttctctttcaaatttttttt

SEQ ID NO: 13171 - DNA, 791 bp, Gossypium hirsutum
  Clone ID: GOSHI-09MAY01-C2905_9
cccagcgtccgggaactggtctagtttcaggacaaaacgacggcggctcgaggcagggatatttggtgaaacggcaccaccttaaaggcaaagttaaaatccccgttagaagtttctagggcgcgagaataagaaggaaggttggtgagagagaaaaagaggtaaggcaaaattcgaagtcgaggcgagaccaagaagtagcatgataatcccagttcgctgcttcacctgcggaaaggtcattggtaacaaatgggacacttatcttgatcttctccaggccgattataccgaaggagatgctcttgatgctttgggattggttcggtactgctgtaggagaatgcttatgactcatgttgacctcattgagaagcttctgaactacaacacattggagaagtcggagaccagttgaggaaacatgtagaatctaagggtttgttgcagtttgtgtgagtgcctgtcaataattctcagttttgtttaagtggggccgtggtttgaatccagaaaaagggaaggaaaggacttaaatagtactagtctagtttgttttctttagctctatgatggatccctgtatgtacgaaaatagtgggatttgaaatgctgaaagtgattggaatgctttgctgtttgctgggataattgtatgatcaaagactaacttttgttagttgcattgctacagatgtgttagtaagtgtacgatgaatggaaaccttaatccagcattttaaaatcaataataccgaactgaacttctggtataaaaaaaaaaaaaaaaa

SEQ ID NO: 13172 - DNA, 537 bp, Gossypium hirsutum
  Clone ID: GOSHI-09MAY01-C2905_8
ctccatcttctcaaaaaattctccatctcaaacgttattttttcctgatggagaagctgaaaatttcaccatctaaaaagcttgaagtgcttttggctgataaatgaccaaaataacctgtcttctcccccttggaaaaacgttctttcctctgctgtgaaagttctatacctatttttttcacccctcccctccgaaagctccttcctgttctttgttcctcttccgcaggtaatttctagtaaaggtgaaaacggtgtcctccagaatatgaaccaaacaacagccacaatgaagcttccagatgaagcaccaaactttaattttctttgttagatattttatagctttagcaagcttaaattatacaggaaattctttgatggattcgatgtgatctgttttttgtttcatcttgttttttttttttaatttatatgaaaagcattcaagtatatcagctttagtttttgctttagtttttgaggtatagaggtaaacattgaaacatcaagagttagtgtaagttttatcctc

SEQ ID NO: 13173 - DNA, 791 bp, Gossypium hirsutum
  Clone ID: GOSHI-09MAY01-C2905_6
tcctcgcgtccgcccacgcgtccggaacggcctggatcttctcaaaaaattctgcatctcaaacgttattttttccccacggagacgctgaaaatttcaccatctaaaaagcttgaagtgcttttggctgataaatgaccaaaataacctgtcttctcccccttggaaaaacgttctttcctctgctgtgaaagttctatacctatttttttcacattttcgctgtgaaagctccttcctgttctttgttcctcttccgcagagatgctcttgatgctttgggattggttcggtactgctgtaggagaatgcttatgactcatgttgacctcattgagaagcttctgaactacaacacattggagaagtcggagaccagttgaggaaacatgtagaatctaagggtttgttgcagtttgtttgagtgcctgtcaatgattctcagttttgtttaagtggggccgtgtttgaatccagaagaagggaaggaaaggacttaaatagtactagtctagtttgttttctttagctctatgatggatcgctgtatgtacgaaattagtgggatttgaaatgctgaaagtgattggaatgctttgctgtttgctgggataattgtatgatcaaagactaacttttgttagttgcattgctacagatgtgttagtaagtgtaggatgcatgggaaccttaaccgagcattttaaaatcaataatgacatgaccttctggtagcttacaagctaagtgaaggaagtgggaatgaagcaaaagacaccatttaattatat

SEQ ID NO: 13174 - DNA, 688 bp, Gossypium hirsutum
  Clone ID: GOSHI-09MAY01-C2905_5
gttctttcctctactgtgggaagctctatacccattttttcacagtttcgctgtgaaagctctttcctgttctttgttcctcttccgtaggtcatacagtagccactaaaaatgggaagtaaaggtcgaattccaccccctcatctgaggcgtcctctccctggacctggcatggtacattctgacccatttggtctaggaattcctctccatccaggtccttttgcacattttgatatgttgccacctccagaaatcaaggaacaaaagcttgttgcacagcttgtggaaatgcagagacttggtacagaaaaccagagaattgctgctacccatgggacattgagacaggaacttgctgttgcacagcatgagttgcagatcttgcatgctcagataggagctataacatctgaaagagaacaaaaaaatgaggagccttacggaataaacagctaagatggaagcagaactacaagcagctaagcctgttaaggtagagttgcagcaggcacactctgatgctcaaaatttggtgttctctttatgttataagctggacattgttataatagaatgttctttcaattttaaaactgtatgagcaaaatgaaatggactaagatactgcaaaggagtaatcactttgataataagtattatttaatgaaatcttctacatattcct

SEQ ID NO: 13175 - DNA, 576 bp, Gossypium hirsutum
  Clone ID: GOSHI-09MAY01-C2905_3
taaaactcattctctcctgatggagaagctgaaaatttcaccatctaaaaagcttgaagtgctttgggctgataaatgaccaaaataacctgtcttctcccccttggaaaaacgttctttcctctgctgtgaaagttctatacccatttttttcacattttcgctgcgaaagctccttcctgttctttgttcctcttccgcacgtgagttcggtttcttcttcttctctttagtttttagttatgctttggttgtatttactttttaattctggcttttgtgcctcttttgctctactggtttgtgcctctactgctgcttgccccgccccctttggtttgggccctcttttgctcgctttgtaactcttccaaactattttagttgataagaatagaagaaatatagactaaatcaaaattctatccaaatttcatatcgttgctgaattttctgtatcttttgtatttgaaagttctgatgatgttctttttaattgtttctagggtttagctttacgataagataccatggctgtgtttcattttggttgaagttatcgtcgattgtattatt

SEQ ID NO: 13176 - DNA, 1021 bp, Gossypium hirsutum
  Clone ID: GOSHI-09MAY01-C2905_2
ggctgctcatctgtagcatcaatctctatttgtgcacaagaaaccaaaaaggtccaatcccttgatggtagtttgcatgctaaacctaaagtcacaattccgtaagtaaccagaactacaaacagcaagaagggctcagagacacaggactaaaggtaaggcagagtcagatgaaaatgcaaaatcaagtgttcatttgtttaaagcactccccttaaacaaaaagattcttcaggctccctcattgccccttcccaagaaaagcctgcctcaaccaccagagtttcagttgtttcatctgaggacatccgagagagccaggcagcatgcatctaatcatgcaatgaaagtacctagttatgtgtcaacttcaagaaatgaaaacacaggcctcagaagcttcaagcccatcagttcattaaaggaggagaaacatgaagctgttaacaaatttaaagcttgtgctcttaataagaaggcaatttctagtaaaggtgaaaaacggggtcctcccagaatatgaaccaaacaacagccacaatgaagcttccggatgaagcaccagtagaactattcaataagctcacgctgtcagctgaagtccatcctggtgaaaagcctcgagaaaaaatagctctttctgagggattgaaagagaatgagccagatcatgaaagtggccaaggaaaaattgcaaaggaatggaaggatgcagtaccagtgtagaagagaaaggaatgctgtaattgggcaacaagagaacattagcaggagactgagattggacataatgtaaagttaccccccccccaaccccgagtaaattaggttgtcatattggcctttttcttgcacgagaaaagcgggttcattgcaggcaagttttttgttgagaacagtggatactttgtttctaaatgattgcggtatttattgcttgaaaagagaagaaagaattttggagaaaatagcaatgtatagcagtgttaaacattttgatagcttttgacatgctttccag

SEQ ID NO: 13177 - DNA, 644 bp, Gossypium hirsutum
  Clone ID: LIB3582-030-P1-K1-D4
cccacgcgtccgaattctgtgagatttgttcttggcatctaactctggagtattgcgtaatgtgataagttattagaagtaaaatttgtcactttgtgttggacttttgataggcaaaataaagagaagagatccaaagttaatattttttgaggtttggttcttaaatcttaaggaatatgacatgcttaaaattttagtatataaagggcttccgtgagatttgaactctagagtattacgtaaaactagaagtaaattttgtttactttgtgctgtctttgttgggttttttaagctaatgttattaccttggtgttttttcgtgcatagtcactctcatgattcattttgagcaacagtaatgcctcaatttattgtttattagcttattggtttaaaggtaatcaatttattgtctttgctggacattgttatgatatatgtaatgctattttagtatagttgactcgtaggtgtcattctttgaagaaatttttccgattggtacacttcttttaggaactgatctagaaaacaagaagcttgaccttgatatccgattttatggtggtacaatttgtagatgaagatatagaaaattgtctttcccctctgtcttaatgattcagtttttgctgata

SEQ ID NO: 13178 - DNA, 627 bp, Gossypium hirsutum
  unsure (1)..(627): unsure at all n locations
  Clone ID: LIB3583-051-P1-K6-F10
ctccatttcggnaaaaaaaaacgccatgagggggggggctgttctccagatgaagaagttaaaattttctccttttcttcagccaaagtgcttttggctggtaatttccatttttctcccccaaaaactgttcttccctctggttctttgcttgaaatatcaagttctttgcctttgtttctttggctgtggttctttgttcctcttccaccggctgcgaagaaacatttgaatcaacgtattcagaacctggatggtaaaatggaaacacagaaagaaatcttgaagagcattcaaacaagtgtaagtgcacatgtgtttccatctttgacatcatagccagattatctcctcaattagaagcatttgaaacaacagcgtgcatagctgaagttgttgttatgctggtcacaactgccttggtgacacttgtaatgcttctatggtgaccaatttgcttatggctttgtgtttacataatgcattactttatatctaatatgctggacattgttatgatatatgtaatgctattttagtatagttgacttgtaggtgtcattctttgaagaattttttcgatttgtacacttcttttaggaactatctaggaaacagaagcttgac

SEQ ID NO: 13179 - DNA, 496 bp, Gossypium hirsutum
  Clone ID: LIB3584-013-P1-K1-F6
gcgcaacgtattcagaacctggatggtaaaatggaaacacagaaagaaatcttgaagagcattcaaacaagtgcatagctgaagttgttgttatgctggtcacaaatgccttggtgacacttgtaatgcttctgtggcagaccaatttgcttatggctttgtgtttacataatgcattactttatatctaatatgctggacattgttatgatagactgttctttcaattttaaaactgtatgagcaaaatgaaatggactaggatactgcaaaggagtaatcactttgataataagtattatttaatgaaatcttctacatattccttaatgtttttgtcattgagttttaagttggattatagattcaattgtatttattgttccttgattgtgttgtgttgcatgtatgtactaaaatcccccagcattgcatcaatatcaaattgttattcatgtcacatgatgaatggaatagtttaaagtttttaatgaag

SEQ ID NO: 13180 - DNA, 447 bp, Gossypium hirsutum
  unsure (1)..(447): unsure at all n locations
  Clone ID: LIB3829-008-Q6-K6-D12
ngatgggtgtaactagctagggcaaatctttaaaacagacgaagaagaaaaagagtattagccgagcaggatgataatcccagtccgttgcttcacatgcgggaaggttattggtaacaaatgggacacctaccttgatcttctccaggccgactatactgaaggcgatgctcttgatgctttgggcttggttcgatattgctgtaggagaatgcttatgactcatgtcgatctaatcgagaagcttctgaactacaacacattggagaaatcagagaccagttgaggaaacaagtagcgcttacctgcaatgttccgtttcagttatgcgagtgcctgtttaggattctcagttttttgtgtaacgaggaccatggttttaaactctgaactttgtaggcagacaagttgaagggtttaaatagaactagttctgcatgttttttt

SEQ ID NO: 13181 - DNA, 902 bp, Gossypium hirsutum
  Clone ID: GOSHI-09MAY01-C2895_2
gcaccggcccggacacggtccggaatgtcccattcaaaccatctctacaaacccatatttccctttgaagaagatgcagatctttgtgaaaacccttaccggcaagaccataacactcgaggtcgaaagctccgacaccatcgacaacgtcaaggccaagatccaagacaaggaagggatcccacccgaccagcagcgtctcattttcgctggcaaacagctcgaagacggtcggacccttgccgattataacatccagaaagaatccaccctccacctcgtcttacgccttcgtgggggcatgcaaatctttgtcaaaaccttaaccggcaagaccatcaccctcgaagtcgagagttccgacaccatcgacaacgttaaggccaagattcaagacaaggaaggaatcccacctgaccaacagcgtttgatcttcgctggcaaacaattggaagatgggaggaccttggctgattataatatccaaaaggaatccacccttcaccttgttttgaggcttcgtggagggatgcagatttttgtcaagactttgaccggcaaaacaatcaccttggaggttgaaagctccgataccattgacaatgttaaggcaaagattcaggataaggaaggaatcccacctgatcagcaaatgctcatctctgccggcaaacaattggaagatgggaggactttggctgattataacattcagaaagagtctacccttcaccttgttcttcgtctccgtggtggccactgattattctaacgcaaccatcttgccttggtttcaagttttaaagtgctcgtgtgtctttctaacttggatttctgggtcttgtcccctttgtaatactttttacttctcctctggagtagaaaggttggttttcttttcc

SEQ ID NO: 13182 - DNA, 2053 bp, Gossypium hirsutum
  Clone ID: GOSHI-09MAY01-C2895_1
gaagatcgagaatgaattagcaagttgcgtaggccaatcttagaaacaccaccgtgtggctaacgtaactgcacgccgactcatctgaccgcaattttctcgtttcctccagaccttccaacctaagaaaatccacaccctctcttctatataagcatcgcctcaccccttctctctccatccaacgcaaaccgattcaagctcttctcaaatcttttttcaatcaactctctccaaagatgcagatcttcgtcaaaacccttaccggcaagaccatcaccctcgaggttgagagttctgacaccatcgacaatgtgaagtctaaaattcaagacaaggaaggcatcccaccagaccagcagcgtctcatcttcgccggaaaacagctcgaggacggccgtaccttggccgattacaacatccagaaggaatctaccctccaccttgtcctccgtcttcgtgggggtatgcagatcttcgtcaaaaccttaaccggcaagaccatcaccctcgaagtcgagagctccgacaccatcgataatgtgaagtctaaaattcaagacaaggaaggcatcccaccagaccagcagcgtcttatcttcgccggaaaacagctcgaggacggccgtaccttggccgattacaacatccagaaggaatctaccctccaccttgtcctccgtcttcgtgggggtatgcagatcttcgtcaaaaccttaaccggcaagaccatcaccctcgaagtcgagagctccgacaccatcgataatgtgaagtctaaaattcaagacaaggaaggcatcccaccagaccagcagcgtcttatcttcgccggaaaacagctcgaggacggccgtaccttggccgattacaacatccagaaggaatccaccctccaccttgtcttacgtcttcgtgggggtatgcagatcttcgtcaaaactttaaccggcaagaccatcaccctcgaagtcgagagctctgacaccatcgataatgtaaagtctaaaattcaagacaaggaaggcatcccaccagaccagcagcgtctcatcttcgccggcaaacagctcgaagatggccgtaccctggccgattataatatccagaaggaatccaccctccacctcgtcctccgtcttcgcgggggaatgcagatcttcgtgaaaaccttgaccggcaagaccatcaccttggaggtggagagttcggacaccatcgacaatgtaaaggcgaagattcaggacaaggaagggatcccgccagaccaacaacgtttgatctttgcagggaagcagcttgaggatgggaggaccttggctgattataacatccagaaggaatcgacccttcaccttgttttgaggcttcgtggaggcatgcagattttcgttaagacattgactgggaaaacaatcacattggaggtggaaagttcggatacaattgacaatgtgaaggcaaagattcaggacaaggaaggtatccccccagatcagcaaaggctcatctttgctggcaagcaattggaggatgggaggactttagctgattataacattcagaaagagtccacccttcaccttgttcttcgtctccgtggtgggcagtgagaagttaattcttcttctgtctttgttctagcttaagatggtcacaaataagcctttaggaaagtgcctattttcttatctcttaatgtaacatgttaatctaagtaaaccttctgtttggaataaaagtttggtgatttcgtatcagaataaaattttttttcctgcaaattttaaaaaaaaaaataaaataaaataataaaaatatataataattttaaaaagataataaaatgtaaaagtaaatgatttttaaatgtaataataaaagaaaatttaaagaatttgaactcttttcatcttttttgttgactatttaaaatggtttatgttttagtagattatggaaattagcttgtataaccttttatattttttttatttataatgtcaaagaaactttattttttgcctgttttttacataaaaaaaaaatttaa

SEQ ID NO: 13183 - DNA, 377 bp, Gossypium hirsutum
  Clone ID: LIB3584-033-P1-K1-F1
ggcttcgtggaggcatgcagattttcgttaagacattgactgggaaaacaatcacattggaggtggaaagttcggatacaattgacaatgtgaaggcaaagattcaggacaaggaaggtatccccccagatcagcaaaggctcatctttgctggcaagcaattggaggatgggaggactttagctgattataacattcagaaagagtccacccttcaccttgttcttcgtctccgtggtgggcagtgagaagttaattcttcttctgtctttattccaaacagaaagtgtacttagattaacatgttacatgaagagataagaaaatatgctctttcctcatggctaattaaggaccatcttaagctagaacaaaga

SEQ ID NO: 13184 - DNA, 690 bp, Gossypium hirsutum
  Clone ID: GOSHI-09MAY01-C2845_1
cccacgcgtccgcccacgcgtccgattcatttcattgtgttatctaagatgacagacttaaccaagaagaaattagccggaaaagtagccatagtcaccggcggagcaagcggtatcggcgaagccacagcgcgtttgttcgccgagcacggcgcccgtatgatcatcatcgccgatatccaagaccaactcggccaacaagtagctacttcaatcggttcccacaattgtacttacagtcgctgcgacgttaccgatgaaaaccaagtgaaagcattggtcgaatcaagtattcaaaagtatggtcaacttgatataatgtttagcaatgctgggattataagtaaatccgatcagagcattcttgatcttgatttccgacagtttgatcggttgatggcggtcaacctccgtggcatgtctgcatgcgttaagcacgcggcgcgtgcgatggtggagaaaaaggtgagaggaagtattgtatgcacggcgagtgtggcggccagccatggaacgaaacggcggacggactattgcatgtcgaagcatggggtgttgggattagttcgattgggcgaagtaaacagctagggatgtatggtataagggtaaactgtgtgtcgccgaatgggttggcgacgccgatgacatgcgaggtgcatgaaaagagtgtggaggaggttgaggaaa

SEQ ID NO: 13185 - DNA, 1051 bp, Gossypium hirsutum
  Clone ID: GOSHI-09MAY01-C2815_1
ccgggtcgacccacgccgtccgaggtaaatccaggatttcccacccgcccgccctcgcggcccacgtaaacagggaggtctgaatttctgagaatttttagaaccgggtttctctccgtaaatcaatatgttgaagctttgcttaatggtttctcatggctaccctcgtggtctggggcctgttttacaccaagagccaggctttagcaggatggtcaaggagtttggttccgtcttcccaggtcagctagtgaaacaagacatggtacagattggctcctttgatctgaggtgcaaccaattccatttccaggagcagccaaagccagttactgcactatgtgagaccaaactgattatcgatgctgatccaacggtacaaaaccccgtggttatagataaaccagatgcttatctagacacagcacggtttagcttcaggatagctgaaaagtgcactagacatgaaaaaatcttgaagtttcttatgtctggatcgaatgaattagagaatggggaacttgatttgtctttgctatctgatttgatgggacttcagccactgatgtttggcgtgcatcaacagccttatgcgtcttctctaatgtatccaagtagcaaaatcgattaccaggtgcctctcccagactgtttaggagagatgatccactattcgaaaattacagttaactcagatggtcaagttgtacttacagctaccgggactgagatgaaagacatcctttcgatcgtagctgagttttacttatcaagcaactcgactaagtctagaaatcagttttcactggtcccatactttgataggaagcggattgccaaagcacgtaccagtactaacctgtcttctccacggtctgaagttgcgagtattgcacctatggaaagtcccaagaaaatcaagcagaagccatctccaaagaagaatgcatctaggaagttagccagtgagagagatctctacaagaagaattatttccatgcatgtgagtgtcttctttccttgatggtgataagagacagcatggcagaa

SEQ ID NO: 13186 - DNA, 1322 bp, Gossypium hirsutum
  Clone ID: GOSHI-09MAY01-C2585_1
ggttgctccccatctctgagtggggcaattcgagtaaatccgtggaacattgatgctgtagcatgatgcaatggactgtgccctcgctatggcagaagcagaaaaacagctcaggcatgaaaagcattacagatatgtgagtacacatcatgttggttactgggctcatagtttccttcaggatttggagaggacttgtcgagaacattctagacggagatgctggggtattggttttgggctaagttttcgagttgtggctcttgatccgaacttcagaaagctctcaagggggcacattgtatcagcttacaagaggactacgactagggcgattcttctagactatgatggcactttaatgccacaggcttcgattgataagagcccatcatccaaatcccttgacatcctaaatagcctgtgcagagatagaaacaacatggttttcattgttagtgctaaaagccgaaagacactcactgaatggttttctccatgtgagaaactaggaattgctgctgagcatggctacttcttgaggctcaagggagacgtggaatgggagacgtgtgtaccagccgtggactgtgcatggaagcagattgcagaacctgtgatgaagcaatacatggagactactgatggatcctacatcgaagataaggaaactgcccttgtctggtgttatgaggatgcagatccggattttggatcatgccaagctaaagaacttcttgatcatctcgaaagtgtgctggccaatgaacctgttacggtaaagagtgggcagaattttgtcgaggttaagccacagggtgtaagcaagggtctagttgcaaagcgcctactctccacaatgcaagagaggggtatgttgccggactttgttctctgcataggagacgatagatctgatgaagacatgttcgaggtaatcataagttcagtattggggccgttgatcgatcccagagcagaagtgtttgcatgtactgtgggtaaaaaaccaagtaaggctaagtactacctggacgatacggtggaaatctgtaggttgatgcagggtctggcttctgtttcagatcaaatgcattcggtgttggcttagctagcgaagggaaaaaacgaaaggtgcactgctcttctttgtgtttgtaactctaatatttgctcaccttgttttgcaatgtacatcatcttagtgttactaagagaaactgcttgcaagcggatacttttttctctgtgttctttgttttttcttaagctgtaaatatgcgcttgcgtgatgaaatccagtttccccagtttttgcccct

SEQ ID NO: 13187 - DNA, 410 bp, Gossypium hirsutum
  Clone ID: LIB3149-040-Q1-K1-D11
tacttcttgaggctcaagggagacgtggaatgggagacgtgtgtaccagccggggactgtgcatggaagcagattgcagaacctgtgatgaagcaatacatggagactactgatggatcctacatcgaagataaggaaactgcccttgtctggtgttatgaggatgcagatccggattttggatcatgccaagctaaagaacttcttgatcatctcgaaagtgtgctggccaatgaacctgttacggtaaagagtgggcagaattttgtcgaggttaagccacaggtacagaaatatatttccaaatatggtacaatacttttcttttttatcagtccacattgagccggaaatcaacttatcgaatcagtgattgccaagcaaaatgagtatggttaggtctactgaaa

SEQ ID NO: 13188 - DNA, 256 bp, Gossypium hirsutum
  Clone ID: LIB3048-013-Q1-L1-A7
attcgatgtgccgtcagtcctatcagctatgggcttattggggttccgaaagattataccgggattaaggaagacattttcagagcagcagtgaacaaaagggtgtcgcacaacagaaactgatgatgaattgagacatggatcgaccgattgactggcagagatagaaacaacatggctttcattggcagagctaatagccgaaagacactcactgaatggttttctacatgtgagaaactacgaattgctgctg

SEQ ID NO: 13189 - DNA, 1127 bp, Gossypium hirsutum
  Clone ID: GOSHI-09MAY01-C2575_1
gttttttttttcttccccattatggtaccttcatacaagattatgtttcttttcttctttttttagtatttcaatcaaattgatgtttgcttaatctcttgtctaatttcaaaattttcctgctttttattttttggtttctcatactttgcctgattttccattatttccgtctttttttttctcttttatcatccagagctgagagctcgaaaaacttactttctgctttcccccccttttcttttgggtttggaatttggagttaagttgtgatggaaaatttggagaaaaataaaagtaaagcgttgtaaaaattctgataaattaaagaattttaaactaacccgtcgagaaaagagaaaaaagagaagaagaaagaaatggatccgtcgaagaaagtggcggataggtatttgaagcgcgagattcttggtgaaggtacttacggtgttgtctacaaagccattgatactaagacgggacagactgttgcaattaagaaaattcggctggggaagcaaaaggaaggggtgaattttactgcactcagagaaattaaactgcttaaggagcttaaagatccaaatataattgctttaatagatgcattcccacacaagggtaatttgcatcttgtgttcgagttcatggagactgaccttgaagctgttattcgagatcgtaatatattcctctcaccagctgatatcaaatcctacattcagatgactttgaaagggcttgctttttgccacaagaaatgggttttacacagggatatgaagccgaataatttgctaataggatccaatggacaacttaaacttgcagattttggtttagcacgcatatttggcagcccagatcgtaagtttactcaccaggtctttgctcgatggtacagtgctcctgagttactttttggtaccaagcaatatggtgctggtgtggatgtttgggcagctgcctgtttttttgctgtacttctcctccgtcgcccctttctgcagggtacaagtgacatcgatcagttaggaaagatctttgcagcttttgggacaccaacgccctctcagtggccagatatggtatacctgcctgattatgtagaataccaatatgtt

SEQ ID NO: 13190 - DNA, 500 bp, Gossypium hirsutum
  unsure (1)..(500): unsure at all n locations
  Clone ID: uC-gsflnu33B059a02b1
cccactcgtccgcccacgcgtccgcaattgatagttatggcatttattttggattgttttctaacaccctcttggctttaacatataaacccatgcaactatgcataggtctttgctcgatggtatagagctcctgaattactttttggtagcaagcaatatggttctggtgtggatgtttgggcagctgcctgtatatttgcagaacttctcctacgacgaccatttctacaggtgaacctagctgtcttcagtgtttttgatacttgcattttttttggtgagttaattcttggtacagagcactgtatcaatatgtcatctgtttaaagtatccttcttagtatattttctcattttcattggttcaacatttaacattntgtagggcacaagtgacattgatcaattaggaaagatctttgcagcttttgggaccccaacatcttctcaatggccagatatgttataccttccctgatatgagaataccaatatgt

SEQ ID NO: 13191 - DNA, 620 bp, Gossypium hirsutum
  unsure (1)..(620): unsure at all n locations
  Clone ID: LIB3584-004-P1-K1-G4
gtccgggtttcttacacaacatgtgaatgtcatacccttcagttgtcatgngtgtaatactaatttttnncctgttctgaatttctgttgttcggttggntgcctatttnttnntagtccgttcttgcaanttgttttacataccccttatcttatttttctcgtgtgcnttttatanttctgagacttgacctgtctgnnataaaaggcaacnntagattggaatacccaagaatgaaaatnnagctgcaggtgcctgcnnaaaaggtttgnngagtatttgcacccgacaaagcnttagtccgcctgttatatantcgtganntttaaaatgctcaaatatannttgcttggtgagggctatcatccgaagttattcggattttggncttggccaaactgggtcctgttggggataagactcatgtatccacgagagtgatgggcacgtatggatattgcgcaccagaatatgcaatgaccggtcagcttacattgaaatnggacgtttattgttttggtgttgttttgcttgaaatcattactggaagaaaagctttgacaatttcggagctggtggtgggcataatctagttgcctgggctcgttctttggttaaa

SEQ ID NO: 13192 - DNA, 181 bp, Gossypium hirsutum
  Clone ID: uC-gsflnu33B089h10b1
tagagtgatgggcacgtatggatattgcgcaccagaatatgcaatgaccggtcagcttacattgaaatcggacgtttatagttttggtgttgattagcttgaaatcattactggtaagaaatgttgttgccaattttagtgcttgtttttagcttatatttatattcttatcctaatcttt

SEQ ID NO: 13193 - DNA, 433 bp, Gossypium hirsutum
  Clone ID: GOSHI-09MAY01-C2515_2
cggacgcgtgggcggacgcgtgggatcggttttatcagttggccccttgctatccttgggaagttcataccggttccagaaactccagtcagtcgggtcttttctaggatgttctaccgtcgaagaaatcaaagtagtcaaaagcatgaggactcaaatgctacatctataagaaattgaaaagggaatgtttgtctataggtgtgtgtgatactgatgtattttgccattttccccctccttttcggatgacaacaaatgttaacacaaaaaaactgaacatacatacggagaatttcaagactgccggcttcacatgtttcggattctttttttccttttaacagaagtcttgaattggagttgtttttctattacatgatgatattttagttagagctggtaaataccaaagcatcatacccccgtttct

SEQ ID NO: 13194 - DNA, 773 bp, Gossypium hirsutum
  Clone ID: GOSHI-09MAY01-C2515_1
gcattagctactgagcctccaaccgaccacttgatgcaccggccccctgttggtcgtagggaacctcttataacgaagatcatgtggaggaacttgctgatacaggccatataccaagtgaccgttctactcgtcctcaattttgatggcaagaagatattgcatctggagcatgaaagcagggagcatgctaaaagagtgaagaatacgctgatatttaatgcatttgtcctttgtcaaatctttaatgagttcaatgctcggaagccggaagaagtgaacattttccgtggacttagcaaaaactatctgttcatcggaatagtggcgataaccataatacttcaggctattatcgttgagtttcttgggaagtttgctaaaactgagaagcttagctggcagctgtggctggtatcgattggtatcggttttatcagttggccccttgctatccttgggaagttcataccggttccagaaactccagtcagtcgggtcttttctaggatgttctaccgtcgaagaaatcaaagtagtcaaaaccttgaggactccaatgctacatcctataagatatggaaaagggaatgtttgtccatatgtgtgtgtgatactgatgtattttgccattttccccctccttttcggatgacaacattgttaacacaaattatctgatctttcttttcggagtattttaagactgtcgtttttccccgttcggggttctttttttccttttttcttttttttttgcctttttttttttt

SEQ ID NO: 13195 - DNA, 360 bp, Gossypium hirsutum
  Clone ID: LIB3147-060-Q1-K1-B4
cccacgcgtccgcttatttaagatcattatgccttaatttattgatttgaactgagatgtgtcaggtagtcaaaagcatgaggactcaaatgctacatctataagaaattgaaaagggaatgtttgtctataggtgtgtgtgatactgatgtattttgccattttccccctccttttcggatgacaacaaatgtttacacaaaaaaactgaacatacatacggagaatttcaagactgccggcttcacatgtttcggattctttttttccttttaacagaagtcttgaattggagttgtttttctattacatgatgatattttagttagagctggtaaataccaaagcatcatacccctg

SEQ ID NO: 13196 - DNA, 773 bp, Gossypium hirsutum
  Clone ID: GOSHI-09MAY01-C2505_2
gtcacttcaaaggcatctgatgatgatggcgagtttgccgagctttatgttttcaaatggacatcacttctcattcctccaaccacagtactcattatcaacctggtgggcattgtggccggcgtgtcgtatgctataaacagtggttaccaatcctggggtcctctttttggcaagcttttctttgccatctgggtgattgctcatttgtatcctttcttgaaaggtttggtgggtcgccaaaatcgtaccccaacaattgtcatcgtgtggtctatacttcttgcttccatcttctcattgctgtgggttgcgtatcgaccccttcacctcagaagctacaaaagctgctgctaatggtcaatgtggcatcaactgttagtttcgtttctggattattttattccagtaaaccctctctccttcaagttggctattggtgtatataaccaaaggaaaaggagacgtcgccctattatctgcaaaaagattatttctactcctgcggcatgatataagtttatggggacctaagaccagccgccctattatctttttggtcacttctattcttctacgtggtattgctgatgaagttggatgttggtgttgtggaattctatgagtatattgctctctttttggtgtggagttttccattcaaaaaatataaaaaaattctagggggcccggtcccatatgccttatagagacgttaaatctatgggcgcgtttacacactgactggaaaacctgggtcccacttatactct

SEQ ID NO: 13197 - DNA, 1919 bp, Gossypium hirsutum
  Clone ID: GOSHI-09MAY01-C2505_1
gttgaatgtcgattgtgatcactacttcaataacagtaaagctcttagggaagcactgtgtttcatgatggatcctgcctatggaaggaagacgtgctatgtgcagttccctcaacgttttgatggcattgacttgcacgatcgatatgccaataggaatattgtgttcttcgatattaacttgaaagggttagatggcatccaaggtcctgtctatgtgggaactggtgcgtccgcccacgcctccgtgctgtttcaacaggcttgctctatatgggtatgatccggttctgacggaagcagatttggaaccaaatattattgttaagagttgttgtggttcaagaaagaagggaaagagtgggaataaaaaatacattgacaagaagagggcagctaagagaactgaatcgaccatccctattttcaatatggaagacattgaggagggtgtagaaggatatgaggaagaaagatctcttctcatgtctcagaagagactagagaagcgatttggtcaatccccggtatttatcgctgctaccttcatggaacaaggaggcattccaccatcaaccaatcctgcaacgcttttaaaagaagcaatccatgttattagttgtggatacgaggacaagactgaatggggcaaggagattggatggatttatggttctgttacagaagatattttgactggttttaagatgcatgcccgcgggtggatatcaatttattgcatgcctcctcgtccagcattcaagggatctgctcctatcaatctttctgatcgtttgaaccaagtgcttcgatgggccttgggttctattgagattttgctgagtagacattgccccatatggtatggttacaaaggaagattgaggcttctggagagactggcatacattaacaccattgtttaccccctcacctctattcctttgcttgcttattgtatgcttcctgccttttgccttctgacaggaaaatttatcattcctgagataagcaactttgctagcatgtggttcattctccttttcgtctccatttttgctactggaattcttgagcttaggtggagtggtgtcagtatcgaagactggtggagaaacgaacagttctgggtcattggtgggacatcagctcatctctttgctgttttccagggtcttctgaaagtgcttgctggaatagataccaacttcactgtcacttcaaaggcgtctgatgatgatggcgagtttgccgaactttatgttttcaaatggacatcacttctcattcctccaaccacagtactcattatcaacctggtgggcattgtggccggcgtgtcgtatgctataaacagtggttaccaatcctggggtcctctttttggcaagcttttctttgccatctgggtgattgctcatttgtatcctttcttgaaaggtttggtgggtcgtcaaaatcgtacccctacaattgtcatcgtctggtctatacttcttgcttccatcttctcattgctgtgggtgcgtatcgaccccttcacctcagaagctacaaaagctgccgctaatggtcaatgtggcatcaactgttagtttcattttcggatcattttattccggtaaatgctctctccttcaagttggctattgtgtatataaccaaagagaaaaaagagatgtcgcaggccatacatgtgcatgatatcagtttatgtctcgaggaatttatatgttttgtaacacagattgggacctaagaccaaccctcctagtatctttgtgttcacttctattcgtcccccccgcccccctgatgtcgtgcggtcgcggggttgtgtaattttacaaagtaattttttcattattatgtagtgatatttattcacccaatgttatgaaggggacttggtttgggtt

SEQ ID NO: 13198 - DNA, 475 bp, Gossypium hirsutum
  Clone ID: uC-gsflnu33B025h12b1
tcgtatgaaagatctcttctcatgtctcagaagagactagagaagcgatttggtcagtccccggcatttattgctgctaccttcatggaacaaggaggcattccaccatcaaccaatcctgcaacacttttaaaagaagcaatccatgttattagttgtggatacgaggacaagactgcaatggggcacggatgattggggcggatcatatggagtctggttacagaaagatattttctgacttgggttttttatagcaatgcccatttggccttccgtctggggggtcttgtggtatttaatttcccaaaacttcccttaaattttagggccaaatttggtccccccttttcccccccttttccgggttttcccccccaaaggggcccaattttttttttctaaataaaagggggggggggtaatatttcccccttttggggcccctttttttccccccctttttaaatttttt

SEQ ID NO: 13199 - DNA, 393 bp, Gossypium hirsutum
  Clone ID: LIB3147-006-Q1-K1-F8
cccacgcgtccgtgataccaatatttagaattagtactggaaaaattacatattggtatcagatataattatattaccaaacttcacatctttaaatgaacatcacttctcattactccaaccacagtactcattatcaacctggtgggcattgtggccggcgtgtcgtatgctataaacaggcgttaccaatcccgcggtcctctttttggcaagctttcctttgccatctgggtgattgctcatttgtatcctttcttgaaaggtttggtgggtcgtcaaaatcgtaccccaacaatcgtcatcgtgtggtctatacttctggcttccatcttctcattgctgtgggtgcatatcgacccctttaccttaaaagctacaaaagctgctgct

SEQ ID NO: 13200 - DNA, 279 bp, Gossypium hirsutum
  Clone ID: LIB3149-002-P1-K2-B7
ccacgcgtacgcgtaaccaaagagaaaaaaagagatgtcggatgccatacatgtgcatgatatcagtttatgtcgtcgaggagatttatatgttttgtaacacagattgggacctaagaccaacaaccctagtatctttgtgttcacttctattcgtctacgtggtattgctgatgaagtttgatgttgatgttgtgtaattttacaaagtatattttttcattattatgtagtgatatttattcacccaatgttatgaaggggacttggttctgggtt

SEQ ID NO: 13201 - DNA, 548 bp, Gossypium hirsutum
  Clone ID: GOSHI-09MAY01-C2535_3
gcaccttcgttttttttcctttttcacttccaaaaaggacaaagaaaagcaaaaaaatggctcatcgtatggcgttttctgtgtgtgtcgtttcgtattttttattcatcggtttgatatcgtcggaggctttctcggtcgtcggatcagaagttgatccgttgatcaggcaagtaacggacggtcaagatgatggagtggagacacagcctttgaccgctgagcatcacttctcgctgttcaaggctcggttcaagaaatcgtacggctcggaggaggagcatgattaccggttcaaggttttccgggcgaacttgagacgagcggcgcgtcatcagaagcttgacccgtccgcgactcacggtgtgactcagttctccgatttgactcccggtgagttcaggaagaggtttttggggttaaggaggttgagactgcctaaagatgcgaaccaggcaccgatttttgcctaccgataatttgcctgaggattttgattggagagaaaaaggagctgttacgcccgtcaaaaatcagggttcatgtgg

SEQ ID NO: 13202 - DNA, 556 bp, Gossypium hirsutum
  Clone ID: GOSHI-09MAY01-C2535_2
ttgttgctaaggtgccaatttcagcgttgtttcccttgatgaggatcaaattgctgcaaatcttgtgaagaatggtcctcttgcagttcccataaatgcagtgttcatgcaaacatacattgggggagtttcttgcccgtacatttgctctaaacgcctcgaccacggagtattgttggtggggtatggttcagcaggctatgcccccatcaggttgaaggataaaccatattggatcattaagaactcatggggagaaacctggggtgaaaatgggttctacaaaatttgcaggggtcgcaatgtttgtggtgtagattccttggtctccactgttgctgctgttaataccaactctgagtaatgtactaatgtgtgtgtatgccccaattggtttgcatatatataatgttttacgcaggtatttgggaaaaaacttgatgtttttacgtaaaccttttaaattcctcatgtttctgtatttgtgtaaaaacaaccgaaatgtttgttagtgcaaaaaagttccaactaactttgttttcaaaaaaaaacacac

SEQ ID NO: 13203 - DNA, 1252 bp, Gossypium hirsutum
  Clone ID: GOSHI-09MAY01-C2535_1
gagagaactagtctcgagtttttctcttttttttccaaaaaaaaaatggaataccgcaatgtttttcccatttttgttattttttcctttttcatcgttggcgtgatttgtacggagactttctcggcggagggatttgaagttgatccgttgatcgaacaagtaacggacggtcacgaaggagccgagccgcagctgctgacggcggagcatcacttctcgctgttcaagaagcggttcaagaaatcgtacggatcacaagaggagcacgattataggttcaagatttttcaggttaacctgagacgagcggcgcgtcatcagaagcttgacccgtctgcgactcacggggtgactcagttctccgatttgactccaggcgagttcagaaaggcatatttgggattaaggagactgagattgcctaaagatgcaactgaggctccgattttgcctaccgataatttgcctcaagattttgactggagagaaaaaggagctgttacacccgtcaaaaatcagggttcatgcggatcatgctggtcttttagtacaacaggagccttggaaggagctaactttttggcaactgggaaacttgtgagcctcagcgagcaacagctcgtggattgtgatcacgagtgtgatccagaagaagcaggttcatgtgattctggatgcaatggggggttaatgaatagtgcttttgagtataccctcaaagctggtggacttatgcgtgaggaagactacccttacaccggcactgatcgagggacctgcaaatttgacaacaccaaggttgctgccaaggtggccaacttcagtgttgtttctttagatgaagatcaaatcgctgctaatcttttcaagaatggtcctcttgcagtggctatcaatgcggtgttcatgcagacctacattgggggagtttcttgcccatatatctgctctaaacgccttgaccatggagtattgttggtggggtatggttcagctggctatgcccccgtccgcttgaaggataaaccgtactggatcatcaagaattcatggggtgaaaactggggagagaatgggttctataggatctgcacgggtcgtaatattcgtcgagtagattccatggtttcacctgttgctgccgtcaataccaactcagagtagggttgggtgcagagtcttcttttacgaacagttgctttgtatatatgttcctcgttacaattaatttgggttcattatgtttctc

SEQ ID NO: 13204 - DNA, 313 bp, Gossypium hirsutum
  Clone ID: LIB3166-051-P1-K1-A9
taaggagctaacttattgtcaactgttaaacttgtgagccttatcgagcaacagcttgaggaatgtgatcactagtgttatccagaataagcaggttcatgtgattctggatgcaaaggggggttaaagaatattgcttttgagaataccctcaaagctggtggacttatgcgtgtggaagactacccttacaccttcactgttcgatggacctgttaatttgttaacacttttggcgttgttatggttgccaattttagtgttgctttttttaaattattatctatatcgcttgttaattttttttaaagaa

SEQ ID NO: 13205 - DNA, 489 bp, Gossypium hirsutum
  Clone ID: GOSHI-09MAY01-C2495_3
ctaaaccatcccccgcccctaaaaaatctcactcatataatttaaattcgaagaatctgctacaccaaagactagttactcgaattcgttaattttaagtcgaagaaaaatgggaggtggtagggaaggcgaatcaagtgacaaagggctgttttctcatcttgctggctatgccgccggacattatcctccgcctggatcctaccctccacaaggatatcctcctcaaggatatcccccacaaggatacccaccggctggatatcctccaccagcgggatatcctccacatggcggatacccacctgcagggtatcctcctcatggaggataccctcatccacctcatggtggatatccaccagctggttatcctggacacggttcgcatggacctgggatgggaggattattagccggtgctggggctgcggctgctgctctttaccgggctccccatttggcacaggggctcatcatcttgccatg

SEQ ID NO: 13206 - DNA, 710 bp, Gossypium hirsutum
  Clone ID: GOSHI-09MAY01-C2495_2
ataaatggtattttaaattttaaatgataatatcttcatctttttcctatcccgcgcggccggaacaattatgataggtaactcctccccaaacatcccccgcccctaaaaaactctcactcatataatttaaattcgaagaatctgctacatcaaagggaaatcacaaatcccatttctcttccttacatcttttctttccttttcaacaattgcatcttttgcttttgatcccaaattctgggtttcctcttctgtccatcaatcaattcatactagttactcgaaatcgttaattttaagttgaagaaaaatgggcggtggtagggaaggtgaatcaagtgacaaagggctgttttctcatcttgctggctatgccgccggacattatcctccgcctggatcctaccctccacaaggatatcctcctcaaggatatcccccacaaggatacccaccggctggatatcctccaccagcgggatatcctcctcatggcggatacccacctgcaggatatcctcctcatggaggataccctcatccacctcatggtggatatccaccagctggttatcctggacacggttcgcatggacctgggatgggaggattattagccggcgccggggctgccgctgctgctctttaccgggctcaccatttgtcacatggagctcatcatgtttcacatgggggatactatggca

SEQ ID NO: 13207 - DNA, 1100 bp, Gossypium hirsutum
  Clone ID: GOSHI-09MAY01-C2495_1
cccgcccctgaaaaaatctcactcgtggggggggaagttcgaagaatctgctacaccaaagggaaatcacaaatcccatttctcttccttacatcttttctttccttttcaacaattgcatcttttgctttcgatcccaaattctgggtttcctcttctgtccatcaatcaattcatactagttactcgaattcgttaattttaagttgaagaaaaatgggcggtggtagggaaggtgaatcaagtgacaaagggctgttttctcatcttgctggctatgccgccggacattatcctccgcctggatcctaccctccacaaggatatcctcctcaaggatatcccccacaaggatacccaccggctggatatcctccaccagcgggatatcctcctcatggcggatacccacctgcaggatatcctcctcatggaggataccctcatccacctcatggtggatatccaccagctggttatcctggacacggttcgcatggacctgggatgggaggattattagccggggctggggctgcggctgctgctctttacggggctcaccatttgtcacatggagctcatcatcttgcacatgggggatactatggccatggtcacggaaaattcaaacatcgcccacgcgtgcgcccgcgcgttcggaagcggtggaagcatggcatgtttggtaaacataaggccaagttctttggcaggaagtggaagtaaatagtcccgtctcccatgtcccatacgaatcttatcatactagtatgctcttttaacagttactgacatggttgccctctaataaacatggatttgtttcgcttgttatttgtgactggcatgctaatattatcacagtgcgtatatatgtgctgttggttttatttttattggaaatggagttgctatgtgtgtgtcatatattgtatatatgattatgttcattttttgttactcatgtgtgaagagtaaccggtgatcacattaacccaatgtattaaccagtccagttgattgcctgattgatgagaaattgaaaatagccaggccatttgatgggtgcagctggacattagtagctaatatgaacc

SEQ ID NO: 13208 - DNA, 537 bp, Gossypium hirsutum
  Clone ID: LIB3584-012-P1-K1-H10
gtatattcatgtggtattctaatgtcgtgtcaaatttcatttgttagtttgcaacatggttcttgatctgatactatgatactttctaacttttttttttactgtatagaatctgatcaagttaatcacgttagttaatatcagactgagtagcacaattagatcattaattcattgttaatggaactggaaaactcgtctctttctcataaacggttcttaagtttacaatacattgtagattatgaagcttgaatgctgttgaatcttattgatattcacaattataataaaacattaggcaagctctaattagtctgctaattttataaagtctgttaatattattccttttcttttattttctttcgttcgaattgtgttttagctgacaatgctttgtttctttgactcataacagactagttactcgaattcgttaattttaagtcgaagaaaaatgggaggtggtagggaaggcgaatcaagtgacaaagggctgctatctcatcttgctggctatgccggcggacatta

SEQ ID NO: 13209 - DNA, 175 bp, Gossypium hirsutum
  Clone ID: LIB3146-036-P1-K1-E1
tcctaccttcaacagggatatcctccggaggggtatcccccacagggatacccaccggttggatatcctccaccagcgggatatcctccacaatggcggatacccacctgcagggtatcttactaatgtagggttccccccttacatttcattctttttcttcactttctttttt

SEQ ID NO: 13210 - DNA, 375 bp, Gossypium hirsutum
  Clone ID: GOSHI-09MAY01-C2445_1
ccggacgcgtgggcggccgcgtgggcggacgcgtgggcggacgcgtgggttcacattcagcgtgccggccagaggcaaaggccccaaagaatggatttaagatccgaaatgtagttcctgcaacagaggaagaagcccggcgtattctagaacgcatggatgctgagatgccccagcaaagccagtgaagctggggcagatcaaccccctcttctagcataagcaatttgatgggatcagtccaatgttaaagattctttgtaaccttagaaacataaattattgcagcctgttaaattttgcaggcatgaacctgatgaatggatccttccccctgaaataaatcagccccccgcccccttttgtttcccccag

SEQ ID NO: 13211 - DNA, 515 bp, Gossypium hirsutum
  Clone ID: LIB3584-003-P1-K1-B7
cccacgcgtccgcgaatattcggaggtttcttaatgcatcgagcattcgagctagcttttgcaacagcttatgtctttgctggactcgtgccttgctttttagaagttgatcatgttgatttcctaaggcctgtcgatgtaggcgacttccttcgtttgacgtcatgtgttctgtacactaaactcgagaatccggatcaaccattaattaatgttgaagtcgttgctcatgttacgaggccggagatcagatccagtgaggtatcaaatacattttatttcacattcagcgtccggccagaggcaaaggccacaaagaatggatttaagatccgaaatgtagttcctgcaacagaggaagaagcacggcgtattctagaacgcatggatgctgagatgccacagcaaaaccagtgaagctggggcagatcaacaccaacttctagcataagcaatttgatggtatcagccaaatgttaaagattctttgtaacattaaaaacataaaattattg

SEQ ID NO: 13212 - DNA, 800 bp, Gossypium hirsutum
  Clone ID: GOSHI-09MAY01-C2405_1
ggtgaggaagaaatatgaacttatattgaggaggtgcaattagttggcttggtgcttttaagtaacagtcttctgcattatccttcttttcaggttcttgaacccaattggcatgtgatgcatggtagactccagactgcaaaaagcattgacgaggtcatccagcatcatgattttttccttgataagtgtctgaaagaatgcttacttcttttgcctgaactgataaagaaagtggagaagttgaaatcattgtgcctacaatatgcagcagcaacacaatggttaatctcgttgtctattgacattcccaagttagatgagcagtctgatggttcggttggctcaggaaaattgaaatcaaagaatccatctcaagtgcaaaaagtcatgactagaaactcagccgttactgattccattcttaaatttgagagagaattcaatgctgagcttcagagcctgagaccaattttgagcagcagctcccaagcagaaccatatttgacacatcttgcacagtggatacttggtgctggaaatgatcagtaagttcaaatattgtgttacatgtgctttaggtagggattcttgtttgtgttgtgttttgtctgtatatttgtttcttctttatactgcattttttaggtctctaatttcacaaaacaattgcttgctatatatttagtaaaactgtgatggggttgaaattttgggtcacatcttctattagatttttattcgggtaagtctttttttttctttattgcatgttagatgtaatatcaatcaaaaatata

SEQ ID NO: 13213 - DNA, 478 bp, Gossypium hirsutum
  Clone ID: GOSHI-09MAY01-C2435_2
tccctccattcaaaacacccccaaaaaaaattccaaaaaaatataaaagaaaaagaaaatgagccgaggaagtggaggcggctacgatcgtcatatcacaatcttctctcccgaaggtcgccttttccaagtggagtatgcgtttaaggcagttaaagcagctgggatcacgtcgattggtgttcgaggcaaagactctgtctgcgttgttactcagaaaaaagttcccgacaagctattggatcagactagtgtcactcatcttttccctattaccaagttccttggattgttggctactggcatgacagctgatgcaaggcaccttggtccaacaagcaaggaatgaagcggccgagtctcggttcagatatggatatgagatgcctgttgatgtatcgtctaaatggactgctgacaaatcacaggtttatgctcaacatgcttatatgagacctcttggaagctgtgctatggt

SEQ ID NO: 13214 - DNA, 1097 bp, Gossypium hirsutum
  Clone ID: GOSHI-09MAY01-C2435_1
cggtcgcgtgcgttcttggagaagaagctttctcttttctacataagaaatctgtgcatcaaaaacaccaaaacaataaaaaagaagaaggaacaagacaattccaaaggaacaagagagaaaatgagtcgaggaagtggtggcgggtacgatcgccatattaccatcttctcccccgaaggtcgtcttttccaagtcgagtatgcgtttaaggcagtgaaagccgctgggatcacatcaattggtgttcgagggaaagactccgtctgtgttgttactcagaagaaagttcccgacaaacttttggatcagactagcgtcactcatcttttccctattactaagttccttggattgttggctactggcatgacagctgatgcaaggaccttggtccagcaggcaaggaatgaagcagctgagtttcgtttcagatatggatatgagatgcctgtggatgtattgtccaaatggattgctgacaaatcacaggtttacactcaacatgcttatatgagacctcttggagttgttgctatggtgttgggtattgatgaagagaaggggccccaactctacaagtgtgatccagcgggccacttttacggtcacaaggcaactagtgctggatcgaaagaacaagaggcaattaatttcttggaaaagaagatgaagaatgacccagcttttacttacgaggaaacggtgcagacggccatttctgctctgcaatctgttcttcaggaggatttcaaggctactgagatagaggtgggagtggtgaaagctgataatcctgttttccgagtgatgtcaaccgaggaaatagatgaacatttgacagccattagcgagcgtgactagcgagctcagaccatcaagagccgctgcaaaaatctctgttatcaatcgaaaatgacaaatgtgctttagtttatcatatcatgtttgagagaggatagaaaaaggggtttgtagcttcaaattatgtcttctcgaattactgcttcaaactttaaaattcatgttatttctgggatttgaggattagtttatttgaaataacatttatctcattgtgaatttcattttagtgg

SEQ ID NO: 13215 - DNA, 441 bp, Gossypium hirsutum
  Clone ID: uC-gsronu33B047e09b1
ttcttggtccagcaggcaaggaatgaagcagctgcgtttcgtttcagatatggctatgagatgcctgtggatgtatagaccaaatgtacttccatcaaaaaatattagtatctctctctattctcataatagtattctttcatatttctttttacgtcttttataacactttttttaggtaaaaacccttgggttacccaacctaaattgctttgaaaaaaacccccttttgccaagtggggtaaaaaccaaaaaggcccgaccgaatggcctttccaaaaatttgccaaccctaattgggaatgggaccccccctttaaccggcccataaacccgctggtgtttgttttttaacccccaaagtgacccgttaaatttggcaagggccttatggccggttcttttggtttttttcctttcttttttggcaaggttggcggg

SEQ ID NO: 13216 - DNA, 511 bp, Gossypium hirsutum
  Clone ID: uC-gsronu33B108h10b1
cgtgtatgtggaggcggatactatcgccatattggtgtgttcttttccaaaggtcgggggttccaaaacgagtatgcgtttaaggcagtgaaagcagctgggattacatcaattggtgttcgagggaaagactccgtctgttttgttactcagaagaaagttcccgacaagcttttggatcagactagcgtcactcatcttttccctattactaagttccttggattgttggctactggcatgacagctgatgcaaggaccttggtccagcaggcaaggaatgaagcagctgagtttcgtttcagatatggatatgagatgcctgtggatgtattgtccaaatggattgctgacaaatcacaggtttacactcaacatgcttatatgagacctcttggagttgttgctatggtgttgggtattgatgaagagaaggggccccaactctacaaatgtgatccagcaggccatttttatggccacacggcaaccagtgctggatcaaaagagc

SEQ ID NO: 13217 - DNA, 366 bp, Gossypium hirsutum
  unsure (1)..(366): unsure at all n locations
  Clone ID: LIB3148-005-Q1-K1-A6
cccacgcgtccggaatgaccctgcttttacttatgaggaaacggtgcagactgctatttctgctgtacagtctgttcttcaagaggatttcaaggctactgagatagaggttggagtggtgaaagctgataatccagctttcagagtgttgtcaacagaggaaattgatgaacatctgacagctattagtgagcgcgactagtgagcatggaccaatattagctgctgcaaaaacctttctattatttgaaacaacatacatgctttagttgatcatgatgtttgagagggattgaacgagggttagaagagctntacatttatgttgcctcctattactgctcngaacttataattaaattcatg

SEQ ID NO: 13218 - DNA, 251 bp, Gossypium hirsutum
  Clone ID: LIB3147-046-Q1-K1-D1
cccacgcgtccgcccacgcgtccgaaattgatgaacatctgacagctattattgagctcgcactagtgatcatggacgaatattagctgctgcaaaaacctttctattatttaaaacaacatacatgctttagttgatcattatgtttgatagggattgaaagagggttagaagtatttacattttattttttctttatattacgtgttattaatctttatattataaattttttttatttttttttttat

SEQ ID NO: 13219 - DNA, 594 bp, Gossypium hirsutum
  Clone ID: GOSHI-09MAY01-C2425_1
cggacgcgtgggtgggaatagagaaaaaaagaggaaaaaagaagaggaagaaagttgttcgattttgatattcgtggaagggaaaaccgaagaaacgagtggaaataaagatgcttcaaatccgactaagcaagaccccgtcctcggacgccgccggtcccgtgaagccattgcctgtggaaacggtgacggtggcttgccccgatcaccttgttatcgctgaccttcccgttgccaagagcattggcgccgctatctcgtcctcgctcgtcaagaccgtcggtcgtaagtcacgccgccagcttggcgagcgagttcacttctgcgttcgctgcgattttcctatagccatctacggccgcttgagtccttgtgagcatgccttctgcctcgattgtgcaaggagtgattcgatttgctatctttgtgatgaacgtatacagaagattcagacaatcaagataatggaggggatcttcatctgtgcagctcctcactgtcttaaatctttcttgaagacgacgtgaatttgaatctcatatccatgagagccatgctgcccttatacagcctaatgcagagaaggaagatggt

SEQ ID NO: 13220 - DNA, 379 bp, Gossypium hirsutum
  Clone ID: LIB3120-009-Q1-K1-B10
aagatgcttcagatcagactcagcaagggctctttcttggatgccggcggttccgatcagccattgcccgctgagacggtgacggtggcctgccccgaccatctcgttctcggcgacctacccgttgccaagagcattggtgccggtacctcctcctgtatcgtgaagaccgtcggtcggagatcccggcgtcagcttggcgagcgagttcacttatgcgttcactgcgattttccgatagcgatttacggccgcttgagtccttgtgagcatgctttctgccttgattgcgcgaggagcgattcgatttgctatctttgtgatgatcgcatgcacaagattcagacaatcaagataatggacgggatatacatctgtg

SEQ ID NO: 13221 - DNA, 1103 bp, Gossypium hirsutum
  Clone ID: GOSHI-09MAY01-C2795_1
cccacgcgtccgcaattccgctgtgattgttcttggagctacaaaccgttctgatgtcttggatcctgcccttcgtcgaccagggagatttgatcgtattgttatggtagagactcctgacaggattggaagagaagctattataaaagtgcatgcctccaagaaggaacttccccttggagatgatgttgatcttggtgacattgcctctatgactactggttttactggggctgatcttgcaaatctggtaaatgaagcagccttactcgctggaagaaataataaagttgctgtagagaggattgatttcattcaggcagtagagcgatcgatagctggcatagagaagaaaactgccaaattaaagggaagtgagaaggctgtcgttgcaaggcatgaagctggtcatgcggtagtaggtacagctgttgctaaccttcttcctggacagccacgtgttgagaaactgagcatattgccaagatctgggggagcactgggctttacttacacgcctcctaccaatgaggacagatatttactcttcattgacgaattacgtggccgtttggttaccctccttggtgggcgcgctgcagaggaagttgtctactgaggtcgtgtttctactggtgcacttgatgatattaggcgagcgacagacatggcatacaaggcagtagctgaatatggtctaaatcagactataggtcctctgtctttagctaccgtgtctggtggaggcatggatgaatccggggggggagttccttggggacgtgatcagggacatctagttgatcttgtccaaggagaggtgagggcattactgcagtctgcccatgaagtaccctttctgttgtacgtgctaatccaactgttttggaagggcttggtgcctcacctggaaaaaaatgagaaagttagaaggtgaacagctccaaaattggttgaaattgggtgtggcccccaagggacttatcctcctccttgaaggcaagccagattctctcctgccggtccaacccggctctggaataagtgttttgcccattgcttgtccacattgaccttggctttgacccaaccctattatttct

SEQ ID NO: 13222 - DNA, 567 bp, Gossypium hirsutum
  Clone ID: LIB3543-038-Q1-K1-G7
cgtccgccccgcgtccgggcgcgggggcgccccgcgtccggccatggcattcaaggcagtagctgaattggtcttaatcagactatagggcctctctctttagctacggtttctggtggaggcatggatgaatccgggggtggagttccttggggacgagatcaggggggggggggtgatcttgtccaaggagaggtgaaggcattactgcagtctgcccatgaagtagccctttctgttgtacgtgctaatccaactgttttggaagggcttggtgctcacctggaagaaaatgagaaagtagaaggtgaagagctacaaaaatggttgaaattggttgttgcaccaaaggaactaatcatcttcgttgaaggcaagcaagagtctcttctgccggttcaagcgggctctggataagtgttttgctcattgcttgtcaacattgagcattgcattgaaccaaccgactatatctttctttgcaccttgtcaatgaccatgctgtggctaccggcatgaaagctcccttgcgctttttttttttcatatttcagcaaggtgagtcct

SEQ ID NO: 13223 - DNA, 433 bp, Gossypium hirsutum
  Clone ID: LIB3165-052-Q1-K1-D1
gcgggcgagaccactactcaagggttcgactccttggaaacctggaggaccattggccttaaggtatattcctcctaccaacgaggacagatatttactcttaattgatgagttacgtggccgtttggttactcttcttggtggacgcgctgcagaggaagttatctatcatgtcgaggaaatactggtgcacttgatgatattaggcgggcgacagacatggcatacaaggcagtagctgaatatggtcttaatcagactatagggcctctctccttagctacggtttctggtggaggcatggatgaatccgggggtggagttccttggggacgagatcagggacatctagttgatcttgtccaaggagaggtgaaggcattattacagtctgcccatgaagtagccctttctgttgtacgtgctaatccaa

SEQ ID NO: 13224 - DNA, 559 bp, Gossypium hirsutum
  Clone ID: GOSHI-09MAY01-C2765_2
taagcgactctgtgagtacaccattgcacaggtgagctaaaactaaggatgtaacactggacaatgtttctagcatgtacgaactctccgaagcttttcatgctatatcattgaggcacacttgcattttgtttatcttggagcatttctctcaattgagcgacagacccgggcactcacatctgatccagcgtataattccagagatccgcaattactttgcgaaagcgcttacgaatcctaacccacataaccagcggccgtagaaggcaaccagtggctgtagaaggctggtttttaactcatctcatctctaacaagatacgttgatgtacagaaatgtagtagctgccctcgcgggcgagccaattgaaggttctctaattcgtttctttgtagcacggttcgtaatcggttccgatgcccgagttgtttcgtggtgtttgtagaaaacaaggtgtaagtttctcgttttaattcattgtcttgtctgcatttagatgtttacacgaactacaacctccttctcgatttgtctgccattggactttgctttatt

SEQ ID NO: 13225 - DNA, 1216 bp, Gossypium hirsutum
  Clone ID: GOSHI-09MAY01-C2765_1
ccttgattgaaagcttcactctcctgtatacagctgaaagagagtcagcctttgctttggggaggacacgcacaatcaagctggtattgcacatatgggtggtttggtgcctttgttgaagcttctagattcaaagaatggatctttgcaacacaatgctgcatttgctctttatggtcttgcagataatgaggataatgtatccgactttattagggtggggggtgtccaacggctgcaagatggagagtttattgttcaagcgacaaaagactgtgtagccaagacattgaaaagactagaagagaagattcatgggcgagttttgaaccatttgctgtatctgatgcgcgtagcggagaagccagtccaaagacgagtggctttggctctagctcatctttgttcccctgatgaccagagaaccatattcattgataataatggacttgagctgcttcttgggcttcttggttctacgagccctaagcagcaacttgatggtgctgtagctctgtacaagttggccaacaaagctatgacgctttctcctatggatgcagctcccccttctccaacaccacaggtctatttgggggagcaatacgtcaacaacgctacattatctgatgttactttcctagttgaaggtagacggttctatgcgcacagaatctgccttcttgcttcttcagatgcatttcgtgctatgtttgatggtggttatcgggaaaaatgcaagggatattgaaattccaaacattagatgggaggttttcgagttgatgatgcgcccacgcgtccggcgatttatatacactggatcagtagatgtttcattggatattgcacaggatctgctcggagctgctgatcaatatcttttggaagggcttaagcgactctgtgagttcacctttgcacaggatgtaaccctggacaacgtttctagcatgtacgaactctccgaagcttttcatgctatatcactgaggcacacttgcattttgtttatcttggagcatttctctcaattgagcgacagacccgggcactcacatctgatccagcgtatagttccagagatccgcaattacttcgcgaaagcgcttacgaatcctaacccacataaccagcggctgtagaaggctggtttttaactcatctctaacaagatacgttgatgtatagaaatgtagtagatgtggagccaatt

SEQ ID NO: 13226 - DNA, 355 bp, Gossypium hirsutum
  Clone ID: LIB3148-014-Q1-K1-A8
tgcagctcccccttctccaacaccacaggtctatttgggggagcaatacgtcaacaatgctacattatctgatgttactttcctagttgaaggtagacggttctatgcgcacagaatctgccttcttgcttcttcagatgcatttcgtgctatgtttgatggtggttatcgggaaaaagatgcaagggatattgaaattccaaacattagatgggaggttttcgagttgatgatgcggtattacaaattcttcgatctggatatataaacactggatttacttcattttggttattttgatcatcattttatgtaagtgacttcgtttctttgtacagatttatatacactggat

SEQ ID NO: 13227 - DNA, 904 bp, Gossypium hirsutum
  Clone ID: GOSHI-09MAY01-C2725_1
gcgttcgccccggagaacaaaaaaaaaaaaaaaatcattatgagcacctaacactaacaggattcaccaaaacagcagagaatggcggccaatttctggacttcttctcactttaaacagcttttggacccggaagaggtggatgtggttcatcaacaagataaagataaaggcatcacgcttgaagaatttaagctgattaagatgcatatggcgaactatataatgaaactggctcaaaatgttaaagtgaggcaaagggttgtagcaactgcagttacgtatatgagacgtgtctataccagaaggagcatgagtgaatacgatcctcgtcttgttgctcctacttgcttatatttggcatcaaaggcagaagaaagcacggtgcaggctcgacttcttgtattttacattaaaaaattatcttctgatgaaaagtatagatatgaaatcaaagacatacttgaaatggaaatgaagatcttagaagcacttaactattatttagttgtatttcatccttaccgcacattatctccgttgttgcaggatgctggcatgaatgatatgagtatgactcaattatcttggggacttgtaaatgacacatacaagatggaccttattcttacacatccgccatatttgattgccttagcttgcatatacattgctagcgtctacagggagaaagatatcacaacttggtttgaagaacttcgcgttgatatgaatgtggtgaaaaacatctccatggagatcctcgacttctatgagaacaaaatgattgcagatgagcgaataagtactgccttcctcaaacttgctcttaagccttagatggttgattgagcgtggaacctgataataccggcatcgaccactgcatgacttgatattattt

SEQ ID NO: 13228 - DNA, 680 bp, Gossypium hirsutum
  Clone ID: GOSHI-09MAY01-C2685_1
ctgcaacttggtaatattgaccgttgccgaaaactgtatgagaagtatctggagtgggcacctgagaactgctatgcatggagcaaatatgctgagttagaaagatcattagctgaaacagagcgggcaagagctatttttgagcttgccatcacacaaccagctttggacatgccggagttattgtggaaggcatacatagattttgaaatttctgaaggtgaatatgaacgaactagaggattgtacgagagactattagatcgtacaaagcacttgaaggtgtggattagttatgcaaactttgaagcctctgcaatggggggggatgatgagagttcggacttgccacaagacggggttcaggaatataatcacgaagcaaagaaggaatgcgttcagcgtgcaagaagagtctttgaaagagcagttaactattatagaacgtcagcaccagagctgaaagaagagcgggctatgctcctggaagagtggcttaaaacggaaagcagtttcggtgagcttggtgacattagcatagtccagtctaagttgcctaaaaaactcaaaacgaggaagcaaattacgagtgaagatggtggtgttactgggtatgaagaatacttcgattatgtattccctgaagaaaaccggcgacgaacctcatgtttttgggaagc

SEQ ID NO: 13229 - DNA, 1008 bp, Gossypium hirsutum
  Clone ID: GOSHI-09MAY01-C2655_7
atgaattcgtagaaatttttttttccttgagcttggaatgttcctagctaattaattacattttgtttggtgttatctaggaaaaagctgtgcagtagatcaacaaaaatggagctatcggcaaacatcgtgcttataccggccgacgattacaggggagaagctagaacaatattttaggggctgaatgaaattttaattgtttatagtttatatttttataatttttaaagtattaaattaaatttttataattttaagaaggttaaagtgtaattttatctttactaatttaaaattttaaaaaatttagaggacctaaatggtacatattcctgcgaagcaacaggtccgatggcggccccgggtccgacggcggccccggttccgatggcagccccgccataaaatcgcctctgccggtaaacctgaggagcttgaacagaacatcacttacatggatgcttcgttgtataaggcagcagcagaaggaaaaattgaagtattcaataattaccaggagcttgaccttgaatcgcaaaagaccccaaaccatgacaacgtgctccatgttaacttggcaacccacgagcttgctgcctggttttctaatggaattctctcaagcactagatccttacccaaattatattttttcatctttttgtttttgtggtttttcattattaagaaaaaaagtgaaaaaagatcaaatttaatcggacaaattcttaacaagtgtccgtcactactactccaaacgaatgctaaaggtcaaactcccttgcacgttgcagcaatgaatggacattctgctattgttaaacttctaatcaagtcatgcgcaaaagctagagatggagatttagagatgctagaaatgggtcaagtaaatgcagtgagagagatgctgaggatcacggatcaggaatctaacacggctttacatttagcagtaaagtatggcgacgttgaaatggtgaaagaattgttggagcatgaagaccc

SEQ ID NO: 13230 - DNA, 881 bp, Gossypium hirsutum
  Clone ID: GOSHI-09MAY01-C2655_5
aggagaatgctaccttgctttttaacatatttctctcaataatcaaattcttccccgtactatatggatgcttctctccgcctatgcgtgatttaattactattataagaggagaaaaaagatcagattttatcgaacaaattctcagcaagtgtccgtcaatgctactccaaacgaatgctaaaggccaaactcctttgcacgttgcagcaaggtatggtcattctgctattgtgaaacttctaatcaagtcttgtgcaaaagctagagatggagatttagagaagctgggaatggatcaagtaagtgcagtgagggggatgctgaggattagggatcaggaatccaacacggctttacatgaagcagcacggtgtggcaatgttgaagtggtgaaagcattgttggagtttgaagaccctgattttccgtattctgccaataaaaaacaggagactccactttacattgctgctaggagaggagacggcggcgtgctgagtgtactattagagaaatcaaaatcaacagctcatggcggcccccacggtagaacagctttgcatgcagcagccatggctggagatgcagaggcaataagggtaatattaaagacgaaggggaactttgacaaaggaaagagatgaagatgggtacacccctcttcattatgctgcacacttaggttacatttctgttgtggaagaagtgttaaaatgggatgtatcagctgcctatataggtgataaaaagaaggggatgacacctcttcttatggcagccaggcaaggtcattttgaaacagtttcaaagattcattctttatgtccagattgttgtgaaaaagtggacaacaaaggtttgagtttacttcattatca

SEQ ID NO: 13231 - DNA, 867 bp, Gossypium hirsutum
  Clone ID: GOSHI-09MAY01-C2655_3
ctctctcctatactaacttcttccacttaaaagcaagttagctagctagggttttttgagctcagagagatggatatcgaaaagtaacagcgtcactagccctgctctgtgcactcaacatcctcttcttttccctggagagtgctcggggatcctgcccttccgccaaccccaaacctaaacctaaacctaataccgaagccataacccctacatccctccccatcttcttctgccacgtgccctagcagatgctcttaaactcggagtatgtgctgatctgctccgagccttgctcaacgtcaccattggtacccctcctgttcaaccctgctgctctctcatacaaggtcttgctgatcttgaagctgccgatcgcctttgcacggcaatcaaagcaaatattatgggcatcaaccttaatgacccactttccctaagattgcttcctaatgtctgctcaaagaaagtaccctctggctgccaatgtcgctaaatcagctctctaaattctttctcttcttagcgctgcgtggttctgacgctcttaaggtccagtttgcagtgatcaatgttttctcggtaactggtcgtttaatctacgttgttgtagcgttgtttccttttggattgatactgaataaatgtaacactatatgaaaaagaagtttaatttctttggatttatgtatcttcatggggaatgaaacattagtatcattcagctctttttaaaaaagagaacacgaaaccagggagcacttacaatccgtatctggacaatcattctctggtaaagaaataacttgattgcaaacaaaacccaccaaagttaaatggggggggccgttttaggggatccaagtt

SEQ ID NO: 13232 - DNA, 546 bp, Gossypium hirsutum
  Clone ID: GOSHI-09MAY01-C2655_2
tcttttcgcgtccgtccacgcgtccgccagatggcttcaaaaagaacagcatcgcttgccctcttctttgccctcaacgttctcttcttttctctagtcagtgcttgcggttcttgcccttcccccaacccaaaaccaaagcctactccttccccatccccctcaggcaaatgcccccaagatacccttaagttaggtgtctgtgctgaggtgcttggtttagtcaatgtaactgttggttcgcccccagtgcaaccatgctgctcccttctccaaggccttgctgatcttgaagctgttgtttgcctttgcacagcactcaaagctaacgttttgggcatcaaccttaatatcccagtttccctcagcttgcttcttaacgtctgctcaaagaaagttccatctggcttccaatgtccctaattattgtttccaattctttgtcttcttggtgttttgcgtggctttgaaggtctaagtaggtttttgtggtgattggtaattgcttgtttcttagtggattgagattgaataagtgtactactt

SEQ ID NO: 13233 - DNA, 1100 bp, Gossypium hirsutum
  Clone ID: GOSHI-09MAY01-C2655_1
cccacttgtttccgcgtcccccccccccccccgcgctctctctcctatactcaacttcttccacttaaaagcaagttagctagctagggttttgtgagccagagagatgggttcaaaaagaacggcatcactagccctcttctttgcactcaacatcctcttcttttccctggtgagtgcttgtggttcctgcccttcccccaaccccaaacctaaacctaaaccaaagccaaaccccactccctccccatcttcttctggcaagtgccctagagatgctcttaaactcggtgtatgtgctgatttgctcggtggcttgctcaacgtcaccattggtacgcctcctgttcaaccctgctgctctctcatccaaggtcttgctgatcttgaagctgccgtttgcctttgcacggcaatcaaagctaatattttgggcatcaaccttaatgtcccactttccctcagcttgcttcttaatgtctgctcaaagaaagtaccctctggcttccaatgtcgctaaatcagttctctaaattctttctcttcttagtgctgcgtggttttgatgttcttaaggtctagtttgcagtgatcaatgttttcttggtaactggtcgtttaatctacgatgttgtagtgttgtttccttttggattgattctgaataaatgtaacaccatataaaaaagaagatgtttaatttctttggatttatgtatcttcatggggaatgaaatattagtataattcagctatgtttcatcacagagtagaagcacgtctaatttctcaatgctctaatgctacagtatctggtcccgtggccgtgactttagtggcgaaaacattttgtatataggaagcattctcttcttttgtttattttttactctacaggttgagatcacctggtttgtctcctatattatcctttctattttgttacttgtcagtatcttagtgcaacccttatgtaaccagcttgttattatttcaattaaataacatgatatctaaaacctcctgtggtcatgaagaattataaagtaccagaattattaaacctcgtggagggtaaggcaaaagggtggaatatgtcg

SEQ ID NO: 13234 - DNA, 546 bp, Gossypium hirsutum
  Clone ID: LIB3543-019-Q1-K1-E5
taagacttacgcgtgggagacgcgtgggactctctctcctatactaacttcttccacttaaaagcaagttagctagctagggttttttgagccggagagatgggttcgaaaagaacagcatcactagccctcctctttgcactcaacatcctgttcttttccctggtgagtgcttgtggttcctgcccttcccccaaccccaaacctaaacctaaacctaaaccaaagccaaaccctactccctccccatcttcttctggcaagtgccctagagatgctcttaaactcggtgtatgtgctgatttgctccgaggcttgctcaacgtcaccattggtaccccttctgtataaccctgctgctctctcatccaaggtcttgctgatcttgaagctgccgtttgcctttgtacggaatcaaagcaaatattttgggcatcaaccttaatgtcccactttccctcagtttgcttattaatgtctgctcaaagaaagtaccctttggcttacaatgtcgctaaatcagatctataaagtctttctcttatt

SEQ ID NO: 13235 - DNA, 527 bp, Gossypium hirsutum
  unsure (1)..(527): unsure at all n locations
  Clone ID: uC-gsronu33B015f10b1
taaataaaatcagattttataaaaaaaaaaccagattttgtcgaacaaattctgagcaagtgtccgtcactgctactccaaacgaatgctaaaggtcaaactcctttgcacgttgcagcagggtatggacattctgctattgtgaaacttctaatcaattcttgcgcaaaagctagggatggagattttgagctgggaatggatcaagtaagtgcagtgagggagatgctgaggattagggatcaagaatccaacacggctttacatgaagcagcagggtgtggcaatgttgaagtggtgagtgcttgtggttcctgcccttcccccaaccccaaacctaaacctaaacctaaaccaaagccaaaccctactccctccccatcttcttctggcaagtgccctagagatgctcttaaactcggtgtatgtgctgatttgctccgtggcttgctcaacgtcaccattggtacccctcctgttcaaccctgctgctctctcatccaggtccngctgatcttgaagctgcg

SEQ ID NO: 13236 - DNA, 413 bp, Gossypium hirsutum
  Clone ID: uC-gsflnu33B137d05b1
gcccgcacggtaccggcccggcctgactggctggacccacccagcgcttcctttcgtccgatcctatactcaacttcttccacttaaaagcaagttagctagctagggttttgtgagccagagagatgggttcaaaaagaacggcatcactagccctcttctttgcactcaacatcctcttcttttccctggtgagtgcttgtggttcctgcccttcccccaaccccaaacctaaacctaaaccaaagccaaaccccactccctccccatcttcttctggcaagtgccctagagatgctcttaaactcggtgtatgtgctgatttgctcggtggcttgctcaacgtcaccattggtacgcctcctgttcaaccctgctgctctcttatccaaggtcttgctgatcttgaagct

SEQ ID NO: 13237 - DNA, 739 bp, Gossypium hirsutum
  Clone ID: GOSHI-09MAY01-C2665_2
aaggtaccccctatacgcagtaatcctacaaagttactgatgtatttcccttcaaatggattaataagaaatggaaagaaggcttctccgtgacctcgatgaccgctgcgggcaacaaatggggcatcgttatgtctcgaaatgcaggctatcgtcttcaggttgttgaacttgatttcctttacccgagcgaggggattcatcgaagatgggaaaaagggtttcggattacatcggcagcggctacggaggatcaagctgcattcatacttagtgcacccaagagaaaatcacaagatgtgatgcaagaaactttgcgtacatctgcttttcctagtacccaagtaaaggataaatggctgttaaatctgtatatttcatccatttgctatggaaggacagtttcttgaagtttattatttggaagaaggtaacctccagttacaagtaaaactcgaaacatattggtatcttaaatcgagcttgaactttaaaaatcgaacttatctgagttgtatttttgagcttcgaatttcgattcaatatcaaagctttttatagtctatatttttagtgttaaatgaaatttaatggctaagtttgtcgcttttttcatttaatacggtatttgtattattttttatcaaatgtgatacttgtatttgataaaaattatacattttgataaaaaaaaaaaaaaaaaataaaaaaaaaaaaaaaaaaaaaaaaataaaaaata

SEQ ID NO: 13238 - DNA, 1774 bp, Gossypium hirsutum
  Clone ID: GOSHI-09MAY01-C2665_1
gatgctttcgaggtcgcgttgaagtttgagcatcaaaatggtaaaggatgtagttcgggtcctccttatgagtggcaagtatatagcactcttaatggttgttatggacttcccttggttcattacaaaggtcaactcggaggctactacattcttgtcatggatatgctaggtccgagtttatgggatgtttggaactcaaacaaccagatgctgacagaagagatggttgcttgtatagctgtggaggcaatatcgattctcgagcagcttcatttgaaaggttttgtacatggagatgttaagcccgagaactttttgcttggccagcctgggacctcaaaggagaagaccctgtatctggttgatctgggtctggcttcgaggtggaaggaggcagcttctgcacgtcatgtcgattatgaccaaaagcctgatgtgtttaggggaactgtacgttatgcaagtgtgcatgctcatttgggtaggacaggcagtcgaagggatgaccttgagtcattggcttatacactaatatttttacttaggggaaaacttccctggcaaggttacattggggagaacaaaggatttcttgtttgtaagaagaagatggcaacttctcctgagatgctttgttacttgtgccctcctccttttcaacaatttcttgagattgtgaccaacatgaaatttgatgaagaaccaaattactcaaagctcatttctcttttccgtaatagcattgatttcaattcatcaatatgtcctatccaaattgatggagctattaagctgggtcaaaaaaggggaagagcactttttgagctggaagatggtgagcagcttaagaagaaacttcggctaggttctcctgcttctcagtggatctcagtctatagttcccgaacctcaatgaaacagaggtatcactttaacgttattgattcaagactcaaccagcacgtggagaaaggaaaagaagatggcttgtatattagctgtgtagcttcatcattgaatctgtgggccattgttatggatgcagggacagggttcacatctcaggtttatgagttatctcctatctttttgcataaggaatggataatggaacaatgggagaagaattactacattacttcagttgctggtgcttgcaatggcagtgcactggttgtaatgtcaaagggtacaccctacacgcaacagtcctacaaagttagtgacgtatttcctttcaaatggattaataagaagtggaaagaaggcttctctgtgacctcaatgaccgctgcaggcagcaaatggggcattgtcatgtcccgtaatgcaggctatcctactcaggttgttgaactcgatttcctttatccaagtgaggggattcatagaagatgggaaaaaggatatcggattaccgcagcagctgctacagaggaccaagctgcattcatacttagtgcgtccaagagaaaatcacaagatgtaatgcaagaaactttgcgtacatctgcttttcctagtacccatgtaaaggataaatggttgaaaaatctgtatatttcatccatttgctatgggaggacagtgtcctgaagtttggtattcggaagaagcaactgcagtttacaagttaaaaggcaggtaaactatcccggtctattattcaaggccttgaaattaataacagttgatgagtcttgtaaagattccatctgattgcgcattttgtcccgctaatacttaatgctttgaatcaaaagtttccttc

SEQ ID NO: 13239 - DNA, 274 bp, Gossypium hirsutum
  Clone ID: LIB3048-017-Q1-L1-H8
caaaagcctgatgtgtttaggggaactgtacgttatgcaagggtgcatgctcatttgggtaggacacacaatcgaaggcatgaccttgagtcattggcttatacactaacatgattacttctgggaaaccgtccctggctcgggcacaccgacgagaacatcacgctatcttagatgtgcatacaagatagcagctcacactgacatgctgtgttacatgagcactactcctttccaacgatctattcatattaagaccatcatgaacagtgat

SEQ ID NO: 13240 - DNA, 1165 bp, Gossypium hirsutum
  Clone ID: GOSHI-09MAY01-C2635_1
aacttcacacacattaagaaagaataacgacagcaattgtaagaacgtcttctccttcaccattttaaaaattttcagcttttcatatttgcctctcctccgagaaatcatgagccaggctccgaccgatcatgaaaaggtctcggaaaccaaacagccaacgtcgtccacggagtcaacccaaccggcgactctctcttctgattacgctccctacccgaaattagaccccaaggacgtcgctcctccaccggaaaattggaccaccgtttccatggcttcgcaatcggatcccagtccggaccccgtcccgatctccagcagcgctgctaccaccatgcctgctgagtccaacccgtacgtttctccggcgccagttcaatcttcttccgtcaagaataagatggaatcagtgaaagacgtgttggggaaatggggaaagaaagcggcggacgacactaagaaggcgaaagagatagctgagaacatgtggcaacacttgaaaactgggccgagttttgctgacgctgctgtaggaagaattgctcagacaaccaaagttattgctgatggcggttatgagaagatctttcggacaacatttgagactgttcctgaggaactgcttctgaagacatatgcttgctacttgtccacctccgctggtcctgttattggagttttatatatgtcaacccataagcttggtttttgcagtgacagtcctctggcttatcaagttggtgatcagactcaatatagctattataaggtggttatcccattacaccagctgagggcagtgaatccatcagctagcaaagccaacccagctgagaaatacatccagattatatcggttgacaaccatgaattctggttcatggggttcgtacactacgacagcgcagttaaaaatctccaaggagcattgcagtcccgtggctcatgatgtgatgttatcatcacatcttcagccacgtcccaaaaggtgatttacattttactagattgatgttgataaaaatattggagccagatttgtaataatcggtagagcatacgcataggctttgttttatattgcatttgtttggagtgtcactgtggtattatcctttggttccgaaacacattaagatgagagcttgttaaatggtttgct

SEQ ID NO: 13241 - DNA, 625 bp, Gossypium hirsutum
  Clone ID: AW186934.1
tgatattcacacttattaagaaacattaacgacagcaattgtaagaacgtcttctccttcaccattttaaaaattttcagcttttcattttggcttttccacaaatatatcatgagccaccctccgaccgatcatgataaggtctcggaaatcacacacccatcgtcgtccacggattcaacccctcgggcgactctttcttctgattaccctccctacccgaaattagacccgatcgacgtctctcctcctccggataattggaccaccgtttccatggttttcgcaatcggattccattctggatctcgtcctgatctccatctgcgctgctacctccatgtctgctgatttctgctcgtacttgtcttcggctccagttcaattcttcttccgtctacatttagatggaatcttttattcacgtgtcggggatcatgggaaataactcgggcgatgattctctttacgtcatctatatttctcacaatacttggtctctcttgatttcggggccagtttctgtgactccgcttgtcgatttattgtctttaccccctctgttttgcttcagcgcggttcccatataattcttctgacttctctttaaatcgttcccgacgcc

SEQ ID NO: 13242 - DNA, 1379 bp, Gossypium hirsutum
  Clone ID: GOSHI-09MAY01-C2625_1
gcctaactcaactcaaatatgtccgtacttcatcctttagaacaacacccctatcttgtaatgaggttaaagttttctgtctctttcctttaatggcgtttcttccattgaaaggactctttttctctttacactcacacttgtccccatcatatattgaagttttgtcaatattttaactcaactctgtcctatataatgacttcttctcctgagtacaataacatgcaaaaaacagttgcattgctgctaatagtttgtcttgattcttacttgattcttattctcaggtttgatattcaaatggcggatattagcaatggttccaaagggtttgcagtgaaacaaggagaaccaactagggtccttcctgcagaagagacaaagaagggtctttattacctgggaaaccttgaccaaaacattgcagtcataattcgaaccatttacttctttcagtcagagtctaaagggaatgaagatgctgccgaacaagttaaaaatggtttgtcaaagattcttgttcatcattatccacttgctgggcgactaaccatcagctccgaagggaagctcatagtggactgcaccggggagggggctgtttttgtggaggctgaagctaattgtgggattgaagagatgggggacataacaaagcctgaccctaacattcttggaaagttggtttatgaaatctctggtgctcagaacttgctagagatacctcttttggtgattcaggtgactaaatttaagtgtggaggattttctattgggatgagcatgaaccactgtatgcttgatgggattgctgctatggaatttgtgaatggatggggtgaagttaccagaggcttgccattaaagacccctccatttttagacagaaccatactgaaaccccgaaacccacctatgatagagttcgagcaccatgaatttgatgagattgaagatatatcaaacacaaacaagttgtatgaagaagaagaaatggtttacaagaccttcctgtttgatccagataagcttggacaactcaaggaacaagcccttgaagatggggttttatccaaatgcaccacattcgaagtccttgcagggtttgtgtggagagctccatgcaaagcattaaacttggttcctcagcaaaaaactaagctcctctttgctgctgatgggagaaaaagattcataccaccattacctgaaggttttgcaggtaatgggattgttttaacatattcaatctccactgccggtgagttagctgagaagccattatcatttgctgtgggattgatccaacaggcggtcaaattggcgaccgacagttttatgcgatcagccattgattattttgaagtgacaagagc

SEQ ID NO: 13243 - DNA, 542 bp, Gossypium hirsutum
  Clone ID: GOSHI-09MAY01-C2195_7
cttttatatacataaaggatgctattgaagctgttctcttgatgattgaggaggcagatagggccaatggccatattttcaatgtgggtaacccgaacaatgaagtcacagttaggcaacttgctgaaatgatgactaaggtctatgccaaggttagtggagtaaactgtgctggagtctccaacagttgatgtcagctccaaggaattttatggtgagggttatgatgatagtgacaagagaattccagacatgaccataataaacaaacaactcggttggaaccccaagacatccctttgggacttgctcgaatctaccctaacctaccaacacaggacttatgccgaggctattaagaaatctatagcaaaaccttctgcatcctaaaggaggctagatggttaaaccacggctaagaaaggactcattaaatgtgcttcatggcaaatgtttcaattcttctttcccccccctcttttaggaagtctttaaatatatcataacgtcgcttttttttatacctcccccccttttttttt

SEQ ID NO: 13244 - DNA, 556 bp, Gossypium hirsutum
  Clone ID: GOSHI-09MAY01-C2195_6
gaagctgttctcttgatgattgaaaatcccgacagggggggtggtcatattttcaatgtgggcaacccaaataatgccctcgcggccgggcaacttgctgaaatgatgactaaggtctatgcaaaggtaagtggtgaaccttcactggagtcaccaacaattgatgtcagttccaaggaattttacggggagggatatgatgatagtgacaagagaattccagacatgaccataataaatagacaactgggttggaaccccaagacatccctttgggacttgcttgaatcgacccttacctaccaacacaggacttatgctgaggctatcaagaaatccatggtaaaacctattgcatcctaaataggtaaagatgttcagaccatgcctaaggaaggatgcatgtaaaatttacttgttcgaaaaatgttccaattctttttgttccttttaaggagtcctatatatatctgaaattgttgattctacttgtatgctactttttgggtcatcccttgtgtcaatagttaatagctcacatttagctcagcagtat

SEQ ID NO: 13245 - DNA, 613 bp, Gossypium hirsutum
  Clone ID: GOSHI-09MAY01-C2195_5
gaacttttgtttacattaaggatgccattgtagctgttctcttgatgattgaaaacccagatagggccaatggccatattttcaatgtgggtaacccgaacaatgaagtcacagttaggcaacttgctgaaatgatgactcaggtctataccaaggttagtggagaacctatgttgcagtcaccatcgattgatgtcagctccaaggaattttacggtgagggatatgacgatagcgacaagagaatcccggacatggccataataaataaacaactcggttggaaccccaagacatccctttgggacttacttgaatcgactcttacctaccaataccggacttacgccgaggccattaagaagtccatggcaaaaccaactgcatcctaaaggggcaagattgtttagaccacgcacacaagtaaggactcgcgtaaaatatatgcttttgttcttttacgtttggattcttaaaattctttttaggaagtcttatttataaatatatcttcattgttgattttggtttatattttttagacttgtctgcatctgtagttaagttcttagtgtggtacttttatatggaaacattagattttcattgtttt

SEQ ID NO: 13246 - DNA, 642 bp, Gossypium hirsutum
  Clone ID: GOSHI-09MAY01-C2195_4
tccacgcgtccgcacatatatacagcacgcccctctttccgcccgctccgtcccgcgcgctctcagctcttttcttctcttgtgacactgctaatattttttttattgtcgtctccggcgttcgaagatcataaaaaaccggagtcgtttcaaatggctacgagaacggatctagatgggaggccaataaagccgatgacgatatgcatgatcggtgccggaggcttcatcggctcccacctttgcgagaaattgatgtcggagacgccgcacaaggtgctcgccttggacgtttacaatgacaagatcaagcacctcctcgagcctgactctctcccttgggctggccgtattcagttccaccgacttaacatcaagcacgattctaggctcgaaggcctcatcaagatggcagatctcgtgataaatcttgctgccatctgtactccggcagattataatacgcgtccactagacacgatttacagcaattttattgatgcacttcctgtggtgaagtactgttcagagaacaacaagcgtctcattcacttctctacttgtgaagtgtatggaaaaactatcggaagcttcttcctaaagattctcctctccgtcaggatcctgcctactaattgcttc

SEQ ID NO: 13247 - DNA, 696 bp, Gossypium hirsutum
  Clone ID: GOSHI-09MAY01-C2195_3
ccatcttcaaatttctctctctttctatattttttctttctgctaataattacttttgtcaccagcggcgtcggaagacaggaaaacaccggtgttgtttgaaatggcagcttcgagaatggatctggacgggagaccaataaagccaattacgatatgcatgattggagcgggaggcttcattggctctcacctctgcgagaaattaatgtcggaaacgccgcacaaggtgctcgccttggacgtttacaatgacaagattaagcacctcctcgagcctgactctctcccttgggctggccgtatccagttccaccgacttaacatcaagcacgattctaggcttgaaggcctcatcaagatggcagatctcacgataaatcttgcggcgatctgtactccggcagattataatacacgcccgctcgatacgatttacagcaattttattgatgcacttcctgtggtgaaatactgttcagagaacaacaagcgtctcattcatttctcgacttgtgaagtgtatggtaaaaccatccaaagctttctgcctaaagattctcctctccgtcaggatcctgcctactatgttcttaaggaagatgtctcgccctgcatttttggctctattgagaagcagaggtggtcgtatgcctgtgccaagcacttgaatgagaaggcccattttgctgaggg

SEQ ID NO: 13248 - DNA, 769 bp, Gossypium hirsutum
  Clone ID: GOSHI-09MAY01-C2195_2
cccacgcgtccgcaaagacattctctcccatttctcaccatctccaattagcttctctcgcttcctgattgtcgtctccggcgttcgaagattataaaaaaccggcgtcgtttcaaatggcgactacgagaacggatctggatgggaggccaataaagccgatgacgatatgcatgatcggcgccggaggcttcatcggctcccacctttgcgagaaattgatgtcggagacgccgcacaaggtgctcgccttggacgtttacaatgacaagatcaagcacctcctcgagcctgactctctcccttgggctggccgtattcagttccaccgacttaacatcaagcacgattctaggctcgaaggcctcatcaagatggcagatctcacgataaatcttgctgccatctgtactccggcagattataatacgcgtccactagacacgatttacagcaattttattgatgcacttcctgtggtgaagtactgttcagagaacaacaagcgtctgattcacttctctacttgcgaagtgtatgggaaaacaatgggaagctttcttcctaaagattctcctctccgtcaggatcctgcctactatgtccttaaggaagatgcctccccctgcatttttggctctatcgaaaagcagaggtggtcctatgcttgtgcgaagccattcattgagaggcttatttatgctgagggggcagagaatggccttgatttaccattgtgagacctttaactggatgggactaggatgga

SEQ ID NO: 13249 - DNA, 1370 bp, Gossypium hirsutum
  Clone ID: GOSHI-09MAY01-C2195_1
ttttggctctcacctctgcccgcgcgtccgcccgcgcgccccgcacaaggggctcgccttggacgtttacaatgacaagattaagcacctcctcgagcctgactctctcccttgggctggccgtatccagttccaccgacttaacatcaagcacgattctaggcttgaaggcctcatcaagatggcagatctcacgataaatcttgcggcgatctgtactccggcagattataatacacgcccgctcgatacgatttacagcaattttattgatgcacttcctgtggtgaaatactgttcagagaacaacaagcgtctcattcatttctcgacttgtgaagtgtatggtaaaaccatccgaagctttctgcctaaagattctcctctccgtcaggatcctgcctactatgttcttaaggaagatgcctccccctgcatttttggctctattgagaagcagaggtggtcgtatgcatgtgcgaagcagttgattgagaggctcatttatgctgagggggcagagaatggcctcgagttcaccattgtgaggccttttaactggattggaccaaggatggatttcattcctggcattgatggtccaagtgagggagttccaagagttcttgcatgctttagtaataatctccttcgccgtgagccacttaagcttgttgatggtggccaatctcagagaacttttgtttacataaaggatgctattgaagctgttctcttgatgattgaaaacccaggcagggccaatggtcacattttcaatgtgggtaacccaaacaatgaagttacagttaggcaacttgctgaaatgatgactaaggtctataccaaggttagtggagaatctgcactggagactccaacaattgacgtcagctccaaggaattttatggcgagggatacgatgatagtgacaagagaattccagacatgaccataataaataaacaacttggttggaaccccaagacatcgctttgggacttgcttgaatctacactgacctaccaacacaggacttatgctgaagctattaagaagtcgatggcaaaacctacttcatcctaagtaagcaaacgaacaaacaaaaattttaaagatttgcctaagcaaggactcgcataaaatgtgctttattcgcaaatgtttcaatttcttttatactttcatttaggaagtcttaaatatatacatatccagttgtttttttttgttatatgccaaatattatttgctgtctttccttgtggtgatagctcactgttagctatgttctcagtatggaattatgtggagacattattagatttctattagggaacgatatttttttattacattatattttatt

SEQ ID NO: 13250 - DNA, 652 bp, Gossypium hirsutum
  Clone ID: LIB3583-022-P1-K1-G3
attggagactctattgacatattcagcgcttgaaacaactgctcccgttcagcaaaatcctgactctggtaactgctcatcagattatgaagggagtttgctgaatgatttctctgattttgatagtttttctgagaccgaggaaattattagtcctagttctgaggaggggagaaaattgttacacttgacaaaaatggggtactcagaagcggaggcttcagtagccatggagagatgtggtccagactccacaattgaggagttaacggactttatatgtgctgcgcaaattgcaaaggctgctgatgcactttttccacttgaagacaagaagccattcagcaatggctctagtcacaagaagaggcgaaactggggttatgatttgttgttaaggaagaagaagcttaagcttgaaaagaggtttgatgaagatgatgatgtagttcatcttcctaatcctatgattggttttggggtccccaatgaacctgataagatcactcatagagtacttccagaagcagctttagggcctccatacttctactacgagaatgtagcacttgctccaaaaggtgtttggaccaccatttcgcgcttcttatatgatgtggagcctgagtttgttgattcaaagttcttttgt

SEQ ID NO: 13251 - DNA, 523 bp, Gossypium hirsutum
  Clone ID: LIB3582-029-P1-K1-F6
cccacgcgtccggtttttctgagtccgaggaaattatgagtcctagttctgaggaggggagaaaattgttacacttgacaaaaatggggtactcagaagcagaggcttcagtagtcatggagagatgtggtttgtgttatctcattcatttttgcaatatattcttgttgatggttggtaggatgtcaaagtttcatttggacagtataaaggatcctagactcttcaattgttgtattgaaaatggtccagactccacaattgaggagttaaccgactttatatgtgctgcgcaaattgcaaaggctgctgatgcactttttccacttgaagacaagaagccattcagcaatggctctagtcacaagaagaggcgaaactggggttatgatttgttgttaaggaagaagaagcttaagcttgaaaagaaggttgatgaagatgatgatgcagttcatcttcctaatcctatgattggtttcggggtccccaatgaaccagatcagatcactaatagagtact

SEQ ID NO: 13252 - DNA, 711 bp, Gossypium hirsutum
  Clone ID: GOSHI-09MAY01-C2115_1
cactatgtttggttcaatggaattgctattccattacgacacggttcaaaacttttaaggaaaacagccgtggggttggctgaatgctcaaaacgtcgaatggagattgcaggttcattctaaaaatcgccgaatagccattccggggaggaggtgccgaatggctattccaacctctccatcgaatgaccctttttttctcctccaaaaataccctttcttagattaaattttctctaacggtttcaacttttgttttcttttggtcattcgacaatctcaagctcaaatcaatctaaaaggaagcagatcaacttgaaggccaaatcaactagattttgttgtaagttcaattcaactagggtttgttttgcattttgattgattttttttttgtttctgatgatttgtccaaggggaattgaaatggattctgcaactgttcacgaggagatcgattcattattcgagtcaactcctcctctcaaagattcggctaaaatcatagacaaattgaatcaagtcatccaatttgattctccttcaggagaaggaaaagggaggagggtagaggagctgctaaaacgatgcccaaatcttaagaaaattattatttttagggttatttcaaaagccaagccacacaaggaatgccagatgtatttcaccattgattcaacattctatgtttcattcacaattatgttatat

SEQ ID NO: 13253 - DNA, 674 bp, Gossypium hirsutum
  Clone ID: LIB3583-022-P1-K1-D5
cacggatcaaaactccacgataaaacagtcgtttggtttgttgaatactcaaaacatcgaatggggattccaggttcattctaaaaatctccgaatagccattcaggggaggaggtgtagaatggctattccaacctctccatcgaatgacccttcttttcccctccgaaaataccctttcttagattgaaatttctcaacagtttcaactttttttttcttttggtcattcgacaatctcaagctcaaatcaatctaaaaggaagcaaatcaacttgaatgccaaaccaactagattttattgtaagttcaattcaactagggtttgttttgcattttgattgattttttttttgtttctgatgatttgcccaaggggaattaaaatggattctgcaactgttcacgaggagatcaattcattcttcgagtcaagttctcctctcaaagattctgctaaaatcatagacaaattgaatgaattcatctaatttgattttccttcaagtacagtacctgaagctaatcgattctgcatatgttcatacgttttcccctaccgaatatttgtttgtatatgtaaatcgtttcgtatttttcaggagaaggaaaagggaggagggttaaggagctgctaaaacgatgcccaaatcttaagaaaattattattttta

SEQ ID NO: 13254 - DNA, 626 bp, Gossypium hirsutum
  unsure (1)..(626): unsure at all n locations
  Clone ID: LIB3584-008-P1-K1-D1
ttctgtccacgcgtccgcccacgccgtccggggggattccgggggtcattctaaaaatctccgaatagcccattcaggggaggaggtgtagaatggctattccaacctctccatcgaatgacccttcttttcccctccgaaataccctttcttagattgaaatttctcaacagtttcaactttttttttcttttggtcattcgacaatctcaagctcaaatcaatctaaaaggaagcaaatcaacttgaatgccaaaccaactagattttattgtaagttcaattcaactagggtttgttttgcattttgattgattttttttttgtttctgatgatttgcccaaggggaattaaaatggattctgcaactgttcacgaggagatcaattcattcttcgagtcaagttctcctctcaaagattctgctaaaatcatagacaaattgaatgaattcatctaatttgattttccttcaagagaaggaaaagggaggagggttaaggagctgctaaaacgatgcccaaatcttaagaaaattattatttttaaggttatttcaaaagccaacctacacaaggaatgccagngggagtgtatgcagtatccatcgntggtcctttttcct

SEQ ID NO: 13255 - DNA, 1036 bp, Gossypium hirsutum
  Clone ID: GOSHI-09MAY01-C2125_1
cccacgcgtccgctccatctttgcttcctgtttctctttctcagtttcttcttcgatcctattatttgagtatttgagtaacagcaatggcagacaagccaagccgagccttgattttatacggtgacgggttggcccgtttcattcacccatcacatgcccatctccactctctcgcatctacagccaactgtggtttcttgagcctccctaatgctcctccttcagaaagcgaggatgataggacagtaagagagtttgctgtgctggtggatgcctttgagacattgaacaagaacggccaattttctagtgaggtcaagtctcaaaagtcatctttgattccaaccatgtctgagaggtttatgggaatgaaagctgctatattgagtaacaattctggtttgcagtcttttggagaaaaacttggcttcaatgtattgaacttggatggactgtttggaaatagtaatactccccctgtttcatcgattgataatttggcttctaagttgctggccttacttgcattccaggaagggaaggtaacggaatccaaccagttcgatttagtgattttgcatggtgggtctggggagaacttgagtgctaatagtggcaatgatgtggaattcttgaatgctttgcttggtgctattatgagtatagctaagcctggaactgaaattcgttctcgtctactcttgtcccttgtaatgagctatgggtctgtgtcaaaggctgatgagctgggtttgtccattttgagcactaaatatgagaagaatcctaatctttcagcacttttccctaatcagagttacaccatgagaggggaaagtcaaagaaatgatgttaggcagtatggtccaatgttatttgctcaatatcagtatgctgtaacccgcaaggatatggtagagactttttcttttgaagaatttaaagagtgttcaggaaatcttactataccggctgaccggttgctgcatgagatagcatttaagctttggaaggcgcccaagtatggtgccta

SEQ ID NO: 13256 - DNA, 678 bp, Gossypium hirsutum
  Clone ID: GOSHI-09MAY01-C2075_1
tgcggcgcgtgggcgggcgcgtcttctgctaatagctctctctgctttgaacctttgtaagtgaaaaaaaaatcaaaaatcaaaaatagttaaatgaagcttcaaaaatggcgttaatggcaactacacgaacccaattatctaggttcttaacccggacactaacacgaccgggatttatagccttcaacggctcgattcggcggccagatgcaccaccgcttcaccgcaacttctcctcctccgccgcagccgcagcggtggtgcctcaaagagagccgatgggagttaaagaatatgaggattatagacgatctctttacggagacatcactcataaagctctccttgttgatgctgctggaaccctcttagctccgtctcagcctatggctcagatttatagagagattggtgagaaatatggagttcagtactctgaagctgagatattgaatagatatcgaagggcttatgctcaaccatggggtaaatctcgtctcagatatgtgaatgatgggaggcccttctggcaatacattgtgagttcttccacaggctgctcagatgctcagtacttcgaagaagtttataactactataccactgacaaggcttggcatctatgtgatcctgaggctgagaaagtattcttggctcttagaagagctggtgtaa

SEQ ID NO: 13257 - DNA, 641 bp, Gossypium hirsutum
  Clone ID: GOSHI-09MAY01-C2395_2
accgggaaagacgggccgggccgacccgtccggtggaatgcaaggccgttaataaagctgtaaatatgatccccgcgcccccggagcaagttggtggaatatatgttgtgaccgctgaccatggcaatgctgaggacatggtgaagaggaataagtccgggcaacctctttatgacaagagtggcaagctccaaatcctcacttcccacacttgtcagcctgtgcctattgcaatcggaggtccaggattggcagcaggcgttagattcaggaatgatgttccggatggcggacttgcgaatgtggctgcaactgtcatgaacctccatggttatgtagctccaaatgactatgagccaacactcattgaagtagtgagcaattagaggcatatgttgcggtcgctgaatgggctaaacgagtttagaataaggatatatttggttcaaaaaaaaggtagtattttggtagacatatgtggtattgagtatatttccccaatgtgttgggaaaatttttgggcttcattgccccatttttaagaacatgggatcgaatgttgaactgatttgcactatgaggtctttttatgattggttgaaatttttaatgcccaaagattggattattttcatccctaa

SEQ ID NO: 13258 - DNA, 2214 bp, Gossypium hirsutum
  Clone ID: GOSHI-09MAY01-C2395_1
ccaacgcttcaccattcccgctctcccccctcccccccttttttttcattttgcctgatttttcgagttttagatttcttatataatcaactacctaatcctctcgctctctcaaccacaagctaactagcaaacacacacacatactaacatctatggggagttcagggcagcaagtctcctggaaattggcggatcacccaacacttccaaaggggaagacccttgctctcatcgttctcgatggctggggcgaggacaaacccgatgagtacaattgcattcatgttgctcaaactcccaccatggattctctcaaacagggtgcccctgaaaagtggagattaatcagagctcatggtaaggctgtagggctccccacagaggatgacatgggaaacagtgaagttggtcacaatgctctcggtgcaggtcgcattttcgctcaaggggctaagcttgttgatattgctcttgcctctggaaaaatctatgaaggagaaggattcaagtacataagcgaatgctttgaaaagggaactttgcacctgattggattacttagtgatggtggcgtccattcacgacttgatcaattgcagttgttgctgaagggagctagtgagcgtggtgctaaaagaattcgtgttcatattctcaccgatggtcgtgatgtattggatggttcaagtgtagcctttgtggagactcttgagagtgaccttgcaaaattacgtgagaatggtgttgatgcccggattgcatctggtggaggccgcatgtatgtcacaatggaccgttatgagaatgattgggacgttgtgaaacgaggatgggatgctcaggttcgtggtgaagcccctcacaagtttgcaaatgctgttgaagctgtaaagaaattaagggaaaatgccaatgaccagtacttacctccctttgttattgttgatgagaatgagaaagctgtgggtccaatagaagatggtgatgctgttgttacttttaacttccgagcagatcgaatggttatgcttgcaaaggcactcgagtatcaagatttcgacaaatttgatcgcgtaaaggttcctaaaattcgttatgctggaatgcttcaatatgatggtgagttgaagcttccaggccgctaccttgtttctccccccgagattgacagaacatccggcgaatatttggtgcacaatggtgtacgtacttttgcgtgcagtgagacagttaaatttggccatgtcacattcttctggaatggaaatcgctccggctatttcaaccctgaaatggaagaatatgtggaaatcccaagtgatgttggcattacattcaatgttcaaccaaaaatgaaggcactggagattggtgaaaaggctagggatgcaattctgagccgcaaatttgaccaggtgcgtgtgaacattccgaatggtgacatggttggtcatactggagatatccaggctactgttgtggcatgcaaggccgctgatgaagctgtcaagatgatcctcgatgccatagagcaagttggcggaatatacgttgtgaccgctgaccacggcaatgccgaggacatggtgaagaggaataagtccgggcaacctcttctcgacaagagtggcgagctccagatcctcacctcccacacttgtcagcctgtgcctattgcgatcggaggtccaggattggcacctggtgttagattccgcagtgatgctccgaatggtggacttgcaaacgtggctgcaaccgtcatgaatctccacggtttcgtagctccgaatgactacgagacaacactcatcgaagtggctgacaactaggctcgccgatagaacattgcctcgatttttttatatttgctctgttcctatacccaaacatcaatttagaataaggttcaaaatgttatatttttgttcttttttgggccaaaaaacgttatatttttgctagacatttgtggttgtaagtgtttttccaggaaaactttgggcttcattgcccctttctctttaaatttgacctcataattttcccttgtaatggggccattttctgatgtttgctgagggtcggccttgatcggttcgtagacaatgttattgtgatgtaatgcttcgcagacactgcgtgtattgagtttttttccccaaatataattttatgaaattaaaaatattttattatctttattatatt

SEQ ID NO: 13259 - DNA, 344 bp, Gossypium hirsutum
  unsure (1)..(344): unsure at all n locations
  Clone ID: LIB3584-055-P1-K2-A1
gtacttacctccctttgttattgttgatgagaatgagaaagctgtgggtccaatagaagaggtgatgctgttgttacttttaacttccgagcagatcgaatggttatgctcgcaaaggcactcgagtataagatttcgacaaattgatgcgtaagggtctaaattcgttgctgatgtcaaagaggtagtgagcncagccgtactgtttacccgaatgaaacatcgcgatattggacaaggcgcttgctcatgacataatgcatgaatttgatgatgtcgtttacctaagaattggaacagactgatacatagtacaatagctgatggaagtagtcattagcaat

SEQ ID NO: 13260 - DNA, 383 bp, Gossypium hirsutum
  Clone ID: LIB3148-035-Q1-K1-H5
gcagcaggcgttagattcaggaatgatgttccggatggcggacttgcgaatgtggctgcaactgtcatgaacctccatggttatgtagctccaaatgactatgagccaacactcattgaagtagtgaacaattaggcatatgttgcagtcgctgaatgggctaaacgagtttataataaggatatatttggttccaaaaataggttggatttgggaaaacatatgtggttttaagttttttccccaaatgggtgggaaaaattttgggccttaatggccccattttaaaaaaacccgatccaattgtgaaaatatttggaattataaggctttttattaatggtccaaaattttaattgccaaaagttggaataattttggtc

SEQ ID NO: 13261 - DNA, 342 bp, Gossypium hirsutum
  Clone ID: LIB3189-027-P1-K1-H5
accgtaccggaactcgcagtgttccgactcaacccacgcgtactggaaagctgtgagatacaataggagatggtgatgctgttgttacttttaacttccgagcagatcgaatggttatgctcgcaaaggcactcgagtatcaagatttcgacaaatttgatcgcgtaaaggttcctaaaattcgatatgctggaatgctccaatatgatggtgagttgaagcttccaggccgctaccttggttcttccccccggattgacacgaacattcggcgaatatttggtgcacaatggtgtacctacttttgcgtgccgggagaccgttaaatttgggccatggcac

SEQ ID NO: 13262 - DNA, 292 bp, Gossypium hirsutum
  Clone ID: LIB3146-033-Q1-K1-C8
cccacgcgtccgaccacgcgtccgcccacgcgtccgcgatttttatatattggctgtgttcctatacccaaacatcaatttagaataaggttcaaaatgttatatttttgttctttttttggccaaaaaacgttatatttttgttagacaattgtggttgaagtgtttttccaggaaaactttgggcttcattgcccctttttctttaaattggacctcataattttcccttttaaaaaaagggtaatcgagagggcaagttacactctattcatactttagctacaaatac

SEQ ID NO: 13263 - DNA, 544 bp, Gossypium hirsutum
  Clone ID: GOSHI-09MAY01-C2385_1
cccacgcgtccgctggaacaatctgctttcaatgggaggtttcctgcccaggtgaggttcaagatctatagtgcttgtttacctttgcatgagagttcctttagacgtgccattgaaaataactaccagaagggtttcaagttcaagcaagaactcaacaagcagcaggtggggagtctattgtcaatgtttcggcctttgacaacaccagtgcctggttctatgcagcctatgctacttcaacctgtggaaaatcaattgaggctaacttttccaaaggattcatttccacaaatcttagagtctcaaaagtttcagcagaccaggcttcagcaaggcatatgccatccaatggatccaaatgtaactgggttgcaactcagttatgtccaaccagtttcagaaccttctgatattcaacatcatgttccttttccagagcagcattattttggatccactgaaaacatgggccattctcatccaactatggtaaaaccaagtttatttgacacaaaatcatcaatattatatggcagatgtt

SEQ ID NO: 13264 - DNA, 797 bp, Gossypium hirsutum
  Clone ID: GOSHI-09MAY01-C2345_1
cccacgcgtacggaaactccctctcccgcataaaccctaattctcccattttgaagaaagtgaatttggcgattaataaaaaaatgccagacacgcaagctctcgtcaatgattttcttaacaagcttaaaaaacgtaagattgagggttcacaagcaacagcgaagcagacagcggaactgcttcggtcagtgatttctcaaactcgaatgccttatacaaaccaggctgctgctttgattcattcggttaaagctgttggagaacgattgattgctgcaaatcctgtcgagcttgctgtgggtaatgttgtgaggcgtgttttgcacattgtcagagaggaggatctttctctgacaacagctgctatggctggattgaacttatctgctgaaagtgacgatgaagatgacactgatagagacaaccacccagcgttatcggctgctgccattgctgctgcttctagaagcactttacgtccaccttccttgcagacattacttgaggatgtgcctgactctgcagcagttcctcatacatcttcttctggcggagattctgaaggaaaaagcaaatctgctgacaaaagttcaagaagtcggaagctgaagcatgatgtcattgaagcagtcaatgagcttattcaagacattagtacttgccacgaactgattgctgagcaagcagtagagcatatacatcaaaatgaggtgatattaacttaggcagttcaagaactgtgttggaatttctttgtgctgcaaaagagaagaaacgatcatttcgggtatttg

SEQ ID NO: 13265 - DNA, 831 bp, Gossypium hirsutum
  Clone ID: GOSHI-09MAY01-C2375_1
cccacgcgtccggtaaaaaaccctgtaaaacaaagggtttttctttttctttttctctctgaaggaaatagaagaagaataaaaggctgcgtgatcagagctttaaaatgggtgggggaaaatggcttgggatttaattttctgggttgtctgtttcttcatcaacattgctcttcttgcttcatccttctatcagttgttatcattatcagatcttgaggctgatcatctgaatcctttcgaagcttcgactcggattaattcgattgttctcccggagttccttttgcaaggatttctctgcatttctttcctgctcacctggcattggttcatgtttcttttcactcttcctattgctgcttatcatctcatgttgtacttgaatcagaagcatcttcttgatgttactgagattttcagagatcttaatactgagaagaaatatcgttttatcaagttggccgtttacttattgctcttcactgtagttttgttcaggctagtgataactgcgttcaactctttacatgatgaagttgatgtgcatgcattttgattacttggcagtgtggtagttggtatttgtaagtctgtgttgaaagtgaaacctagctaactgcagtagatgttccaacagttcatagtttgattagtttcctgaatgggttttcacttcggctgattgatgcacagcgtaggttacctacataaatcttccaagttttgtaaaaccgagtgaaaggagtggcatcttcctaaagcaatgggttactccagtatgctttttttcgatctcaaagaaggagaaaaccatgctatgcttatcac

SEQ ID NO: 13266 - DNA, 773 bp, Gossypium hirsutum
  Clone ID: GOSHI-09MAY01-C2365_1
cccacgcgtccgggggagatgaggaatggatggaaggacaacatgagaaactggaggatgatgtgaatattgattctcacatcttgtctactccagtcatagcagacattgataatgatggtgtatcagaaatgattgttgctgtttcctacttttttgatcatgagtactatgacaaccctgagcataggaaggaacttggagatattgatattggaaaatacgttgctggtggtattgttgtattcaatcttgatacaaagcaggttaagtggacaaaagatttagatttgagcacagatactgccgacttccatgcacatatatactcttcaccaaatgttgttgatttggatggtgatggaaacttggacatccttgtgggaacttcatttggtttgttctatgtattggatcaccatggaaatgtcagagaaaagtttcctcttgaaatggcagaaattcaaagtgctgtaattgcagctgatatcaatgatgatggcaagatagagctagtgacgacagatacacatgggaaatgttgctgcatggactgcacaagggaaagaaatttggcaggttcacgtgaagagtctaattccccaggtctgctggtgctcccgttctgtatgcatttataatttggtattgttctgtcactttcttttcattcctgacaaattccatagcttgttatcactactgattatagttgcagtaagggatatgatatgttcatcgttgcatgccccgggtgcatgttagccatcttt

SEQ ID NO: 13267 - DNA, 1399 bp, Gossypium hirsutum
  Clone ID: GOSHI-09MAY01-C2285_1
gtcaaatcaggatggaagagcatgtggatggttgggactactgcagcttatgatgaccacaaaaacatcgtactgttagcctttgaaataatagaaaagattattcgagactatttcccattcatcactgaaactgaaacaaccaccttcactgattgtgtgaattgcctaattggaggggcgaatagtagattcaacaaagacattagtctcaatgcaattgcttttctacgtttctgtgccacaaagcttgcagaaggggatcttggctcctcgtcaaaaaaataaggacaacgaatttgggaagatttctccatcttcatctaacaagggaaaagatggaacacaagataatggaggctagtggataaggatgaccatcgctatttctggttcccgttgggggctggcttatcagaactcagctttgatccaaggccagaaattaggaagagtgctttacaagtgttgtttgaaactttacggaaccatggtcacctcttctcactacctttgtgggaaagggtgtttgagtctgtgctttttccaatatttgactatgtgcgtccgcggccgcgtgggtgctattgatccagcaggtggtgactcgcctgggcagggaattgttaatgacatggatgaacttgatcaagatgcatggctctatgagacatgtacattggcactccaattagttgtagatctttttgtgaatttttataataccgtccatccacttttgaggaaggttctctctttgctcgtaagttttatcaagcgtccccaccaaagcctagccggtattggaactgctgcatttgtacgtttgatgagcaatgcaggcgatcttttttctgaggagaagtggctggaagtaggttcttcattaaaagaagctgctaatgctacacttcccgatttttcttgcgttgttagtggggatatcatggctggaaccaatgggcatgctttgaacagccaaggtaatgaggcttctgctggttctgacacatctcatggcggttcagagagcctgagaacacagcatatttatgcttctttatcagaagcaaaatgccgagctgctgttcagcttttattgattcaggcgatgatggaaatctacaacatgtatcgaactcacctttcggctaagagcaccttagtcctctatgaggcaatgcatgatgtggcatcccatgctcacaggatcaacaacaatactatactacgttccaagcttcaagagtttggtcccatgactcaactacaagatcctccattattgcgccttgagaatgagtcgtatcaattttgccttacattcctgcagaacctgatcttggataggcctcaagtatgaggaggctgaagtggagtcccatcttgtggatctttg

SEQ ID NO: 13268 - DNA, 474 bp, Gossypium hirsutum
  Clone ID: LIB3583-056-P1-K1-C8
gcttgcagaaggggatcttggctcctcgtcaaaaaataaggacaacgagtttgggaagatttctccatcttcatctaacaagggaaaagatggaagacaagataatggagtgctagtggataaggatgaccatctctatttctggttcccgttgttggctggcttatcagaactcagctttgatccaaggccagaaattaggaagagtgctttacaagtgttgtttgaaactttacggaaccatggtcacctcttctcactacctttgtgggaaagggtgtttgagtctgtgctttttccaatatttgactatgtgcgtcatgctattgatccatcaggtggtgaatcgcctgggcagggaattgttaatgacattgatgaacatgatcaagatgcatggctctatgagacgtgtacattggcactccaattagttgtagatctttttgtgaacttctataataccgtcaaatc

SEQ ID NO: 13269 - DNA, 1240 bp, Gossypium hirsutum
  Clone ID: GOSHI-09MAY01-C2245_1
caaaagatggcggactgtctagacggcaatgttttagcagctaagtcctttgcccgtttcggcgtcacccacatgtttggcgtcgtgggtatccccgtcactggcctcgccaaccgtgcagtccaattgggtatccgttttattgcttttcacaacgaacaatccgctggttatgcggcttctgcttatggctacctcacgggccgacccggtcttctcttgactgtttccgggcccggttgtgtccacggtctggccggtttgtccaatgctatgatcaacacctggcccatggtcatgatctctggctcccccgatcagaaggattccggtcgtggagatttccaggagcttgatcagatcgaagcagtgaaacccttttcgaaattctctgttaaagccaaagatatcaaggaaattcccgattgtgttgctagggttttggatcatgcagtttcgggtcgacccggtgggtgttatttggatttaccgactgatgtattacatcagaagataactgaatccgaagctgagaaattgttaaccgaggtcgagaaaggaagggtttttgaagcaacaaaagcaccgccgagttctgaaatcgcaaaggccggtagtgtgttgagggaaggcggaaaggccattgattgttttcggcaaaggggcggcctattgcccgagctggagggggacttaaaaagttggttgaaagaaccggaatccccttttggccaactccaatgggtaaagggctggtgaacgacgatcatgagttggccgccagtgctgcaaggtcactcgccattggcaaatgtgatgttgcattggttgttggggcaaggctcaattggttattgcactttggggagagtcctaaatgggataaagatgtgaagttcattttatggatgtttctgaagaagagattaagttgagaaaacctcattaggtttagttggtgatgctaaaaaggttttggagatgattaataatgagattaaagatgaccctttttggttgggaaagtgttatactttggtgggaggctatttcgaagaaagtgaatgttaatgtgtcgaaaatggaagcttagttgctaaagatgtttgccctctaatttttgactccttgacgatattatagatgcttatttggggtgtaagtcatctctggtgtggtttactatgggcaattctatgaatttctaatgatatactggtcataccgagctagtcttaat

SEQ ID NO: 13270 - DNA, 1002 bp, Gossypium hirsutum
  Clone ID: GOSHI-09MAY01-C2265_3
cttggatggaagacagtgaaactcacaatcttaagagagaaactgtagagcaacagtatgaatcagtaagcataaaagattttcagcaaattttggagttattttggggcttataaccagagagactttcatcatgcgaaaattcttgaatttccatcatgcaggtaaaggaaaggaccttccaatttcaatgcttacgcatttggtggatcgcatgtgatggagtatgggaacacgagcattaaactggaaaagctttatttatatcaaggttttgatcctgccaccgtaaaccttcctccaaatgagctgagccccaacacccccatggaagcatttaatcagagagatgcagatattctctttttatggcatatgtacaaaaattctgaagatggatcaaagaagactgaaatactcaaacagataactgagacaaaaaggcatagaatccacttggatggcagcattgatttgattggaacacttttatatggaccagcaaaaggctctgccattctcaaatctgtaagggaaactggtttgccccttgttgatgactggcaatgcttgaaatccgtggtatgagtcaaattctcctttcgagatttaactatctgtgcattggtccttgcttataagttgcaaccatatcttgattccaggtccgcttgttcgaaacacactgtgggtcattgacacaatacggcatgaaacacatgcgtgcgttcgccaacatttgcaatagtggtgtttcccaagtcttaatgcaggaagcttgtactgctgcatgcaacggccatggtccgattcaatggcatccttcaaatcaaggctatagtgcttaattgcatttactaccattacatttgaatctttccaaagctagtcatatatgtttgtttctttctgccagtcgcatctctatcctgcatacttacaggattgtaaatgcatagcagcagtttgtatatcaagcttatgcataaaagtttttaaggt

SEQ ID NO: 13271 - DNA, 1634 bp, Gossypium hirsutum
  Clone ID: GOSHI-09MAY01-C2265_2
ctcttttcttcatttctccttcttaccctgttgctggcttttctttaaccggttcactttttatgtttaattaaaacctatggcaaaacacgattctgttttcatcaagaacccatctttgtttttcttgatattactgctttttgaggcaaatcatattgaaggagccggtcggttgaaccagtgggagtctggaatccggctgccaacagacaaaaataatgaaccggaggaactagatgagcagcaagttggaacaagatgggccgttcttgttgctggttcatctggctacggtaattacaggcatcaggcagatgtatgccatgcctatcagctgttaaggaaaggaggattgaaggaagagaacatagtggtgtttatgtacgatgacatagccatgaatgagctgaatcccagaccaggagttatcatcaaccatcctcaaggggatgatgtttatgctggcgtgcctaaggattacacgggtgagcatgtaactgctgcaaatttgtatgcagtacttcttggtgacaaagatgcactgagtggtggaagtggaaaggttattgatagcaaacccaatgacagaatattcatgtactactcggatcatggaggccctggagttctggggatgccaaatatgccattcctgtatgctatggattttcttgatgtcttgaagaagaaacatgctgcaggaacttacaaagagatggttttatatgtagaagcttgtgaaagtgggagtatctttgaaggcataatgcccaaagatcttgacgtttatgtaacaacggcatcgaatgctcaagagagtagctggggaacttattgtcctgggatggaacctcctccacctccagagtttatcacttggttaggagatctgtatagtgtggcttggatggaagacagtgaaactcacaatcttaagagagagactgtagaacaacagtatgaaatgaatcagtaaaggaaaggacttccaatttcaatgctgacgcatttggtggatcgcatgtgatggagtatgggaacacgagcattaaactggaaaaactttatttatatcaaggttttgatcctgccaccgtaaaccttcctccaaatgagctgagccccaacacccccatggaagcatttaatcagagagatgcagatattctctttttatggcatatgtacaaaaattctgaagatggatcaaagaagactgaaatactcaaacagataactgagacaaaaaggcatagaatccacttggatggcagcattgatttgattggaacacttttatatggaccagcaaaaggctctgccattctcaaatctgtaagggaaactggtttgccccttgttgatgactggcaatgcttgaaatccgtggtccgcttgttcgaaacacactgtgggtcattgacacaatacggcatgaaacacatgcgtgcgttcgccaacatttgcaatagtggtgtttcccaagtcttaatgcaggaagcttgtactgctgcatgcaacggccatggtccgattcaatggcatccttcaaatcaaggctatagtgcttgattgcatttactaccattacatttgaatctttccaaagctagtcatatatgtttgtttct

SEQ ID NO: 13272 - DNA, 914 bp, Gossypium hirsutum
  Clone ID: GOSHI-09MAY01-C2265_1
cggacgcgtgggcggacgcgtgggcggacgcgtgggcggacgcgtgggaaaaattctgaagatggattaaagaagactgaaatactcaaacagataactgagacaaaaggcatagaatccacttggatggcagcattgatttgattggaacacttttatatggaccagcaaaaggctctgcctttctcaaatctgtaagggaaactggtttgccccttgttgatgactggcaatgcttgaaatccgtggtccgcttgttcgaaacgcactgtgggtcattgacacaatacggcatgaaacacatgcgtgcgttcgccaacatttgcaatagtggtgtttcccaagccttaatgcaggaagcttgtactgctgcatgcaacggccatggtccgattcaatggcatccttcaaatcaaggctatagtgcttgattgcatttactaccattacatttgaatctttccaaagctagtcatatatgtttgtttctttctgccagtcgcatctctatcctgcatacttacaggattgtaaatgcatagcagcagtttgtatatcaagcttatgcataaatagtttttaaggtaaacggatggaagtggtgtcttcaacattgcaagtaatatttgcatgcacattaaattcaaaataatagtaatggtagtagttattttaattgcacagattatctaaatgtcttcaaattcgaggttttcaagtgttaaatgtttaaagagtatatttatatttaaaaataaaatgttcaacttgttgcctcaacaaaatttaagaggttatctttaaacacagtaagtatagtcaggtagatatatgtaaatatgatggaaagatctgtttggttggaaagacttgattgaaaagaattgaaaagatttgctggaagatttattttt

SEQ ID NO: 13273 - DNA, 595 bp, Gossypium hirsutum
  unsure (1)..(595): unsure at all n locations
  Clone ID: LIB3583-050-P1-K6-H10
cggtccgcctatcccgggtcgcccacgcttctccccgcgtccgcttntaaccnttcattttggtgggggttaaaacttggcaaaaccgattctgttttcatcaagnaacccatctttgtttttcttgatattactgctttttgaggcaaatcatattgaaggagccggtcggttgaaccagtgggagtctggaatccggctgccaacggcgaaataatgaaccggaggaactagatgagcagcaagttggaacaagatgggccgttcttgttgctggttcatctggctacggtaattacaggcatcaggcagatgtatgccatgcctatcagctgttaaggaaaggaggattgaaggaagagaacatagtggtgtttatgtacgatgacatagccatgaatgagctgaatcccagaccaggagttatcatcaaccatcctcaaggggatgatgtttatgctggcgtgcctaagtacttcttggtaacaaagatgcactgagtggtggaagtggaaagtaattgatagcaaacccatgacagaatattcatatactactcggatcatggagggcctggagttctggggatgccaaa

SEQ ID NO: 13274 - DNA, 1152 bp, Gossypium hirsutum
  Clone ID: GOSHI-09MAY01-C2215_1
cccacgcgtccgaaaaaaaaagaagagaaatcctctaaaagaagacttggggccggtcttggagtaccgtcgtgcctccgtccaggggtttgcacgcgctcacgcgcccttttctactctgccacatacggtggtcggaaaccgaaaattttcctttttccgacgcaaatcagaatggtacgttttccttttcttttttattgttcgcaatatatatatttaaaaaatattcacctttgtgtatcttgatcgactatggtactttttctgtatatatatgtagaaataaactttttattgaatctgtgtgtgtattccccctaaaaaaccgtcccttacatcctttcgattcgggctttttatggccactgaaaagaaaaagaaaaatatttacaatctttgatttatttcctgccatatttgtttcgtttctgtcgttttctttccatttttgcaggtgttcaaggagagtagaccaccggccccgcgcggcccgtcgattacggcataaggtggggcctagaatcacggcattgatgaaaggtagctgaagcgacggaatttgaagaggcacgactcttggggtgcttgcggcaagaagcttctggaaaccctagggtttccagattttgtttaggcgttgggccttgttaattttgggccgttgagttgggtcaatggtgtaatgggtattaccttgtaattgggcctcaggtagacttaaatttttaggctctgtatatggactatttaaaacagtaaacattcatttattttttattttttgtttaaggcccgggcaaatttaggttattacaaggctaacagagtagcacacggactggcgaaggagggctggaaattcgatgacccacagtactggatggaagaggttcctagcgagatggaggatctggttaatagggaccgaaatagcaacaatggcagatgaggcgttcatgacgagtccggatcgagaaatgagaatgtgattcgatgaacccgtgaaataactagaggcttgggattgaaaagttatttgctgatgacgattcagaagaagagtcttagtagcaactgatgcaacaagaaagggggctcgggggaatggcttttcatttctttttttttttttggctaaatggatccatt

SEQ ID NO: 13275 - DNA, 827 bp, Gossypium hirsutum
  Clone ID: GOSHI-09MAY01-C2235_1
caacgaagtaataagagtactgtgttgaagacaccaatgaagtattagagtactctgttgaagacactttcaactaatgaaaactgttcacgatgaccttaatttacatcaagtttggaaggaagttggttttgatttcattgtgaagaagtgcaagtcttgaagaatatcaactcaattaaaatttggctcccacaaggcaaccacgtggttttggatttgtccagtatctagatcctgctgatgctgctgatgcaaaatatcatatggatggctatgttcttcttggaagagaacttactgttgtatttgctgaggaaaacaggaagaaaccttcagaaatgagggcaagagaacgcagaaggcgctctccaccaagttattctcgatcaccaagatatgctcgaagttactcccgcagtccatactattattctcctcctcctaggcaaagacgttactcaaggtcaatttcacctggagataagagatatagagaacggtcttactcgaggtcaccctgtggctcaaggagtccaagccggagctttagtaggagcaggagtcaaagtttggactattctaggtgactgatttgaaggtggctgggttagtatgtatccgggagtatttctccacgttaattgtctagatgatttaagtttaggtttgtatcagcagtatatgagtgacttcaaagttgattgtttagtttctagtgctgattatggctagtaataaagttaaaacataagcatgctgtttgaatattctatgctgacaatgctcgccatccttaaaatgatctttattgagatttttcattt

SEQ ID NO: 13276 - DNA, 664 bp, Gossypium hirsutum
  Clone ID: LIB3583-025-P1-K1-G11
cccacgcgtccgttcattgtgaagaagtgcaagtcttgaagaatatcaactcaattaaaatttggctcccacaaggttagcagcagcataatcatatttacttaaattgtatgaagcattaacttgctatcatgatttttgtgatactctggagtcaagatcattgttgtgattttgaatatcaatgagcatgtttggctgatgaattgcaatatagtacctttatatatttatgctatgtttatgcgagctaccttttttgtgatgcaggcaaccacgtggttttggatttgtccagtatctagatcctgctgatgctgctgatgcaaaatatcatatggatggctatgttcttcttggaagagaacttactgttgtatttgctgaggaaaacaggaagaaaccttcagaaatgagggcaagagaacgcagaaggcgctctccaccaagttattctcgatcaccaagatatgctcgaagttactcccgcagtccatactattattctcctcctcctaggcaaagacgttactcaaggtcaatttcacctggagataagagatatagagaacggtcttactcgaggtcaccctgtggctcaaggagtccaagccggagctttagtaggagcaggagtcaaagtttggactattctaggtgactg

SEQ ID NO: 13277 - DNA, 609 bp, Gossypium hirsutum
  unsure (1)..(609): unsure at all n locations
  Clone ID: LIB3825-021-Q1-K6-D10
gnaaaagctcaaggaagttgggattttcttcgtctgcgattttgtaactatgcggggtagaagttacagttacagtccctcgccaccaagggattatggaaggaggcggcatcgtagccctagccctaggggtcgctatggaggtcgtggtagagatcttcccaccagtcttctagttcggaaccttcgccatgactgcaggccagaagacctgcgtggaccttttgggcaatttggtcgcctcaaggacgtctacctgcctcgggattattatactgggcaaccacgtggttttggatttgtccagtatctagatcctgctgatgctgctgatgcaaaatatcatatggatggctatgttcttcttggaagagaacttactgttgtatttgctgaggaaaacaggaagaaaccttcagaaatgagggcaagagaacgcagaaggcgctctccaccaagttattctcgatcaccaagatatgctcgaagttactcccgcagtccatactattattctccttctcctaggaaaagacgttactcaaggtcaatttctcctggagataagagatatagagaacggtcttactcgagctcaccctatggctc

SEQ ID NO: 13278 - DNA, 809 bp, Gossypium hirsutum
  Clone ID: GOSHI-09MAY01-C3995_1
gtgtacagttatacttaccgctatatttttcattgaaatacttcaaagaaaaaataaaaataaaatcattttcaggacaaaattttcgtgtatttggcagttgtcggaactctgatcgattcttatagcagccaagattgatggttgttgactaaaactaaccaaaaaaaaaaaagttttcgcttcacctttttaatctgtcacgtttcattgactaatttggccgataaaatcaaacattcatctgagtgttttaaaattttgatttgggcttaatcaatctctgctttttctcggtttcagctgccatggctaccgacccttcaccccaaatcccaatgagggccagttcaaagagctcaaacaattcgatacacccagtggatgtggaaaccccacctgttaggactccaacaccaatcatttacagagaaatcaagcatttcaagaaatggataccttggttggttcctgcttttgttgttgctaacactgttatgtttatcatcaccatgtacgtcaacaattgtcccaagaattccgtttcttgcgttgctgatttcttaggcagattctcctttcagccttttaaggagattccttttctgggtcctccctcccccaccctgctgaaaatggggcctttacatgtgaaggaagtatttgatggagaccaaggatggcgtctcatcacttgcaattggttacatggaggggtgtttcatttgctggcaaatatgttgagtcttttatcattggaatccggcttgaaagataattcggattcatacgggttggattgatatatt

SEQ ID NO: 13279 - DNA, 673 bp, Gossypium hirsutum
  Clone ID: GOSHI-09MAY01-C3955_2
cccacgcgtccgcccacgcgtccggacaggggggaggggtcatttaattttactcttaaaaactaaaacgaaaattcccctttgcaaatccctcgcgtccctcctcgcccgctctctcacaccgtctccttcccttttccctgcctctctgctactcgatctccacactgcaacacggtggctctttcaaagagaagacaaagaaaggaagaaaagtatcagcccggattatggacggcggtgttccgtacaacccacgtacagtcgaagaaatctttcgagatttcaagggtcgtcgagctggcatgattaaagcccttactaccgatgtggaggagttttaccagcagtgtgatccagaaaaggagaatctttgcctttatggattccctagtgagcagtgggaggtgaatttacctgccgaagaggtacctccggagcttccagagcccgcattgggtattaactttgccagagatggaatgcaagaaaaggattggttgtctttggttgctgtacacagtgactcgtggttactctctgtggctttctattttggtgctaggtttggatttgataaagctgataggaaacggcttttcaatatgataaatgatcttccaacagtattcgaagtagtaacaggagcagctaagaaacagacaaaggagaa

SEQ ID NO: 13280 - DNA, 1169 bp, Gossypium hirsutum
  Clone ID: GOSHI-09MAY01-C3955_1
ggaccgtggggaaactcccatttctttcaaaattccgcttccatctcctctctgtcttttccttccttttctcttcacccacagaaagaaaggggtctcactcaaatgctctgctactaaaaacccattttttgcaatcatctttccttccttctctctctctctctctctcaaacaaaaccagttctcttccaaagaatcagtctgggttatggacggcggtgcttcctataacccacgtacagtcgaagaagtctttcgagatttcaagggtcgtcgagctgccatgattaaagccctcaccactgatgtggaagagttctacaagcagtgcgatccagaaaaggagaatctttgcctttatggatatcccagtgagcagtgggaggtgaatttacctgctgaagaggtgcctccagagcttccggagcctgcactgggtattaactttgccagagatgggatgcaagaaaaggactggttgtctttggttgctgtacacagtgacgcgtggttacttgctgtggctttctattttggtgctaggtttggattcgataaagctgataggaaacgccttttcaatatgataaatgatcttccgacaatatttgaagttgtgacaggggcaactaagaaacagacaaaggagaaatcgtcggtttcaaatcatagcagcaacaaatctaaatcaaactctaagcgacgttctgaatctcagcccaagtattcgaaggcagcagcatcaaaggatgaggttgaagatggcatggaagacgaagacgatgaggagcatggagagacgttatgtggggcttgtggagagaattatgccgctgatgaattctggatttgctgtgatatctgtgagaaatggttccatggaaagtgtgttaagataacaccggcaagggcggagcatattaagcagtacaaatgcccatcttgcagcaacaagagagcacggccttgacgatggttgttggggtggctgttttatgtgaattctggcattgtgggactgctaactgtctagtaggggatgtagtgaagtttgatgttagttaatgtgacgttttaatgtaggagatctgtgtttttacttttgatatgtaggtggtgaactggctgtttgatttgattataaaataggataattataatcagtt

SEQ ID NO: 13281 - DNA, 702 bp, Gossypium hirsutum
  unsure (1)..(702): unsure at all n locations
  Clone ID: LIB3543-038-Q1-K1-C2
aaggggnntctcactcaaatgctggtgggcggtagagaaacccattttttgcaaacatctgctccgttccttctctctctctctctctcgtctctcaaacaaaaccagnnttctcttcgaaataatcagtccctggggttatggacggggcggtgcttcctataacccccacgtaccagtcgnaagaaagttctttggggaggggggcaaggngnntcgtcgagcctggccccatgattaaaagccccctcactactggatnggtggaagnnagttctaccaaggcanngtgcgatccccagaaaagggagnaanntctttgcccctttatggggatatcccccagtgagccccagtgggagggtnngaatttaccctgggctgaagaagggtgnncctccagnagnncttccggnagcccctgcactggggggtatcaaccctttgcccagannatgggatgcccaagaaaagggacctggttgtnnctttggttggctgtacaccagtgacccgcgtggttaccttgnnctgtggctnnttctattttggtggcctaggttnntggattcgatnnaaagctgacagggaannacgccttttcaatnnatgataaatggannccttccgaccaatatttgnannagttgtgacagggngnncaactaagnaaacagnacaaaggnagaaaatcgttcagtt

SEQ ID NO: 13282 - DNA, 828 bp, Gossypium hirsutum
  Clone ID: GOSHI-09MAY01-C3965_1
ctaataggttgcttttttgacaccatttcaaaatcccctataaatacatatatactctgactgtccaaacactccgctatatcaccgatccaatcaatcgcttcaactatctcaccaaacacatatccaatggctccgatcgctgtcggcgacgtgttaccggacggtactctctcctacttcgacgccgatgataagctccagcaggtgtccgtacattccctggctgccggtaaaaaggttatcatctttggcgttcccggtgcctttacccctacttgcagcttgaagcatgttcctggattcatcgagaaagcaggggagctgaaatccaagggcgttgatgaaattatttgcattagcgtgaatgatccctttgtgatgaaggcatggaccaaaacttaccctgagaacaaagatgtcaagtttctagctgatggttcagcaacatacacccatgcccttggtcttgagctcaaccttggcgataaaggtctcggcactcgttctaggaggttcgcactcttggtcgatgacctcaaggtgaaggcggcaaatgtcgaatctggaggggagtttaccgtgtcaagcgctgatgatatccttaaagctctttagatttgctttgtgcctaataaggtctatgttttcttggcctcggctattaatatagattgctttatttagcacaccttttatggtattgttaataataaaatacgtctcttggaggatgtaagatcgaacgtgtttaagagcgaatatgttccgttttgtatcgaagaaccatgttccgttttgtgtcaaagaaccaattacttctttctt

SEQ ID NO: 13283 - DNA, 664 bp, Gossypium hirsutum
  unsure (1)..(664): unsure at all n locations
  Clone ID: LIB3828-026-Q6-K6-E11
ccgggttcgacccacgccgttcgttttgngcgttcccggtgccctttgagcgggggctgggggggtgggaaacatagttcctggnnattcatcgagnaaagcagnngggagctgaaatccaagggggcgttgatgaaattatttttgcattanngcgtgaatgggatcccttnnngtgatgaagggcatggtaccataaactttaccctgagnaacanaanatgtgcaaggggggctgagctgnnatggttcagcaaccataccacccnnatgcccttgnngtcttgagnnctcaaccttnnggcgataaaggggtctcggcactttcgttcttaggagggttcgcactttcttggtcgatgaaacctcaaggtgaaggggcagcaaatgtcgaatnnctggaggggagtnnttaccgtgtcaagtgctgatgatantccttaaagctctttagatttgctttgtgcctaataaggtctatgttttcttggcctcggctattaatatagattgctttatttagcacaccttttatggtattgttaataataaaatacgtctcttggaggatgtaagatcgaacgtgtttaagagcgaatatgttccgttttgtatcgaagaaccatgttccgttttgtgtcaaagaaccaattacttctttctt

SEQ ID NO: 13284 - DNA, 1621 bp, Gossypium hirsutum
  Clone ID: GOSHI-09MAY01-C3845_1
tagaaatatccaaccacaatcttctaacctcgactccgaattcggtttcctcttttcttttacggtggttgtttgcggtgggtggacaacgatcatgatcgccgatcctaaatcttgtgacgttctgttggttttcgttttatttgcgattatatcctcttccagcgccttggtttccactccctatcctaaggccatttctgatttaaaagaggcagttgtgaagggattgggattccaagccgatgattttaagatttcagggttcgatctcagagatgcccttgtgggccattctgtggcatatgaattcgacattgaaatcgataacaaagtgattccttttaagctcttggaggatgtaaatcgttgggaatatgttgatttgcctatttttagggtggaagagccagctagacccggagttgaaaatgggttggtggtagcataagaggatatcggacaatgggggacccgttttggccccgtttcagctggctggacccatggaactctggatccaagatgccaaagatatgcgaatctccttgccccatgatgtggatgctggtgtcttgaaaaaggtaatgttagcagatggcgctgtggtaactgtcaagggtgcaagatcagttagcctgcgccatccaattgatcttccgttacctcttaacagaactcataatggattcgcatctggtcttatggctcttgccgagcatcttcgtcgtgcttcttgcggccaagacgccccactcctttctcgtcgcattgttggcccggctgcccttactgtcccatcttcttaaataacaagttgaagcttaagcgacttgcacctggtcttgtggaattatcttcaatgtctaaaactaagaccatggatgccctctccactattgatttacaaggagaagccgctacagttctaaccccaaagcatttctctacaatgtggccttttgcgtccatcaatggttccaatgctaatttaattggtttcgagagactgctatcgtctgtgctggattcaaaggcaaacaagaaaggatactttaagttactgaaggctgatgtgtcagctcaaacatttgtgaagattggttttgggatcgagaagaagttgaaagaaagagatgggtttaattttgagggctttccagagtggaggacaaagcctgagatagtgagtatgcattttggggtactggctaaggttgatggcgagactgttataccggagagaatcaatgcaggttaaccctgttgctgccgaggatgcaattgcaccacctgtgctagcaaggaacatgaccatgtcttccacacctgttgtttacactccttcaaatcccttcaccttgtaaattgttagagggaaaaggatcaagagtctaaatagttatacagaacggtaaaggtgagatgaatcgattattctattccgtgtgccctcattaacatatttaatataaaggtaaagatgaatttatattacaaaaaaaaacccgcggttaaaaaatttaaaaattttatactttttccctaaaaaaaaaaaaaaagggtaatggtttttaaggggtttcaaaacaaatgggtgaaaaaaaaagggtattttctt

SEQ ID NO: 13285 - DNA, 858 bp, Gossypium hirsutum
  Clone ID: GOSHI-09MAY01-C3865_1
cccacgcgtccgcggacgcgtgggtaggtttccatatcttacattctcgcttcaatatccttcgttatatggctgcttgcttgctggcaacagtacaaagccaggtatccaatatttggttgcaatcctgagactccaaaccagaaattaagcagaaaatggcttccaagttaggtttagctggtggaattccggagcgtcgggttcgacccatttgggacgccatagattctcgacagttcaaaaatgctctcaaactcaccaccactctccttgccgggctgccccattctccgtacgctcttgctctcaaggctttgattttggaaaggatggggaaaaccccaccaagcattatctgtttgtttaaatgcgaaagagcttttatataagaatgagtccttggtaatggatgatcttactcttagtactgctgcgaattgtttttcaacgactcgaccacctggagttggctactagctgttacgagcatgcttgcgggaaattcccaaacaatttagagctgatgatggggcttttcaactgttatgttcgggaatattcgtttgtaaagcagcaacagccatcaaaatgtacaagctcgttggtgaagaaaggtttttgctctgggctgtttgtagcatccagttgcaggtcctttgtggcaatggtggagagaagttgttactcttagctgagggtttactcaagaagcatgttgcttcccatggtttgcacgagcctgaagctcttatagtctacttttcaatattggagcaacaagctaaatatggtgatgctttggatattcttggggggaaactaggatccctcctgatgattgaagttgataagcta

SEQ ID NO: 13286 - DNA, 588 bp, Gossypium hirsutum
  Clone ID: GOSHI-09MAY01-C3805_1
acgatttttctaaatcttctaaatccgttgattgttttcctaagtgttgcccccaactgtaaaaacccccttattgagcgtattaaatttgattgaaaagctgcgagcattaaatgtgatcatgaaacttgattgttagtttgtgccttttaagcattcaatccaaaaccagtttctaaagagacctaaatataacggccttgtgaacccaaactaaatccttgcggcataacacctttaatgacttccatttcatctttaggattggcttttcaattgaaacaaattggtctacacatgaacaacacatatgggcttaacataataactaaatatgggatattatagaatgttaagcaaagaactcaaaatcaactaatagatgattgagaggccccacttgagtttgacataaaaaaagatctcaatttagctgataacacctgttggtaccttttcattgggacatgattagttagagatgctaattttggtttcgagtattagctaaatcttttgtgagattttccattgaatcggaacaagaaagaatattcaattcccactctcgtcacgcctgagtaatta

SEQ ID NO: 13287 - DNA, 854 bp, Gossypium hirsutum
  Clone ID: GOSHI-09MAY01-C3545_1
tgactgttaacatcaaagcgtgaggaactgggtattaagcaatcaaggcaactaataccagtgacgccttctatgcctaagggttctgttctaaattcagcagataaatcaaaagccaaacctgcagccagaataagtgagacaaatgtagctgtcaagagtggaccgcagccacagcctttgactcatcaaggtaatcagtctcctcatggtggacatgtcaagtccgatatgccaaagacatctgggaagcttttggttctcaaaccaggatgggagaatggggtctcgtctcctactcaaaaagatattgctagttcagcaacaatcacaaacaacagggttactactagccaacatgctgttgctcctattaaatctgctcctgcaagaaactcaaacagccccaagctttcttctggggaactcaaggcagcttccattaatccaatagctgggttcactggggaaaagagaccttctttggctcaaacccagagccgaaatgatttttttaatctccttgaagaagaggacctcaacaaacacttctgctgggctttcagatccggatcctcatatttcaacttccactacagagaaatctgaagttacaaaggaagtagacggggcttctgcaactgctcatgctgatgagaatggtactgcagctgctagcaatggtgacacctgttctgatgatggggaaaagaacatgagtgctactgctatggtttatcctgatgaggaagaggctgcattccttcgttctcttggttgggaagaaatactggtgaggatgaagggcttacggaagaagagattaatgcttttatcaggagtacatgaaactg

SEQ ID NO: 13288 - DNA, 640 bp, Gossypium hirsutum
  Clone ID: GOSHI-09MAY01-C3565_1
aaggaatgtaaatcgcaaagaaaaaagggtcaataatatttgctggactccctccatgaccgtcggtgtgtcaaacagaagcagagcacctgttctggtcggactcttttggtggtttgttccgatgttcaaagattttggttattggatctcattttcttctcaatgttgacgcgtctgcagagtaacaaacttttctccaaggttcttctgagtcgttacaaaaatgggtttcccaatcttatctctgggtctcaatttttaagaggttttaacgagattgcaaagcatgggttttctgtaatgtcgggtgataatctacggagcctatctaacagtgcttccccgaggaattaccgagtcgtagtggctgcaactcgtgaaatgggaatagggaaagatggcaagttgccatggagattgccttctgatctcaaattcttcaaggaacttacagtgacaacatcagatcctgagaagaagaatgctgtagtaatgggtagaaaaacctgggagagtattccacttgagtttagacctttacccggtcgcctgaatgttgtccttactcgtttccagagttctgatattacaactggagaaaatgttgtaatatgtgggagcattccatcagctttcg

SEQ ID NO: 13289 - DNA, 676 bp, Gossypium hirsutum
  Clone ID: GOSHI-09MAY01-C3445_1
gttttattaggactatgccccatgctctatttgttgttttaaatgggtacgaggctcctagcacctttagagaactagaactcaagttctgtcttgccttacccccaatagttgcttctagttttttcttccaacaagaatatttaatatcctgatctaaacaaaggcttaaattcctacttaggaagtgggtagactacgacaatgtttctgcctaaaataccagagcgaggtcattacctataggcaagtgaagatttagtaaaatgatgtccttttgtcggtgatggataccccacgtaaaaatgccaatattgataaggactacgataaccttgaacaataagtaaacaaagcatagcttgactgcctggttttggctttgagggcttgcttttgggtgggttgtgctggaccaagcatggctcccttttggtaattagggttggatctagtcgaatgatattgcccatattttgtgccgggtcaggggcctagacaaacgtgaaaggtgttagtatcctgtctaggctctacttgtgagcaggcctacctatgaccaaactattacttaggttgtaacttctacttgacttccatccccctcccaataattacttttgataacctccgtctcttccactactcatgattggtgttactttcatattagtgc

SEQ ID NO: 13290 - DNA, 815 bp, Gossypium hirsutum
  Clone ID: GOSHI-09MAY01-C3475_1
aaaaccctttttggagttgcataagcagagcaacgcagtcgcttttttggggttttttcttcttcttttagacaaaccttaatcgtcgaagatgccgaagtccaagcgtaacaaaatagtttcattatcaaagacaaagaagaagggtaaagaacataaagaatcaattgtgaatgccataagggaagctgcggaagattacaattccatctatgttttctctttcgagaacatgagaaatcttaaattcaaagagtttagagagaagctcaaacctaccagcagatttttccttggttcgaataaagttatgcaagttgcactaggccgttctgtttctgatgagattagaccaggtctttacaaagtctctaagcttctgcgtggggatgctggactttttcttaccaacatgcccagagatgaagtcgaaagctgctttaataaatttgaagaaaatgactttgcaaggacaggaaccattgcaactgaaaaggtggaacttttggaaggtcctttggatcagttcacacatgagatggagccatttttgcgcaagcaaggcatgcctgttcggttgaacaaaggtgttgtagaacttgtttcagactttgttgtctgtgaggaaggaaaacctttgtcacctgagtctgctcggatactgcgcttgttggggatcaagatggctactttccggctaaacttgatatgcagatggagccctgaggatttcgagctttataaaggactagatgaatcggacgtagaatgtgcctaaaccaacattttcagagtgaatatgatctcattaatgt

SEQ ID NO: 13291 - DNA, 686 bp, Gossypium hirsutum
  Clone ID: GOSHI-09MAY01-C3415_3
tcgtacatgcttaaaaccttactggtctctgccagtgggcgggagctttgggtggatttaatgcccatgccagtaacatcgtgactgcaatctacatagctactggccaagacccggctcaaaatgttgagagctctcattgcatcactatgatggaagccgttaatgatggaaaggaccttcacatctctgtcacaatgccttctgttgaggttggcaccgttggtggtggaactcagcttgcatctcagtcagcctgtttgaacttgctcggcgttaagggtgcaagcaaagaagtagctggagcaaactcaaggatgcttgcaaccattgtagctggtgccgtcctcgcgggggagctgtcactcatgtctgctcttgcagcgggtcagctggttaagagccatatgaaatacaatagatcaagtaaggatgtgtccaacctttcttcctagatgaaacattgttaaaggtatattattgtagtgttgttgcaaatcccatgctatgtatgtatggaatctgaccatctctttgtaattttctttattcgttttgtattttgttcgtttatttcttattgtttgatatccaagaaaaagaaactagaagagccatgtaatctgataattgtgtaaaaaatgacagaatcgttaattattgtttttgtcttgtttacatattat

SEQ ID NO: 13292 - DNA, 914 bp, Gossypium hirsutum
  Clone ID: GOSHI-09MAY01-C3415_2
tgaaaattggctttttggtggttgcagatcaagtagatttggcaggctccagggtatcaaatgtgcaattgctggaaagaatctgtatattagattcacttgcagtacaggtgatgctatggggatgaacatggtttccaagggagtgcaaaacgttttggatttccttcaaactgatttccctgacatggatgtcattggcatctctggtgagtttcatttttttgtataggcttgcaattatgtctttttactgtccgacataggatcactgatatttatgaatttgtgcatataggaaactattgttccgacaaaaaaccggctgcggtaaattggattgaaggacgaggcaaatctgttgtctgtgaagccaccattaagggtgatgtggttaggaaggtcttgaagacaagtgtggaatctctcgtggagcttaacatgctgaagaaccttactggttctgccatggctggagctctgggtggatttaacgctcacgccagtaacatcgtcgctgctgtctacatagccaccggccaagatccggcccaaaacgtcgagagctcgcattgcatcaccatgatggaagctgttaatggcggcaaggaccttcatgtctctgtcacaatgccttccattgaggttggcactgttggtggtggaactcagcttgcatcacaatcagcttgtttgaaccttcttggtgtcaagggtgcaagcaaagaatcccctggagcaaactcaatactccttgcgactatcgtagccggtgctgtccttgccggcgagctgtcactgatgtcagcacttgctgccgggcaactagtgaaaagccatatgaagtacaataggtctagcaaggatgtttccaaggtttcttcctaaatttgatgaaaaaaatgaccttggcg

SEQ ID NO: 13293 - DNA, 2103 bp, Gossypium hirsutum
  Clone ID: GOSHI-09MAY01-C3415_1
tccgggtcgccccacccacgcgtccgctgaaaactaattgaaatcgtcggctgtctctcatttccgttcctctcgggcttccgccaccgtcgacacccaaaatggaggctcaccggctatcttctactaaacctgttcaatctctcaagccaacgaaaaagattcctttagaggaagataccggtaaagcctccgacgcactgccgcttcccttgtacctaacgaacgccctgttcttcaccctcttcttctcggtggtttattttcttctttcccgttggcgtgagaagatccgtacctccacacctctccatgtcgtcaccttttccgagatcatcgccattctctcatttttcgcgtcctttatttaccttttgggtttctttggaattgacttcgttcaatctttggttttccaaccatcgcctgacgtttggattgccgaggaagaggatgatgaagttctgcttgcaaaggaagaagcccgtaaggtcccttgcgggcaagctctcgattgttcgcttccgcctctgcctcctgcggcaccaatcgtgaccgttcagaaggtgttcgatgaaaagcctgtgacggttctaacggaggaagatgaagaaataattaaatctgtagtggctggtacaaccccttcatattccttggaattgaaattgggtgattgcaagagggcggctgcaatcaggcgggaagcgttgcaaagattaacagggaagtcgttatctggattgcccttggatgggtttgattacgagtcgattctagggcagtgttgtgagatgccggttggctacgtgcaaattcccgttggaattgccgggcctttgttggttaatggaagagagtactcggttcctatggctaccacggaagggtgcttggtggctagcactaataggggctgtaaggctattcatttgtctggtggagctacaagtgttctattgaaagatggtatgactagagctccatgtgtaaggttcggtactgcgaaaagggcagctgatttgaagttgtatttggaggaccctgataatttcgagaccttgtctgttgttttcaacagatcaagtagatttggcaggctccagggtatcaaatgtgcaattgctggaaagaatctgtatattagattcacttgcagtacaggtgatgctatggggatgaacatggtttccaagggagtgcaaaacgttttggatttccttcaaactgatttccctgacatggatgtcattggcatctctggaaactattgttccgacaaaaaaccggctgcggtaaattggattgaaggacgaggcaaatctgttgtctgtgaagccaccattaagggtgatgtggttaggaaggtcttgaagacaagtgtggaatctctcgttgagcttaacatgctgaagaaccttactggatcagctatggctggagctctgggtggatttaacgctcacgccagtaacatcgttgctgcaatctacatagctaccggccaagatccggctcaaaacgtcgagagctcgcattgcatcacgatgatggaagctgttaatgatggcaaggacctccacgtctctgtcacaatgccttccatcgaggttgggactgttggtggtggaactcagcttgcatctcaatcagcctgtttgaacttacttggagtgaagggtgcaagcaaagagacaccaggagcaaactctaggacgctggcaaccattgtagcgtctgctgttcttgccggggagctgtcgcttatgtctgcaatttcagcaggacaactagttaggagccatatgaagtacaataggtcaagtaaggatgtctccaaggcaacgtaatgataacctgatatttgggataaaagtggcgatctcccatggtagaaacatactaaggagacaaatccctttgtaataagttaaagcactaattttgtaagtttctttatttattttgtatttttgttctttgctttcttttataatatatattgaatacaaagtgaggccatgtagcctgataatattgtaaaatacactgttactttttaagcaaaaaaaaaaaaaaaaaaaaaaaaaaaaaaaataaaaa

SEQ ID NO: 13294 - DNA, 693 bp, Gossypium hirsutum
  Clone ID: AI730268.1
gtgggtggagctctggtggattcaacgctcacgccagtaacatcgttgccgcaatctacatagctactggacaagatccggctcaaaacgtcgagagctcccattgcatcacgatgatggaagctgttaacgagggcaaggacctccacatttttgtcacaatgccttccattgaggttggtactgttggtggtggaactcagcttgcatctcaatcagcctgtttgaacttacttggagtgaagggtgcaagcaaagagacaccaggagcaaacgctagaatgctggcaactattgtagcgggagctgtgcttgcgggggaactgtctctcatgtcagcaattgcagcagggcaactagttaagagccatatgaagtacaataggtcaagtaaggatgtgtccaagggttcttcatagcgaaaacgtaatggtagcctgaatatttgggggtaaagttgcaatgtcccatggttagaaatgtaccaaggaaacaaatccctttgtaataagttaaaagcagacatcttctccttgtaattttctttatttaatttgtattttggttctttcctttcttctataatattatttaattttttttttttaagacgaagtcaggccatgtaacctgagaatactgtaaaatgacagaattgttaatgaactttcttttttcaaaaaaaaaaaaaaa

SEQ ID NO: 13295 - DNA, 328 bp, Gossypium hirsutum
  unsure (1)..(328): unsure at all n locations
  Clone ID: LIB3135-004-Q1-K1-E5
cggaancccggncgacgacgcgtccggcaagttcatcaggacaactagttaggagccatatgaagtacaatacgtcaagtaaggatggctcctgggcaacttaatgatgacctgatatttgggataaaagtggctatctcccatggtagaaacatactaaggagacaaatccctttgtaataagttaaagcactatgtaagtttctttatttattttgtatttttgttctttgctttcttttataatatatatttaatacaaatatttgtttatgtattctgatattattttttttaatattattttttatttttttattttttttta

SEQ ID NO: 13296 - DNA, 639 bp, Gossypium hirsutum
  Clone ID: GOSHI-09MAY01-C3795_1
cccagcgtccgtaataaatacgctaaacaacccccacttttcgggaaaaaaaattgaatccaattattctttctccgtgaaagtggagaagtccagcgaatcttagcttcttaatcacgctactttcttcgtcgtatttctctcgtcgtcgctacctcttccgttattagatcttcgaagcgtgtttctcccttcattctgttcgttccgcctttctttttctttaaattctcagttatgttcttatgagcaaatgaagggcccccaaaaatggagagagtgcctgcgtttacccaactgttaaagaaaggagaacttatatagattaaccatttgttactgccttattgatcagctcatatttagctctttagcacaaagatagaaggctatgcaatggagtctacctctcaggaaatgaatacgactaaccaacccggtcacaaaccttcgttctcggctttgatcgatgctatcgcattgcaagaacaatgttttgaacagtcgctagctagtcaacagctttgggccaaacagcttgctaatgaacaggaggcaaagataaaagcaactgttcagaaaatcacagtggatgctgctgaagttgatgaaattcttaaagggaaaaacattcttaca

SEQ ID NO: 13297 - DNA, 851 bp, Gossypium hirsutum
  Clone ID: GOSHI-09MAY01-C3745_1
tcgcagaatatataaatttaaaaagatttttgtcacaatgggattctttcataatccaataatcaaagagttttagaaggaatattctgagagattatcggtagatccaccgtccacggcatatgatgttatcaaacaacacaatataatgtataatgtacccagaaacactccccactttcatctcataatttttttttgaagatttgtttcaactgatagataacccataattttgggacgcataaagttgaaaaaaagttgaaacaaggggatctagagaagtggacttattgtttgagggcaaaagcaatgagcttaacatgctttgcccctctcttgtttctgtcattcattcttgggtgtgctgcgaggcctttctatccacttcctagtaaaatgtccaatcaaaatagacagcctatgcaaacctcacgtccgtataatatcgcacatagaggttcaaatggagagatccctgaagaaacggctcctgcttacatgagagcaattgaagagggtgcagactttatagaaacagatatcctatcatctaaagatggtgtccttatatgttttcatgatgttatcctcgacctgacaactgatgttgctaatcacaaagagtttgcaaatcgtatatggacatacaatgttcaagggttcaacgtcacgggcttttttactgttgacttcacgctaaaagaattaaagaagttacgggtgaagcaacggtacaatttccgggatcagcagtataatggaaagttttccattattacttttgaggagttcatttcaattgcactggatgcacccaggagtgtggggaattatccgagattaaaaat

SEQ ID NO: 13298 - DNA, 530 bp, Gossypium hirsutum
  Clone ID: LIB3583-023-P1-K1-G10
acccacgcgtccgcctatgcaaacttcacgtccgtataatatcgcacatagaggttcaaatggagagatccctgaagaaacggctgctgcttacatgagagcaattgaagagggtgcagactttatagaaacagatatcctatcatctaaagatggtgtccttatatgttttcatgatgttatcctcgacctgacaactgatgttgctaatcacaaagagtttgcaaatcgtaaaaggacatacaatgttcaagggttcaacgtcacgggcttttttactggtctggaagcatacaatttttagtcctttttcttcttgcaattgtgccataaagataaaaaaatcccgtagatgggcactgtatttagtttaacaccttacgttcaccgcaaattctggatttgtacgcttaacttacaaatagtatgtttcttatctagctaagaccgacaaaattttcttaatacatgcagttgacttcacgctaaaagaattaaagaagttacgggtgaagcaacggtacaatttc

SEQ ID NO: 13299 - DNA, 1087 bp, Gossypium hirsutum
  Clone ID: GOSHI-09MAY01-C3715_1
aaagattgaaaatttacaagctctgactcgagcaatccgtaatgctagagccgagtattctgttgagccagcaaagcgcataactgcttctattgttggtagtgaagaagtcattcagtatatatctgaagagaaggaggtgttggctctcttatccaagctagatttagacaatattcatttcgctgattctcctccagaggatgcaaaacaatcagttcaccttattgcaagtggaggactggaggcatatcttccccttgctgatatggttgatatttctgctgaagtgctccgccttaccaagcggctatcaaagatgcacacagagtatgagggacttaaagctcgtctcaactctcctaaattcatagagaacgctcccaaggatgtcgtctgcggggttcaggaaaaagcacgcatgtatcagaacagaagattaatttaaccaaaaaccgattggctctactggaatcaactgttatgctgtcccaataggctccatattggtcatattttcagtcttagcaaagctacacttcgtgttgggatgatctgcactgtttactcatttatgtcactataaactccatttcaactgttctgcacattcaaccattagaggactttgtagttttctgttgttagaagcatattatacccaaacttccgcactgataacgagcccagaacgcaactggcttggtcagataagaaggttagagcaatccataaattgagtggagttgaaatgccataattgtgctttcattgcttcgtcgaagttacaaaaaaatattaaaccttgttcattgttctttcattgtacctttatccaggtattgatttcatttaagaagcatttcttttatcaaatattattggtgtgggagaatggaagatgatgggtttctgttactcagtgttagccttgtatatttgcgagattttatctctcttaacgtgtggcgtcttttatgcctcggtttgaggcgtgacatgaatactcgtggattcttttacttttcctaaactatcatgtttaggaatttgaatgaaattgtgtaataaaatgtaaattaggatt

SEQ ID NO: 13300 - DNA, 520 bp, Gossypium hirsutum
  Clone ID: LIB3584-038-P1-K1-C4
gttataaacactgcatatgctaatggatcctgccactgagagttataacaaacttttctttggggacgttgggagagaagcactccccaatcggcgagacgctctcataatatctttagtcatattttcagccttagcaaagctacgcatcgtgttgggatgatctgcactgtttactcatttatgtcactacaaactacatttcgactgttctgcatattcaacctttagaggattttgcagttttctgtggttagaagcgtattatacccagcagctacacatcgacagtctgactagttccaaaatagacgtggtcccgaagttctgcactgataacgcgagcccagaacacaactggcttggtcggataagaaggttagagcaatacataacatcgagtggagttgaaatgccataattgcgctttcattgcttcgtcaaagttacaacaaaacattaaaccatgttcattgttcttcgttgtacctttatacagattattgatttcaatggtttc

SEQ ID NO: 13301 - DNA, 1137 bp, Gossypium hirsutum
  Clone ID: GOSHI-09MAY01-C3735_2
atctgcgtccgcttggacgatacgacgctctgttttgaatctgcagaagagggatccgcatttcatcccacgttgtctacttgccaacaagagccaactcgtatactgggacggggagaatcgggcaccccgtgccgtggctcgcggcaaagcgaattcaaaagtaaaggcggtggattttgacgcgaggtcatgacacgatataacgaacgattgagagaagaggacgagtctatgggagactaaatgagaagagagttaaagaaattgaggacatgatggaattggagaagaaagctgtagatctgcagagtaaagcggaagcagaggaaactgaacgtgaaggtgaaggtgcaggtagagaagaaaccgacgaggaaaagaggatgagagtgagaaaagagctcgataggtggctaacgagcaggcagagaggagagctacggcacaattgatgttcgaattgggccaaaaggcttacggaaaaggcatgtgcggacgtgccattgcaatttcttgaaggtgctctcacgatcattcccaggccaacattatttggcggtgagattcaaatatggctggctatggcttatgaggcgaataaccgccatgcggactgcattgctctgtaccagcaattagagaagaagcaccctagtgtgagcattcgacggcaagctgctgaactccgctacattttgcaagcacccaaactcaagatatcccaggaagagatggttacaataccgctgattggttctagttacgacagctatgcagcgacatggactgacaagtacaaggacaaagatcagaagacaagcggatcaacaaccaatcagcttcgctcctccagagactttctggctgattttctggtgtggcgacctcctgttggactggagaagaacagagcattttgggttgctttgactttatggtttggcttggtgggagctgccgttttactacaaagatgaatcatccagaacggactccataattattgttgttgttggattatgatatatgttcatttaattatttatcgtgccttgttaatttgatgtcaataatgtatgtataaagcaaaaggatgtgttccttaatgatttacaagcacacttgagatctgtc

SEQ ID NO: 13302 - DNA, 580 bp, Gossypium hirsutum
  Clone ID: GOSHI-09MAY01-C3735_1
cccacgcgtccgtgtggttcttggaaatttggctttgttactagacgtgacgtctgcgaggaccgttacgacggaccgaaaatctcgtcccttggcgatcgacgtcgttttgaacctgcagaagagggatcctcatttctcccacgtttctcttcccaacaagagccaactcgactactgggacggggagaatcgggcaccccgggccgtggctcgtggcaaagcgaattcgaaagtaaaggcggtggattttgacgcggcgtccagtgacgacgatgaaaacggcaacggatttgaggaggaagaggaggagtacgattgggagaacgaaatgaggaagagagttaaagaaattgaggagatgagggaattggagaagaaagcagaggagctgcagagtaaagcggaagcagaggaaactgaaggtgaaaggtgaaggtgcaggttgaggagaaaccgaggaggaaaagaggatgagagtgagaaaagagctcgaaaaggttttgccttcgtctctcttgccttgctacataaatagaactaatcctctacttcttttttcggttttcgttccaatttt

SEQ ID NO: 13303 - DNA, 797 bp, Gossypium hirsutum
  Clone ID: GOSHI-09MAY01-C3695_1
ctttctcttgccaattactttccattctccctccctttcattgctggtttttttttccgttgcttcaatgggtttctttgtagaagatccagggctaattgtaacccatcttctttacaaaacagctgttgttttagcagttttaagatgggtctggtcttgggctcttaggtttaaagacacgagtttatttagtttcattttttcatctgactcccaaaacaacacttcttcttctttggtttcgtcccaaatgattagagacagcctggtgttgacaaccttcgaagatgctaaggaaagggtgccttgggtttctgacacctgtgcagtctgcttgaatcagctgaaggaaggtgacgaggtcagagaattgaggaactgttgtcacgtgttccacaaagattgcattgacagatgggttgactatgatgaagatcaagatcacgaccatcatgattatgatcatgatcaagatgatagtaacaatcacaagacttgccccctgtgcagggcccctttactcacttcttcacaatgctcggtgtggcctaagaatgaacctagttgggccgtcgagcgactcctttaccttttcgggacgatcttctgccttgatctacgtcctttatctattttctacagttttttttttctttttaacatattatttgctcaattcatcatggagatagagcttggagcaataattattgtatatttagtagtcagttgatggtttgggtatagggacaagggtcaattttgttctttggggaagtctaaagtgagagagg

SEQ ID NO: 13304 - DNA, 936 bp, Gossypium hirsutum
  Clone ID: GOSHI-09MAY01-C3615_1
atacaccattgaagcaaattcaccctgttaatacatgggttggagcagttgttggtgctattcctcctcttctaggatgggctgcagcatctggtcagatttctctcaatggattaattcttccagcagctctctacttttggcaaataccccatttcatggccctagcatacttgtgccgtgatgactatgctgcaggagggtacaggatgttttcgcttgcagatgcttcaggtcggagaacagctgctgttgctttcaggaactgcctctatcttatccctttggggttcatagcctatgactggggtgtggcttctgggtggttttgtgttgaatcatcagttatcacccttgcaataagtgctgcagcattttcattttatcgtgaccggactactcaaaaagcaagaaggatgttttatgccagccttttgtatcttcctgtatttatgtctggcctcctatttcatcgtctctcagacaatccgcagtgccttgcggaaaatcccaacagtattgttgagcttccatcattccccgaagctgtaactgaaagtgaagaagatgatcagaagaagaaagtgaggtatgtcactgctggtccacaaggacgcgcacctgtggcatatgcatccattgctccatttccctttctccctgttccttcctatgttgatcaatgacatatcgaactggcatctagtttttgtataccaaatcaaagttattgaaaaggcacccctcgaaacctctttggctttgcattaagcctatttctgtgaagtttctattttaacacagttttggttcttgattgtctttattttgaaatccaatgtataattgggattgagctgtttaagcaccatgagtgacattcatcttgcagctgccattggaataaaactgttatgcaatgcatagatccattgc

SEQ ID NO: 13305 - DNA, 625 bp, Gossypium hirsutum
  unsure (1)..(625): unsure at all n locations
  Clone ID: LIB3583-052-P1-K6-H5
gtgaaanatgcttaatgatttgattgattccaanaggacaaataccaacattaaagcaaccattagcaacacatctcaaatagatccagtggcagcagagactgggatttctttggataatcttgatgctacaatcatatcttcaaatttctggcctccaatccaggatgaggcacttatcattcctgaacctgttgatcagctgctctctgattatgcaagaaggtttcatcaaattaagactcctcgaaagctaatttggaagaaaaatcttggaacagtcaagttggagttgcaattcgaggacaaggtaatgcaatttacagttgctcctgtgcatgcagcaattataatgcaatttcaagaccaaacgagttggacctctaagaatcttgctgctgctactgggatccctgttgatgtgctcaacaggaggataagcttttggataagtaagggtgttcttactgaatcactaggaacagatcctagcaaccatgtatttaccctagtggagggcatgattgaagctggcaaaaacagtggtattactggaaactgcgaggagcttctagctggtgacgaggaggcagagagatctgtggcttctgtttgagatcaacta

SEQ ID NO: 13306 - DNA, 472 bp, Gossypium hirsutum
  Clone ID: LIB3584-041-P1-K1-F6
aatttctggcctccaatccaggatgaggcacttatcattcctgaacctgttgatcagctgctctctgattatgcaagactgtttcatcaaattaagactcctggcaagctaatttggaagaaaaatcttggaacagtcaagtgggatttgcaatgcgaggacacggtaatgcaatgtacagctgctcctgtgcatgcagcacttataatgccgtttcacgaccaaacgacgtactgtcaacaatgacaaacactatgcatcttattgtgcatatgaacatggtatgtctgatgcccactctcagatggacctttgataatactagctgctgctactgggatccctgttgatgtgctcaacaggaggatatgcttgtgcctaagtaagggtgtcattactgaatcactagcaacagatcctatcaaccatgtatttaccctagtggagggcatgactgcagctggcaaaaaca

SEQ ID NO: 13307 - DNA, 948 bp, Gossypium hirsutum
  Clone ID: GOSHI-09MAY01-C3635_1
ccccaaccagcaacagtagaatcaacactgctcatttgtaccttgactaaacacccagggcactgttggaaaacgtgattgctatcctccccattttgctagcacctaggataccgatcatcaataggtactctttttaacttgtgatttgagaaagtgggaataaagtcccaggaaatcttccacgctgtaattttaattttcaaaggcatgtttatgttccacaatttcttgtaaaaagctttagtattagcctgtaaaaaattactaggatttagagtagacttttgcattagtatataggcacttctcactgagaaattaccggatggttctcctttccaaacttgtaaatcgtcatgggctgacctcaccaaagggatctgcatgattcttctagcaatattcaccggaaagatctgtccaatccgagatactatcccccttgccaactctccaacataggcccttctccaacagtccttttgctgaccagatgctcttccaggtaagtgaaggtgagttccctaaaggagcatttaaaaagtttgaattcacataatatttagctttcaaaactcgggctaacaaagaattgggataattaacaagacgccaaccctgtttagctaataatgcgatattaaatttatcaagtctcctgaagccgagacctccatcttcttttaacgaacacatatccttccatgcacaccagtgtataccctttctgcctctttttttcctccaccaaaatttcgcaattatgccctccaaatcggcacataacgacttaggaagcaagaaatatgccattgagtaagtaggaatagactgtagaaccgctttgataaaaacttctttgccaccttgagaaaagagttttatgctttaattatcaatccgttaatgtagtctatctttcaaattttgaaaagagctttttta

SEQ ID NO: 13308 - DNA, 387 bp, Gossypium hirsutum
  Clone ID: LIB3166-044-P1-K1-G11
attctatcttcattgctacccggtacttagagatctgaccaaagcaagatgctagccaccttgccaactctccaacataagcccctttctagcaatcatttagctgaccagatgctcttccaggtaagtgaaggtgagttccctaaacgagcttttaaaaaacttgactgcgcataatatttagctttcaaaatgtgggctaacaaagaattgagataattaacaagacgccaaccctgtttagctagtaatgcgatattaaaattatcaagttttctgaagccgagacctccatcttcttttaacgaacacaaatccttccatgcacaccagtgtataccctttctatctttatttttcctccaccaaaatttcgtaattatgccc

SEQ ID NO: 13309 - DNA, 1338 bp, Gossypium hirsutum
  Clone ID: GOSHI-09MAY01-C3055_2
cttcctctttctctcttttcatttttttcccttcggctttttatttttcctcttctgtttgtttcttctctctttttattttctttctatccggccgttgtccttcttttctttcgttctttgattttctgaggtcaatactttgagatcctaaatgatcggtttctctctttgatatcttctccaaaaacgttacattttgtgattctgcgcagttactgttgttgaaactgaataaaaatagcatacgtatcgcagggaaattcagttgtggaagctctcggagaactataaatcataatagtttaggctttaagataggaaaatgcaaattctcaactttggatactcttctaagagctatataaatcataatagtttaggtattgatataggaaaatgctaggaggcaatgaaggtaatcctatgctgcccatttgcatggatgagaatggtcttccatatcagactaatgcatcaaatcaactgcagttatttggaagactacccgttggatgtactgttgatgtggtgaattattttggaaatgagcatttagctcccatggttccacccaataaaaaaggccatgaaacagaagatattctgaggcaacagaagctacaaatttcattgaattataaaatttataaagaggaagctgactgttctggtagcattcctaatccccatgctgtatctactggcttacggctatcatatgatgatgatgagcggaactcatctatgacttctgctagcggaagcatgacacatggaccgttaatgatcttggctctcggtgacaatgttacaaccgaacttgatcgtcagaaagaagaatttgatcaatatatcaaaatgcaggaagagcacttgacgaagggaataagagacatgaaacaaagacacacggcttcttttcttgctgctattgagaaaggtgttagcaaaaagcttagggagaaagacgtagaactagagactgtgaatcgcaagaatagggaactggttgacgggataaagcaggtgactatggaagcccagaattggcaccatagagcaaaatacaatgagtcagtcgtcaatgtgttgaagagaaacctggagcaagtaatgtcacagtcacagggtggtgagcagcagggaaaggaaggttttggagaaagtgaagtcgatgatgctgcctcgtatattgaccccaacaacttactcagcattcctgatgttggtggtgccaaatgtgtttccaggaatcgccatggcatgatttgcagagcttgcaacgcaaaagaggtgtccgttttgttgatgccgtgtaagcacctttgcatatgt

SEQ ID NO: 13310 - DNA, 1085 bp, Gossypium hirsutum
  Clone ID: GOSHI-09MAY01-C3055_1
cccacgcgtccgagttaccaacgttggcggtttgtctgaaaggttgataaggaagttgagaaagctgatgttagtgaagccatcaaagaacatgtcatggaggaagaaagtagtacaaatgaaattcctccagtatcaagaggagatgaagcaaataaggcaaaagactacaattcaggctgaactgaatgtatcaaggaagctgagtccagagagcacatagaagcagaacaaacagaggttgaaagaaaatcaacccatgacaaagaaggatcccacattatagaagaattagaagaaaggagacagggtgaagagtccacagatcctgcaaaagtgtccagtgaagatagagaagcagaagaaaaagctgagattatcgacgacgtgaaactctgccgtgaagagagtcatattgaagttgcgacagacttaagagcacagacgagcttaaacgatgctgtgaaggaggagctcataaatacattgaatatcagctcagtcaagatgggtctagaaaccattaaaggtggtgccaatcaagagactaaagaagtagagatggggcagcttgaagatatatcctccgacttggcacttgaagtcccacttaatgacaacaatgaagtggaggtaatcaaaagagatgctgatgcactttacatgcacaaagatcaggttgctgaacctgagaaaggcccaacagcagaactggaagccaataaaactgaagacattgaagagaaacctggagcaagtaatgtcacagtcacagggtggtgagcagcagggaaaggaaggttttggagaaagtgaagtcgatgatgctgcctcgtatattgaccccaacaacttactcagcattcctgatgttggtggtgccaaatgtgtttccaggaatcgccatggcatgatttgcagagcttgcaacgcaaaggaggtgtccgttttgttgatgccgtgtaggcacctttgcatatgtaaagattgtgatgtgctaattagtgtttgtcctgtctgccaggttaagaaaacagctcgtgtccaagtttacttatcataaactgtgaagcaaattactgatt

SEQ ID NO: 13311 - DNA, 419 bp, Gossypium hirsutum
  Clone ID: LIB3165-048-Q1-K1-E6
tccgatcgtctgaggacactactgtcaaagcctaattgattagatcgctgagtgggatatgtggtggaaaaacattatatgttgtgagatctgcgcagatactgttgttgaaactggataaaactagcatacgtatcgcagggaaattcagctgtggaaactcttggtgaactataaatcataatagtttaggctttaagataggaaaatgcaaattctcaactttggatactcttctaagataaatcataatagtttaggtattgatataggaaaatgctacgaggcaatgaaggtaatcctatgctgcccatatgcatggatgataatggtctttcatattcagactaatgcattaaatcaactgcagtttttttgtaagactacctgttggatgtactgtagatgtggtgaattat

SEQ ID NO: 13312 - DNA, 1711 bp, Gossypium hirsutum
  Clone ID: GOSHI-09MAY01-C3015_1
tgtaagtctcgtttctctttttcctttccccctttaaaaaccgccttttaagcgctttgctttctctctctttttatggatgggatcatctcctttccttctccttcatgaaggctacgatttgaagactgtttttgatttccattagcatgcgaattaggccttttcgttataattcatcgcctgaaatatctgttatcgaatacgcttctacttttttttgtttcctgattttgattttagtgataacaactggaaattttgaatgctcgagctgtaatatgggatatttgaattcggttttgcaatcttcaagtcaggttcatgctgaatatggaccggttagcggcggaggccttagccagaatggaaagtttagctacggctgtgcaagctctcctggaaagaggtcttcaatggaagatttttatgaaacaaggattgacggtgttgatggagagatagttggtctttttggagtttttgatggtcatggaggtgcacgggcagccgaatatgtgaagcaaaaccttttcagtaatttgatcaggcatccaaagctcatatctgataccaaatctgctatagccgatgcatacaaccatacagattctgaatttttaaaatcagaaaataaccagaatagggatgctggatcaactgcttctactgctatacttgttggagatcgtttgctagttgcaaatgttggagattcccgagctgttatctgcagaggaggcaatgcttttgctgtgtcccgtgaccacaagccagatcaaagtgatgagcgacaacggattgaggatgctggaggatttgtcatgtgggctggaacttggagagtgggaggtgtccttgctgtttctcgtgcatttggtgacaggctcttgaagcagtatgttgttgctgatccagaaattcaggaggaaaaaattgacagctcacttgagttccttattcttgcaagtgatggactatgggatgttgttacaaacgaggaggctgtggcaatggtaaagccaatacaggatcctgagcaggcagccaagcggcttatgcaggaggcatgccagagaggcagtgcagataatatcacttgtgttgtcgtccgtttcttggccaatcaaggtggttcctcacgtactgttcctgcataatccatccattctcagtatggttttaggttttggttcttctagccgatgaaacaaagtaagtcaaaataaactccatggtaatagctagtcatagaaaacgaaactataaacagcacattattgtgcgaagcatagaagcaatgaacaaatgtgtcagcctgctgatctgtatttttacatcttctaagcctcaagaaaagatatgcatctgagttagcttctccacgattccagtcatgcacatagaacgggtatgcacgtgtgaatttgtgtaaagaaatgttgagacttaagtcctcctgtatgttgtaaattgtagtaaaacatgtcttcttttctagttagttcactttcggataattcgtatgtcgtgtgatgtcctctttcagaaaaatagtagttatgcccgttttgtaggatgcaaatgcgaagcttcgctgttaacacttgcttgttaatgcagctttgaagtttgaatgcattatgatcacagtaatacagtatctgtttgattataataattaatggaaaatcgtttatatgtggatgtg

SEQ ID NO: 13313 - DNA, 603 bp, Gossypium hirsutum
  Clone ID: LIB3543-030-Q1-K6-C12
tcgctattgctgtgtctcgtgaacacaggggggggggagagtgatgagcgacaacggattgagaacgcaggaggattcgtcatgtgggctggtgtggatttacatttctccatttctctttcctgtcttaccatcctctcctttttctgtttaagcttttgctatgatgtgttaaaaggcgggggggggagattatatccgtaggaacttggagagtgggaggtgttcttgctgtttctcgtgcatttggtgacagacacttgaagcagtatgttgttgctgatccagaaattcaggtctggttagaagacttggttgaaatatgctgagttcctgagatgtaatcgtacatcataattaagatagaaaaccgtaatgcacaaacccaacatgaaaactctataggattccaaattgagagatgaactataatttatatgggtattaaagtttcatgttcttttactaggatttctattgactttgagcattttgtaatctgatatgaactttggaggttgcaggaggaaaagattgacaactctcttgagttccttatacttgcaagtgatggactatgggatgttgtttcaaatgaggtac

SEQ ID NO: 13314 - DNA, 855 bp, Gossypium hirsutum
  Clone ID: GOSHI-09MAY01-C3035_1
ctttcttaacactcttcaagcttttcattacagactctttcaagaatttcctgaaagaaaagaagagaaagaagaagaagatgttgctggggaagaggccaaggccacctatgaaaagaaccacaagcatgacagagatcacttttgatctaaacaccaccaccaccaccaacgccgaacctccaccctctgatccacataacccttttaacaactaccccaaacaggcttcccctttcggtggcgcagcaccttctgtagctgttgctggcggtggtgttggacttgaagggttggatcaacggttgttggcgacggtgtcacctagagttcatagaaggcattcagctgattttatggaaacacctcatttcttaaggtcttgcggtctttgtagacgtcgccttgttcctggccgtgacatctacatgtataggggtgatacagcattttgcagcttagagtgcaggcaacagcagatgaaccaagatgaaaaaaaggataaatgttcaatagcatccaagaaacaagccgccgcctctcctgccgccagatccagtgtctcaaccaaaggagagacggttaccgccgtatagatatcaatccccgtggcccaaaaaggttgtttttactaagctcaaaaaggggcatgtactagaaggaattaagattatgtaagggaagtgcatgtttaactttgtaatgctactgggaacaagttttggacaagttatttcatgtgtaatcaaagggggggggggatgggttattcaaaaaataagatttaaaatctgtacttattcctaatttcctttcttttgatcccattaatgttttttggcagtagtcttagag

SEQ ID NO: 13315 - DNA, 900 bp, Gossypium hirsutum
  Clone ID: GOSHI-09MAY01-C3025_1
cggacgcgaaagttgaaacacaaaagaccaaagagatggatagatcaaggttgcggtctctcaccttgctttgcactttggttcttcttggatctctagcttctactcaggcaaagaagtccaaggaagatctgaaagaagttactcacaaagtttactttgatgttgaaattgctggaaaacctgctggtcgaattgtcattggactcttcggaaaggcggttccaaaaacagcagaaaacttccgagcactatgcacaggtgaaaaaggtgttggaaagagtgggaaacctctccacttcaaaggaagtgctttccaccggattattccaaacttcatgattcaaggtggtgattttacacttggtgatggaagaggtggagaatcaatctatggtgagaaatttgctgatgagaatttcaagctgaagcacactggacctgggcttttgtcaatggcaaatgctggtcccgacaccaacggctcacaattcttcatcacaaccgtgacaaccagctggttggacggcagacatgttgtgttcggaaaggtgctgtctggaatggacgtggtttacaaagtcgaagcggaaggaaggcagagtggcacacccaagagcaaagttgtgattgctgacagtggtgaactccctctgtaattatcaaagctcaaacttgggtcttttctttattccaattaagtccatgataaatcctccaagatgaacctttttttttttttttgcttttttgcttttttgtcctagcagactcggttttgtcctagctataggaatcatatctttcacttgctctatgatatgttatgcgttagccttaaaaacttataagatttggttactgggtgattaccatcttattttttaaaaaaaaaaaaaa

SEQ ID NO: 13316 - DNA, 1492 bp, Gossypium hirsutum
  Clone ID: GOSHI-09MAY01-C3395_1
gcgtccgttatacttcatggaaattccaacaaccatgggagcacaaagcagcttgtagagcttgcgaaacgctgcacaatcagtacgggaaacatgaatatgcaagtgcctccccaggtccacaaatggccaaaataatcctttattgatgcagatggggcagcagcagcagcagcagcagcagtcaagagggcagatacttgttgattccactattaatcacgctcctaggctctcatcaatggggcagccaatattgtccaatggaatggccgccgcgggggcttccagaagtggaatccctgaaaatattagagcccctggttattctcagactccttcaatgttgaatttccccatgaatcatgcttccgaactacctggtaactgtttccctctcggaagtacacctggggtatctattctcacatcgaaaggggcttttcaggaagatgttaactcagaaactaaaggatccggagggttgatgcccagttacgatgtatttaacgacttggatcaacatataccccaaagttgggagctacagaatgtcggcatggcatttgatacctctcagcattcaaactctcttcaagggcaacctcgatcttacacagtctgctttaggccaaccaaggattttcttcaggccaaatgaatggacacaacaggagtgcagctgttgcaagcaaggcaatgttctcaacaggcgatgttaaggagctcggaagtgcacaaaatgttaaccaacatctcagcaaccttcttgttgacaatacaataagggtcaagtccgagagagtttgcgataccagccctgccaatatattccccgatcacttcggacaagatgatctcatgagtgctcttctcaaacagcaagaaagtgttgcatcatctgaaaacgagtttgacttcgacgggtattctatgaataatattccagtgtagggtgttattccataccccagttcacatcgtgattgcagtttccgatgtacatatccattgtataggaaaagttatcacttcagcaatcaagttagtaggaacttgagtttgttcaagatactgcgttttgcttagttggaagatggtgtcttcacattgtgaatatcatgttctgctgggtttctttgaagcttaccagggccagataattggtgaagtgtctaagatacacttctgcatgatatgcaaaggtgctcatgcagaattttgattgtatttggtagcgaaatctggcaggaatcgactaattatcgcgtgctttctctaaaattgtcaaagttgtggagccactgtttgtaggtatcagcagactatgggaaactctctaactctaatagcagattttaagtttgctccttttttcttcttaatcagaggaattaactatgttatgtacatacgctatttgattgctctagacagaaagtctgggtattaatctcttcctatttaagtttcaatatcattcgattgctct

SEQ ID NO: 13317 - DNA, 1068 bp, Gossypium hirsutum
  Clone ID: GOSHI-09MAY01-C3355_1
acagaatcacagaaagacagcttcaacaatgaacagtagtttccaaaaagacttgactttggttttgcttccaaccaatctgtcatttatgttagaaacccacaatcaggctgccttatgtctgtcactctaatctcctaaggaccctctcacaaatatcttctttgctttgctctagttcgtgttgttctcttttctgcaattctctgtttttttctacatttcttttccattgaagaggaagctgtcttgtaagaatgaagccaacaaggggcagagaagctgcaacaatgaaggacaagaaggaagcaaaaaagcctgctgagaacaaggtcgtcggtaagcgaaaagcggcgagccgggccgataagagtgaccgaaagcgcgcaaagaacatagcatcatcgaccaacaaggacccgaataaaccgaagagacccgccactgctttctttgtgtttatggaagagtttaggacaagttacaaacaagaacatcctaaagtgaaggctatctcagctgtgggcaaagcgggcggagagaaatggaagtcgatgtcgaatgcagaaaaggctccgtacaaagtgaaagcaacggaaaggaaatcagaatacgagaagctcatggcagcctacaacaagaaacaagaaagttcagatgatgaggaagaagccgagtccgaatcatcaaaggatgatgaagaaagtgaggacgatgattgaatccaggatggttttggattaggttctgtaaatgaaaccatgtttaaaaatactgtctttagcagcattgtatgatggtatgtttgcttgatatgtcgtgtgcttggttttcgatgtgaaagaaaacgcagctcctatatttctatattcgcagatatatgtttgtgttaccatgttgaaggcactgccactgcaaaagagattactgaggatatggcggacggccattagtggcagcaactcgacagccccattccaagacctctttgcttgtatcatccttatgaactatcacttgaatgaaaacaagcagtctttcatggctcttgttgccgtctaaaacccc

SEQ ID NO: 13318 - DNA, 617 bp, Gossypium hirsutum
  Clone ID: AI727102.1
attctctgttttttctacatttcttttccattgaagaggaagctgtcttgtaagaatgaaggcaacaaggggcagagaagatgcaacaatgaaggacaagaaggaagcaaaaaagcctgctgagaacaaggtcgtcggtaagcgaaaagcggcgagccgggccgataagagtgaccgaaaacgcgcaaagaacatagcatcatcgaccaacaaggacccgaataaaccgaagagacccgccactgctttctttgtgtttatggaagagtttaggacaagttacaaacaagaacatcctaaagtgaaggctatctcagctgtgggcaaagcgggcggagagaaatggaagtcgatgtcgaatgcagtgatgcataaaacttccaatgcggctcctccggacttggctatgtaccgatcaaatgttcaccgactcgggaaactgttatggcatggttaagccaatgctattctggtataaactgcagggaacataaatgtatggtatataaattagtcgaaaatagacttgtccgaaaaagctccgtacaaagtgaaagcaacggaaaggaaatcagaatacgagaagctcatggcagcctacaacaagaaacaagaac

SEQ ID NO: 13319 - DNA, 711 bp, Gossypium hirsutum
  Clone ID: GOSHI-09MAY01-C3375_4
ggaaacccggcccgacccacgcgtccgcccacgcgtccgcccactcgtcctttcactcttccgcccacgcgtccgcccacgcgtccgtgaacatctacaggcagattgaaattagagtaattgagaaaaacgcaatggctcaaaagatgttgatgatggcggtccttgtgatattggggacgaagatagcgacatttacggctgcggatccgacttgtttgcagagcttgatgtcttgtgctccttacttcaacaacgccactctcctcctcgcggccgcccgcgcgtcccctctcagacaagccgtcgctactgaacttacttgcctttgcagcctcattaataactctactttgcttagttctttcaacatcaacatccccatccctgcagctcttaggatcactcgtggctgcggtgtcactgataagatgaacggctgcatccccgctactctcacccctgctccttccccatcagctacttctcccaaggctgctccactcatcaccaggaggtgaaagtggaggtgtccacaagataacttcgaccagaatcatcactttgttgttttttttttttaagcatctatagctctgtactatggtgacatgtttcctacatgagttgaggggtgatttcatctcataataaataataaataataaagagagcatttcgagtttaaaaaaatcacccaccaattaccgg

SEQ ID NO: 13320 - DNA, 652 bp, Gossypium hirsutum
  Clone ID: GOSHI-09MAY01-C3375_2
ctccgcgtccggggttttggagggtttgaaggaggaggtaaagttgaagcctttgaaggctttgttgacttggctggctgggaattactcatttcaaaacaatgagaagaaaaacgatggggttttgaagaaatgggatttcaaagattgaaacaaagggaaaattttgaggaaatgaagctgtaaagattgaagcaaataaggaagaaaaacaacacatacacacacagcggaattagattaattgagaaaaacgcaatggctcaaaagatgttgatgatggcggttcttgtgatattggggacgacgatggcgaccgttacggttgcaaatccgacttgtttgcagagcttgatgtcttgtgctccttacttcaacaacactgatgtccaactgccagacgattgctgtaaacctctccaacaagccgtcgctactgaacttatttgcctttgcagcctcttcaacctgccttctttgcttagttcttttgacatcccctacgttggagctcttaggatcgccaatcagtgccggtgtcgttgatataatcagcgactgcatcagcgctgcttcttccccatcaactacttctgccacttcttgcacatctgctccacccctcaccaggaggttgaagcggaggcgctga

SEQ ID NO: 13321 - DNA, 767 bp, Gossypium hirsutum
  Clone ID: GOSHI-09MAY01-C3375_1
gtgacatgaattaagggaatatgggtacaaaggaggggaaatatttgataagtaaacaaatgagaaaggaaatatgaaatcatgaagatgatttcaaggaaattagattgagtaaggagttttgataaaataaaaggaaaagacttaataaaagaacatcattgcttgcgccggcagaaccggaagaaaaacatctacaggcagattgaaattagagtaattgagaaaaacgcaatggctcaaaagatgttgatgatggcggtccttgtgatattggggacgaagatagcgacatttacggctgcggatccgacttgtttgcagagcttgatgtcttgtgctccttacttcaacaacgccactctccaactgaaaggcgattgctgtaaccctctcagacaagccgtcgctactgaacttacttgcctttgcagcctcattaataactctactttgcttagttctttcaacatcaacatccccatccctgcagctcttaggatcactcgtggctgcggtgtcactgatcagatgaacggctgcatccccgctactcccacacctgctccttccccatcagctacttctcccaaagctgctccactcatcaccaggaggtgaaagtggaggtgtccacaagataactttgaccagaatcatccactttgttctttttttttttaaagcatctatagctctgtactatggtgacatgtttcctacatttcatctcataataaataaataaataataaagagcatttcaa

SEQ ID NO: 13322 - DNA, 502 bp, Gossypium hirsutum
  Clone ID: LIB3583-041-P1-K1-D8
cgagtacgtccgaattcggtcgacccagcgtcgaacatctacacgcagaggaaattagagtgatgaaaaaacgcatggctcaaaagagttgatgatggcggtccttgtgatttggggacaagatagcgacagtacggctgcggatccactgttgcacgcttgatgtcttgtactccttacttaaacaacgccactctcaactgcaggcgattgtggaccctctagacaagccgcgctactgaacttacttgttttgcagcctattaacaactcactttgcttagtctttcaacattccatcgctgcagctcttagatcactcgggctgcggtgtcactgatcagatgaacggtgatccccgcaattccacacctgctccttcccatagctactttccacattgctcatcataccagagtgaaagtggagtgtcgacagatacttgacagaatatcatacttgttcttttttttagcattatgcttgtactatggacatgttc

SEQ ID NO: 13323 - DNA, 1629 bp, Gossypium hirsutum
  Clone ID: GOSHI-09MAY01-C3365_1
acaggctctgagtatgcctgtaagtctatatccaaaaggcaggggatctccaatgacgatgtggaggatgttcggagggagattcagataatgcaccatttggctgggcataagaatattgtgaccattaaaggtgcatacgaggatacttcgtatgtgcatattgtgatggagctttgctctggaggtgaattgtttgatccgattatccacagggggcattactccgagaggaaagcagctgaattgactaagatcattgttgcggttgtcgaggcttgtcattctctcggggttatgcatagagatttaaagcctgagaatctcttgttagttaacaacgatgatgatttctctctgaaggccattgagtttggactctcagtcttctttaaaccgggccaagtttttaccgacgtggttggcagtccatattacgttgctccggaagtacttctgaaacagtatggaccagaagcagatgtatggactgcaggagttatactctatatattgctaagtggtgtgccaccattttgggcagaaacacagcaaggtattatttgatgcagtgttaaaaggacatagggactttgattcagacccttggcccctaatatctgatagtgcaaaggacctaattcgaaagatgttatgctctcgaccttcagagcgactgactgctcatgaagtattatgtcatccttggatttgtgaaaatggggttgctcctgatagggctctggatccagctgtactttctcgcctcaaacaattctctgcaatgaataaactaaagaagatggctttacgggtaatagctgaaagtctttccgaggaggagattgctggtttaagagaaatgtttacgtctatggatactgataacagtggtgcaatcacatttgatgaactcaaagctggtttgcgaagatacggctctaccttgaaagatacagagataagggaccttatggatgcagctgatgtcgataatagtgggaccattgattatggagaattcatagctgcaacagttcaccttaataaactagagcgtgaggagcatctcgttgctgcattccgatactttgataaggatggaagtgggtatattacagttgatgagcttcaacaagcttgtgctgagcataacatgacagatgttttgctcgaggatataatcagagaagttgatcaagataatgatggaagaatcgattatggtgaatttgttgccatgatgcaaaaaggcaatgcaggaatcggtagacgaaccatgcgaaacagtgtgaatataagcatgagagatgccccaggtgctatgtaatctccagctgcgcacacatcatgtacagattgtacagcagatccagaagatgatgactcatgacaaaagtgatcgggaaacggttttggttcgtcgcatgctccaggaccggtttcttgatgttgtttgtttgagcattagagagatgctgttggtttatggaatgccataggttttgttaaactttgaggagtgtgggagtgttaaagtttttcaaaattaccaagctcattagttatgtctttgattgatgttttttcggttggtttttccgaggtttgccggaatcccgccccccg

SEQ ID NO: 13324 - DNA, 694 bp, Gossypium hirsutum
  unsure (1)..(694): unsure at all n locations
  Clone ID: AI055228.1
ggagaatcatttttcaggacacatttaattcgatgcttgctcctcttttattaggtctattacttgatcttgtttaacatttggacttaataattaaagagtcaaattttcttattttagcgagtcatgcagtaatttcaacccctttagtatataatgaaaccgatgtcgtctggaataaagtttattgatataatgtgtggtttgcaatgttaggccaagtttttaccgacgtggttggcagtccatattacgttgctcccgaagtacttctcaaacattatggaccagaagcagatgtatggactgcaagagttatactctatatattgctaagtggtgtgccaccattttgggcagaaacacagcaaggaatatttgatgcagtgttaaaaggacatattgactntgattcagacccttggcccctaatatctgatagtgccaaagaccctattcgaaagaatgtatgctctcgaccttcagagcgactgactgctcatgaagtattatgtcatccttggatttgtgaaaatggngttgctcctgatagggccctggatccagctgtactttctcgcctcanacaattctctgcantgaataaactanagaagatggctttacgggtagactcttgagaatgtatgcgcttgaatctgcgttgtgacctgctgtcattgcnagagaagan

SEQ ID NO: 13325 - DNA, 359 bp, Gossypium hirsutum
  unsure (1)..(359): unsure at all n locations
  Clone ID: LIB3583-050-P1-K6-B9
cccagcgtccgcgnttatggtgaatttgttgccgatgggactaattttcagtttgttggcagattgtacagcagatccagaatatgatgactcatgacaaaagcgatcgggaaacagttttggttcgtcgcatgcaccaggacgggttacttgatgttgtttgtttgaagcattagagaggtgctggtggtttatggaatgccataggttttgtaaaactttgaggagtgtggaagtgataagctcactataaagcagcaaatttatattagattcgcagaatatacttgctgcataaatgcctttgatttccataagttcatatttaaagttggaatttataaatgtttcaatgagtg

SEQ ID NO: 13326 - DNA, 229 bp, Gossypium hirsutum
  Clone ID: LIB3148-008-Q1-K1-A8
gcgatcgggaaacggttttggttcgtcgcatgctccaggacgggttacttgatgttgtttgtttgaagcattagagagatgctgttggtttatggaatgccataggttttgtaaaactttgaggagtgtggaagtgttaaagttattcaaaattaacaagctcactataaagcagcaaatttatattagattcccataatatacttgctgcataaatgcctttgatttc

SEQ ID NO: 13327 - DNA, 672 bp, Gossypium hirsutum
  Clone ID: GOSHI-09MAY01-C3305_1
gcgtcctttcatgcgtccacacgtacggccacgcgtccgagcatctgaccgtgcatttggattgagctctctagcactctaccgtggaagtacgaagacgcaataattattcaagtgaaacgatagggttatgcactcacaggaccgttaggccaaatggatctgagattgcggtaatggttctctcttgatggcattggggaattgaggctaactgaactaaattattggcctccacaagacagggatgtcaaccacaggagtctctcactccctgctgctggattgctggccgaatgtcttgagcttaggaagttatgtatccatgggacggctcatgaacacttcatgatgttccttcttaaaatacctaacctcagagacgtacagctgagagaggactactatccggcaccagagaatgatatgagtactgaaatgagagcaggctcatgtagtcgctttgaagctgctctaaataggcgacacatcctcgattgaaatgatttactggtgtggagcctagccctgattagattatgcacgggaagaacaggaggggtttcaagtacgaaattttcttttttcccttgtctagaaaagaaactgtaaaagttcatccatggtctgcgtttctttatatacatgcaattccctcccccacttcagcct

SEQ ID NO: 13328 - DNA, 675 bp, Gossypium hirsutum
  Clone ID: GOSHI-09MAY01-C3325_1
gttcagttcttctcggtttcacctttagcaagctcattgatacattgggttggaggaattgtgtacatgctacaaataagcatctttgtcagccttcttcgaggggtattacgaaacggagttctgtacttcctgcgagatccagccgatccaaactacaaccctttccgtgattgaatcgatgatcctgtacacaagcatgctccgagggtcttgttatctgttgcctgtttatgggagtttgattgtgatgctggtatttttgcctgtcaagcttgctatgaggatggtgccctctattttcccacttgatatatcggtatctgatccatataccgagattccagctgacatgcttctctttcaaatatgcattccttttgctgttgagcattttaagttgagggcaacaatcaagtctcttttgcgctattggttcactgcagttggctgggcattaggcttaacagacttcttacttcccagacccgaggagaatggtggccaagacaatgttaatgtggaaccaggacaacaggatagactgcaggttgtgcaactaggtggacaggaacagcccatgggtgcatttgctgctgctgatgatccaaatagaggcctcatggcatcagggagctccaatgttgcggaggagtttgatgaggatgaacaaac

SEQ ID NO: 13329 - DNA, 889 bp, Gossypium hirsutum
  Clone ID: GOSHI-09MAY01-C3275_1
ggcttctggattaattaatagttctgatgtttctttgcaccttaatgaagaaatagaatccatctcttatcttggagaatattatgaacttaactccacaaaacgaaacagttattcatgtgaagttgcagtggttgctacaccccttgatgaagtaaacatccgattttcacctgctgtttcaattcctgagaggaaattgcagcatacacatgcaacctttgtgagaggcctcttgaatccagcctattttggtctgcgcactgttgctgagattccagaactggttggcacattagaggatcctgaccttccattcacatgcatttcagttctcaagcaacttgatgaaaatgatacaacttacaaaatattttctcgagaaccaatgtcagatgcattactggatagcatttttagtgcaaggctgcagacaaacagaataaactggggagcctatccgcattataaagctccggaactgtttgcaccattcattttggatggtcaacatttgtattatgtaaacgcattcgagaatgcggccagcaccatggagacgggtgcggttgcagctgagaatgtagcaaggctcatattgtccagatattttggtgaagcatccctgcagtcatcaaacttgcagagctttagtcccgatgcagacgtatcacacttcgacctgtaacttacggcgaatgtaatattggtgtgtaaatttggtgtctcaataatgtgaaatcgtagaatatacaaacgacaaaccagtgcttccaacgctttggtatttgtgaggtaattgtgcgtgatgaaatatgacttgtcttttctccttccgctatatattgtaaaatctggaccggctcatatgttctagtaaaaaaaataa

SEQ ID NO: 13330 - DNA, 576 bp, Gossypium hirsutum
  Clone ID: LIB3583-018-P1-K1-C1
cccacgcgtccggcttgctcttcctgttagtggtattgcagaaactatataggactgctttttagatacttggtgaagacttggaccataattacaccacagatatccatatcatagccgtgcagctttctcttgcacgagggaaacaatccgttatttgacactgttgcccccagttcctgtctccaaattggactcataaaaattgaatgttttaggagtcatactctaccttgtctgatgacaagaccttgttcttaaactttaaagatcgattacagggctttacgttattagttgctgatgacttttattttctgctgatattattagtgcaaggctgcagacaaacagaataaactggggagcctatccgcattataaagctccggaactgtttgcaccattcattttggatggtcaacatttgtattatgtaaacgcatttgagaatgcggccagcaccatggagacgagtgcggttgcagctgagaatgtagcaaggctcatattgtccagatattttagtgaagcatccctgcagtcatcaaacttgcagagctttagtcccgatgc

SEQ ID NO: 13331 - DNA, 463 bp, Gossypium hirsutum
  unsure (1)..(463): unsure at all n locations
  Clone ID: uC-gsflnu33B113b04b1
cggacttttgggttgntcacgagtccgtattgggggggtcttatgataagaatggtgggtgcaacattagtattatgtaaacgcattcgagaatgcggccagcaccatggagacgggtgcggttgcagctgagaatgtagcaaggctcatattgtctagatattttggtgaagcatccctgcagtcatcaaacttgcagaggttttagacacgatgcatacgtatgacactttgacctgtaacttacggcgaatgtattattggcttgtaaatttggtgtcttaataatgtgaaatggtagaatatacaaacgacaacagaaggttttcaaagctttgggatttggaggtaattgggcgtgatgaaatatgacttggtaataatttcttctgatatatatgggaaattttgaccggcttatatgttctaggaaaaaaaaaaaaaattttttatcaaagagtta

SEQ ID NO: 13332 - DNA, 952 bp, Gossypium hirsutum
  Clone ID: GOSHI-09MAY01-C3215_1
atttgtagcgcagtttgaaaaagaagatgactccgtcgatagaacaaccgaccccagagactacgagcgagcaagcattcaacgccaagaaaaaggacaagaagaagaagaagaacaaattaccaaaaccggaaggtcaaattgaagaaaatgttaagcagagtcaccaagagaacgaggaaattgatctaaaaaagagcaagaaagacaagaaaaagcgaaagaaagaaaaggaaaacaacgaaggtgaatccgaggaagtgaatcacgatgaaagcggtgaggagtctaagaaggaaaagaagaagaagaagcacaaaaagcagaagaaagaggaagaaaatggggattctattgaaactgcaaatggcaaagaagactcggttcaatttgatgacaaggagaaggtggtagtgagtggaaaaaacgctgaagaagcgaaatatgcgccgttgaaatcattttctaattctaagttaccaaaaaatgttttggattgctgcaagggtttttctagcccatctcctattcaagctcacgcctggccctttttattggatggtcgtgattttattggaattgcaaaaactggatcaggcaagactttggcatttggcgtacctgcaatgatgcatgtattgaaccagcgaaatggtaaatcctcaagagggaagaatccgctttgcctcgtactttctcctacaagagagttggctgaacaaatatttaacgttttgtgtaatgctgggcaagcatgtgatgtcaaatccggttggttgtatggaagaacagctaaaggacctcagatttcttctttaaagtctggtgttgatattgttattggaacacctggtcgtttgaaggatttgatgaatatggaggtgtgtcagctcaatgaggtatctcttgtggtcctagacgaagctgatcgaatgcttgacatgggatttga

SEQ ID NO: 13333 - DNA, 947 bp, Gossypium hirsutum
  Clone ID: GOSHI-09MAY01-C5_3
ttgtttctcgtgggcggacgcgtgggatttgtaggatcagtatcacttgtacgctttaccgggaaaaagggggaaaaaaagtgaggatcaagcatagatggaaaacatgggagttctaggcaaggtggtggattaccttctattgttatcattcttcagcatcacattaacagctcagttggacatccccgagtccatcctcccccacgcctacaatcccttctatcaagtttataccacgttaacccaagattatttggtgcttgagcagcctgcttttttcaaggcacttatgacgttggaacttgtttaccaactccctctcgctttgcttaacatctatgggttgttatactctaagccctggttcaacaccacctgcctcctctttggtgcctctatcgttgcctctacgacagctatggtgggagacattctcaattcccagaaggcatcagccaatttgatggccatgtattatccaccgtttcttccattaggggttctggctatagtgcgaggggtggttggacaatcgagcaaggctgctccatccattggcaatggaccttcgtcggctgtgaaaaagagggcttaaagttgatccccgatcagtttcaaacgtcttctttaagagaccatgctaatacaataataagggagggattctaatctgtttgatccgcagctaaataaggataaaaaaaaaatgaagtaggcaaattacaaatatattagcaatctaatagtatttgtaatacttgcttaggctgcattttcagcttgttttgtttacagtgtgtatcgcagtttttagtggcctacttgtctttgattaatgcaaattttatttcaattttgatgatatgccgttttactaaaacatacaatacacactcttttttcccaaagcataataaacacatttttttacggtggtccttttt

SEQ ID NO: 13334 - DNA, 603 bp, Gossypium hirsutum
  Clone ID: GOSHI-09MAY01-C5_2
caaaccctccaaaaaaaatttgtacggaatgtcgcagttgttggagaaggcgaaggacttcgtggtggataaggtggccaacataaagaagccggaggctagtgtctcggacgttgatctgaaacatgtgagccgtgagtgcgtcgagtatggcgctaaggtctctgtctccaacccctacagccattccatccccatttgtgagatctcttacaatttcaaaagtgctggaagagggatagcatcagggacaataccagacccggggtcattgaaagccggcgacacaacgatgctggacgtgccagtgaaggtgccgtataacatcttagtaagcttggcaaaggatattggtgcagattgggacattgactatgaattggaattgggtctcaccattgatcttcctatcatggggaacttcactatccctctctctcagaaaggagagatcaagcttcctactctcagtgacatcttttagatttatcattattatgtctctctcatactcataaaacttgtgtgtcgctgtaacatgaagaatatatcgaaccatactaggttgtttttcttttaatatgatacatcttttgctttatt

SEQ ID NO: 13335 - DNA, 625 bp, Gossypium hirsutum
  Clone ID: GOSHI-09MAY01-C5_1
ctcagattgaatcctagaatataacaaaaccctccaaaaaagactttgtacggaatgtcgcagttgttggagaaggcgaaggacttcgtggtggataaggtggccaacataaagaagccggaggctagtgtctcggacgttgatctgaaacatgtgagccgtgagtgcgtcgagtatggcgctaaggtctctgtctccaacccctacagccattccatccccatttgtgagatctcttacaatttcagaagtgctggaagagggatagcatcagggacaataccagacccggggtcattgaaagccagcgacacaacgatgctggacgtgccagtgaaggtaccgtataacatcttagtaagcttggtaaaggatattggtgcagattgggacattgactatgaattggaattgggtctcaccattgatcttcctatcgtggggaacttcactatccctctctctcagaaaggagagatcaagcttcctactctcagtgacatcttttagatttatcattagtatgtcgctctcatactcataaaacttgtgtgttttcccttttactcatgctgtaacatgaagaatatatcgaactatactaggttgtttttcttttaataaa

SEQ ID NO: 13336 - DNA, 513 bp, Gossypium hirsutum
  Clone ID: AA659956.1
gagagagagagagagagagagagagagagagagagagagagagagagagagagagagagagagagagctcgtgccgaattcggcacgaggaccgtttcttccattaggggttctggctatagtgcgaggggtggttggactatcgagcaaggctgctccatccattggcaatggaccttcgtcggctgtgaaaaagagggcttaaattaagttgagccccgataggtttcaaacatcttctttaagagaccatactaatacaataataagggagggattctattctgttttatccgcagctaaataaggataaaaaaaaaaaaaaacgaacgtaggcaaattacaaatatattagcaatctaatagtatttgtaaaacttgcttaggctgcattttcagcttgttttgtttacagtgtgtatcgcagtttttaacggcctacttgtcttgataatgaaaaatgtttctacacttgaagaattttattttttaaaaaaaaaaagaaaaaaaaaa

SEQ ID NO: 13337 - DNA, 406 bp, Gossypium hirsutum
  Clone ID: uC-gsflnu33B060d01b1
ttatgttataacaaaaccctccaaaaaagactttgtacggaatgtcgcagttgttggagaaggcgaaggacttcgtggtggataaggtggccaacataaagaagctcggaggcttagtgtcctcggactgttgattctgaatacatcgtgacgcgcgtgatgtgcagtcgcagctttatgacctatggaactttgtttaccacctctctatccattcgcttaacatctatgggttgttatactctaagccctggttcaacaccacctgtgtactctttgctgcctctatcgctgcctctactacagctatggtgggagacattctcaattcccagaaggcatcaaccaatttgatggccatgtattttccaccgttttttccattaagggttctggctatagtgcg

SEQ ID NO: 13338 - DNA, 1243 bp, Gossypium hirsutum
  Clone ID: GOSHI-09MAY01-C55_1
ggaatttggatatgtttatgtagaatttcctttatttttatcttgtcatcaaaaagtatagataatataaaaaaataatggaagtcatagaccacttctttaatttttgtagtatttatatgtgatgaacccacgcgccctccctcccgcccccagtagagcttctttctagctatatccttatcagctttcaaagatggcaggaatcgcctttggtcgctttgatgattccttcagtttggggactgtcaaggcctaccttgctgagtttatctcaactttggtgtttgttttcgccggcgttggctctgccattgcttacaacaagttgacaactgatgcagccctagatcccgatgggctagtcgccattgctgtttgccatggatttgctctctttgttgcagtggctatcggtgccaacatctcaggtggccatgtcaaccctgcagtcacttttgggttagctcttggtggccaaatcaccatactaactggcatcttttactggattgcccaacttcttggatccattgttgcttgcttcttgctcaaggctgtcactggtggcttgacagttcctatccacggtcttggagctggagttggagctattcaaggagtggtgatggagatcatcatcacatttgcattggtttacacagtgtatgcaaccgcagctgacccaaagaagggatcactcgggaccattgcacccattgccatcggcttcattgttggtgccaacatcttggccgctggtccattctctggtggatccatgaacccagctcgctccttcggaccagcagtggctagtggcgacttcaacggcatatggatctactgggtgggaccactgatcggtggcggattgtctggtctcatctatggaaatgtgttcatgaactctgaccatgcaccattgtccaatgacttttaatcaagttattctcaggacagtctaattcgcttaatttgatcttttaatccattgcttactgtaataaaatggcacttcttgttgttctttcctcttttagctttgggtttggttttgttttgttattgtttgtaaagttattgtcgccaatcgttgctatcgtggaaatggatgaggtggtttttttattatttccaaaaaaaaaaaaacaaaaaaaaaagagacaatctagaaacataatggtaaatacaatagaaaaaagccctcgatagaaaaaaaataaaaaaaagcggggggggc

SEQ ID NO: 13339 - DNA, 463 bp, Gossypium hirsutum
  Clone ID: uC-gsronu33B147c11b1
ttagttgccattgctgtttgccatggatttgctctctttgttgcagtggctatcggtgccaacatctcaggtggccatgtcaaccctgcagtcacttttgggttagctcttggtggccaaatcaccatactaactggcatcttttactggattgcccaacttcttggatccattgttgcttgcttcttgctcaaggctgtcactggtggcttgacagttcctatccacggtcttggagctggagttggagctattcaaggagtggtgatggaagatcatcatcacatttgcattggtttacacagggtatgcaaccgcagctgacccaaagaagggatcactcgggaccattgcacccattgccatcggcttcattgttggtgcccacatcttggccgctggtccattctcatggatcccaaaatggtgccattgatgttgatgaatgtgccgatcttttatc

SEQ ID NO: 13340 - DNA, 457 bp, Gossypium hirsutum
  Clone ID: LIB3148-050-Q1-K1-B1
cccacgcgtccggccaacatcttggccgctggtccattctctggtggatccatgaacccagctcgcgtccttcggaccagcagtggctagtggcgacttcaacggcatatggatctactgggtgggaccactgatcggtggcggattgtctggtctcatctatggaaatgttttcatgaactctgaccatgcaccattgtccaatgacttttaatcaagttattctcaggacagtctaatttgcttaattcgatctcttaatccattgcttactgtaataaaattggcaccttctagttggtgcttttcctttttttaagctttgggtttgggttttggttttgatatttgtttggtaaaagatatttggtcctcaaatcgtttgcttattgggggaaatttgaatgaagggtgggttttttttttttttttactaaatatattttactgtgtatta

SEQ ID NO: 13341 - DNA, 1061 bp, Gossypium hirsutum
  Clone ID: GOSHI-09MAY01-C75_16
caagcggaacaacttcagaaatttttactgatgccgttagcagagatagagtatgaagacgtccaagtctggaagggagaattattcggtgaattttctgtacacagcacctataaactattacaagaggctaccctaaatcctactagttatttattacagaccaaatataaagaattttatagcaacttatggggcttacagttacgccccaaaaattacaatgactatttggagaatctcctgagactatattcccaattttgttaatctcaggtgcaggaaagtcattacaaatgatgaatgccctcgttgccggtcctggtttgaagaaagcctccatgtattttgagagtgcccaaaagcaacgattcagttcgacgcagcgtttgacagaagaagctccaagtcagcaacaggactggtagcatgggaccaaaaaggggatttgttggtgcttaagacggtggttcgcaccaatgtttcttcctcgttcgtagcagagcccggacgcgtgggcgggcgcgtgggcggacgcgtgggcggacgcgtgggtttttttttttttttttttttaataatacctttcaagcggaaacaactcagaaaattttactgatgccgttagcagagatagagtatgaagacgtccaagtctggaagggagaattattcggtgaattttctgtacacagcacctataaactattacaagaggctaccctaaatcctactagttatttattacagaccaaatataaagaattttatagaaaattatggggcttacagttacccccaaaaattacaatgactatttggcagtttgcggcttccagtttatactgacccacctagatggtaggcaacttctcattaagacccatcctggtgaagtggttaagcctgatcaatgcaaggccataaatgatgaagggatgcctatgtatcaaaggccattcatgaggggtaaactatacattcactttaccgttgattttcctgactccttggcccccgagcagtgcaaggcactcgaggctgtgctaccttcgagggcc

SEQ ID NO: 13342 - DNA, 444 bp, Gossypium hirsutum
  Clone ID: GOSHI-09MAY01-C75_14
cgggatctcaagcaacgctatggggataatgaccagcttcattaacgacatctttgagaaactggctcaagaagctatcgaggctcgcgaggtacaacaagaagcccacgattacttcaagggaaattcagaccgctgttaggctcgttcttcccgctgagcttgcgaaacacgccgtctctgaaggtaccaaggcggtgactaagtttactagctcttgaatttaatgaaatttggggattttaggtttagcgttttttatggaggttcctttttgaaattgcgttgatgtatgtaactccttgttactgatggttttgaaattgttggaaccatgaaatgaaagtgtatccttttgtctatgttaaggaatcgaaatgtttctttgtttaacaatggctgcgtattccgcataactaaataaagactccgcctaattcttcc

SEQ ID NO: 13343 - DNA, 867 bp, Gossypium hirsutum
  Clone ID: GOSHI-09MAY01-C75_10
cataaataacctcccggaggagtaactttcactctactgattagtcattacccggaaggatccagctatgacagtttcctccgttaccgccatatgacgcccaaggcaatgcggccccttagttttttttttttgaggagatatcggaattttctgtacacagcacctataactattacaagaggctaccctaaatcctactagttatttatacagaccaaatataaagaattttatagaaaattatggggcttacagttacccccaaaaattacaatgactatttggagaatctcctgagactatattcccaattttgttaatctcaggtgcaggaaagtcattacaaatgatgaatgccctcgttgccggtcctggtttgaagaaagcctccatgtattttgagagtgcccaaaagcaacgattcagttcgacgcagcgtttgacagaagaagctccaagtcagcaacaggactggtaggatgggaccaaaaaggggatttgttggtgcttaagacggtggttcacaacaatgtttcttcctcgttcgtagcagaggcgtacacatgtttggaaagtataaagttaggaatctcactaagaatgttatcaatcaaaatcatgggggactccagaacagttattaaaaaatgttgaaagcttcactagataaattagtgattggggctattatcagagatatccataataagaaaccatgtttccagtaactaaatttccaatacattaatagatcagagaactcgcatgcacataggttggcaaaaagtgctcttgacagagaggaaaacgtttacctgataggagtagatctggaccggcatgttcttgcctgggagaggagag

SEQ ID NO: 13344 - DNA, 706 bp, Gossypium hirsutum
  Clone ID: GOSHI-09MAY01-C75_9
gacccacgcgtacgcccacgcctgcagaaaatcgcgcaaattttatcgtcttccactcaaaacaaaccagaagagaatctaccatggcgcccaaagccgagaagaagcctgctgagaagaagccggccgaggagaaaaagactaccgtcgctgagaaatcccttgccgagaagaagccgaaggccggtaagaagcttcccaaagaaggcggcgcggccggagacaagaagaagaagaaggccaagaagagcgtggagacctacaagatctacatcttcaaggtccttaagcaagtccatcctgatatcgggatctcaagcaaggctatggggatcatgaacagtttcatcaacgatatcttcgagaagcttgctcaggaggcttctagactcgcgaggtacaacaagaagccaacgattacttccagggaaatccagaccgcagttaggcttgtacttcccggagagctcgccaaacacgccgtctctgaaggtactaaggcggttaccaagtttactagctcttgaaatttgaccttagggttttttttctctctgtaatttggcggaattcgataaatttaggattagggttttatggaatcttaaattgttgttgttacccttgtgttggttgatgtggttttgttgtaattacaagttgctaatggaatttggagtaaatctcttcgcttaaatgttataat

SEQ ID NO: 13345 - DNA, 698 bp, Gossypium hirsutum
  Clone ID: GOSHI-09MAY01-C75_8
tttcatcttctccaaatcagttttcaaaactctattggctcctaaaccccaaacgaaccctcagaatggcaccaaaagccgagaaaaagccagcagagaagaaaccagcggaggagaagaaaacagtagctgagaaagctccgccggagaagaagccaaaggcaggtaaaaagctaccgaaggaaggcggagcagctgccggagacaaaaagaagaagaggaccaagaagagtaccgaaacctacaagatctacatcttcaaggtccttaaacaagttcatccagatatcggtatctcaagcaaagctatgggcattatgaacagtttcatcaatgacatctttgagaaacttgctcaagaagcttcgagactcgcgaggtacaacaagaaacctactattacttctagggaaatccagaccgctgttaggcttgtacttcccggtgagctagcgaagcatgccgtttctgaagggactaaagctgtgactaagtttacttcgtcttgaagaaggggatttgtacgtttgtctttttagttagggtttgctttaagttgatgtttggagattgtgtattggaagatggatttactcgatcctgatgtgattatatagtagatttaaatggaattatttcacaatttcgcattatttctaggcatttgttcgtttttctaattcaactaatgggagatt

SEQ ID NO: 13346 - DNA, 866 bp, Gossypium hirsutum
  Clone ID: GOSHI-09MAY01-C75_7
cccacgcgtacgcccacgcgcccgcgcacccgcgggtttcagtattctctcattcttttcccgggacccagacaaactctaagaacaagaaaatggcaccaaaagctgagaagaagccagctgagaagaagccagcggaggagaagaagacggtagctgagaaagcccccgctgagaagaagccaaaggcaggcaaaaagcttcccaaggaaggcggagctgcggccggagacaagaagaagaagagggtcaagaagagtactgagacctacaagatctacatcttcaaggtcttgaagcaagttcaccctgatatcggtatctcaagcaaggctatgggaatcatgaacagcttcatcaatgatatctttgaaaagcttgcccaagaatcgtctaggctcgcaaggtacaacaagaagcctaccatcacttccagggaaatccagaccgctgttaggcttgtacttcccggtgagcttgcgaaacacgccgtttctgaagggaccaaggccgttaccaagtttacatcttcttgaaaaatgtgatttgtggttagggttagggttttcattttaaaagtagatcgcgttgtttttctcttccgttgtgaatcattctgctcttctgttatatgattccgtgtgtatcttgaagatggatctgctcgatcctgatttgaacatgttagaattgaatgcaattaaatactaaaatttagcgtattttcttgctttttataatctgtgggggcccgtacccaattgcctttgtggcgattacatcatggcgtgtttaaacgcggaatgtaaacctggttcccactaatgctgtagaatccctagcactgctatacaaaagccacgacg

SEQ ID NO: 13347 - DNA, 1154 bp, Gossypium hirsutum
  Clone ID: GOSHI-09MAY01-C75_6
cccacgcgtccgcccccgcgtccgcccacgcgtccggtgtttctctccatctagccgtctcgcgtgcgccctgtggctctcttcaaccctcgcatatctcttcaagatctgatctgatctgacaaaaaaatgttcgggagagcaccaaagaaaagcgataatactaaatactatgagatattgggagtgcccaaaaccgcttcccaagatgatttgaagaaggcttatagaaaagctgcaattaagaatcatcctgataaaggcggtgatcctgaaaagtttaaagagttggctcaagcttatgaggtgctgagtgacccagagaagcgtgagatatatgatcagtatggcgaggacgcccttaaagaaggaatgggtggaggcggtggtgcccatgatccatttgatatcttccaatccttctttggtggcaatccttttggtggtggtggtagcagccgaggccgaagacaaagaaggggagaggatgtaattcatcccctaaaggtttctttggaagatctctataatgggatttccaaaaagctttctctttcacgcaacataatttgctccaagtgcaaggggaaagggtctaaatcaggtgcatcaatgaaatgttctggttgtcaaggttcaggaatgaaagtctccatcagacaccttggtccttccatgatccaacagatgcagcacccttgcaatgattgtaagggtactggtgagaccatcaacgataaggaccgttgcccccaatgcaaaggtgagaaggttgttcaggagaagaaagtcttggaggttaatgttgaaaagggtatgcagaacggacagaagattactttccctggagaagcagatgaagcacccgacacagttactggggatattgtatttgtcctccaacagaaagatcatccaaaatttaaacggaagggtgatgacttatttgtagaacatacgttgacacttactgaggcactttgtggcttccagtttatactgacccacctagatggcaggcaacttctcattaagacccatcctggtgaagtggttaagcctgatcaattcaaggccataaatgatgaagggatgcctatgtatcaaaggccattcatgaggggtcaactatacattcactttactgacgattt

SEQ ID NO: 13348 - DNA, 731 bp, Gossypium hirsutum
  Clone ID: GOSHI-09MAY01-C75_5
ccgcccacgcccgtccgctccacgccgtccggttcatactgactcacttagatggcagacaacttctcattaaaaccccaacctggggaagtcgttaagccctgatcaattcaaagcaataaacgatgaaggggaatgccgatttatcagagggccatttatgagaggggtaaacttgttgcatttgcacttttcacttttgttgacttcccttggactcgttgaccccagaccaatgcaaggcactggagggctgtgcttcctcccaaggggcatcggttcagctttgactgacatggagctggatgagtgcgaggaaaccaaccatgcatgatgttaacattgaggaagaagatgcgtaggaaacaaaggctcaagctcaacaagaagcttatgaggaagatgaggacatgcatggtggtgcgcagagagtacaatgcgctcagcaatgataaaaaagccgaatgtccgagacacagacggtggtttttggcgatggaatgtacctgtggttaaaaaaaaaaaaaaagaaccatttgagagtaagattctcaaacattgttgtgttttggtagtcctttattttttgtttttaatagtgcaagtattttagtaattgcaatggtgttatatgttctgaaacctgatactaagtatgcaacgattaaaaaaaaaaaattaataaaaacaaaaattaataaattgaaaaaagaaaaaataagttttttttt

SEQ ID NO: 13349 - DNA, 927 bp, Gossypium hirsutum
  Clone ID: GOSHI-09MAY01-C75_4
cccacgcgtccgcccacgcgtccgcccacgcgtccgcccacgcgtccgcccacgcgtccgattactttccctggagaagcagatgaagcacccgacacagttactggggatattgtatttgtcctccaacagaaagatcatccaaaatttaaacgaaagggtgatgacttatttgtagaacatacgttgacacttactgaggcagtttgcggcttccagtttatactgacccacctagatggtaggcaacttctcattaagacccatcctggtgaagtggttaagcctgatcaatgcaaggccataaatgatgaagggatgcctatgtatcaaaggccattcatgaggggtaaactatacattcactttaccgtcgattttcccgactccttggcccccgagcagtgcaaggcactcgaggctgtgctacctccgagggcctcagtccagctgacagacatggagctggatgagtgtgaggaaacaactctatatgatgtcaacatcgaggaagagatgcgtaggaagcaggcgcaagcagctcaagaggcttatgaggaagatgatgacatgcatggtggtgcccaaagagtgcaatgcgctcagcaatgatcggtggcaggcggtaaggaatggaatgtatgattgtttaacaaaaattatttgaaaataccattctggatatggttgtttgcttagaccatttcttctagagtgctatctgctttggtaactggtaaagtgtatggaaagatttagcgttggaacttgacctatttgtttatggtatacaacctattgcttcttgtgagcttagtttttttagttttgattttatatttgaatttgagaaatcatttagggatattttatgatttgaaggtgttcattgttccgatttgattcgggtcattataagatgtttgg

SEQ ID NO: 13350 - DNA, 1329 bp, Gossypium hirsutum
  Clone ID: GOSHI-09MAY01-C75_3
cccacgcgtccggcccccactcttctacttttcgccaggcttcaatgttttgttgacctctcaacttgcttagtttcctttggttgtcgtcgttgtttttcgtgaaaatggcggtggatctgatgagttttcctaagatggatgatcagatggccattcaggaggctgcaacgcaaggtatgaagagcatggagcacctgattagcctcctttctcaccagtctaaccgactcgactgcgctgaggttgccgatctcaccgtctctaagttcaaaaaggtcatctcactaattaacagaaccggtcacgctcggttcagacgtgcaccgattcagtcctcgtcttccttttcctcaccgtcatcatccgctgcttctctaactgttactgattcccacaaggctctaactcgaactcctgccccggttgaagcaccgccgctgaccgtaaatccggcgccggttgaagctccaagtacggctcctgttagtttcgttccttcgcaaccccagagtttaactctcgattttacgaaaccttgtttgtttagctctaatactaaaagtactgagttggagttcacaaaagaaagcttcagcgtgtcgtcgaactcttcgtttatgtcttctgccatcaccggagacggcagcgtttcgaatgggaagcaaggatcatctctatttttgacaccggcggcggccgtttccgcgggaaaaccaccactatcctctgctccattcaagaagaggtgccgcgaacatgagcactccgagaacgtctccggcaacggcaagtgtcactgctcaaagcgaaggaaaaacagggtgaaaaaagtaatcagagttccagccatcagttctaagatcgccgacattccggcagacgagtattcatggaggaagtacggtcaaaaaccgatcaagggctcaccatacccacggggatattacaagtgtagtacggtcagagggtgtcccgctaggaaacacgtggagcgagcgaccgatgatccgtcgatgttgattgtaacatacgaaggggagcaccggcacggggaaggcgcggcgcaggagaacatggctccaggtgtggggctggtattcaagtcaacttgataaacaaataaacttaaaagagttttgtaatattttagtggttgagggggctgaatgtaaatttgttttttccttagatatattataaattttcctaatgaaaaaagtaatgcttatttaaattaattggtgattgctgatgacgatgtaaatagcaataataatttcttaatattcccacaaaaaaaaaaaaaggcgggcttttaaggatcaa

SEQ ID NO: 13351 - DNA, 801 bp, Gossypium hirsutum
  Clone ID: GOSHI-09MAY01-C75_2
ccctcgcgtccgcccacgcgagcccccgcgtcgtcgcccaccgcgtccggttcaattctctcatcccttgttttccttctaagccaaacgaaatctaatcatttttgaaaaatggcaccaaaagctgaaaaaaagccagccgagaagaagcctgcggaggagaagaaagccgtagctgagaaagccccggcagagaagaagcctaaggctgggaaaaagcttcccaaggaaggcggagcggctgccggagacaagaagaagaagagagttaagaagagcgtcgagacctacaagatctacatcttcaaggtcctgaagcaagttcaccctgacatcgggatctctagcaaagctatggggatcatgaacagtttcatcaatgatatcttcgagaagcttgctcaagaagcctctaggctcgcgaggtacaacaagaaacccaccatcacttccagggaaattcagaccgctgttaggcttgtacttcccggtgagcttgccaagcacgccgtttctgaaggtaccaaggccgtgaccaagtttacttcatcttgaaaaggctattagttgatctgtagttggggttagggttaggaggttgctttttaaattagatcggtgtggtttttatgtttatttttctgaaatttccgcatatttattttgatatatggtttgtattagcgagatggatctactcgatcctgatatgactattgtagaaattaatgctattaacgacaacttaatttcttggaagcttacaaaaaactaccttttatactatttctttttttaatt

SEQ ID NO: 13352 - DNA, 1670 bp, Gossypium hirsutum
  Clone ID: GOSHI-09MAY01-C75_1
atctggacacccgtgccattttcacgcccatatgacttgtactgtagtcccccccggatcccccctccccctacgcctcactccgccgtctcgcctctcgcttattggttcaagatctggttttgatctgatcagatcggataaaaatatcaaaacatgtttgggagagcaccgaagaaaagcgataataccaaatactatgagattttgggagtatcgaaaaacgcttctcaagatgatctaaagaaagcttatagaaaagccgctattaagaatcatcccgataaaggcggcgatcctgaaaagtttaaagagttggctcaagcttatgaggtgctgagtgacccggagaagcgtgagatttatgatcagtatggtgaggacgcccttaaagaagggatgggcagcggtggcggtggccatgaccctttcgatatcttccagtcattctttggtggcaatccttttggtgctggtggaagcagccgaggcagaagacaaagaaagggggaggatgtaatccatcccctcaaggtatcattggaagatctctacaatggaacatcgaaaaagctttctctttcacgaaacgtaatatgctccaagtgcaagggcaaagggtctaaatctggtgcatcaatgaaatgttccggttgtcaaggttcaggaatgaaagtctccattcggcacctcggtccttccatgatccaacaaatgcagcatccttgcaatgagtgcaagggtactggtgaaaccatcaacgataaggatcgttgcccacaatgcaaaggtgataaggttgtgcaagagaagaaagtcttggaggttattgttgagaagggtatgcagaatggacaaaggattactttcccaggagaagctgatgaagcgcccgatacggttactggggacattgtattcgtcctgcaacagaaagatcatcctaaatttaaacgaaagggtgatgacttatttgtagagcatacattggcacttactgaggccctttgtggctttcagttcatactgactcacttagatggcagacaacttctcattaaaacccaacctggggaagtcgttaagcctgatcaattcaaagcaataaacgatgaaggaatgccgatttatcagaggccatttatgagaggtaaacttttcattcacttcactgttgacttccctgactcgttgaccccagaccagtgcaaggcactagaggctgtgcttcctcccaaggcatcggttcagctgactgacatggagctggatgagtgcgaggaaacaaccctgcatgatgttaacattgaggaagtgatgcgtaggaaacagactcaagctcaacaagaagcttatgatgaagatgaggacatgcatggtggtgcgcagagagtacaatgcgctcagcaatgataaaaaaaagccgaatgtccgagacacagacggtggtttttggcgatggaatgtactgtggttaaaaaaaaaaagaaagaacatttgagagtaagattctcaaaacattgttgtgttttggtagtcctttattttttgtttttaatagtgcaagtattttagtaattgaaatggtgttatatgctttgaaacctgatgctttctaagtatgcaaagatttatgcacggaacttgtcttttctgtcaatactttttgt

SEQ ID NO: 13353 - DNA, 638 bp, Gossypium hirsutum
  Clone ID: LIB3543-048-Q6-K6-F5
ccccgcgtccgcccacgcgtccgcccacgcgtccgcaagttcaattctctcatcccttgttttccttctaagccaaacgaaatctaatcatttttgaaaaatggcaccaaaagctgaaaaaaagccagccgagaagaagcctgcggaggagaagaaagccgtagctgagaaagccccggcagagaagaagcctaaggctgggaaaaagcttcccaaggaaggcggagcggctgccggagacaagaagaagaagagagttaagaagagcgtcgagacctacaagatctacatcttcaaggtcctgaagcaagttcaccctgacatcgggatctctagcaaagctatggggatcatgaacagtttcatcaatgatatcttcgagaagcttgctcaagaagcctctaggctcgcgaggtacaacaagaaacccaccatcacttccagggaaattcagaccgctgttaggcttgtacttcctggtgagcttgccaagcacgccgtttctgaaggtaccaaggccgtgaccaagtttacttcatcttgaaaaggctatttgttgatctgtagttggggttagggttaggaggctgctttttaaatagatcggtgtggtttttatgtttatttttctgaaattc

SEQ ID NO: 13354 - DNA, 422 bp, Gossypium hirsutum
  Clone ID: uC-gsflnu33B136f09b1
ttaatcctatctctatatgatgtcaacatcgaggaagagatgcttaggaagcaggcgcatgcagctcaagaggcttatgtggaagatgatgacatgcacggcggtgcccaaagagtgcaatgcgctcagcaatgatcggtggcaggcggtaaggaatggaatgcatgattgtttaacaaaaattatttgaaaataccattctggatatggttgtttgcttagaccatttctcctagagtgctatctgctttgggaactgataaagcgtatggaaagatttagcttcggaacttgaccaatttgtttatggtatacaacctattgcttcttgtgatcttaataataagaatcatccgctgcttctctaactgttactgattcccacaaggctttaactcgaactcctgccccggttgaaacac

SEQ ID NO: 13355 - DNA, 383 bp, Gossypium hirsutum
  Clone ID: LIB3146-024-Q1-K1-C9
cggacgcgggggtcgaactatgcgtttatgtccgctgccaggaccggatacggttgtttttttaacgggaagcaaggaacaacatctattgatgacaccggatggaggacgagaacagacggaaaaccaccactatcctctgctccattcaagaagaggtgccgcgaacatgaacactccgagagcgtctccggtaacggcaagagtcactgctcaaagcgaatgaaaaacagggtgaaaaaagtaatcagagttacatccatcagttgtaagatcgccgacattccggcagacgagtatacatggaggaagtacagtcaaaaaccgatcaagggcttaccatacccacggggatattacaagtgtagtacggccagagggtg

SEQ ID NO: 13356 - DNA, 328 bp, Gossypium hirsutum
  Clone ID: LIB3145-011-Q1-K1-H6
acgatgatccgtctatgttgattgtaacatacgaaggggagcaccggcacagtgaaggcgcggcgcaggagaacatggctccaggtgtggggctggtagtattcaagtcaacttgataaacaaataaacgtagagttttgtaatattttagagtggttgagggggctgaatgtaaatttgttttttctttagatatatttataaattttcctagtgaaaaaaaagctagatcataaaaaatttcaaacatataaacatgatggtcttgaataaaaaaacggaattgttgaaaacaaatttacgatactatgcatctcattataaaact

SEQ ID NO: 13357 - DNA, 493 bp, Gossypium hirsutum
  Clone ID: LIB3585-017-P1-K1-A4
cgccgtcgcaaaaaccaaggcagctatggcaactgatggaatccttgccttcattggcttgttcactatagcctaccggtgaactctcatatccacccgagagtgtgtttccggtataactacaacggccgtacggacagccgagagaggccctggctcatctgagtccgcctaagctgccgatgcgggtgctggggacattgtattcgtcctgcaacagaaagatcatcctaaatttaaacgaaagggtgatgacttatttgtagagcatacattgtcacttactgaggccctttgtggctttcagttcatactgactcacttagatggcagacaacttctcattaaaacccaacctgtggaagtcgttaagcctgatcaatttaaagcactataatgatgaatgaatgccgctttatcagatgccatttatgagaggtaaactgtacattcagttcacttgtggactttcctgactcgttgaccccggacc

SEQ ID NO: 13358 - DNA, 422 bp, Gossypium hirsutum
  Clone ID: LIB3189-030-P1-K1-D1
ataacctccaagactttcttctcttgcacaaccttatcacctttgcattgtgggcaacgatccttatcgttgatggtttcaccagtacccttgcactcattgcaaggatgctgcatttgttgagaagggtatgcagaatggacaaaggattactttcccaggagaagctgatgaagcgcccgatacggttactggggacattgtattcgtcctgcaacagaaagatcatcctaaatttaaacgaaagggtgatgacttatttgtagagcatacattggcacttactgaggccctttgtggctttcagttcatactgactcacttagatggcagacaacttctcattaaaacccaacctggggaagtcgttaagcctgatcaattcaaagcaataaacgatgaaggaatgccgatttatcaga

SEQ ID NO: 13359 - DNA, 346 bp, Gossypium hirsutum
  Clone ID: LIB3146-019-Q1-K1-G9
cccatcatccggttaggcttgtactttcttttgagcttgcgaaacacgcctttcggggggaccaaggccgtaccaagtttacttattcttgaaaaatgtgatttgtggtttgtgttaaggttttattttaacagtcaatcgcgttgtttttctgtaccgttgagaatcattctgctcttctgttatatgattccgtgtgtattttgaaaataaaaaattatattttttaatttaattacataaaaaatttatatttttttatattatataaataatttttgttttttttatatattccatatcttttcttattttttgtatataatatggcgtcttgtttttttta

SEQ ID NO: 13360 - DNA, 325 bp, Gossypium hirsutum
  Clone ID: LIB3149-051-Q1-K1-C7
caaggccgtgaccaagtttacttcatcttgaaaaggctatttggtgatctgtagttgggggtggggttaggaggctgctttttaaattagatcggtgtggtttttatgtttatttttctgaaatttccgcatatttattttgatatatggtttgtattagcgagatggatctactcgatcctgatatggctattgtagaaattaatgctattaacgacaacttaatttcttggagcttgtttttggctagtttttaaatttatttttttcttagataatttcgattaaaattaaaaattttagtttcatcaaattctttactaaa

SEQ ID NO: 13361 - DNA, 509 bp, Gossypium hirsutum
  Clone ID: uC-gsflmaxxa088g07b1
tttattctctcatcccttgttttccttctaagccaaacgaaatctaatcatttttgaaaaatggcaccaaaagctgaaaaaaagccagccgagaagaagcctgcggaggagaagaaagccgtagctgagaaagccccggcagagaagaagcctaaggctgggaaaaagcttcccaaggaaggcggagcggctgccggagacaagaagaagaagagagttaagaagagcgtcgagacctacaagatctacatcttcaaggtcctgaagcaagttcaccctgacatcgggatctctagcaaagctatggggatcatgaacagtttcatcaatgatatcttcgagaagcttgctcaagaagcctctaggctcgcgaggtacaacaagaaacccaccatcacttccagggaaattcagaccgctgttaggcttgtacttcctggtgagcttgccaagcacgccgtttctgaggtaccaaggccgtgaccaagtttacttcatcttgaaaaggc

SEQ ID NO: 13362 - DNA, 474 bp, Gossypium hirsutum
  Clone ID: LIB3189-041-P1-K1-B7
tctagatcgcgagcggctgccctatcaaattatttttgtgagagcacccattaaaatcgggaggggcaaatactatgagatttggggagtatctaaaaacgcttcccaagatgatctaaataaagcttattgaaaagccgctattaagaatcataccgataaaggcggcaatcctgaaaagtttaaagagcaggctcaagcttatgaggagctgaatgacccggagaagcgtgagattcatgatcagtatggtgaggacgcccttaaagaacggatgggcagtggtggcggtcgccatgaccctttagaaaacttccagtctttctttggtggcaatccttttggtgctggtggcagcaacctgggcagaagacaaaaaaggggggaggatggaatccatcccctcaaggtatcattggaagatctgtacaatgggacatcgaaaaagctttctctctcacgaaacgtaatctg

SEQ ID NO: 13363 - DNA, 337 bp, Gossypium hirsutum
  Clone ID: LIB3166-013-P1-K1-C5
gcaaatgctattgctttacactcaatacataccatattagattctaccacgccgctcacaggcgggactaatcctgctgagaagaccaccgtcccagagaaaaagactactcactctctcaaacacattgccgagtagaagccaactgccggttagaagctttccaaagaaggcggcgcgcacggagacaagaaggacaatatgccaagaagagcgctgagacctacacgatctacatcttcaaggtccttaagcaagtccatcctgatatcgggatctcaagcaaggctattgagatcatgaacagctgcatcaactatgtcatcaagaagcttgc

SEQ ID NO: 13364 - DNA, 405 bp, Gossypium hirsutum
  Clone ID: LIB3825-026-Q6-N6-A11
aagttccaaatctaaatcgttgcatacttagtatcaggtttcagaacatataacaccattgcaattactaaaatacttgcactattaaaaacaaaaaataaaggacctgaaaaaagccaggcgcgaggaagaagcctgcggagggagaagaaagccgtagctgagaaagccccggcagagaagaagcctaaggctgggaaaaagcttccctggaagtgatggggggtttcttgttgtacctcgcgagcctagaggcttcttgagcaagcttctcgaagatatcattgatgaaactgttcatgatccccatagctttgctagagatcccgatgtcagggtgaacttgcttcaggaccttgaagatgtagatcttggaggtgtggacgctcttcttaactctcttct

SEQ ID NO: 13365 - DNA, 235 bp, Gossypium hirsutum
  unsure (1)..(235): unsure at all n locations
  Clone ID: LIB3148-011-Q1-K1-D4
tggccgccctttttttttttttttttntttttttttttttnttaatgagatcgcgttgtttttctgttccgttgtgaatcattctgctcttctgttatatgattccgggtgtattttgaagatggatctgctcgatcctgatttgaacatgttagaattgaatgcaattaaatactaaaatttagcgttgaaaaaaaaaaaaataaataataaatatattaaatttaataaaatg

SEQ ID NO: 13366 - DNA, 298 bp, Gossypium hirsutum
  Clone ID: LIB3147-013-Q1-K1-D3
cccacgcgtccgaaaaaaaaaaaaaaaaattatatattctaataaaaaaaaaaaaaaaaaaggggaaggagactaccgtcaattaaaaaattccctgccgaataaaagccgcatgccggtatagaagcttcccaaagaaggcggtgccagcggagacactcacaagaagtatgccaagacgagcgtggggacctacaagagctacagattcaaggtccttaagcatgaccatcctgatatcgggatctgaagcatggctatggggatcatgaacagggtcatcaacgatatcttcgaa

SEQ ID NO: 13367 - DNA, 207 bp, Gossypium hirsutum
  Clone ID: uC-gsronu33B004d06b1
atcccttattccttatacctcgctcgccttctagcgcggggtcttaaaagcaaagagggttcccactcttttctttccttttaagacactgatctattcccaccaaaaaatgttcggtagagcacctaagaaaagcgataatactaaatactatgagatattgggagtgccccaaaccgcttcccaagatgatttgaagaatgctta

SEQ ID NO: 13368 - DNA, 740 bp, Gossypium hirsutum
  Clone ID: GOSHI-09MAY01-C15_1
cccacgcgtccgcccacgcgtccgctttatttttcactttccgcacacttagcttaattaagcaagctcgtaagctgttttcatcaatggccgaccgtgaccgctcttaccgatttgaccaggttgttcgtggtgatagaacgaactatcaaagcggaccatcaacaacccaagttctaaccgtcctcaccctccttcccatcggcggcactctccttgcattagccgggctaaccctcaccggcaccgtcatcggcctatgcgtggcaacgccactcttcgtcatcttcagcccggttctgctcccagctgccatcgcggttttcatggctgtggccggtttcttgtcgtccggggcttttgggttgacgggactgtcctcgctctcctacgtatttaaccgcttcagacaggcgactggcaccgagcagctcgacgcggaccgggccaagaggggcatgcaagatatggtggggtatgtgggacaaaagactaaggaagctgggcagactatcgaaaacaaggctcatgagggtggtaggacatgaatatgaaccatggaaggttgctttgcttgcttgtaaaatgtactttaagtgtgtttcattttcgagaagtctttcgtctttgcgattttcgtgcatgttgattttatcttcttctttttctctagttgtgaaataatgggtaatatactaatatattagatttgtggtgatatggggtttttttttatggtt

SEQ ID NO: 13369 - DNA, 571 bp, Gossypium hirsutum
  Clone ID: LIB3582-054-P1-K1-D9
tttgttcgcactttctacgtcacggacacttggctaaactcagcaagcttgtagggggtggtgatcaatcggctgccgggaccaatcttaccgggctttgaccaggttgctcgaggtgatagaacgaactatcaaagcggaccatcaacaactctatttctaactgtcctcaccctgcttggtatgggggggactttccttgcattagccgggctaaccctgaccggcgcgcgggatgggcctatgcatggcaacgccactcttcgtcatcttcagcccggttctgggcccagctgccatcgcggacttcatggctgtggccggtttcttgtcgtccggggcattcgggttgacggggctggcctcgctctcctacgtatttaaccgcttcagacaggcgactggcaccgagcagctcgacgcggacctggccaagaggggcatgcaagatatggtggggtatgtgggacaaaagactaaggaaactgggcagactatcgaaaacaagctcatgagggtggtaggacatgaatgtgaaccatggaaggtgactatgcttgcttgtaaaatg

SEQ ID NO: 13370 - DNA, 712 bp, Gossypium hirsutum
  Clone ID: GOSHI-09MAY01-C35_2
cggacgcgtgggcacaattcgagcaaaagaaagaaaaggcgtctcatgaacagagttacaaagctggtcgagctgaaggccgagctcatgaaaaaggtgagcaaatgaaggagagcatgaaggagaaagcagaagcagcgaagcagaagacaatggagaccgcagaagcagcgaagcagaagacaatggagaccgcagaagcagcgaagcagaagacaatggagacaacagaagcagcgaagcagaagaccagaggagccgccgagacaaccaacgacaagacaaaacagacggcgggagctgctagagggaaggcggaggaaactaaggagacggagacaagcggagggatactgcagcaggcgggggagaaagtgaggaacgcggcacaaggtgcgactgatgcggtgaaacatacctttggaatggcggatgccgatgaggatgaacataattatccggctactattactaggaaggattagggtagcatgtagagttaagatattaataacagttgcaatttgtacgtgagtggttttagataacgtacggttgcaaacgcttcgttgttatgagcattgtcttactttgttgtttcagctttttttttaataataaaaaatttacttttcccctttttaaaaaaaaaaaaaaaactggctggcctgctatagagctattcaagctaacttactctcacatacgacgt

SEQ ID NO: 13371 - DNA, 1213 bp, Gossypium hirsutum
  Clone ID: GOSHI-09MAY01-C35_1
cctagaattatttataaatttagataatgtatgaaatttgattgtagataataaaatttaaaaacaatattattaaaaaaataaccacaaatcttaaatatgaatattaaattaaacatgaaaagtacaaaaatatatatataatttatatagaatattagacataaattaaagttctataattttcaaacaaatttgattcaaaatcttaacattttttaatataattaaatatctaattcttataaatgtgaagctttctagaaccaatacgtggttgtcatatagctacatctgccacgcgtcgaagcaccataggctgggtaatcaaacaaaatcctgcaaaaacaaaacacattttatttatccatactacaagtgtatagcactgcatggcaagcacgtccaacacgtgtcataaacaagatacgtgtttcatccgtaatgtcccaaagttccctataaatagaaaccacacatgcaatagtaaactccccaacaaacagttacacaattcagagcgaaaagaaaagaaaatggcgtctcatgaacagagttacaaagctggtcgagctgaaggccgagctcatgtaataatattattaattaccactttcgtccttccattttctttttcattaccagattttctttaacattatgttcttttatggtaggaaaagggtgagcaaatgaaggagagcatgaaggagaaagcagaagcagcgaagcaaaagacaatggagacagcagaagcagcgaagcaaaagacaatggagacagcagaagcagcgaagcagaagaccagaggggccgccgagacaaccaacgacaagacaaaacagacagcgggagctgctagagggaaggcggaggaaaccaaggagacaagcggggggatactgcagcaggcgggggagaaagtgaggaacgcggcacaaggtgcgactgatgcggtgaaacatacctttggaatggctgatgccgatgaggatgaacataattatccggctactgttactaggaaggattagggtagcatgtagggttaagataataataatagttgcaatatgtacgtgagtggttttagataacgtacggttgcaaacgcttcgttgttatgagtgtgtgttgtgttactttgttgttttagctttttttttaataataaaaattttaccttttcacttttaaaaaaaataattttagt

SEQ ID NO: 13372 - DNA, 579 bp, Gossypium hirsutum
  Clone ID: LIB3825-003-Q1-K6-A7
aaagaaagaaaaggcgtctcatgaacagagttacaaagctggtcgagctgaagccgactcatgaaagggtgagcaaatgaaggagagcatgaaggagaaagcagaagcagcgaagcaaaagacaatggagacagcagaagcagcgaagcaaaagacaatggagacagcagaagcagcgaagcagaagaccagaggggccgccgagacaaccaacgacaagacaaaacagacagcgggagctgctagagggaaggcggaggaaaccaaggagacaagcggggggatactgcagcaggcgggggagaaagtgaggaacgcggcacaaggtgcgactgatgcggtgaaacatacctttggaatggctgatgccgatgaggatgaacataattatccggctactgttactaggaaggattagggtagcatgtagggttaagataataataatagttgcaatatgtacgtgagtggttttagataacgtacggttgcaaacgcttcgttgttatgagtgtgtgttgtgttactttgttgttttagctttttttttaataataaaaattttaccttttcactttt

SEQ ID NO: 13373 - DNA, 1810 bp, Gossypium hirsutum
  Clone ID: GOSHI-09MAY01-C25_1
ctgatttctgataaaaactcttttttacttttttctttccaatcaataatagttggactgcaacagcagtaacagagtagataccaagtctaacaatggcgaatcctaagctcggtcgaagtcctagcatgagggaccgcgtggaggacacgctttctgctcatcgtaacgagctcgttgctcttctctccaggtacgtggcgcagggaaaaggaatactgcaaccgcatactttgatcgatgaactggaaaatgttgtaggcgacgacaaagctagagagaagctaagtgatggtccctttagcgaagtccttaaatctgcacaggaggccataattctgcctccatacgtggctatagcagttcgcccaagacctggtgtttgggaatacgtacgagtcaatgttcacgaactcagcgtggagcaactggatgtgtccgaatatcttcgcttcaaagaagcacttgcagatgtgggggaggacaaccattttgtgcttgagcttgattttgagccattcaatgcatcctttcctcggcccaaccgctcttcatccattggcaatggcgtccaattcctcaaccgtcacctttcttcaaacatgttccgtaacaaagattctttggagcctttacttaatttcctgagagcccacaaatataaagggcatgcattgatgttgaatgatcggatacaaagtataccccgacttcaagctgctttggctaaggcagaagatcatcttgctaagctttcacctgatgcaccatattctgagtttgaatacgaattacaaggaatgggttttgagagaggatggggagatactgcagctcatgttctggagacgatgcatcttctcttggacatccttcaggctcctgatccctctatattagagacattccttgggagagtgcctatggtgtttaatgttgtcattctgtctccacatggatacttcgggcaagcaaatgtattaggtttgcctgacactggtggtcagggtggttatatactggaccaagtgcgagccttagagaatgaaatgcttctaaggataaagaggcaaggacttgatattactcccagaattcttattgtgaccaggttaatacctgatgcgaagggaactagttgcaatcagcggctggaaagagtcagtgggacagagcatactcatattctgcgagttccttttaggtcagaacatggagttcttcgtaaatggatatcaaggtttgatgtatggccttttctggagacttatgcggaggacgtcgcaagtgaaattgcagcagagttgcagggtattccagattttattataggaaactacagtgacggaaacctggttgcatctttgttggcttacaaaatgggcgtcacacagtgtaccattgcccatgctttggagaaaacaaaatatccagattcagatgtatattggaaaaaggttgacgaggaatatcacttctcttggcagttcactgctgacttagtagccatgagtaatgctgattttattatcaccagcacataccaagagattgcaggaacgaagaatactgttggtcagcttgagagccatactgctttcactcttccacggctgtatgcgagtggttcatggcattgatgtttttgatccgaagttcaatattgtatctcccggggcagatatgtgcatttattttccatactctgcaaaaggaaaagagactgacggcactgcatggctcaatagaagaactgttgtttgcatcctaagcagtatgacgaacacataggtactctgagtgatcggtc

SEQ ID NO: 13374 - DNA, 761 bp, Gossypium hirsutum
  Clone ID: GOSHI-09MAY01-C995_1
cggacgcgtgggcggacgcgtgggatcctcatagagaaaagacagcaatcaaatggatggagcgacttggtcgtgaggctcatcaacataacatagtggttgacattctctgtgctgggacttgccctgtaagggttcctgtgctgcagccacttgcaaatgcttcaggaggtgtgttggttcttcatgatgactttggtgaagcctttggtgtaaacttacaaagggcatctgccagagctgccagttcccatggtttgttggagatacgttgttctgatgatattcttgttactcaggttgtgggtcctggtgaagaggcaaatatagacacccatgaaacctttaaaaatgatatggctgtctctattcaaatgctgagtgttgaagaaacacagtgcttctcaatatcgatgcagaataaacatgacatcaagagtgattacgtatttttccagtttgctattcaatactcaaatgtttatcaagctgatatagctagagtgattactatcagattgccaactgtggatagtggttcggcctatcttcagagtgttcaagatgaggtggctgcagtcataattgccaagaggactctgctgcaagcaaaaagttattctgatgcaattgatatgcagacaacaatagatgagagagttaaagatattgcttcaaaatttgggtctcaagtgccaaagtcaaagctttatcggttcccaaaagaaatatctttactaccagagcttctattccatctt

SEQ ID NO: 13375 - DNA, 1142 bp, Gossypium hirsutum
  Clone ID: GOSHI-09MAY01-C975_1
gctattttggggtttcttttcttttgtttttccgaagatttctctccccatttcttaaatctcatcgccgtcatttccttttatatataaagctgaaaactaagcctgggttttgctttaaacctccattaaaatggcttcttcaatctctgttccatgccctaagatctcttcttttgttaaaccaaagcaaacccaaaagatctcttttgctcttcctcattgttccaagtcttgtttctcatttggatcttcaattaaggtccctgcattttctggatgccagtggcatactgagaagaaaactatggccttcaaagcacgtgcaaagcttaacgaggttgcagcagagaaatcttcgaattctgtaccggtagttgacatgaagtctaaagctgcattgccaaaggaagatgataaatctactggcaatacaataccggatgttgcagcaatctcggctttcatgacacaagtatcggaccttgttaagcttgttgattcgagagatattacagagttgcaactgaagcaatcggattgtgaacttataataagaaaaaaggaagctttgcagccaccggaacaagcacccccagttttcatgccacaatacatgcctcatcatgcaatgtttcaaaccccatttccggcagcagccccaacagcaccaccggcaccttcaaacccagcccctccaccactagcactgccctcagctgcatccccggctaaaactagcagctcatctcatcctccactcaaatgccccatggctggaaccttctaccagagtccggcaccaggtgaaccgccatttgtcaaggtgggagataaagtacagaaaggccaagtaatctgcatcattgaggcaatgaaactgatgaacgaaatcgaagctgaccaatccggaaccataactgagatactagctgaggatggaaaaccagttagtgtggacatgcctctatttgtgattgtaccatgaaaggagcagttccccggttaggtgacaaagaagcattggtgttggtttaatctgtaatttttaaactaataattaaggttgtgtttgtggttctgagaatgattaacactactgtttatgtttttgatataaaggcagaagaattattattatt

SEQ ID NO: 13376 - DNA, 375 bp, Gossypium hirsutum
  Clone ID: GOSHI-09MAY01-C915_15
cccacgcgtccgcccacgcgtccgttgacgcgtggggcgcggtgggatgcaaaggttcgtgaaaaccttgactggcaagacaatcactctcgaggtcgagagctccgacacgatcgacaacgttaaagcgaagatccaagacaaggaaggcatccccccagaccagcaacgtctcatctttgccggaaaacaactcgaagacggccgtaccttggccgactacaacatccagaaggagtcaactctccaccttgtccttcgtttgcgcggcgggatgcaaatcttcgttaagacgcttaccggaaagacgatcactctcgaggtcgagagctctgacacgatcgacaacgtgaaagccaaaatccaagacaagga

SEQ ID NO: 13377 - DNA, 754 bp, Gossypium hirsutum
  Clone ID: GOSHI-09MAY01-C915_11
acgcgtatgaacgcccgtgcgattgaacatgtgctttcgcgatggtctctttagccaaaaaagatgcagatcttcgtcaagactctaaccggcaagacgatcactctcgaggtcgagagctccgacacgatcgacaacgtgaagaccaaaatccaagataaggaaggcatccctccagaccagcagcgtctgatcttcgccggaaaacagcttgaggacggccggaccttggccgattacaacatccaaaaggagtcaactctccacctcgtcctccgtttgcgcggtgggatgcaaatcttcgtcaagaccttgaccggcaagacaatcactttcgaggtcgagagctccgacacgatcgacaacgttaaggcgaagatccaagacaggaaggcatccccccagaccagcaacgtctcatcttcgccggaaacaacttgaagacggccgtaccttggccgactacaacatccagaaggagtcaacgctccatcttggtccttcgttgcgtggcgggatgcaaacttcgttaagacgcttacggggaaacgatcacttctgaggtcgagagctctgaccgatcgacacgtgaaagccaaatccagacaggaggcatcgccagacaacacgttatctcgccggaagaactgggacggcgccttaccgttcatatccgaagatcgatttcattggctggtcagtgaacgactgtagaattgcggagcatctctttatggactcgatcatgtacgaa

SEQ ID NO: 13378 - DNA, 454 bp, Gossypium hirsutum
  Clone ID: GOSHI-09MAY01-C915_9
gctctgtatattgaaattttctttctcgattttctctttagccaaaaaagatgcagatcttcgtcaagactttgaccggtaagacgattactttagaagtggagagctcggatacgattgataacgtgaaagcgaagattcaggacaatgaaggaattccaccagatcagcaaaggttgatttttgctgggaaacagctggaagacggaaggactttggctgattacaatattcaaaaggagtccactcttcaccttgttcttcgtcttcgtggtgggttctaagccttaaggtctcccttaatgtgggttttctggtattacgtgaaggattgtgccctttgatggccttttaaataatcgttaatacgggattgccggatggctatatgtgtggtttgttgttgaacggaatctgcatatgcacctatattctctgctcgtgtcaaactatc

SEQ ID NO: 13379 - DNA, 599 bp, Gossypium hirsutum
  Clone ID: GOSHI-09MAY01-C915_7
ctggtacgcctgcgggtacccgcgccccaatttcccggtggagacacacgcgcgcgctttcgcgtgcgcccacgcgtccgcaaattttggagaaaaccttagactggcaagaacaatcactctcgaggtcgagagctccgacacgaatcgacaacgttaaagcgaagatccaagacagggaaggcatccccccagaccagcaacgtctcatctttgccggggaacatctcggagacggccgtaccttggccgactacaacatccagaaggagtcaactctccaccttgtccttcgtttgcgcggcgggatgcaaatcttcgttaagacgcttaccgggaagacgatcactctcgagggcgagagctctgacaccgatcgacaacgtgaaagccaaaatccaagacaaggaaggcatcccgccagaccagcaacggctcatcttcgccggaaagcaactcgaggacgggcggactttagccgattacaatatccagaaggaatcgactcttcatctggttctacgtcttcgaggtgggatgcagatcttcgtcaagactttgacccgtaagaccattactttagaagtggagagctcgga

SEQ ID NO: 13380 - DNA, 735 bp, Gossypium hirsutum
  Clone ID: GOSHI-09MAY01-C915_3
atcactctcgaggtcgagggctggtgggggcggggcggcaacgtgaaaagccaaaatccaagacaaggaaggcatcccgccagaccagcaacgtctcatcttcgccggaaagcaactcgaggacgggcggactttagccgattacaatatccagaaggaatcgactcttcatctggttctggcgggggggaggggggatgcagatcttcgtcaagactttgaccggtaagaccattactttagaagtggagagctcggatacgattgataacgtgaaagcgaagattcaggacaaagaaggaattccaccagatcagcaaaggttgatttttgctgggaaacagctggatgatggaaggactttggctgattacaatattcaaaaggagtccactcttcaccttgttcttcgtcttcgtggtgggttctaagccttaaggtcttccttaatgtgggttttctggttttacgtgaaggattgtgtgccctttgatggcctcttaaataatttctagcctttgtttaccggttgcatctatgtatggctttcctctttgaatgggatttgcgtatttacctaaaaaaaaaaaaaaaagggcgccaaaaaaaaaaaaataaaaaaaaaaaaaaacttaaatacctatcttactttaaactataacataaattgggggggccgttttagggaaccaagttttccctcccggtgttgggaaggtataatttttttttagg

SEQ ID NO: 13381 - DNA, 1007 bp, Gossypium hirsutum
  Clone ID: GOSHI-09MAY01-C915_2
ggcccggaagacccgggccgaccgcacgcagggcgcccacgcgtccgcccacgcgcgattttctattttgttttctctccctccaattaagatgcagatcttcgttaagaccctgaccggcaagaccatcaccctcgaagtcgagagttccgacacgatcgacaacgttaaggcgaaaatccaagacaaggaagggatcccaccagaccaacaacgtctcatcttcgccggaaaacagctcgaagatggccggaccttggccgattacaacatccagaaggagtccaccctccatctcgtcctccgtctacgtggtggcatgcagatcttcgtcaaaaccctgaccggcaagaccataactttggaagtcgaaagctctgacaccattgacaacgtcaaggcaaagatccaagacaaggaaggcatcccaccagaccagcaaaggctcatatttgccgggaaacaactcgaggacggtcgcaccttggccgattacaacatccagaaggagtccaccctccatttggtattgaggcttcgtggtgggatgcagattttcgtcaagacgttgactgggaaaaccataactttggaggtggagagttccgatacgatcgacaatgttaaggcgaagattcaggacaaagaaggaattccaccagatcagcaaaggttgattttcgctgggaaacaattggaagatggaaggactttggctgattacaatattcagaaggaatccactctccaccttgtcttgcgtcttcggggtggtttctaagctctcctatgaaaatgaggtttctggattttatgtgaatgattgtgatgtctggccctgttaaggcctcataaataaacctaaactattttatctgtgttttatcctatgtaatgatattatatgaataaaaattacatgtttaccttaaaaaaaaaaaaaaaaaaaaccccccgcacgagaaaaaaaaaaaaaaaaaaaaaaaaaaaaaaaaaaaaaaaaaaaa

SEQ ID NO: 13382 - DNA, 1211 bp, Gossypium hirsutum
  Clone ID: GOSHI-09MAY01-C915_1
tcggtcgcgccggcgccccaccccacgcgtgtttgtttgctctgtatattgaagtttcctttctcgattttctatttagccaaacaagatgcagatcttcgttaagactctaaccggcaagacgatcactctcgaggtcgagagctccgatacgatcgacaacgtgaaggccaaaatccaagataaggaaggcatccctccagaccagcagcgtctgatcttcgccggaaaacagctcgaagacggccggaccttggccgattacaacatccaaaaggagtcaactctccacctcgtcctccgtctgcgcggtgggatgcaaatcttcgtgaaaaccttgactggcaagacaatcactctcgaggtcgagagctccgacacgatcgacaacgttaaagcgaagatccaagacaaggaaggcatccccccagaccagcaacgtctcatctttgccggaaaacaactcgaagacggccgtaccttggccgactacaacatccagaaggagtcaactctccaccttgtccttcgtttgcgcggcgggatgcaaatcttcgttaagacgcttaccggaaagacgatcactctcgaggtcgagagctctgacacgatcgacaacgtgaaagccaaaatccaagacaaggaaggcatcccgccagaccagcaacgtctcatcttcgccggaaagcaactcgaggacgggcggactttagccgattacaatatccagaaggaatcgactcttcatctggttctacgtcttcgaggtgggatgcagatcttcgtcaagactttgaccggtaagaccattactttagaagtggagagctcggatacgattgataacgtgaaagcgaagattcaggacaaagaaggaattccaccagatcagcaaaggttgatttttgctgggaaacagctggaagatggaaggactttggctgattacaatattcaaaaggagtccactcttcaccttgttcttcgtcttcgtggtgggttctaagccttaaggtcttccttaatgtgggttttctggttttacgtgaaggattgtgccctttgatggccttttaaataatttctagtctttgtttaccggttgcatctatgtatggtttctctttgaatggaatttgcatatttaccttctcaaacaaaaatgtataaaaaacaaacaaaaacggaagcgttggcggaacggcgtaaaa

SEQ ID NO: 13383 - DNA, 655 bp, Gossypium hirsutum
  unsure (1)..(655): unsure at all n locations
  Clone ID: uC-gsronu33B141e03b1
cggacgcgtgggatttgtttgctctgtatattgaaattttctttctcgattttctctttagccaaaaaagatgcagatcttcgtcaagactctaaccggcaagacgatcactctcgaggtcgagagctccgacacgatcgacaacgtgaagaccaaaatccaagataaggaaggcatccctccagaccagcagcgtctgatcttcgccggaaaacagcttgaggacggccggactttagccgattacaatatccagaaggaatcgactcttcatctggtcctgcgtcttcgaggtgggatgcagatcttcgtcaagactttgaccggtaagacgattactttagaagtggagagctcggatacgattgataacgtgaaagcgaagattcaggacaaagaaggaattccaccagatcagcaaaggttgatttttgctgggaaacaactggaagacggaaggactttggctgattacaatattcaaaaggagtccactcttncaccttgtcttcgtcttcgtggtgggttctaagccctaaggtctcccttaatggtggtttctggtttacgtgaggactgtgcctgtatggcctttaaaaatttctagtcttgttaccggtgcattatgatgttctcttgatggattgctattact

SEQ ID NO: 13384 - DNA, 445 bp, Gossypium hirsutum
  unsure (1)..(445): unsure at all n locations
  Clone ID: uC-gsflnu33B025g10b1
ttttacgcgtccgtacgattgataacgtgaaagcgaagattcaggacaaagaaggaattccaccagatcagcaaaggttgatttttgctgggaaacagctggaagatggaaggactttggctgattacaatattcaaaaggagtccactcttcaccttgttcttcgtcttcgtggtgggttctaagccttaaggtcttccttaatgtgggttttctggtcttacgtgaagggattggtgccncttttgtattggnccctttttttaaaaatanaattttttcctttagcttcctttttttgggttttttaacccccggggtttttgggccaattttccctttaatttggtttaaatttgggggatttttttttccccttttcccttttttttttggggaaaaaattttgggggggggaaaaaaaattttttttttttggggcccc

SEQ ID NO: 13385 - DNA, 417 bp, Gossypium hirsutum
  unsure (1)..(417): unsure at all n locations
  Clone ID: LIB3148-002-P1-K1-C4
ggaaanaccgggncggaccaagccgtccgcccacccttccgaaaagaaggaattccaccttatccagcaaaggttgttttttcttgggagggcaggtgtaaaacggaaggactttggctgattacaatattcaaaaggagtccactcttcaccttgttcttcgtcttcgcggagggttctaagccttaaggtctcccttaatgtgggtcttctggttttacgtgaaggactgtgccctgtaatggccttttaaataacttctagtctttgtttaccggttgcatctatgtatggtttctctttgaatggaatttgcatatttaccttaactgaaagacttgataaatagcaaatgataattgttccttaaagtgcctttttcctgcttgttacaagcttatatatttaaagttatct

SEQ ID NO: 13386 - DNA, 365 bp, Gossypium hirsutum
  Clone ID: uC-gsronu33B158a06b2
cccacctttccggcctgactaccatgatttagggaggggggttcttttatacctttgggggcgtgaaagcgaatattcaggacaaagaaggaattccaccagatcagcaacaggtgattcttgctgggaaacagctggaagatggaacgactttggctgattacaatattcaaaaggagtccactcttcaccttggtcttcgtcttcgtggggggttctaagccttaagggcttccttaatgggggttttctggttttacctgaaggattgggccctttgatggccttttaaataatttctaggctttggttaccgggtgcatctatgtatgggttcttttttgatggaatttgcatatttacct

SEQ ID NO: 13387 - DNA, 417 bp, Gossypium hirsutum
  Clone ID: LIB3149-064-Q1-K1-G7
ggaaggtcctgattttatcccatctcgtgttagtacatatctcttgtgtgagtgcgggtatgctatcatcaactctccaccttgtccttcgtttgcgcggcgggatgcaaatcttcgttaagacgcttaccggaaagacgatcactctcgaggtcgagagctctgacacgatcgacaacgtgaaagccaaaatccaagacaaggaaggcatcccgccagaccagcaacgtctcatcttcgccggaaagcaactcgaggacgggcggactttagccgattacaatatccagaaggaatcgactcttcatctggttctacgtcttcgaggtgggatgcagatcttcgtcaagactttgaccggtaagaccattactttagaagtggagagctcggatacgattgataacgtgaaagcga

SEQ ID NO: 13388 - DNA, 305 bp, Gossypium hirsutum
  Clone ID: LIB3189-016-P1-K1-E6
aggtaaatatgcaaattccattcaaagagaaaccatacatagatgcaaccggtaaacaaagactagaaattatttaaaaggccataaaagggcacaatccttcacgtaaaaccagaaaacccacattaaggaagaccttaaggcttagaacccaccacgaagacgaagaacaaggtgaagagtggactccttttgaatatgatgagaatgctcaaccagttagggtttgagaccgatgcatggctgaagtgacttataggctgagtattgctaaggaaacaggaagtgaacctgctgttttacag

SEQ ID NO: 13389 - DNA, 407 bp, Gossypium hirsutum
  Clone ID: uC-gsronu33b112b12b1
tgttcggaccttgtccgattacaacatacaaggagagtcatctatccagctttaatctccgtctgcgcggtgggatgcaaaccttattgacaacctagactggcaagacaatcactctcgaggccaagagcgtccgacacagatctgacaacacttagatgatcatatacaatatcgggatggcattaccgcagagaggcaacgtattatctatgtactaaacaactggaaacggtcgtaccttggccgactacaacatccagaaggagtcaactctccaccttgtccttcgtttgcgcggcgggatgcaaatcttcgttaagacgcttaccggaaagacagatcactctcgaggtcgagagctctgacacgatcgacaacgtgaccgccaaaatccaagacaagga

SEQ ID NO: 13390 - DNA, 336 bp, Gossypium hirsutum
  unsure (1)..(336): unsure at all n locations
  Clone ID: LIB3165-027-P1-K1-H1
agcaattgtactcaaatatttnattcaaggaagagcacggaatcaatggatggcgcgatatcgaagatgcatgacaaagcaggaatctcaccaaatcagcaaaggttgatttttgctgggaaacaactggaagacggaaggactttggctgattacaatattcaaaaggagtccactcttcaccttgttcttcgacttcgtggtgggttctaagccttaaggtctcccttaatgagggcttttctggatttacgttgaggcactgtcaaatgcaaaggtcgaagatgggatctttggcacctgtggagggattggatttacctatggaatcttctt

SEQ ID NO: 13391 - DNA, 336 bp, Gossypium hirsutum
  Clone ID: LIB3146-007-Q1-K1-G1
ggcgggagttccaggcagacccacgcgtcgcgctgcttgctctcccttcgatcaagaggcagatctcgataagaccctgaccggcaagaccatcaccctcgaagtcgagagttccgacacgatcgacaacggtaaggcgaaaatccaagacaaggaagggatcccaccagaccaacaacgtctcatatttgccgggaaacaactcgaggacggtcgcaccttggccgattacaacatccagaaggagtccaccctccatttggtattgaggcttcgtggtgggatgcagattttcgtcaagacgttgactgggaaaaccataactttggaggtggg

SEQ ID NO: 13392 - DNA, 229 bp, Gossypium hirsutum
  Clone ID: uC-gsflnu33B075e10b1
taagtttcctttctcgattttctatttagccagagacaagatgcagatcttcgctaagactctaaccggcaagacgatcactctcgaggtcgagagcttcgatacgatcgacaacacgaaggcctaaatccacgagtaggacggctgccatccagaccagcagcgtctgatcttctgcggtaaacagttccttgactaacagccctgcttcaagggctgcctgtaaaac

SEQ ID NO: 13393 - DNA, 223 bp, Gossypium hirsutum
  Clone ID: uC-gsflnu33B068a09b1
tttgtttcccagcaaaaatcaacctttgctgatctggtggaattccttttttgtgctgaatcttcgtggtgggatctaagccttaaggtcttccttaatgtgggttttctggttttacgtgaaggattgtgccctttgatggccttttaaataattcctagtctttgtttaccggttgcatctatgtatggtttctctttgaatggaatttgcatatttacct

SEQ ID NO: 13394 - DNA, 792 bp, Gossypium hirsutum
  Clone ID: GOSHI-09MAY01-C905_1
gaaacgctctccttcctccttaaatttcccccgtttttaactttcttctgcaacacccgatggtgagtaacagcgtctagattcatacattcggaattcagcaacaatgtgcgggatcttcgcttatctgaactacaacgtcaagcgtgacagacgttttattctggagatcctctttaacggcttgaggaggttagagtacagaggctatgattctgccgggatttccattgattcttcttcttcttcggatccaaatggacagctttccttttctcctctcgtcttccgccaagaaggcaacatcgattcactcgttaaatccgtctacaaagatgtcgcatcgattaaggtgaatttggaggagcttttctgtgttcatgctggaatagcacatacccggtgggcaactcatggagagccatctccaaaaaatagccatcctcagacatctggtgctggaaacgaattcttggttgttcataatggagttattacaaactatgaggtgttgaaggaaacactaacgcggcacgggttcaactttgaatccgagactgacacagaagttattccaaagcttgctaaatatgtttttgacaaggcaactgaagaaggtgaccagtctgtcacattcagtctagttgtgcttgaagttatgaggcatcttgaaggagcctatgcccttatattcaaaagccaccattacccaaatgagttgattgcttgtaaacgtggtagtccgttgctcttaggtgtgaaagaattaagtgaagacatgcatagtggagc

SEQ ID NO: 13395 - DNA, 1286 bp, Gossypium hirsutum
  Clone ID: GOSHI-09MAY01-C935_1
atttgccaatcatgatcatgcgcgggggttctctaccaagcccagaaacattctcagcaggcaattgggttctctacaacgaacccaaacatcagggtggacactttgtcgcaccagatgtattatccccaaaggccactcttccatacgatgactgctgattgtcttggtaaatctggatttcctcttggtcagaatagattggatccgaagccagaactctacaatggccagaatgctattgtggctgtccctcgcctccgtggttacaaccaagaggattccttggtaatgaaccgggcctcgatagagcgtgggatgttccgcaccgaacatggaagaagttacaaagctgaagtagataacaaggaaatccaggagaagaggcggaaggctgaagatattgtaaactctggaaaaacggaaagtaagatcggacgggtggacagtcttgatgatgatggttttccttatattggtgcttccctgcagtctggtgacattgtcattgggaggtttgcagaatctggagctgatcatggtgtaaaactgaagcacaccgaaagaggcatggttcagaaagttgtgttatcttcaaatgatgatgggaaaaattttgctgtggtgtctctgagacaggttcgttctccctgtcttggagacaagttctcaagcatgcatgggcaaaagggggtccttggttttctggagtctcatgagaactttcctttcacaactcaaggaatagttcctgatatcgtgattaacccacatgcatttccttcacgacaaacgccaggtcaactcttggaggctgccttgggaaaggggattgcctgtggtgggtcgaagaaacatgccacccctttctccactctctccatagatgccattacagaacagcttcacagggctgggttttcaagatggggaaatgagagagtttacaatggtcggactggtgagatggttcggtcactcatatttatgggtccaacattctaccagcgtcttgtccacatggctgaagacaaagtgaaatttcgtaacactggacctgtgcacccacttacaaggcagccagttgcagaccggaaacgttatggcgggatcaaatttggtgagatggagcgggactgccttattgctcatggtgcatcagccaacttgcatgagcgcctcttcactcttagcgattgctcacagatgcatgtatgtcagaattgcaaaaatgctgcaaatgttattgaaccgaccgtagcagctggtcggaagattaggggacc

SEQ ID NO: 13396 - DNA, 532 bp, Gossypium hirsutum
  Clone ID: GOSHI-09MAY01-C865_3
ttttcttctatgaaggaagctatgagggcaatgattcatctaattaagtttactttctcaagcttatcaagttgctgtaatcgctaagaccaaatggctaagttcatctgattattgccgaaacggagctccttgtcaatgtaaaagaacattctcttgttccggagcatcaggtgcttactaccgaggagaaaaagactttgctgcagagatatactgtaaaggaaacacagctgccgcgtatccaggtgagtgatccgatcgcaagatactacgggctgaagcgtggacaagtggtgaagataattaggcctagcgagactgctggtcgttatattacctatcggtatgtggtgtgaacatgtttcatgttaaataggattttcccagtttagttagaactagacagcctgatggattttgtagtcggggtatgaagaagacagctatgatgatagtttggttaaatgtagtttagggttttgttgaatagcctcaggtggtgtaatagtgcaatcactctttttaggct

SEQ ID NO: 13397 - DNA, 970 bp, Gossypium hirsutum
  Clone ID: GOSHI-09MAY01-C865_2
ccggttcgacccagcgttctggtgctgtaccaaaggggaagcaagttcagctgttagcattcaaaaggggacgcaaagagtaattttctcttagggtttttgtctgctacactttttgttctttgggggaaacacaaaatggtattgtcggatgatgaaatcaagaggctttttcgaattcgaaagactgtaatgcagatgttgaaagataggggttatttcgttggagattttgaaattaatttgtcaaaacaacaattcatttccaaatacggcgaaaatatgaaaagggaggatcttgttatcaataaaaccaagcggaatgataactctgatcagatctatgttttcttccctgaagaggccaaagttggtgttaagacaatgaagacgtataccaaccgaatgaaatcagagaatgtatttagggctatactagttgtgcaacagaatttaactccctttgctcgaacttgtataaatgaaatttcttcaaagttccatttggaggttttccaggaagccgagctcctggtcaatgtaaaagaacatgctctcgtgcctgaacatcaggtgcttactaatgaggagaaaaagactttgcttcatagatataccgtaaaggaaacacagctgcctcgtatccaggtgagtgatccaatcgcaagatacttcgggctgaaacgtggacaagtggtgaaaataatccggcctagtgaaactgccggtcgttatatcacttaccgatatgttgtgtaagcatgtaccctgttcgacaacattatcctccgataaagcaattttttttttctctaaaacaaagccgaactaaccgcccgtatcctagtattcatgttgtattcgtgtattgtcaagtgtcaagtatcataattgtgctcaagaaattatatatttatataaattttgacacattaataatttgaattgatgcaataactttttatagtcc

SEQ ID NO: 13398 - DNA, 888 bp, Gossypium hirsutum
  Clone ID: GOSHI-09MAY01-C865_1
aaactctcacactttctcctcgcattggcacactcgaagattttttctcctagggtttcagcaattctcgttattattgaaattgtgggacgaaaatggttctgtcggacgatgaaatcaggaggttgtttcgtatccgaaagacggtattgcagttgttgaaagacagagattacttcgtcggagatttcgagattaacatgtctagagaacaatttatttccaaatttggcgaaaacatgaaaagggaggatctcattattaataaagctaagcgaaacgatagctctgatcagatctatgttttctttcctgaagaacccaaggttggtgtgaaaacaatgaagacatataccaaccgcatgaaatcggagaatgtatttagggctatactggttgtgcaacaaaatttgactccctttgctcggacttgtatcaatgaaatttcttccaaattccacttggaggttttccaggaaacggagctccttgttaatgtaaaagaacattctcttgttccggagcatcaggtgcttactaccgaggagaaaaagactttgctgcagagatatactgtaaaggaaacacagctgccgcgtatccaggtgagtgatccgatcgcaagaatactacgggctgaaccgtggacaagtggtgaagataattaggcctagcgagactgctggtcgttatattacctatcggtatgtggtgtgaacatgtctcatgttaaataggattttcctagtttagttagaactagacagcctaatagattttgttgtccgggtatgtagaagacagctatgatgatagtttgtttaaatgtagtttagggttttgttgaatagcctcagttgtagtattagtgcaatcatttttttagcc

SEQ ID NO: 13399 - DNA, 551 bp, Gossypium hirsutum
  Clone ID: GOSHI-09MAY01-C835_2
ctttgcaagtgcatgctttttattatttattgaattttattgatgatttacgccctaaaaattggtgtgttttgaatgaacaattcatagattttaaacgttggtggtgaaaatgtcggagaagggtggcagaatgttctccttgcccaccaaaacaacacccaaatcttctctcaaatccaccgctggaaaagatgataattcagcaaaatcaaagaggggaaggaaagttcagtttggaactgaaggttcacctgatgttaatttctcatcgccaaaatctgatggcaagtttgcaaccccttttggtaaaggtggaaaaggagaaaaggcagcgaatggtggaaagactcatgtggccaaagaatcacagtcattggagctcagagttgaacagggtttttacttgccttaactaccatacatgtttgtttcaatgatttgttactctttgtttaccaagttagttctttgtcaagcctgcatttaggttgtatttatacttttttccttttttggatggtttaccggttttcccctggtgggccggg

SEQ ID NO: 13400 - DNA, 622 bp, Gossypium hirsutum
  Clone ID: LIB3582-049-P1-K1-H1
cggacgcgtgggcaaaacaggaaaaagacttcactaacacaattcattcataacccccgccagtcaaaacagttctaaaggtttttaagaaggcaggctggcagcattataatcttaaagattctcaagtccacaattttttctctctcgtttctacctctccagttctacccactctgctccgtttgattttaaacgttggtggtgaaaatgtcggagaagggtggcagaatgttctccttgcccaccaaaacaacacccaaatcttctctcaaatccaccgctggaaaagatgataattcagcaaaatcaaagaggggaaggaaagttcagtttggaactgaaggttcacctgatgttaatttctcatcgccaaaatctgatggcaagtttgcaaccccttttggtaaaggtggaaaaggagaaaaggcagcgaatggtggaaagactcatgtggccaaagaatcacagtcattggagctcagagttgaacaggaacttccagagaatgttaaatgccttatggactgtgaggctgccggtatcttagaaggcattcaggatcaaatggttatactctccagcgatccaactaattaaagctccctgaatcatttgggtt

SEQ ID NO: 13401 - DNA, 344 bp, Gossypium hirsutum
  Clone ID: LIB3197-051-Q1-M1-B4
cggacgcgtgggattggttttaagatctgggtctgaaactttgcttaagctggaaaggtccttgccattatttgcagaacttccagaaaatattaaatgccttatggactgtgaggctgccactatcttagaaggcattcaggatcaaatggttattctttccagcgatccaactattaagctccctgaatcatttggttcgggactgcagtatgccaagactggtagctattttaccaatccccagtctgttagaaaagttcttcaatatccttgaatttctgttttccatggcacttatattatagataattttcctggcattctttggctttatgccacat

SEQ ID NO: 13402 - DNA, 525 bp, Gossypium hirsutum
  Clone ID: GOSHI-09MAY01-C585_3
taagcctacattttgctctctttctcaccctaaactcttcaaagaagcagcagcaactaaagctttgaggaaagggcgttggctttcgatgagtgcgggagacccttcattatactcaaagagcaagaccagaaaaccaggctgagagggatcgatgcccaaaaagccaacatttccgctggcaaagccgttgcccggatcctccgaacctctctcggacccaagggcatggataagattctccaaagccccgatggcgatgttaccatcacaaatgacggggcaacaatattggagcagatggatgttgacaaccaaattgctaagttgatggttgaactatctcggagtcaggattacgaaattggtgatggaacaactggtgttgttgtcatggctggagcacttctagagcaggcagagcggttattagaacgtgggattcatcccatacgaattgcagaggggtatgaaatggcttcaaaatcgccgttgagcatttgagcacatatctcagaagtttga

SEQ ID NO: 13403 - DNA, 601 bp, Gossypium hirsutum
  Clone ID: GOSHI-09MAY01-C585_2
aaagctttgaggaaatggcgttggctttcgatgagtacgggagacccttcattatactcattgagcaagaccagaaaaccaggctgagagggatcgatgcccaaaaagccaacatttccgcgcgcgcggcccgtgcccggaccctccgaccctctctcggacccaagggcatggataagattctccaaagccccgatggcgatgttaccatcacaaatgacggggcaacaatattggagcagatggatgttgaactgtctcggagtcaggattacgaaattggtgatggaacaactggtgtttgttgtcatggctggagcacttctagagcaggcagagcggttattggaacgtgggattcatcccatacgaattgcagaggggtacgaaatggcttcaagaattgccgttgagcatttggagcacatatctcagaagtttgatttggagcatcaaatatagagcctttggttcaaacatgcatgaccactttgtcctcaaaattgtgaaccgatgcaagcgccatttggctgagatttctgttaaagcagttctttctggtgctgatctagagagggaagatgtcaatttagatatgatt

SEQ ID NO: 13404 - DNA, 1957 bp, Gossypium hirsutum
  Clone ID: GOSHI-09MAY01-C585_1
gggctttggaaacatgccacactcttctcatttccaaagggctgagcactgaagaagaaaaagtagcatagatcggcaacgtaacagtgaaactcgggggaaatggcgttggcgttcgacgagtacggtaggccattcattatacttaaagaacaagagcagaaaacgaggctgagcgggctcgaagctcaaaaagccaacatttccgcaggcagagcggtctctcggatcctccgaacctctctaggacccaaaggcatggataagatgctccaaagccccgacggcgatgtcaccatcacaaacgatggggcaacaatattggagcagatggatgttgacaatcaaattgctaagttgatggttgagctgtctcggagtcaggattatgaaattggggatggaacaactggtgttgttgtcatggctggagcacttctagagcaggcagagcggctattggaacgtgggattcatcccatccgtattgcagagggttatgaaatggcttctagaatagctgttgagcatttggagcgcatagctcagaagtttgattttggagcatcaaatatagagcctttggttcaaacatgcatgaccactctgtcctcaaaaattgtgaaccgatgcaagcgccctttggctgaaatttctgttaaagcagttctttctgttgctgatctagagaggaaagatgtcaatttagatctgattaaggttgaggggaaagttgggggaaaattggaggatactgagctaatatatggaatcactgttgataaggacatgagtcatccacagatgccaaagcaaattgaagatgcaaaaattgccatattaacttgcccatttgagccccctaagccaaagaccaaacataaggtagacattgatacggtggagaagtttcaaactttgcgtctgcaagagcaaaagtattttgatgacatggttcagaagtgcaaggatgttggtgccaccttggttatctgtcaatgggggtttgatgatgaggcaaatcatttattaatgcaccggaacttgcctgctgtcagatgggttggtggtgtggaattggagctcatagcaatagctacgggtggaaggattgtaccaaggttccaggagttgaccccagaaaagttgggaagggctggtttggtcagagagaagtcttttggcaccacaaaagataaaatgttgtacattgaacactgtgcaaattccagggctgtaaccatatttattcgtggaggaaacaagatgatgatagaagagacaaagcgcagtatccatgatgcattgtgtgtggccaggaatctcattcgcaacaattctattgtctatggtggtggctcagctgagatttcttgctcaattgctgtggaggcagctgcagataaatatccaggagttgagcagtatgcaatccgggcatttgctgatgctttagactcagtccccatggccctggctgagaatagcggactccaacccattgagacactatcagcagtgaaatctcagcaaattaaggacaataatccacactatggaatagactgcaatgatgttgggactaatgatatgcgggagcaagacgtctttgaaacactgatcgggaagcagcaacagatcttactggcaacgcaagttgtaaagatgattttgaaaattgatgatgtcatttctccatcggactactgaggtataatttctgtactgcttcactctgaaggttaccgtgttttgattgttttgtatggttcactccagaacaattgttcacttgtgaggaacatgttttgcttatgtatttttcaactgccaagctctttgttggttggaaatagaatgataaacccttcgtattgacaacggttgtttaggtttttttttatctttagtttctactttcaatcaaaaaaaaaaaaaaaaaaaaaatataatttat

SEQ ID NO: 13405 - DNA, 419 bp, Gossypium hirsutum
  Clone ID: LIB3197-030-Q1-M1-B2
aagctagtgtcttgatctcgttacatcctaaacaccaccgtagacccttaagaagactgaaggagcccgaccaaagaacaaggctccaacggattgatgtgcattaagccaacattcacgctggctaagccgttggccggatcctacaaacctatctcggacccaagggcatggattagatactccaaagccccgatggcgatgttaccatcacaaatgacggtgcatcaatattggagcagatggatgttgacaaccaaattgctaagttgatggatgaactgtctcggagtcaggattacgaaattggtgatggaacaactggtgtagttgccatggctggagcacttctagagcaggcagagcgggtatttgaacgtgggatcattccatacgaattgcagagggtgtccaaatgg

SEQ ID NO: 13406 - DNA, 257 bp, Gossypium hirsutum
  Clone ID: LIB3135-052-Q1-K1-B7
gtcatttctccatcggactactgaggtatatatttctgtactgcctcactctgaaggttaccctgttttgatttttgtatggttcactccaaaacaattgttcacttgtgaggaacatgttttgcttatgtatttttcaactgccaagctctttgttggttggtaatagaatgataaacccttcgtattgcaaataaaaaaaaaaaacattaataaaaatataaacaaataagtattccatacttggtgttcgttct

SEQ ID NO: 13407 - DNA, 1161 bp, Gossypium hirsutum
  Clone ID: GOSHI-09MAY01-C555_1
agctaatctcttcaaagtcgaagtctcatctctgcgattctagtacggattggagcaaagccgattatatttgttttcattttcttatggattctcagcattttctcggattctttcttctaattttccttcagtcttgtttggtttcggctgatattaatggatcggttcttaaaatgaaaacaggaacttcttcggttccgtttgatccgactcatgttactcaactctcatggcaccctagggctttcatttacaaaggatttttatcgagtgatgaatgtgatcacctcattactctggccaaggataagttagagaaatcaatggtggcggataatgaatcaggtaaaagcgtcgaaagtgaagttcgaaccagctctggcatgtttcttcagaaagctcaggatgaagtagtcgctgatattgaagctaggattgcagcatggaccttccttccagttgagaatggggagtccattcaaatactacactatgaacatggtcagaagtatgagccacatttcgattattttcatgacaaagctaatcaacagctcggcggtcaccgtattgccactgtactgatgtatttgtctgatgttgagagtggtggggaaactgtgtttccaaatgcagagggacgactttctcagccgcaggatgatagctggtcggcctgtgccaaaaatggatttgcagtgaaaccccgaaaaggtgatgcattactattcttcagccttcatcttgatgcaacaactgattccgacagtttgcatggaagttgcccagtgataaagggtgagaaatggtctgcaacaaaatggatccatgtcaggtcattcgatacggcaaagtggcagtctgtaaatagagattgtgttgatgagaatgagaattgtgctacctgggcttcagcgggtgagtgtgaaaagaaccctagttacatgattggttctgaagactattacggatattgtaggaagagttgtaaggtatgctcctcgtagaaagtcgtttcctggctgtttccaaagacaatggtaaagctttaatagctgtatataccacacatttttgagttatgctcgatgcaccatatttttgggacttgattgtgaagtttatatattatttaggatgttattggtattataaaaa

SEQ ID NO: 13408 - DNA, 570 bp, Gossypium hirsutum
  unsure (1)..(570): unsure at all n locations
  Clone ID: LIB3582-045-P1-K1-C11
cccacgcgtccgattgctactgtactgatgtatttgtctgatgttgagagtggaggggaaactgtgtttccaaatgcagaggtaagcatttgattgtggaatccggttttctgcctgtcttttattatctttttcttttgtttgatttagcccattgttacttttccattttatttagttcattgctcttcactttttttctgcagggacgactttctcaggtgcaggatgaaaattggtcggcctgtgccaaaaatggatatgcaggtattaagattaccttggagatatttagttgcttaatattttaggtcgcatgaatctgttagtctaactttctcttgattctaaataataaaatcacagttaaatggtgaacaagtatctgaattaacacgaatcatttaattacggctgccttatcatgttcttatttagttgttgcactagaatccgaccatatggttgttgatatttggctcaactntactgcctatacatgcgcagtgaaaccccgaaaaggtgatgcattactgttcttcagcctacatcctgatgcgacaactgata

SEQ ID NO: 13409 - DNA, 417 bp, Gossypium hirsutum
  unsure (1)..(417): unsure at all n locations
  Clone ID: LIB3146-053-Q1-K1-E11
ggaaaaaccgggccgaccgcacgcgtccgcggacgcctgggttccatttgagaatttttagtccattcaaatactacactatnaacagcntcttttttatgagccacatttccattattttcatgacaaagctaatcaacagctcggtggtcaccgtattgctactgtactgatgtatttgtctgatgttgagagtggaggggaaactgtgtttccaaatgcagagggacgactttctcaggtgcaggatgaaaattggtcggcctgtgccaaaaatggatatgcagtgaaaccccgaaaaggtgatgcattactgttcttcagcctacatcctgatgcgacaactgatacagccagtttgcatggaagctgccctgtgattaagggtgaaaaatggtcagcaacaaagtggatcca

SEQ ID NO: 13410 - DNA, 905 bp, Gossypium hirsutum
  Clone ID: GOSHI-09MAY01-C575_1
cggccgcgtgggcggacagcgtgggcgggcgcgtgggcggacgcgtgggttcgagaactcggcggggccgagcaaacaccaagcggtggctttaaggagtgggtcagacctctctgcattctacaaatgcagcttcgttgcttaccaagacactctctacgtccattcccttaggcaattctatcgggaatgtgacatatacgggacagtggactttatattcggaaacgcagctgttgttttccagggctgcaatttatatgctcgtaaacccaatccaaaccagaagaacattttcaccgctcaaggaagagaagaccctaaccagaacactgggatttcaattctgaactgcaagatcgctgcagctgcggatttagtccccgtaaaatcatctttcaagacgtttttggggcgtccttggaaagagtattccaggacagttattatgcgttcgtacattgatgattcagtggatcctgccggatggttagaatggaatgggacgtttgctttgagtaccctctattatggggagtacctgaaccgagggccagggtccaatacgagtgcaagagtaacttggcctggttatagggtcatcaacagttccactgaggcaactcagtttactattgagccatttatacaaggaaatgagtggctaaattctagcaatattccattcgctctcggcttgaattgagagctaaatgccacttacgtgcctcccttattttatttttcgttaataattggattctgtgtttgtctgatcaagttagccaccatgcagtttgatcccatgtcaaattgcttttgtactgaaaatgaaattaataagaaaatgaatagttcttttctctcttcctttccctaaaaaaaaaagagaaaaaaaagcggac

SEQ ID NO: 13411 - DNA, 574 bp, Gossypium hirsutum
  unsure (1)..(574): unsure at all n locations
  Clone ID: LIB3582-045-P1-K1-E1
gngagatgggatcggtaagacagtggtgaaggccagcagaaatgtcgttgatggctttacgactttccgttctgccaccgtcgctgtggtgggggagggattcatagcgaaagggataaccttcgagaactcggcggggccgagcaaacaccaagcggtggctttaaggagtgggtcagacctctctgcattctacaaatgcagcttcgttgcttaccaagacactctctacgtccattcccttaggcaattctatcgggaatgtgacatatacgggacagtggactntatattcggaaacgcagctgttgttttccagggctgcaatttatatgctcgtaaacccaatccaaaccagaagaacattttcaccgctcaaggaagagaagaccctaaccagaacactgngatttcaattctgaactgcaagatcgctgcagctgcggatttagtccccgtaaaatcatctttcaagacgtttttggggcgtccttggaaagagtattccaggacagttattatgcgttcgtacattgatgattcagtggatcctgcccgatggntagaatggaat

SEQ ID NO: 13412 - DNA, 440 bp, Gossypium hirsutum
  Clone ID: LIB3146-028-Q1-K1-A3
ttcgccagcactaccggcgcgcaatgcctgggtcgacgcacacgcgtgcatcatcgtcccattggttagaatggaatgggacgtttgctttgagtaccctctattatggggagtacctgaaccgagggcccgggtccaatacgagtgcaagagtaacttggcctggttatagggtcatcaacagttccactgaggcaactcagtttacaattgagccatttatacaaggaaatgagtggctaaattctagcaatattccattcgctctcggcttgaattgagagctaaatgccacttacgtgcctcccttattttatttttcgttaataattggattctgtgtttgtctgatcaagtaagccaccatgcattttgatcccatgtcaaattgcttttgtactgaaattaataagaaaatgaataaggcttcttttctctct

SEQ ID NO: 13413 - DNA, 908 bp, Gossypium hirsutum
  Clone ID: GOSHI-09MAY01-C565_2
atgggcagtgccatggatgtggagttcatgcttgtgaggatggcagcaagtatgtgggggaattcaagtggggtgtcaaacatggatttggtcattaccacttcagaaacggagacgaatattttggggaatatttttccgacaagatgcatggctttggtgtttatcaatttggaaatgggcaccgctatgagggggcttggcatgaaggaagaaggcagggatttggtacatacactttcagaaatggtgagacacaatccggtcactggcaaaatggtgctctcgatgttcttagcgcacaaaatactcgacccagagttcttcacgctgtccaggaagcatggcgagccgctgagaaagctcgtgaagttgcaaagattgacaagagagtgcataaagctgtgtcagctgcaaacaaagcagccaatgctgccagagtggtggctgttaaagctgtcccagaaacaaatgcatcatcataacagtgaagaaatcccaaccgtgtagcctgcacctaatacaaggaatgtagtagagccttaaagcaccccaaaaatggttacagctgttctcttcaattttcgaagtgagaactgcaaggttcccgcttggacccatgttcagtcgtcattcaaagatggttattgctcatggagcaagaaatggacctcccctttccctttcttttaatggcttaagtaatgtatataagctgagtttacgagagacatggcactgaggtgggtgcgcctaaagagtatgcccacatctctctctttttcttcttgtaaattaattagtcgtagttctagatcctggaactctggataaaacatccagtcctcccaaggccagcttcgtatgcacgttggtcacaataataaacaaaagaagtcttttcaagc

SEQ ID NO: 13414 - DNA, 727 bp, Gossypium hirsutum
  Clone ID: GOSHI-09MAY01-C565_1
atcttcaaaagcagttgtttggtcaattgggtcaaagccaaaatcagagaagaaggcaaattcggggacttgggtacaagtttacagtaacggggatgtgtacgagggtgaatttcacaaggggaaatgttcagggagtggggtttattatcccccgcggccgcccacgcgtccgggggattgggttgatgggagatatgatggttatggtgtggaaacgtgggcaaaagggagccgatatcgcggtcaatataggcagggattaaggcatggaattggggtgtataggttttatactggtgatgtttatgctggtgaatggtctaatgggcagtgccatggatgtggagttcatgcttgtgaggatggcagcaagtatgtgggggaattcaagtggggtgtcaaacatggatttggtcattaccacttcagaaacggagacgaatattttggggaatatttttccgacaagatgcatggctttggtgtttatcaatttggaaatgggcaccgctatgagggggcttggcatgaaggaagaaggcagggatttggtacatacactttcagaaatggtgagacacaatccggtcactggcaaaatggtgctctcgatgttcttagcgcacaaaatactcgacccagagttcttcacgctgtccaggtgtcgtttatataacggcttcactattgaattaccattaactccttagtatgaatataacct

SEQ ID NO: 13415 - DNA, 1006 bp, Gossypium hirsutum
  Clone ID: GOSHI-09MAY01-C495_1
ccccactcaaattagtgaaattaagaataaggacaaaggcaatttcaggggacctgggaagtcggtccaaacagaagtccctgactgtagttaatggtccaacctgcaatgaacatgatgtgaggcccagaaacactttgcctgcagaacaaaatcaaagttacagcaggcaagaaatgggtgaaggttcggacagatcaagttctctgcagttgttgcactcaggtttgaagttgaacatgtatgatggggaacacccatataaagatacaactaattccgaaggcttaaatgtcatcaacgatcatgattcagaaattatgtttaccgaagcagcagctgatgcagttaacagaagacagtccctgcggccgcgggcgcctgcgctggagcagaatgcttggaaccataacttgagggtaagagtagatcatgcattagcagggacatcagaaaatgaagaaaaaacctctttgaaaacatataatggtattgcatctgaacaatggatgtcaagttccaaacatagagacagatcaagatccagcagaaccaagcggggcggtggccatgacaatgacttaaaattttcaagtggaaggaagtcaaatccttctgttagaaaattatcatggttgatggtgtcggaacaggaagagggttatcgttatatacctcagctgggcgatgaagttgtatatttcagacaggggcatcaagagtgcattgaagaaggtttcatgaaggggactggtccatggagctcaaggggacacctgagtgcggtggaaatttgcagggttgtagaccttgcttattcccacgttccaggttctggagagagttgctgtaaaatcacacttagatttactgataattcatcatgtgcatttggcgaggtatttatattgaccttgcctgagttgataggtcttctgattttcttgttgagaagacaagatatgatgctgcaatgagcagagaatgggactcgtaggataaatgc

SEQ ID NO: 13416 - DNA, 767 bp, Gossypium hirsutum
  Clone ID: GOSHI-09MAY01-C795_1
gaagtgaagaaggagaggaaaaaaggaaaaggagaaagacaaagctttaccctacaaatttgcatcttgataaggactgatatattgtataccaaggaccttttttgtagtagtaagtaataatccccccccccccaacccccaacccaaagaaaaaaaaaaaaaggcttgcttcctctcaaccttcgcacaaaaatggcttcttttcaccatttctcagtttcccattgatttccccttatcttttctctcttttcaaaagacccattttttcttcaaagcttcttactttcagaaggctgcacctttaaccacaattcaactaatgtacattcaagtattggttatttgaagtagatgcatggatagaagggatgcaatggcattaacagggtctgcatcttattatattcaacaaagaggcataactgggtcaggggggcatggatcacaagacattcatatgttatctagtccaaatgtacaataccaatcaagtatgagtgctactactatgggacctgtggagagtagtacccctcatagtgtcaatgtaggcacaccttcagctgttccatctagtgagaccacgaaacggaaaagaggaaggcctcgaaagtacggtcccgatgggaccgtttcattggcattgactcctccatcggttactaatcccaggacattaacaccaccgagtcaaaaacgaggtagagggcgaccacccggtactggaaagaagcaacaacttgcttcccttggtgtatggc

SEQ ID NO: 13417 - DNA, 415 bp, Gossypium hirsutum
  Clone ID: LIB3582-002-P1-K1-D4
gaaaaaaaaaaaggcttgcttcctctcaaccttcgcacaaaaatggcttcttttcaccattggctcagtttcccattgatttccccttatcttttctctcttttcaaaagacccattttttcttcaaagcttcttactttcagaaggctgcacctttaaccacaattcaactaattagatgcatggatagaagggatgcaatggcattaacagggtctgcatcttattatattcaacaaagaggcataactgggtcaggggtacatggatcacaagacattcatatgttatctagtccaaatgtacagggccaatcaagtatgagtgctactactatgggacctgtggagagtagtacccctcatagtgtcaatgtaggcacaccttcagctgctccatctagtgagacccttaa

SEQ ID NO: 13418 - DNA, 1715 bp, Gossypium hirsutum
  Clone ID: GOSHI-09MAY01-C785_1
ccccgcgtccgccccgcgtccgcccacgcgtccgcccacgcgtccggaagagacagcctccctgttactctttttcttttgttttctttttcaaattttcttcttctctgctaatctgcttctactttcttctctttctcgacaaccaaacagaatactcatcacgtaaaaccaaaagctatggctagtgtgattaatcagatgttgaggatctaaattcaaaccaagccgtgccataagagggaggagaagagaaggatctgagactttgtgagatacaacaattgaaaaaacttgaggaacatttttgctggttctaactgatcgtcaatatttgttttcttttgcggaagttttgagaatcggatacatttgaacgacagcatagctactttctgaagaattctcgactgaattaatctttaaaaaagcagatcaattgcttacgtatcaaaatcataagaatcttacaacgaatgaaagtcggaagaataggcttcatatttcgttattttgttgaaagtccagaacaaattttgtgtttatagcaaaggactttgaagaaaggaaagttgtaacggcagagccttagctattcagtgtgcagaagatgatggagagggactccttaaggagcaataacaatggtaatagcgcgaactacaacagagagagaaccggaggtgatgcgggattgttaagatccagctcagatccggccaaacaaacggcgtcgtcttctgattttgttttgcagtggggaaaccggaagcgtctcaggtgtatgaagatccaggtcaaagacgaccaatccggcccggttaaccgaaccacggttcgagtcgatcgccgtgtcgtgagggccgataaggactcttcaaatcagcccagccataataacaatcacgggactggatattttaacctccgtcaacggcctgcttctcctcaggccccgccccctctgcgccttcccaggtactgtgagaattccagtgctatgagaggccagggcaacggtggtgtaagaggattcacttcgccagacaggggtgtgctacgagaagagagggggcaacaataacaattacaaccaccacagcaacaaccatgataaccaccaccacaacaataaatcggcggcatcttcggagacagctcaggatagcaaaaaaggagggtcatcttctgggagcggtgagatagctcctgcacccatggtttggccacctaaattcgtgattgctttaacaaataaagagaaagaagaagatttcatgacctttaaaggatctaaactgccacaaagaccaaaaaagcgatcaaaatttattcaacgtaccctcaatctggtaagtcctgggacatggctttgcgatttaaccctcgaacgttatgaagtcagggagaagaagatcacaaagaagagaccaagaggtttaaaggctatgggtaatatggaatctgactctgaatagaaagctgggaaggtgcagtttaaaggtatgattttttgggtatttgcaaatgtcgatgatgatgagattttccagagacagttgctctttatttttttaaaggatgagattagtctttaactgtataaatgatgatcttttcatatatgagaagaaggaaaagtttagattaagcaaaatatgtggtgtaagcaaatgaagagcttttcatttattagatgatttgaaagattgttt

SEQ ID NO: 13419 - DNA, 644 bp, Gossypium hirsutum
  Clone ID: LIB3829-001-Q1-K6-E11
catacctaaaagaattcttctcaatcatgatacaaagatcctcaattttctgagaggcataagttctcgattttttcacaggaactgtgagaattccagtgctatgagaggccaaagcaacggtggtgtaagaggattcacttcgccagacaggggtgtgcacgagaagagaggtggcaacaataacaattacaaccaccacagcaacaaccatgataacaaccaccacaacaataaatcagcggcatcttcggagacagctcaggatagcaaaaaaggagggtcatcttctgggagcggtgagatagctcctgcacccatggtttggccacctaaattcgtgattgctttaacaaataaagagaaagaagaagatttcatgacctttaaaggatctaagctgccacaaagaccaaaaaagcgatcaaaatttattcaacgtaccctcaatctggtaagtcctgggacatggctttgcgatttaaccctcgaacgttatgaagtcagggagaagaaggtcacaaagaagagaccaagaggtttaaaggctatgggaaatatggaatctgactctgaatagaaaagctggaaggtgcagtttaaaggtttgattttttgggtatttgcaaatgtcgatgatgatg

SEQ ID NO: 13420 - DNA, 621 bp, Gossypium hirsutum
  Clone ID: GOSHI-09MAY01-C755_2
cccacgcgtccgcccacgcgtccggaaaaagaaaaaatcacccgcaggttctctttctgctatcagtttcattacataatatatctcttcgattaaagaatcgctgggttcgattttgtcagacaagatcggccaaattaagatttcaggagattagagaagatggaccctcatgatgagacgggccgccaagcttcagaaggccccatcctgtgtgttaataactgtggtttctttggaagtgcggcgaccatgaatatgtgctccaaatgtcacaaggcaatgatcctgaagcaggaacaggcacaactcgtagcatcatccatcgatagcattgttaatggcagcactagcgggaatggtaaggaaccatctgttgctgctgctttggctgtgcaatgtggaaattttgggtcaaaaattgaatcatccatcgatccatcccatatgaccttcggtgggatgaaaacaaaagagggtcccaacaggtgtaatgcatgccacaagcgtgttggtttgacaggatttagctgcaggtgtggaaacatcttctgtgcagcgcataggtactctgacaaacacaactgtcctttcgattataggacagctgcccgcgatgct

SEQ ID NO: 13421 - DNA, 741 bp, Gossypium hirsutum
  Clone ID: GOSHI-09MAY01-C755_1
cttcgattaaagtaagagctctctgttttcttttttttttttaaacgatgatataaattctgaccttttttcttgatggttgattgtaaaaaataaattttgtttggttgaaattagatgtgaagaaagagattatgttttattttattttgtattaaaattgtaaatttttttttatgtgtatgtattctgcatgagacaggaatcgctgggttcgattttgtcagacaagatcggccaaattaagatttcaggagattagagaagatggaccctcttgatgagacgggccgccaagcttcagaaggccccatcctgtgtgttaataactgtggtttctttggaagtgcggcgaccatgaatatgtgctccaaatgtcacatggcaatgatcctgaagcaggaacaggcacaactcgtagcatcatccatcgatagcattgttaatggcagcactagcgggaatggtaaggaaccatctgttgctgctgctttggctgtgcaatgtggaaattttgggtcaaaaattgaatcatccatcgatccatcccatatgaccttcggtgggatgaaaacaaaagagggtcccaacaggtgtaatgcatgccacaagcgtgttggtttgacaggatttagctgcaggtgtggaaacatcttctgtgcagcgcataggtactctgacatacacaactgttctttcgattataggacagccgcccgcgatgctattgctaaagccaat

SEQ ID NO: 13422 - DNA, 402 bp, Gossypium hirsutum
  Clone ID: LIB3146-053-Q1-K1-A12
cccacgcgtccgcccacgcgtccgcccacgcgtccgcccacgcgtccgcccacgcgtgcgtgcatcgatagcattgttaatggcagcactagcgggaatggtaaggaaccatctgttgctgctgctttggctgtgcaatgtggaaattttgggtcaaaaattgaatcatccatcgatccatcccatatgaccttcggtgggatgaaaacaaaagagggtcccaacaggtgtaatgcatgccacaagcgtgttggtttgacaggatttagctgcaggtgtggaaacatcttctgtgcagcacataggtactctgacaaacacaactgtcctttcgattataggacagctgcccgcgatgctattgctaaagccaacccggtagtgaaggctgagaaacttgat

SEQ ID NO: 13423 - DNA, 635 bp, Gossypium hirsutum
  Clone ID: GOSHI-09MAY01-C745_1
caaaaactctatttgagtttaaacacacacaccactccaccctttgaggccaaagctataaagatggagaagattgagcacaccacggtgaccaccaacggcataaagatgcatgtggcatccattggctccggcccaataatccttttcttacacggcttccctgagctttggtacacctggcgccgccagcttctttcgctctcatcccttggctaccgttgcgtcgctcccgatctccgtggctacggtgacagcgacgcccctccatcgcccgaatcatacactgtttttcacgttgtgggggatctcgtaggcctcctcgacgcccttggtgttgacaaggtgttcttggtggggcatgattggggtgcgatgattgcttggaatttttgcttgttcaggcctgatagaatcaaggctttggtcaacttgagcgttccttatcatcctaggaaccccaaggtgaagactgtggatgggtatagagctttgtttggtgacgatttttatatttgcaggtttcaggtaccaggggaggctgaagcacatttcgcgcagatggatactgccaaagttctgaaaaaatttcttacaactcgagatccaaatcctccttgtatacctaaagaaac

SEQ ID NO: 13424 - DNA, 516 bp, Gossypium hirsutum
  Clone ID: GOSHI-09MAY01-C725_4
ggaccccgaagccgaagccgaacccgaaccgataaagaaccccacatcatactcactctactcaacaaaaccctagtccccccttctgtgatatttatcgccctcttgctgccgctcccgctcctgctcgctgcgtcttcgtctgcaagatctcagttctcaaatcgtagcgcccttttctatcacgccgtggctctggtcttgcatgcagcaaaggcagaggcagctgaggaggaggaggcaccaaagcccaaaccaaagaatcctcttgatttgctgcctccaagtaagatggtactggatgactggaagaggctttactctaacacaaagaccaatttccgagaggttgcaattaaaggattctgggacatgtatgatcccgagggatactcactgtggttttgtgactacaagtacaatgaggagaatacagtttcatttgtcacaatgaacaaggttggaggattcctgcagagaatggatttggcccgcaggtatgcatttgggaagatg

SEQ ID NO: 13425 - DNA, 829 bp, Gossypium hirsutum
  Clone ID: GOSHI-09MAY01-C725_2
gggggattcggtcacccacctccatgaggttgagaaacaggcgcaaatgcaacagcttaaagacgacgcgatgtccaacgggggagagggggtccattctctcctccaagtaaaatggtactggatgactggaagaggctttactctaacacaaagaccaatttccgagagggcgccagtaaaggattctgggacatgtatgatcccgagggatactcactgtggttttgtgactacaagtacaatgaggagaatacagtttcatttgtcacaatgaacaaggttggaggattcctgcagagaatggatttggcccgcaagtatgcatttgggaagatgttggtgatcggtgctaaccctccattcaaggtgaaaggactatggcttttccgtgggcaagagattcctcaatttgtgattgacgagtgctatgacatggaactctacgagtggaagaaggttgacctgtcagatgcagcccagaaggaacgggtgaatcagatgattgaagactgcgagccatttgagggagagcctctcttggatgccaagtgctttaagtgataatatgtcttggttttatgttgcttgctactgttctgcctgtcagggttttctatacggtcagttttttcaggttcggacttatttttcttttctcccctttttgagtctggttcagccaacattacaattaagttttaagttctcagatgttgattatggaacgtgttatttatgttattaaggaggtatggtttttgttttttattacaaaaaaaaaaaaaaaaaaaaaaaaaaaattaaaaaaaaaataaataaaaataaa

SEQ ID NO: 13426 - DNA, 1562 bp, Gossypium hirsutum
  Clone ID: GOSHI-09MAY01-C725_1
gaaccctcgcgtccgcccacgcgcccccgcagtctctcccgctccttctcgctgcgatttcgtcttcaagatctcagttctcaaatcgtagcgctcttttctatcaagccatggctctggtcttgcatgcaggaaaaacaaacaaaaatgcctttaaggcactcattgctgcagaatatagtggtgtgcaggtcaaaatggttgagaattttgagatgggtgtgtcaaataagactcctgagttcatcaagatgaaccctttggggaaggttcctgtgttggaaacacctgagggtccggtatttgagagcaatgccattgctcgttatgttgctcgctcaaaggttaacaaccctatatgtggttctacattgattgattatggtcatatcgagcaatggattgattttgcagccatggaaattgatgctaatattgccaaatggttgtatccaagacttggttacggtgtttaccttcctccagctgaggaagctgctattgctgcattgaagagagcccttggcgctttgaacactcatcttgcttccaacacatttcttgttggacattttgtcacccttgctgacattatcatgacatgtaacctctacttgggtttctcccagatcatgaccaagagttttacctcggagttccctcatgttgagaggtacttttggaccttggttaatcagccaaaaatcaagaagattcttggtgaagtgaagcaggcagtctctctaccacctgttccttcaaagaagcctgctgcccagccaaaagaaactaaaccaaaggctgaaccaaagaaagaagccaaaaaggaggttgagaaacaggcagcaaaggcagaggccgctgaggaggaggaggcaccaaagcccaaaccaaagaatcctcttgatttgctgcctccaagtaagatggtactggatgactggaaaaggctttactctaacacaaagaccaatttccgagaggttgcaattaaaggattctgggacatgtatgatcccgagggatactcactgtggttttgtgactacaagtacaatgaggagaatacagtttcatttgtcacaatgaacaaggttggaggattcctgcagagaatggatttggcccgcaagtatgcatttgggaagatgttggtgatcggtgctaaccctccattcaaggtgaaaggactatggcttttccgtgggcaagagattcctcaatttgtgattgacgagtgctatgacatggaactctacgagtggaagaaggttgacctgtcagatgcagcccagaaggaacgggtgaatcagatgattgaagactgcgagccatttgagggagagcctctcttggatgccaagtgctttaagtgatagaatatgttcttaattttacctttttatatttctggtacctttttgcatgtcaggttttatttataggtcgctgttttcagttttgattaaggtaacattacaattaagttttaatgttctgagatgttggatttgaaattctctatttatgttttattaagaagatatagtttctattgtttt

SEQ ID NO: 13427 - DNA, 489 bp, Gossypium hirsutum
  Clone ID: uC-gsflmaxxa067g11b1
gtttacttgtattctactacaacggagagcagaaaaaagcgtaaatctcgagcgcccgagcggaagcgaagcagttgttttttcatttcttttggctctgattaacggagagactggtttaattgcattcttggagccttctgttatcctcatgatattagctgccaatgctgcagtaggagtaattacagaaacaaatgctgaaaaggcacttgaggagttacgtgcctaccaagctgatattgcaaccgtgctgcgcaatggttgtttctcaatacttcctgcaacagagttagttccaggagacatagtagaagttagtgtgggatgcaaaattcctgctgatatgagaatgattgagatgttaagtggtcagttacgtgttgatcaagcaatttccgagaggttgcgattaaaggattctgggacatgtatgatcccgagggatactcactgtggttttgtgactacaagtacaatgaggagaat

SEQ ID NO: 13428 - DNA, 525 bp, Gossypium hirsutum
  Clone ID: uC-gsronu33B148a01b1
gaagaaactcattttgagattacatgtcatgataatgtcagggggggtgtcagcatgtcccacatgaaatgtgttggaagcaagatgagtgttcaaaagtacctctcaacatgagggaattcagaggtaaaactcttggaccttggttaatcagccaaaaatcaagaggattcttggtgaagtgaagcaggcagtctctctaccacctgttccttcaaagaagcctgctgcccagccaaaagaaactaaaccaaaggctgaaccaaagaaagaagccaaaaaggaggttgagaaacaggcagcaaaggcagaggccgctgaggaggaggaggcaccaaagcccaaaccaaagaatcctcttgatttgctgcctccaagtaagatggtactggatgactggaaaaggctttactctaacacgaagaccaatttccgagaggttgcgattaaaggattctgggacatgtatgatcccgagggatactcactgtggtttttgtgactacaagtacaatgaggagaata

SEQ ID NO: 13429 - DNA, 386 bp, Gossypium hirsutum
  Clone ID: LIB3166-040-P1-K1-E4
cttccgggaacccttggccttttgcaccttgtttattcaaccaaaattcaagaagatcctgggggaattgaaccagccagtctctttaccacctgttccttcaaagaagcctgctgcccagccaaatgaaactaaaccaaaggctgaaccaaagaaagaggccaaaaaggaggttgagaaactggcagcaaaggcagaggcagctgatgaggaggcaccaaagcccaaaccaaagaatcctcttgatttgctgcctccaagtaagatggtactggatgactggaagaggctttactctaacacatagaccaatttccgagaggttgcaattaaaggattctgggacatgtatgatccccggggatactcactgtggttttgtgact

SEQ ID NO: 13430 - DNA, 234 bp, Gossypium hirsutum
  unsure (1)..(234): unsure at all n locations
  Clone ID: LIB3493-045-P1-M1-D8
cgatttcgtctaagatctcagttctcaaatcgtagcgctcttttctatcaagccgtngctcttatctaacatgcaggaaaaacaaacaaaaatgcctttaaggcactcattgctcagaatatagntggtgtgcaggtcaaaatggttgaagaattttgagagtgggtgtgtcaaataatatcttttttttttatcaacattaaccataaaaaaaaagttcctttttttctaaca

SEQ ID NO: 13431 - DNA, 168 bp, Gossypium hirsutum
  Clone ID: LIB3197-041-Q1-M1-D6
ttggaagtctggtgaaacacctaggtcgtatttagacaagccattggtcgtatgttgctcgctcaaaggttaacaaccctatatgttggttctacattgattgattatgggcatatcgagccatggattgattttcaaccttggaaattgaagctaatattgccaaag

SEQ ID NO: 13432 - DNA, 1179 bp, Gossypium hirsutum
  Clone ID: GOSHI-09MAY01-C655_2
ttcatgcgtccgcccacgcgtccgcgtatctcggcggctaattctcctacttatctgctgctcgcaaaaccctagccccttccttttttctttcgtagtaatcatccatggagttctggggtattgaagttaagtctgggcagcctattaaagcagatcctggtgctaactacgttatccatctttcccaggcttcacttggagagtccaagaacaaagcagaatccgttccactctatgtgaatgttgatggaaagaaacttattctgggaaccctttcccaccagatttgccctcaattatcttttgatttagtatttgacgaagagtttgagctctcccacaactccgaaaacgggagcgtatatttcctcggttacaaaactttcataccagaggaaggtgatgattttggtatgtctagcgaagaagaaagcgaggaggaggaagaggaggagcttcctgttgctgctgctgctgctgcagtaaatggaaaagctaagccagatggaaaaacagccaaggctaatgctgggaaacctgatgctgttaaacaatctggcaagatagcagaacctagcagtaacaagaaatctgaggatgaagatgatgatgatgagtccgaggatgagagtggttctgatgaggaagatgattctgatgacgatgacgagtctgatgagatgtctatggatgaaagttcagatgacgaggatgaggagacacctaagaaggtcgagtcaagcaagaagagacctgctgaagctgcaacccctgcttctgcaaaaaaggctaaatctgcagttacacctcagaagacagatggtaagaagggtggacacacagcaacaccgcatccagcaaagcaatctgggaaaaattctgcaaagtctccaaagtctggtggtcaattctcttgtggttcttgtaacaagtcgttcgggtctgagggcggtttagagtctcacaagaaggccaagcatggtggcaaatgagatcgggtttacatgctctaatgtgcatgtttaattttgggggagagatgtttggcttgtggttttggttcttattattcttactagtaaaatgagtgatttatggattagaaaagacttcgggaaggtccttatgattagaaactatcgtcatattggataattattatgattatattttagg

SEQ ID NO: 13433 - DNA, 1338 bp, Gossypium hirsutum
  Clone ID: GOSHI-09MAY01-C655_1
ccccgcgtccgcccacgcccccccccgcccgcgctttactctgtcgtatctctccttctaaaaccctacttatctcctcctcgcaaaaccctagccccttccttttttctttcgtagtaatcatccatggagttctggggtattgaagttaagtctgggcagcctattaaagcagatcctggtgctaactacgttatccatctttcccaggcttcacttggagagtccaagaacaaagcagaatccgttccactctatgtgaatgttgatggaaagaaacttattctgggaaccctttcccaccagatttgccctcaattatcttttgatttagtatttgacgaagagtttgagctctcccacaactggaaaaacgggagcgtatatttcctcggttataaaactttcataccagaggaaggtgatgattttggtatgtctagtgaagaagaaagcgaggaggaggaagatgaggagcttcctgtcgctgctgctgctgctgctgctgcagtaaatggaaaagctaagccagatgcaaaaacagccaaggctaatgctgggaaacctgatgctgttaaacaatctggcaagatagcagaacctagcaataacaggaaatctgaggatgaagatgatgatgatgagtccgaggatgagagtggttctgatgaggaagatgattctggtgacgatgatgagtctgacgagatgtctatggatgaaagttcagatgacgaggatgaggagacacctaagaaggtcgagtcaagcaagaagatacctgtcgagtcaagcaagaagagacctgctgaagctgcaacccctgcttctgcaaaaaaggctaaatctgcagttacacctcagaagacagatggtaagaagggtggacacacagcaacaccgcatccagcaaagcaatctgggaaaaattctgcaaagtctccaaagtctggtggtcaattctcttgtggttcttgtaacaagtcgttcgggtctgagggcggtttagagtctcacaagaaggccaagcatggtggcaaatgaggtcgggtttacatgctctaatgtgcatgtttaattttgggggagagatgtttggcttgtggttttggttcttattattcttactagtaaaatgagtgatttatggattagaaaagacttcgggaaggtccttatgattagaaactatcgtcatattgggttattattatgattatattttaggatgtgtaatgtttgcttcaaattttgtctgatttgcattctacatgcgtgatccttaaatggaaggtttatggttttccggaagtctgtgcttatataattggagttttg

SEQ ID NO: 13434 - DNA, 539 bp, Gossypium hirsutum
  Clone ID: LIB3828-019-Q1-N6-E11
aaggatcacgcatgtaaaatgcaaatcagacaaaatttgaagcaaacattacacatcctaaaatataatcataataattatccaatattatgatagtttctaatcataaggaccttcccgaagtcttttctaatccataaatcactcatttgactagtaagaataataagaaccaaaaccacaagccaaacatctctcccccaaaattaaacatgcacattagagcatgtaaacccgacctcatttgccaccatgcttggccttcttgtgagactctaaaccgccctcagacccgaacgactttggagactttgcagaatttttcccaaattgctttgctggatgcggtgttgctgtgtgtccacccttcttaccatctgtcttctgaggtgtaactgcagatttagccttttttgcagaagcaggggttgcagcttcagcaggtctcttcttgcttgactcgacaggtatcttcttgcttgactcgaccttcttaggtgtctcctcatactcgtgatctgaactatcatccatagaca

SEQ ID NO: 13435 - DNA, 444 bp, Gossypium hirsutum
  Clone ID: uC-gsflnu33B060d04b1
tatgggttgacattcgttgaagtggaaagatggggtttggggaagcagatgggttacttaccgccgtctcgaggataagaacgagcacgcctagaaagtatatcctggagctaactacgttatccatctaagccgtgattcagtcggggaggccaagaacaaagcagaatccgttccactctatgtgaatgttgatgggaagaaacttattctgggaaccctttcccaccagagttgccctcaattatctatcgattcagaattcgacgaagagtttgagctctcccacaactggaaaaacgggagcgtatatttcctcggttacaaaactttcataccagaggaaggcgatgattttggtatgtctagcgaagaacaaagcgaggaggaagaagaggaggagcttcctgttgctgctgctgctgctgcagtaaatggaaaagc

SEQ ID NO: 13436 - DNA, 379 bp, Gossypium hirsutum
  Clone ID: LIB3189-021-P1-K1-A7
gtcgtatctctccttctaaaaccctacttatctcctcctcgcaaaaccctagccccttccttttttctttcgtagtaatcatccatggagttctggggtattgaagttaagtctgggcagcctattaaagcagatcctggtgctaactacgttatccattttttcccaggcttcacttggagagtccaagaacaaagcagaatccgttccactctatgtgaatgttgatggaaagaaacttattctgggaaccctttcccaccagatttgccctcaattatcttttgatttagtatttgatgaagagtttactggaacatgttgaaagctttactttattagttcaaaagcttcttcgacatgatccactctctttctt

SEQ ID NO: 13437 - DNA, 283 bp, Gossypium hirsutum
  Clone ID: GOSHI-09MAY01-C645_79
gttttgtaaagcataagcttcagggttattttcaatgctttgtaatagtttataggcgctccgtgttgtgaactcacccgtcgcttcaacgctccaaacttggaaatcttcatgcggactttcagctagtgggatactgaggatcatctctgctacatcctccggaaaggtagtagctgggtgcaattactcatcccatgccccattcttccgcattcaaaactgaatattggcaaattttcatacttgaagggtatccaaactttactaacataagcattag

SEQ ID NO: 13438 - DNA, 557 bp, Gossypium hirsutum
  Clone ID: GOSHI-09MAY01-C645_78
agctggccgcctgcacggcccggactactggctggacacccatcctgatatctttgtctgctatggtgatcaacaaatacacgctgaggagtaacattaagagctttaatctttcgggaatggggtgcagtgcggggcttatctccattgatttagctcgggatcttctccaagtacacccgaaccctcgcgcccgccctcgcggccctgagatcatcactcccaactactaccgggggaatgaaagagccatgctccttcccaactgtctcttccgcatgggtggcgccgcaatcctcttgtcgaaccgccgctcctagaggcggcgtgccacgtaccgtctctgtccacgttgttcgaacccacaaaggggccgatgacaaagcctaccgatgcgtgttcgaaagaagaagacaaagacggcaatagttgggatatctttatctaaagatctcatggctattgcttggagaggctttaaaaatttaacattaccacttatttggtccctttactttctttcctgcaattctgaagcaacttcctaattttttttt

SEQ ID NO: 13439 - DNA, 544 bp, Gossypium hirsutum
  Clone ID: GOSHI-09MAY01-C645_75
caatatagggacatataactacatacaggtgtgctactgtcaatgaagtgcaaaagctttttagcaaactgcattcatgcacagtgactgaaaccccatttgcttcaaacgatgccaaatactttttgggaccaccgaaacccatatattctttcccaaagctccattatacttcaccacaacaagcttatccaaaagttgcttagattcagcaatatcacaagacattggtgctaagtgtatcataaggaacaacaagcacttcatcacttgcaccgctgccttcgctctcacttgtgctctctacttggtcccaaagagaccttcaatgggatccaggtgggatctaaaatgctttgcaaactcaatcccaactgctttccggccgcccggaatttcaaatgcccttgggtatgttgaaggaaagaaagaggcttcagagtcacatgagaaacagataaagtatgagctcttctgagatgtatgcacaaagagggatagaggggaagatgatgatgaagacggtggtggcagagagaaacac

SEQ ID NO: 13440 - DNA, 616 bp, Gossypium hirsutum
  Clone ID: GOSHI-09MAY01-C645_60
tgccctctcttcaattcaaaaaaaagaaatgaaaagtaaaaggcaacatacgagcctgaaatgttcaaaaccattggataaatcttagtttaggcagagttaatgaaatcatactaaaacgcgtcactcaaacttctcttgccagcatttaattccctttttatctaaataaaaactaataagactacatcttaaaaagatactactggaaaatttaagcacttgtgtttaagctctcaaccaaattgccagcgaaatactgtattcctcttgccttatagctcatcatgttgtactgcatcttcctcagcactgtctttgctcggacccgtcgcacttccttcaccatcatcagtatcatcgtcgtcgtcctcagcatcggaatccactggctttgtccatatttttacaggtatggaagattgcaacctatttttaccaactgcatcaagatctgaaatatagctatgaacaaatctccctacttcttttccagatttaccatcttttttatgcaatctattgttcctgtctccccagatggcccatactgcaacacaaaagattcgatgttgaggagtcgagctctgtgagaaaaccaggttagccactgtag

SEQ ID NO: 13441 - DNA, 446 bp, Gossypium hirsutum
  Clone ID: GOSHI-09MAY01-C645_59
gattcccggaaaaatacaattcataattttgctgcgtttcttcatgcagaagagatttttaatttgaagcaaatataaagattttttattaatattagccaaaacccagggatcaaaaaagttttagatgaacaaatggacggttaaaaaaatttgatttttaacctacaaaaacatttaaaggaaaaaactgaatgatctttattggaaaagttacctgatccaaggatttttgggatggagaaatgaaatttaggttaataaaagaagataaaatgaaccctaaaaataagcagaaatgtgagaggcgtttgtgtgtgtgttgtgagaggcgttagaagcaacaggaacaaatgcgtaatctgaaaagcacattgaaccaacatagttcaatccctgcaaatatccccattttcaaacactagacaactgtaaaatagtgtctg

SEQ ID NO: 13442 - DNA, 467 bp, Gossypium hirsutum
  Clone ID: GOSHI-09MAY01-C645_57
aacaatcatgattaaaaaagctagtacacaaggtagctacaaaatcctgttttagtaacacctaattcaagttccgactaaaataaacgaccatggaatacaacattaaataacactctacttgaaaaagtgctaagccggggcttttccatacaacattaaatgggatggatcgttcttgtactgccttttttacgttaacccattcatcctcctcagctccaaatcagtttcactggaactggtaactcggtgagacagaaacatatcaacatcataccatgctctgtatgttgatgactttgccttaaattctagttctgatagatctgaaaccttttctcccacttttgaaaccaaacctttaagaatctgacaactttggtctccataatttagaaagcaagtttgaggaagtccagactcatccttgtatgtattggtcactgaaggaacttcctctcccc

SEQ ID NO: 13443 - DNA, 773 bp, Gossypium hirsutum
  Clone ID: GOSHI-09MAY01-C645_55
gataaaccggggaacttgaatagtaaaaatatctagtcatcataaaaaagaaaaagagcatgcctttgttctgacagttaaaatcatattaagaaagcatcagtgaaagttcttttgcctgaagcattcaattcctttttcctctaacaggaaactcctaaaactagaactcttttttaaataaagggtaggaaaaaatttaggcgtttttatctccaaaccgatttgtcagcgagacattgcagtgcttagagctcatcatgtgcatcttccttgtcctcatcgtctgatttggtatcggaatcagactcgtgcccttcagtatcatcggcatcatcttcatcctcagcatcggaatcaactgggtcatcctttgatgcctcctcctctctctttttctccgcctcctcaaacgctgccttttcagcatccttctgcttgccccatgtttcttcagctagtttcttggcactactctacatcatcggcaactaagatgttatcaaacattgttccagattttacctgccacaattcaataccgacatacttcaagttgggtttttacaattaaaagaaagggatgtttgtgccaggcgttgcttctcagcagctgtagtgtttacactgccagtggtagcactgttatccagcatgaaagatagaagccctgtgagtatgcttgatacagaccacattgaataccacctttatggatataaaatccctcccgggcaagccctcgcgtcagaccaggaagcatgggcggcggg

SEQ ID NO: 13444 - DNA, 729 bp, Gossypium hirsutum
  Clone ID: GOSHI-09MAY01-C645_51
aaaaattgaaactagttcatatcaacttgctcaagttgtatgtataaattgcaaatcaacaccttatttgaacttacaaatctaggaaagcataaaatgtagttccaggagcatgcatttaaagtagcaaaaaaaattactgattacagtgtaagtctaagctccaaatctagctcttgtgtgtcacttgattctgaattttgactgctcgatcccaataagttgctgagatggttcttgctccttgagtgtgaatcctcaacatgtaggtttagaagttctggtcatgtttggttgtgcaaaatgttgggtgtctaagaagccactggttggctgggaatcaccatatctgatgttttccctttgatcgtattctccaacccccatctgtaataatatataattgtagtacaatcaaacaatcgagcataaactgtctttgtcaatgcatcccgactagccacaacagcattacaatcaagagctttaactatacttccttcacaggtttgaatggtacgagtacataatgtcgccaacaagaggttcacatcacacctgtgagcataaaagaatgtattgctgcaaggccaagctgttgaaaagaggttccacatttgcaagccccttgctatgattatgaggtattgtgttgatagtttctggtcatcgacgatttctagctcttccggcatcccatactgaggttggcgatattgaactgcaaag

SEQ ID NO: 13445 - DNA, 614 bp, Gossypium hirsutum
  Clone ID: GOSHI-09MAY01-C645_48
cccaaacgagcctttttaaacatattgtggaatgttttaggagattccctttggggttccaatttattcatccaggatgggggatacgtggggtcaaatgtttcttggcagcagagagagcatctgacacagaatccagatgtttggttaagttctccacagccaatgccatatggcgttttgttacccaaaatagatcagagaacgaaatgcccttccaccacatgtaaccataacccaatgcccccaaggtagcagcagggattaccagagaggttaacttaacgccggaatccccattcagaacagttatctgccgtgctgaggccagttgcctaatctccgttgagagacgacgcacctgagccagaagggcatctgaatcatctgattggtccccagtttttttccagtcccttcacaagagactgcaattcgcctaacatgtccgatagcttaccgttcttgagaaggatcgtaccggtgtaacctgcgccggcaaggatcaaaatcttcgaaaagccgactccggtttgcatcgccatggcggtgattcttttgaagggtcaccagagagagtttggttgagactgggaaaattttagggaagagaa

SEQ ID NO: 13446 - DNA, 1116 bp, Gossypium hirsutum
  Clone ID: GOSHI-09MAY01-C645_47
ctaaaagttaaaagcaaaggacaaattccttcgaaaattcaaaaagatggaaaattagcaaaaaacatccatccaagttgagaaaacgaatgtttttatttttggaatgacttttttaacatcatcccctgaaaagtctacaagtttttccgtcttgggatttaaatttttctccttaaggtgattcaggtaaggaatgctctcaaataagctgctgctgcttcttgtgcctatccacatactccggaaacagttttctgaatgtcgggtttttacaaattaaatgcaagggatgtctttgccaggcgttgcttctcagcagctgtagtgttcacactgccagtggtaggactgttatccatcatgaaagagagaagcccggtgagtatgcttgatacagaccacattgggttccaactttctggatgaaaatcactcatggacaagcatattttcttctgcgtcataccccgtccattgggggtgatcatggtgattccaggaggtttgtagggatactcaggagggaacttgatctttccatagtaatacccacctgcaaaaggcgttccttcactcccttccagcacataatgccactcaagaatgtcacttggggatggacgagcaacaacatgagaaactggttccttacaaagtgctctgtattctttctgaaggcgcttaaagcacgatttctctgccattccttgaaacctaaaaagacagtcttagccacaaccaaataaaacccgtataaccggcgccggctaagatcaagatcttcgacaaacctactccggtttgcatagccatgacagtgttttcgaaaaaattaatcatataaaaaacagaatatgttgcattagtaaggaacaggaaaaagaacctgcaagggtatgtaatctgaacattggtaacatccttggttatagatttcaagaaaatctcagatggtttaactcgagctaatagtcgcaatccctttttgctctttttctcatcgtttccttggtttcctggttctgggttctttgattttggaccccttttatccatttgagagtttacgaagaacaaacaagaactggtttggcttcaatcgggaagaaacag

SEQ ID NO: 13447 - DNA, 623 bp, Gossypium hirsutum
  Clone ID: GOSHI-09MAY01-C645_46
aaagaaagactaataagatgtggatgaataaccataagctagatcgtcccggtatcgaccaggatcggaatctctgcagcaagccatggggcaagtcccgaacacagggcatgtgctattccaaacctaggacaattttttgcccaaagtggcttgaaatgcacggtcagacaaatcttccctcctctgtacatcttctgagtcttgccatcgagttcgggcaactcgagctcgggagcagtggccggataagtaacggggatatcaaactggagatcgaattcgtacttgagaaggttatggacgtaccaacacttgccggtccaacgcgtcccttccggattggcggcggatatccggaaccaatcgttgtcgttggacttattcatctgcgtgtaggcgatcaaagccttatactcctccttcagccgctgagtccatgccgctccgtctctgggacccgccttcgtcgtcagtagcgggatctgtgttagcgtcgacttcgtattcgggtcccagccttccatttgcgggtttcacctcttttgcaaaccctagataatttattccgggaatccgaattctgacgtatcgctgcgcgaacgcgtgggcggacgcgtggg

SEQ ID NO: 13448 - DNA, 619 bp, Gossypium hirsutum
  Clone ID: GOSHI-09MAY01-C645_45
atagcaacttcaagcacatattagaaacatttcgactgagctaaaagtgtaaaaaaaacagattatgtacaaaacaaggaatatttcagaacaactaaaacaaaactgtttttcatgaacttccacaatttagaagtattatttcagattatgcacaaaacaaggaatattgctgaagcgtggcgattgtgctgcaagtttcatgccctcctattgacaacccttccactcggtacccttcaatttccaatccctttttgctctttttcccatcgtttccttggtttcctggttctgggttctttgattttgattttccctagatgtgaacatgccgccatagaaagtgacatgagcagtttcccaggatccaccagtgcaaacaccggggattcttgcgttaactaatacgaaaatggagaacaatgaagctaaatgaagcatggtaaaggaagaagatgaagcaacggtgtagccattgttttttgtttgtataaaagaggaatagaaatgttttttcggacgaataaaatgtgaggaagaagatgaggagatgcagagggctgccgatttggggaatttggggggaaaaataaagggaatcggggtagggggagca

SEQ ID NO: 13449 - DNA, 690 bp, Gossypium hirsutum
  Clone ID: GOSHI-09MAY01-C645_44
agacagaattagtggggtgacgcattttctatgctatctctctatatatagccataactgcagccactttaatacatcaaaaaatatattgtccaagctctattgggtgacatgaagaatccttggttccatacttcaatttcattatccttcaagttttgaaaccatggagtaatttgagactagctgaaggagcttctcacttcccttaaggctgtatgtcgtaatcttcgccgtacaagccatgcatttaaactgcaaaacgttagaagcaacaagaacaaatgcgtaatctgaaaagcacattgaaccaacatagttcaatccctgcaaatatccatatttttagacactagacaactgtgaaaatagtgtccgcaagtgttactttggtgagatataaaaaacaaaatatgttgcactagtaaggaacaagaaaaagaacctacaagggtatgtaatctgaacattggtaacatccttggttatagatttcaagaaaatctccggtcgcgtggcccgacccgtgggtcgcaatccctttttgctctttttctcatcatttccttggtttcctggttctgggttctttgattttggacactttttatccattggagagttttaagacgaagaacaaacaagaactggcttggcttcagttgggaagaaacacagagttgaataagc

SEQ ID NO: 13450 - DNA, 1186 bp, Gossypium hirsutum
  Clone ID: GOSHI-09MAY01-C645_43
gcttgagattactctagggctgctgaaataactttgatgtctgcccttctctatactctcatggcttcatttctcgctttcttccttcaatctggttcttttgccctcccagtttctgcttggatttctgccgcttcagggactcggccgatcaggtaggctcctctactactcttcagcgcttcatttgctaatatatgcgcaaggttgtttgctaatcttgggatatgctcaaacctacactccttgaatttaagcagaagttgacgaatatcatgtaaatacgcactaatcaatgatttatcgggcctttttgttttacattttcttattattgataaagaatccccttcaataataactttttcccactgcatgttaacgccgatctggagggctttccgacacgctattgcttccgccccaaaggctgagggaactctttgatgaacctccgtacatgatagaagaactgaaccctccttatcgcgggccacaaccccaatagccgctttactttgtctaccgtcgtacgctgcatcgaaattgattttgactaccttgtccactggctttgtccatatttttacagatggcccatactgcaacacaaaagattcgatgctgaggagtcgagctttgtgagaaaacccaggacattcccggaagagatggtccatagtttcagttcctgaactacagcgaggacatactgacgtgttcgtcagtcttctaagtagcatattagctcgcgtagctagaaaattccaagatatcttccaaactgtaattttaatttttgaaggaagatcaagtaaccatagtttcctgtagaaatccttggagtcggtttgtaaagcataagcttcaggttattttcaatgctttgtaatagtttataggcgctcgatgttgtgaactcacccgtcgcttcaatgctccaaacttggaaatcttcatgcggactttcagctagtgggatactgaggatcatctctgctacgtcctccggaaaggcatactcaatcaactcctgtttccatgttctgctacttgaatcaattagctctgcaactttactatcgttcaaattcgaatttaaaactggtaatctatcacgcggtaaacctggaatccaataatcacgactgattgaaattttcgtacctcgacccactttccaaca

SEQ ID NO: 13451 - DNA, 520 bp, Gossypium hirsutum
  Clone ID: GOSHI-09MAY01-C645_42
aataattaacaatcatgattaaaaaagctagtacacaaggtagctacaaaatcctgtttcaataacacctaattcaagttccgactaagataaacgaccatggaatacaacattaaataacactctacttgaaaaagtgctaagccttggctttttcatacaacattaaatgggatggatcggcctcgtactgccttttttacgttaacccattcatcctcctcagctccaaatccgacaaatctaacacgaacttcagtttcaccggaactggtaactcggtgagacagaaacatatcaacatcataccatgctccgtgtgttgatgactttgcctcaaattctagttctgatagatctgaaaccttttctcccacttttgaaaccaaacctttaagaatctgacaacttaggcctccatcatttagaaggcaagtttgaggaagtccagactcatctttgtatgtattggccactgaaggaactttcacttcgctttcttgctgcctagttgtgaacc

SEQ ID NO: 13452 - DNA, 718 bp, Gossypium hirsutum
  Clone ID: GOSHI-09MAY01-C645_38
gtagtgttcacactgccagtggtaggactattatccatcatgaaagagagaagcccggtaagtatgctagatacagaccacatagggttccaactttctggatgaaaatcactcatggacaagcatattttcttctgtgtcataaaccgtccattgggggtgatcatcctgattccaggaggtttgtagggatactctggagggaacttgatctttccataataatacccacctgcaaaaggcgttccttcactcccttccagcacataatgccactcaagaatgtcatttggggatggacgagcaacaacatgagaaactggttccttacaaagtgctctatattctttctgaaggcgcttaacacacgatttctccgccattcctctgaaacctaaaagtggtctgggccacaagaaaataaaaccccaccccctgtttcgtttcttcaactttcaaattataattattcactggggatcgaggcagataaaagaagctgaaactataactaaaagaaagacgaaagagaggaaaggaaagatctaacggagagcgaaagcgagagaggaggattcttttgacgctggggatttgtttgttacgctttatgtgatagtactgtagcgtactactaatgctgccgctgctccttcctttccttccctttctccagttatcgtctctccttcgagatcgacttgccggaggaaattgc

SEQ ID NO: 13453 - DNA, 705 bp, Gossypium hirsutum
  Clone ID: GOSHI-09MAY01-C645_37
ccagtggctctttccatttcttgtaacagctgctgcaaagagctccccagatcagacaaattagttggttccgtgatacccctggaagcaccacgagccatggcactgacacgagctatatatgcaggtgtgtacgattgcccaccttctaagcctacctttcaccaaagtccctaggcgaggctccaagacagatgccaccaactcagagccaacatataactgtgcagccaattcagctaaagcaatttgactgcattcctgcagtctctcattgatttcttcagctacagaatcccaataagattgtgatataatttccccctgaatcaacatgagccctggatcctccgacactacatgctgagcttgcttctcaacatgatataaatccaccccagtagtatccgcaagatcaatcaatgaaacacgtcctaatttcttcacctccccagcaatttcatgtctcaattgctcgggagtgatatattctttgccagaaaccggacgcgggggttcgaaatcaatgatacgaagctcgtggagcttttggaccaattcaacgacgttccgttccgataatcggatgctcgatttggcctgctgtgcaaactcgaattgcctctgcaattccagtaattcacccatcccttcttcctattccaaattccactcaactgaagaagatcagcttttcttagggtt

SEQ ID NO: 13454 - DNA, 1034 bp, Gossypium hirsutum
  Clone ID: GOSHI-09MAY01-C645_35
tttttttgagaagtagtttgtctttttagggctgtgccctctcttcaattcaaagaaaggaaaataaaataaaataaaaaagtcttgaaatgttcaaaaccattggataaatcttggtttcgtcataaaacgcccgcttcgtttaggcagagttaatgaaatcatactaaaacgcgtcactcaaacttttctcttgccagcattcaattccttttttatctaaataaaaactaataagactacatcttaaaaagatactaaaggaaaatttaagcacttgtgtttaaagctctcaaccaaattgccagcgaaatactgtattcctcttgccttatagctcatcatgttgtactgcatcttcctcagcactatctttgcttgaatccgactcacttccttcaccatcatcagtatcatcatcgtcgtcctcagcatcggaatcaactggctcatccttcgattcctcttcctctttcttcttctcttcctcctcaaatgctgccttctcagcatccttctgcttgccccatgtttcttcagctagtttcttggcatactctacatcatcagcgactaagatgttatcaaacattgttcccgatttcacctgccacaactcaataccaacatacttcaagctggggaaaacatagagatccggatcatccttgaaatcagggttgtcaatcattggtgccttccacttgcccttgtagttggggttcttgattttctttggattccatgggcccttgtattcaggattgggaatagttgaaggtatccattcaccatcttcttcatcatcccaatcttcaggcttcttagcatcaggatctggaatttcttttggaatgtcatcataaccctcaggcttcttgtcttcgggatcagggatgtattccttgtcatccccggccgcgggcgccgtcgcctcggcggccgcgtgggtcttaggtgggagaagatcccaatcagtgtacaagctaccagtttgtctcccaacattgtcaacaaggcggacgcgtgagcac

SEQ ID NO: 13455 - DNA, 671 bp, Gossypium hirsutum
  Clone ID: GOSHI-09MAY01-C645_34
agtaaaaatatctagtgatcataaaaaagaaaaagagcatgcctttgttcagacagttaaaatcatattaagaaagcatcagtgaaagttcttttgcctgaagcattcaattcctttttcctctaacaggaaactcctaaaactagaactttttttttaaaataaagggtagggaaaaatttataccaaaccgaattgtctgcgagatattgcagtgcttagagctcatcatgagcatcttccttgtcatcatcgtctgatttggtatcggaatcagactcgtgcccttcagtatcatcggcatcatcttcatcctcagcatcggaatcaactgggtcatcctttgattcctcctctctctttttctctgcctcctcaaacgctgccttttcagcatccttctgcttgccccatgtttcttcagctagtttcttggcatactctacatcatcggcaactaagatgttatcaaacattgttccagattttacctgccacaattcaataccgacatacttcaagttggggaaaacatagagatctggatcatccttgaaatctgggttgtcaatcattggtgccttccacttgcccttgtagttggggttcttgattttctttggcttccatgggcccttgtatcggggttgggaattgttgagggtgtcctt

SEQ ID NO: 13456 - DNA, 1270 bp, Gossypium hirsutum
  Clone ID: GOSHI-09MAY01-C645_33
attatatatatatataggccattttaatccatcaacccatcaacccaactgtaaccattggtcatgagaggttccaggttcttgaattgcttaatgtcctcctggatttctgttccatgacaaatacgatgggtctcccaattgccttggctttgccaggtaagcaacaatggaaggccaagcccaaaagaaagctcaccccgccaacagtgagattagcaatgccaagggagtcgttttttccacccaagccagctagtagttgaaagccctagttttttcttgccattgaaactgtaagtattgtagttgttatccaatgtcccatctatttgatcatttggttgcagatcctgttcaatcttcccatacaattttctaaatgttggcagcgcagcagttcgcatccaaacaatgaggtcttcttgctcccgtcgcggggtagatggattaagcgttgcaccacctttaagactcccattctgaaaattttggggaaatacatctttcccgaatttactgtccctatcacttttccaggagatgcccttcttgttcaccgccaattgctgattgttgagggagaaattataggtatcattaaataaactccaagctataagaccacagggaacaattggctggtccttagacatatcttcaggcttacaagaactaacatcatcccaactgctattttctttcaactgtgagtcacttcggctcttcacatacctccgatgattctggtagaaattgtccagttggtagtagacatagataggcttcttcattcgcttcttaactgtcaatgttctgttgcattgtttggtcaaattactttgtatgaatgtgaccttatcatttttgtagccgtccggtacacatgcagtttcataccgatcaatgatttcaacgacatctcgagaagcaaacagagagaccactccaataggaatgaagacaatgctaacaagcataaaggctgatatgacccatcgtggcgtgaggattggcttgcaagctggaagctcttgctgagtgaacttagagtatttgggtcgcttggaatttcttctaggagcagcagaatcagcggatccaacacctccagcgctagatgatggtgtactggaactcattggatcaaccttttacttctgatgggggcggcaccaaatattattgtacgcgtcctccgcctctaactccttccgctcgcgggggccgtctagaagacgtttgtgttaacaactaaaattatttgtcg

SEQ ID NO: 13457 - DNA, 915 bp, Gossypium hirsutum
  Clone ID: GOSHI-09MAY01-C645_32
atgtcttttggtaaaagaaaattatcatcatttaacttggccgatcttggattttacgcaaaacctaggcgcacgccttgacaacaattataggaaaaacaatgcgaaatttgattcaaatttcaaggagtggagaagccaccgacgacttaggaagagagctaatctttgataggcacattcagttcaatctttgacaataagtattcagtagcagtattagatcctatttgtatttcaaaagtaagaaatcaagaggcttcgacattatcaattcatcacaagacagattaatttgtcaatgaaattgtataattattgcccgtgcgcttatttaggaaaaactcaagcttcgcctttaacatccaatatgctaagacttgttcgacgaggctgcataatccttatacttgatcatcccagcatcggcatgctaagactcatttgatgtggctgcatcatccttatgcttgatcatcccggaatcgacgagaatcggaatctctgcagcaagccatggggcaagtcccaaacacagtgcatgtgctattccaaacctaggacaattttttgcccaaagtggcttgaaatgcacggtcagacaaatcttccctcctctgtacatcttctgagtcttgccgtcggcgtccggcaactcgagctcgggagcagtggccggataagtaacggggatatcaaactggagatcgaattcgtatttgagaaggttatggacgtaccaacacttgccggtccaacgagtcccttccggattggctgcggatatccggaaccaatcgttgtcgttggacttattcatctgcgtgtaggcgatcaaagccttatactcctccttcagccgctgagtccatgccgcttttgaccactcgcggacgcgtgggcggacgaagtggg

SEQ ID NO: 13458 - DNA, 865 bp, Gossypium hirsutum
  Clone ID: GOSHI-09MAY01-C645_30
aataaaccaaaaatttcctgtcattactccttttgtcttttttcaaattcattgttccagttgtgcaggtaaacatttgactatgttttatgattgaataagaaactgacatactacaaccggtaaacggtaaacaacaccgaccaaaactggaaaatcgtatcgtaaaatttacgagtgcattgagtttaataacttaagagcaagttcttcttgttctgccagagaaatggattcggccttgatactcgccgatccagccttatcttcttccttttcaccgtcatcgctatcactatgaaagtatattttcgatcttttccgttttctgttcgcatccggttctccttctgaacctgaaagatcatcctcctcctcttcaccatcctcttcttccctttgccctttcttcaacttcatcttcttcttgatccgtttctccctaagccgttgccgctctagaagtttgtcttccttgtccacctgcttcaagctctatccctcagctgcttagattcagtaatatcatgctcttttgaccttggtctagctaagttatatcgccacttgtcttgaggaacaacaagcacttcatcacttgcactgcattcgctctcacttgtgctctctatttggtctctttaatcaaatatcggatttcaagtaaaccagaaaattggaaatagttccaataacaaaacaaagaacagaagaaacaatgcaacagcaaaccatgaaaactcaactcgtatataaacattagggagtctttcttacacagttcgcagttctttaagtttagcaaattttgaggggatctcaccacttaatgcacaactgttaatgtatctgatacgattttgtc

SEQ ID NO: 13459 - DNA, 815 bp, Gossypium hirsutum
  Clone ID: GOSHI-09MAY01-C645_29
agcatgtttgatccttccactaagtccatatcaaagcgcttttcttatttttaaaaggaaaattcactacaccaaaataggcttttagcggcggctttttaggcctttaaccgcgctttagaagtgccgcaaaaaactccgctaatgaaagcgtcgctaactttaacggcgtttccagaaataaacgccgctaaagatcatgacctttagcgacgtttgtgggtaaagcgccgctaaagaccatgacctttagcggcgcattcctcaaaccccgctaaagactgacctttaactgcacttttctcacaaacggtgctaactataggtcataacttttagtggcgtttataaaaatcgacccatgcaatgcaacattaaataacactctacttgaagaagcgcttaagccctggcttttccagcttgaagcgattgaatcctccactacaccttcaatatcttggtcaagcagtatatcgccgctcgtcttgtcagccaacatagcaagtggagcctgtgtgttgccttcctcatcaaagacaacccttgtccctacaggcctatgaacattgatcttcagcttttttttcttcaagatccgtgttgctgaccttttcgaaaggagctgatgcatttatggaaggacttggaagtctttgtgtcttgttgtataattcgaccatgtgacatttcacctttggtaacaggctcctctgtcaatccagtagaagcaaactggttagttaaatcctgatgctgaagaagctcacactaaactccgatacttgatttcctggttctgggttctttgattt

SEQ ID NO: 13460 - DNA, 585 bp, Gossypium hirsutum
  Clone ID: GOSHI-09MAY01-C645_28
gcattagtgccaagatcaccggttatcatgcatgcccgacacatcacctatttaaccaccaatcagggattttaaatttccagtcctcactaaatttaagtaattaactcgataatcactaaattcacactcaaattaaattgcctaactaataaactcataccggttccatgaactttcgtgaaaacattgctatcaaaaccaccggaaaaccttcctcccttgccgtaagaacaatagctttaacatcgtttcacctcgttgcctcagcgaatttctccttcaatccatcactgactggtgaccttttatccaaagcttgaaaatttctaaaaatatgccagaagatatatagggagccaataacctcttctgaaattgctacgaaagtttcagcttctccatgactatgaccaataagatcctaaagcaaattcatccatctctcaagaaacctccgttgttaagctttggactatgaggaatagttttttctggtgataagagacgaaagcaagaggcgataaacaagcagatctattcggagatgggtatttatgcttagatcaattttaagagtaaaag

SEQ ID NO: 13461 - DNA, 689 bp, Gossypium hirsutum
  Clone ID: GOSHI-09MAY01-C645_26
ctcccggccggcgtttgaactctgctgtatccatgctggtggacgagcagtcatagatgaactgcaaaagaacctgcaactttcagcagagcacgtagaggcatcaaggatgacattgcataggtttggaaacacatcgtcttcatcgctgtggtacgagatgagctacattgaggcaaaggggaggatgaaaaaaggggacagggtttggcaaatagctttcggaagtggattcaagtgtaacagtgcagtatggaagtgcaacagaaccatcaaaacaccaaaagatggaccatgggcggattgcattcataggtacccagttcatatccctgaagttgtcaagctctaggctaaaagcaacaaacaaatatggttgattcatggctttgtcaaactcagatccttctggatctctgcatttatttatatttctcctgttaactttttctctactcattttgtttctgtcatactgtatcctttttccaatttcttatcaaaatcatgagtttgcataggtacccgatatggtgctctttgtttttgttaattaatgtacaccctgcaggggaaaataacaagtgtggaaaaacaacaggttgaattagccattgcaataaaacctgaaatattaataaagaaaatgctatcccagttgtgattgtacatgaaaaaaaaaaaaaacc

SEQ ID NO: 13462 - DNA, 665 bp, Gossypium hirsutum
  Clone ID: GOSHI-09MAY01-C645_25
ttgggttttctttcaaatctagaccattttgagcattgatcctgtttctggcatcctccccggtcgaattatctctttccataagtggtgaagttgtgtttcaggatcaacccatacaccaacaattggttttgtccacttatccatcttggcctcaaccaacaacggaatgtctagaacgatcaccttatgaccttttatccaaagcttgaaaatttctaaaaatatgccagaagatatatagggagccaataaccggttaaggagttgacgtttggaggcatcagagaagccaattcgtcccaatttcaaccgatcaacttggtcatcatcttgtagaatgtccggtcccaccccccccaccacttttttgtacccgccagagttcttcttcaaggcatcccgagcgatgatgtcagcatcgacgacgggaatatggttgtgcttgcacatggaagagacagtactctcccctgaagcaatccccccggtcaggtcccacccaccccctttttgctccctgtttcagatctttccctttgaccaatcccctgtttccttcgccgcttaccttactaccgaagatagagaaataaaactcgtgtcaccaacaccctttggatcccaaaagaacccagcagcattcggctttccgtacgcgtggg

SEQ ID NO: 13463 - DNA, 988 bp, Gossypium hirsutum
  Clone ID: GOSHI-09MAY01-C645_24
ccattaaaaagagcctaaggatagaactttaaagttcccaaacatttttatccagtaaagcgaatctcaatacagcatccaaacattctcaatttttaaatatgaccacttatttgtaggtctttccaagctaccacgttcaattgcatcctcaatagcagcatccaacatctcatcattgaagggtgaccaaatgctgcaactagtggtatgcttcaaggaaatctgggcagcaagtactgaataggttgggaaattcccaagtttatgcagagtgtcatagctgataaaagagttctgtgagaagaaagaatcaacacactcctttgagcaatacccctggaagcaccacggaaccatggcactgacacgagccatggcactgacacgagctatatatgcaggtgtgtacttgctgaaaaatccctctggagcttttaaaacctcactgccatagctaacaaaatttgcctatcgagatccattttgagtggcattgctgtcccataagtattggccaagactttcctcttcatctgttcctgcgttttctttgcctacaaaaaacacacacataaataaatagtattccattcccaatactatctcaaaacctaattaaaaatcttttaaaaaaataagtaactattttaacttcataagaaccatctggcaacaaaccctaaaccactttttttttttcaaaaatataatacggtggatcaactatgctcaggtgtgcgtttgagatctgagtaatgaacagaacaagatgaaacacacacaaataaacaaacaaaataataatattaagtcccgtaaaacaaccggtagtagggattattgattcgtaagcagattggagagagtgagatccgacgaggtcgctcttaacgccgtggagaccgaatcgcagcgcgtcgttctggactccttcaatttcgtgctgaatcgtctttggtgttgaatagttaaatttttctttttg

SEQ ID NO: 13464 - DNA, 1139 bp, Gossypium hirsutum
  Clone ID: GOSHI-09MAY01-C645_23
cgttttacaagtccacaaatatcatagatacataagatatctctattaagataggaattatcaaaccacatgcaaaataagttattataaacccagccacacacctagattaacgtctataaaaggttcttgactatcatcaaattatcaaagcttctttcacaaaccttctatcatgaatcattcatatttccagatgaaaatttgccaacatctttcagacccctcagagctgaagttcctatgcaaagtaaagcacaagatttcccagaaagtttaagtggctcgtgcagagcttcaggcatgtttgctttctttccacccacccatattacgaaggtcccacaccaccagcattagcaagatcctgcttatattccaatgaaccaattttgccatccaaaccagagatcattctctgcagtgcatccaaatcatattcaatattagacagattcatatgagcctcttctacacttgtttgaatgctcttcgagatttccttctgtgtttccattttatcatccaggttctgaatgcgttgagtcaaatgcttcttcgcagcagagagagcatctgagacagaatccagatgttttgttaagttctccacagccatcgccatattgcgtttggtgacccagaaaagatcagagaatgaaatacccttccaccacatgtaaccataacccaatgcccccaatgttgcggctggcactacaagagaggttaacttaccgccagaatccccattcagaacagttatctgccgtgctgatgccagttgcctgatctccgttgacaaacgacgcacctgagctagaagtgcatctgaatcatcagcttgctcccccgatttttcgagtcccttcaccagcgactgcaattcgcctaatatgtccgataatttaccgtttttcaggaggacagtacccgtataaccggcgccggctaagatcaagatcttcgacaaacctactccggtttgcatagccatgacagtgttttcgctcagcttgccaaaaagaatttggctgtggttatggctgaagctgagaaaagcggtcgcggggggagtttaaagttcacgattgcttagctgacagcgtatataatacatacataaagtttcgtcttgt

SEQ ID NO: 13465 - DNA, 1065 bp, Gossypium hirsutum
  Clone ID: GOSHI-09MAY01-C645_22
ttaatgcctccatttatggtaaacgtcaagtccgaaaagtcacgcaagagtgcataatagtcctcatatgttagtgggggaacttcttcggttatcagcctgggctcatgccatttagtagagccttccgtgaatgtatgatcaaatgcctagttggtgatagggaagaaaccttgtagatataatcgcagagctcattatatgaatcatgatcatcaacaccaatccgacatttaccactgacaggaacatttgtattgccagcaatgactgacatggcttctccaacaaactttcctttggatcaagcataagacgcacaccaaagcacccatgccctgcaacttttgggctaggacacccacaattgaaattaatctcatcatagttgtatgcattagcaagttcagtggcttttgccaagttttctaatttactcccaccaatttgaaggacaataggatgctgttcaggagaatatcccaagaacttgtcagattcccttgttgataaacaataccctatttccataacagcagcttcagcttctctgtgtaaagcctaagatggatgaccatgaaatgcaacataaataacgttccacttgaagaagtgctaagccttggcatttccagcttgaagagattgaatcctttgtcgcaccttcaatatctttgatgattctggtagaaattgtccagttggtagtagacatagataggcttcctcattcgcttcttaaccaaattcaaagtaacaaaaatggaagaaaatgtcaaagaatcaaagagaatgtcgtccaattcaaagagatagcactcggatgattctggtcctggtgaaaattggggcttcttcagctttgccaagaagattacataagtttgtccaataaggggaatatctagttgtgcaaaaggggaaatgacttccacttcagcacctgcctcttcccatgtttcccttattgccccttcagcagtaggctccccaatttccaagtaaccagcaggaagagtctaatgtgtctcaaaatacttttccttcctcatctgtttgtaaggt

SEQ ID NO: 13466 - DNA, 692 bp, Gossypium hirsutum
  Clone ID: GOSHI-09MAY01-C645_21
agtataaataatagataatccagctaaaaagagcatattaatagagacagtttattaagacaccaatgaaattcaataaagctagaactgcacacctatatacattatcaatggaaagcagcttgtggaagactgtaatcagtgccaacatatgtcacaactaagctaccagcatcggggtggggccaactcctagaagtaggaaacctaagtataaatgtcccaggctcttgcaggcctctggaaccttcatggctggtggcggagcagaggcggtggctcaaactcacttcgatttcttccttctgcttagggttttcaaaaacaagttccctcttttggaagatggtcaaaattataattaaaaatctatatggaacaaataacacccaaaattagaaaataaagaggaaaaatggaacagaaataaaaagcgatagggatctgagtaatgaacacaacaagatgagacacacacataaataaacaaacaaaataataatattaagtctcgtatattttccagggaaacaaacggtagtagcgaattgctgactcgtaagtagattggagagggtgagatccgacgaggtcactcttaatgccacggagaatgaatcgcagcgcgtcgttctggactcctccaattttgtgctgaatcgtctatggtgccgccattttcctcttctttc

SEQ ID NO: 13467 - DNA, 698 bp, Gossypium hirsutum
  Clone ID: GOSHI-09MAY01-C645_20
ttttttttcatcagtcaagcatattcacaagcttaattaaataacacaaaatatctttcaaaaggtttgggtaaagagtgtaaagatcaataactgaattcaaatcattcaatcaagataaactttaatatcaattccattatcaatgagggattgaaccacagctctgattttgccttcgaatttgtccctctccctgggagtataagaagctgtatacacatcggcttctctcgctctctcagctaatatccgcccgattgccaagcaagccggaatgtccgatctggatctcagtactgctttaatgtctttcgagtttgtgcctgcgactgcaacttgcttacatgtcaccctatgtgtgacagaagcggaaacaaaccgcttcgagatgaagacatcaagtgtaaatggttccatgtaggcttcggtccgttgtttaaatgagacatgcttgttcggattcttcgacttttttcctttctgataagtgtatggcttgctattatcatcatcaagaaaatcctctaccccaaaaaaacttcttggtgaacaatgaaactgtccagcgtgaaaagaagtcgtgggcaagtacaagcaaggcaaaagaagtttatcaccagaatctgaaactacccttttgctcaacaccttccgtatcgcttgcttcaacatcttacagacaacaccccctggca

SEQ ID NO: 13468 - DNA, 393 bp, Gossypium hirsutum
  Clone ID: GOSHI-09MAY01-C645_17
atcaatgttctgcttcaacaattcatgtgccatgtctatccacgttgcatatgcttctcgacactcttcaagagtagactgcactattttccctttccaaacagttttcttgctaaaagccacattaacataaacctgcaaaacgcagccttcttgtgggccatcattgtctctttctacatcccaaagcccctctacacggaaataatctccatatggtacatcactgatctcttgtgatgtctctataaccaagtgaccgtccaaagtaaaagtggtactgtttctgtaaattcgaaatttctgggcctcctggcagctaccaaattttgcaccaaagtatatttttattcgatgttgaaatgacacatcacggacaagtccaaatttgtc

SEQ ID NO: 13469 - DNA, 538 bp, Gossypium hirsutum
  Clone ID: GOSHI-09MAY01-C645_16
tggtttgaatagcttcccattctgtcataccattaactatcatggttaaagaagctagtacactagctacaaaaccctgtttcaataacaccaaattcaagttccgactaagacaaacgaccatggaatgcaatattaaataacattccacttgaagaaagtgctaagccttggcttttccagcttgaagagattgaatcctctgctgcaccttcaatatcgcttctctcttgctgtgttgtttctcttccaaatcttgaagagatgaatcaagccgcttcaattctgcagagatgtactcaattctcttgcgaacattcgcattggcctccgctaaatcttgtttcacaagcactggaccaatcaacttgtacacattcgcatcctcgtttaataaatccaactccttgaggactaactcgttttctcctaactgaatagtgtacttcttccggacttgatggctcttagctatatctttttgaagcttgctaagatcattggctttgttctcaaggtcgcgctgtaggtctcgaag

SEQ ID NO: 13470 - DNA, 612 bp, Gossypium hirsutum
  Clone ID: GOSHI-09MAY01-C645_15
taagggacaagtgcatcaataagacctagcttcttcccttcttcagacatgattggtttggatgacagcatcatttcaatagcttttgaaagccctacaagccttgggagacgctgtgtgcctccaaaaccaggaatcactccaagtgacaattctggcaagccaagttgagtcctaggagcagcaatacgtgcatggcaacccattgcaaattctaagccacctccgagagccaatccttcaacagcagccacaataggcttcttgcaatcttctacagcattagtgacaagatcaacagatacatcaggcatgatcgacacatcaccggttccatgaactttcgtgaaaacattgatatcaaaaccaccggaaaaccttcctcccttgccggtaagaacaatagctttaacatcgtttcgcctcgtcgcctcagcgaatttctccttcaatccatcaattattggaatagctaaagcgttaacaggaggattggagatggtgatgactgcaacgccgtcgtttccgacctccatcgtcactttactttgcgacatcgttctttttagctcttctttttatttttttctccgcgtttttttttttggctgt

SEQ ID NO: 13471 - DNA, 776 bp, Gossypium hirsutum
  Clone ID: GOSHI-09MAY01-C645_13
caaaaaaataatccagatcatatgtgcatttaaagtacaaagccaaagagttcgccagataatgtgacactttaacaaaaaaaacactgtaaaatcgtataagcatttatttttgaaactcaaggtacaccttaaaccttcccaccaccggcatgctaagactcattcgaagtggtcgcatcatccttatgcttgatcataccagaatccacaagaatgggaatctctgcagcaagccatggagcaagtcccaaacacagtgcatgcgctattccaaacctaggacaattttttgcccaaagtggcttgaaatgcacggtcagacaaatcttccctcctctatacatcttctgagtcttgccatcgagttcgggcaactcaagctcgggagcagtggcgggataagtaacggggatatcaaactggagatcaaactcgtacttaaggagattatggacgtaccaacacttgcctgtccaacgggtaccttcgggattggctgccgatatacggaaccaatcgttatcgttggacttgttcatctgggtgtaggctattagagctctgtattcctctttaagcctctgagtccatgccgctccgtctctggggcccgccttcgtcgtcaatagcgggatctgggtcagcgtcgacttcgtattcgggtcccagccttccattttccgggtttaccctctttagctaaccctaaccctagattttattcttgattgaagatgaaaaattgaagcatcagcgcctgtttcagttggaag

SEQ ID NO: 13472 - DNA, 755 bp, Gossypium hirsutum
  Clone ID: GOSHI-09MAY01-C645_12
acctcacaactcatctaatctatattaactcggccaattataaaagaagttacaaaacacataataattaacaatcatggttaaaaaagttagtacacaaggtagctacaaaacactgtttcaataacaccaaattcaagttctgactaggataagcgaccatggaatgcaacattaaataacattccacttgaagaagtgctaagccttggcttttccagcttgaagagattgaatcctctgctacaccttcaatatcttctgggagttcaggctgttcgaatggggtacaaagagacttagctgctcccatctcaccccttgttcgagctttcacatctttctcccacctccgttcgagtgctatatgcccaggaattctgccagaccatagacttttcccctttttcattttcaaagtttatctcaaacatttttgcaaagttttggcccaaacaaggggaggttgcaccttgaataccgcgcccagtgtttggaataaatgcctttaaatttttcattattgttgcaaatagaagcacagtcactgaaatgagaatctcgacatgcttcttgtttttctggttgcaggcttctgttagcaatattactatcaaaatttgcaattgcatttgaagaaccagggtcaggaagagggggcgcagtgaaatgaaggaaagcaagataagcggcgtttaagaattggggcgtttaagaaaagttctgcacggaaaaatctagggttccaaagggcg

SEQ ID NO: 13473 - DNA, 807 bp, Gossypium hirsutum
  Clone ID: GOSHI-09MAY01-C645_11
ctatggggcttcgtctcccatgcgagcacaatcaagaaggcatataaaagagctagagccttgaggctttgggtgagttttcaaacagtgacatgactccacccataaacatctccagctttagtattggccttggtattggattaaatagttgtcaaagcagttggttttcaagaagttcaacccaacgcaataaaaaaaaaaagctgatgtgcattatacaaaggccagaacggctaaattcattaagggcaaataaaaaggttcagcagtgacttccttcatgggacaacactgaagtagtcaatgaaaatctcacataaaactagggcagactggtcccttggagaggccgagacgaacttccatgctgtggtgcaagtccaatggccgaacagtctccgaatctcgaggatcattcagataatcctcaaagccaaaatcatctaaagttcctgtcaccgcttccaaccctagcatcgaagatggtagcaatggcctctgaaaccgccagagaatttgcctatcgagatccattttgagtggcattgctgtcccataagtattggccagaacttttctcttcatctcttcctgcgttttctttgctgattcgtaagcagattggagagggtgagatccgacgaggtcgctcttaacgccgtggagaccgaatcgcagggcgtcgttctggactcctccaatttcgtgctgaatcgtctttggtgcctccattttcctcttctttttttctttttcgaacgcatcccctgccgcgtgggtcttttgggattttttttataatgt

SEQ ID NO: 13474 - DNA, 608 bp, Gossypium hirsutum
  Clone ID: GOSHI-09MAY01-C645_10
aaatattatgtttaaataaatcgcaggtcatatctacctcaggctcacagctcatctgatgtatataattaactgcggctcaacaccttatttaagaagctacaaaacacgtaataattaacaatcatggttaaagaagctagtacacaacgtagctacaaaaccctgtttcaataacacaaattcaagttctgactaagatgaccgaccatggaatgcaacattaaataacgctctacttgaagaagtgctaagccttggcttttccagcttgaagagattgaatcctccactgcaccttcaatatcacggtcatgaactttcgtgaaaacatgtgctatcaaaaccaccggaaaagccttccttcagccttgccgtaagactgcattcatgcacagtagactgtaaccccgtttgctgcactcgtcgcctcagcgactttctccttcaatccatcaattacttatgaccttttatccaaagcttgaaaatttctaaaatatgccaaaagatatatagggagccaataacatcttttatcgcagcaacagtggtagtccaaacagcagctttcaagtgatgcattcccagcaacagacgtttccatc

SEQ ID NO: 13475 - DNA, 773 bp, Gossypium hirsutum
  Clone ID: GOSHI-09MAY01-C645_9
aatcgtggttaaagaagctagtatacaaggacaaatgaagagacttggacgagaaaaaataacattcacatggacattcattttaaaggaccccattttggtgccttattttgttaaccagaaatagaaaatatgaactaacagcgaccttcagaagatgagcctgtagcgaacggacactagatagggctctacaggaaacctcaaattgatatgctgtatttggaggctgatgctttttgcagcttcagccatggctcgactagctgcacgagaagcaaggtcttgcactgaagccttcagccacaaactcaatgtctgcctcttcctttgttgcgaaggcagtatgcccttcctgccatagaaattcacgactcctacaatcaagcatcaagttagcggtgcaaaatccatcctcaaatattttaaataaaaactctagcttgccatcgaaaataatctacacatctgtgaacattaacaactaatgctcagaaaatacgcactttatgcatggaatggatgtagaattttccatgatctgagaacatggaaagaaagcttcaatttcatcttcaaaaggccctgtggtgcatggaacaccagctgaaaaacagaagggcactagagagtaagaaagagagatgtataaagaatgaaatattgtctacacctgctcaacttcaaccatttatttctttttacaataattcatgctgtatatgtaatttccacagtcaacaagaacacataaataaatcaagaaaaaaata

SEQ ID NO: 13476 - DNA, 740 bp, Gossypium hirsutum
  Clone ID: GOSHI-09MAY01-C645_8
ataaaagaagctacaaaacacgtaataattaacaatcatgattaaagaagctagtacacaaggtagctacaaaaccctgtttcaataacacctaattcaagttccgactaagatatacgaccatggaatgcaacattaaataacactctacttgaagaagcgcttagccttggcttttccaggcttgaagagattgaatcctccacactacaccttcaatatcttggtcaagcagtatatcgccgctcgtcttgccagccaacatagcaagtggagcctgtttgttgccttcctcatcaaagacaacccttgtccccacaggcctatgaacattgatcttcagcttttttttcttcaagatccgtgttgctgacctagtttgattggcaaaacttcattttctttggtaggctgaaaaatgtagctgttgatgtacttcatccaacaggggaccccgcacaacagttaaagccagacgtccgtggacctgcgtcactatccagtcattgtcccgactgttatatccatagcaatgtgactcagtcagaaggctcgtcaaccgaatcctccgttgtaagctttggactatgacgagtaagttttctctggtcacttgctgacgaaagcaagaggcgataaaccagcagatctattcggagatgggtatttatgcttagatcaattttgattgaaagctctaaatcgaagagtaggaagtgaattcagtgcaaaatgaaagg

SEQ ID NO: 13477 - DNA, 1884 bp, Gossypium hirsutum
  Clone ID: GOSHI-09MAY01-C645_7
ctttttcttatcttcttaattatttctctatctcttgcaatatgcctccagcctcgcccgatttctccagctctgtcaagcttaagtatgttaagcttggctaccaatacgttgtggatcattttcttactctcttgttggttcctgtcatggttggtatccttattgaggttcttcgtttaggccctctagagattgttaacctatggaattccctccattttgatcttattcagatattgtgctcttgtttcttcatcatttttattgccactgtttacttcatgtccaagccacgaagcatttaccttgtggattatgcatgctacaagcctcctgtcacttgcagggttccttttgctactttcatggagcactcgaggctgaacttgagcaacaaccctaagagcgttgagtttcagatgaggattctagaaaggtctggtcttggtgaagagacttgtttacctcctgctattcattatattcctccaactccaaccatggaggctgctagaggcgaggctgagattgttattttctcagctatggattctttgttcaagaaaacggggttaaaacctaaagacattgatattcttattgtcaactgcagtctgttttctcctacgccatctttgtctgctatggtgatcaacaaatataagctgaggagtaatataaagagctttaatctttcaggaatggggtgcagtgcggggcttatctccattgatttagctcgagatcttctccaagtacaccctaattctaatgcagttgttgtcagcactgagatcatcactccaaactactaccaaggaaaagaaagagccatgctccttcccaactgtctcttccgcatgggtggcgcagcaatcctgttgtcgaaccgccgctcagagaggcggcgagccaagtaccgacttgtgcacgttgttcgaacccacaaaggggcagatgacaaggcctaccgatgcgtgtttgaagaagaagacaaagaaggcaaagttgggatatcattatctaaagatctcatggctatagctggagaggctttaaaatccaacattaccacaatagggcctttggtgcttccagggtcggaacaactcctatttcttctcactctgatcgggcgtaaagtcttcaaccccaagtggaagccttatatcccagacttcaagctggcgtttgagcacttctgcatccatgctggagggcgagcagtgatagatgaactgcaaaagaacctgcagctgtcagcagaacacgtagaggcatccaggatgacattgcacagattcggaaacacctcctcctcatccttgtggtacgagatgagctaccttgaggcaaaagggaggatgaaaaagggagataggatttggcagattgcttttgggagtggattcaagtgtaacagtgcggtatggaagtgcaatcgaaccatcaaaaaaccaacagatgggccttgggaggattgcatccataggtatcccgttcatatccctgaagttgtcaagctctagacagcttcttcattcatggccttccttctttgcctttagtactttgctaaaatcaccatcatcatcatcatcatcatcatcatctacttcttatcctactccatctctgcctttatatttctcctctgtatttttcttagctcctactcatttgtctctcctcttccttttccattttctcttttcaagccatgaattcacatagataccaaatatgatcacatttatgtgttgactaaatatatcccttgcaagggaatgaaaaaacagtgtggaaacaggttggattagctccttgaaataaacctggaatatttaacagaaaaaaaaatatatgtgcttctgccgccgc

SEQ ID NO: 13478 - DNA, 835 bp, Gossypium hirsutum
  Clone ID: GOSHI-09MAY01-C645_6
tttttctttttttttaaaagaagctacaaaactcgtaataattaaccatcatggttaaagaagctggtactacaacggtagctacaaaaccctatttccataacacctaattcaagttccaactaagactaagacgaatgaccatggaatgcaacattaaataacgctctcacttgaagaagtgctaagccttggcttttccagcttgaagagattgaatcctccactacaccttcaatatcttggtcaagcagtatatcgccgctcgtcttgtcagccaacatagcaagtggagcctgtgtgttgccttcctcatcaaagacaacccttgtccccacaggcctatgaacattgatcttcagcttctttttttttcttcttcaagatccgtgttgctgacctgcagaagatgagaaaacctgctcagcgaacggatttcacgtagataggagctactataaggaaacctcaaatcgattaatggttgtactacctgaagggctgatgctttttgcagcttcagccatggctcgactagctgcacgagaagcaaggtcttgcactcaagccttcagccacaaactcagtgtctgcctcttcctttgttgcgaaggcagtatgcccttcctgccatagaaattcacgactcctacaatcaagcatcaagttagcagtgcaaaatccatcctcaaatattttaaataaaaactctagcttgccatcgaaaataatctacacatctgtgaacattaacaaataatgctaagaaaatatgtaatttatgcatggaacgtgtcacagtcaacaattcaattgcatgactaaccaggaaaat

SEQ ID NO: 13479 - DNA, 1299 bp, Gossypium hirsutum
  Clone ID: GOSHI-09MAY01-C645_5
aaaagaagtggggaatatatttcttggccaaccgtggaacgccactttgccccttctcctatatgatcaattcggagatacaatttcccaaggatagttaaaccatcacatccttcagagacacaaactgtttcatttaatacttcaccaacacctctgatatcatcgtgaatcaccctcctgtgaagcatcagctcaatttggccatcagctaagctggatgcccccactgaacgatccaccaacactgagagctctgtgctatcatcttggacatagattccaaggttaaccgggtagtaatttccagcaattggttggttaacttgaaggtcccagtctttcctaaaatctcgaatccgtttaatgaagtcacgtccattagaatctgtatagaacgttttgttggtcctcatagttgttgtaatttgagtgatgatttctttacctatcccatcattcacaggaataggtccaatactgaactcgagctcagcatgctcttttcccttgtataccctggtaacctgtgatatccatgaattcagctcttgatgtacttcatccaacaagggaccccgcacaccagttaaaggagtctggttttccgattttatggagaatgtaccatttggacgaaaaacatatgccccagcagcctgaggatctttatcagttccatcatttcccgagtaataaccataggattgctcagcaaaggccgtaaccgaatttctggtattaacataacgagtaagttttcctttatctgctgagtaaagaagctttaaacttccttggccaacttcaatggtattgttttcacttgcttcataggtatgcatggttgagatggtagggctacggccttctttccaaacagttttcttgctaaaagccacattaacataaacccgcaaaacgcagccttcttgttggccatcattgtcgctttctacatcccaaagccaatatgatccatatggccatgagaaataaaaaggaaatcttgagaaagggcacgttgtgggcatcgaccgatatcaaatgctaggttaagagtgggaaaaataatgcaagtttcatgccctcctattggcaacccttccactcggtacccttcaatttccaatcctttttgctctttttatcatcgtttccttggtttcctggttctgggttctttgatttttatccatttgagagttttaagaggaagaacaaacaagaactggcttggcttcagttgggaagaaatacacagagttgaataagctttgggtttttttttggatgggg

SEQ ID NO: 13480 - DNA, 1146 bp, Gossypium hirsutum
  Clone ID: GOSHI-09MAY01-C645_4
ccaggcctttatttttaactatggaatcatcaagaaatgcttccctttcctgggaaaaaaataagggtcaaacctccagaagttagataattggttactcgggaccaccgaaacccatattctttcccaaagctccatgtgacacttcacctctggtaacaggcttatcctaaagctgctcagatccagtagtactgcacttctaatatgcagaagcaaactggttatgtttcatgcccgatgcgggaaaagaagtcgtgggcacactacaaactccgcataagagatagtcgttatcacctgattctccatggttctgccttctttcgctcttcgaccttccatatgcgctcgcattcgacagtcttacagacccaacgaccccctgaaagccagtatggaacagaaattcgtcagagttgaatgaagcttttggatttttctgatccggtcgcgtgggttgcatcgttaagactagagcctaaagaaagaaaaatgagtcttgcgcgatatttgagaaaaaaatgacaagtaagaggcgtttttggtagaataaatgaaagggagatgaagacgaagagaagcaagagaggtaaacctggtatagatggcaaatacaaaactgggaacaaacttacgagagctggagaactaagttccaccgtaaataacttcgcttctatacgaaggaatatgaataacttccttggaagtagatttgttaccatgaattttaagcaataacttgttaccagcagcaatgagaccagcagtaacttgcatcgtcgatttctagcttcttctggcatcgtcgatttctagctaaaatataagagaaaaaaaacaataataaaaagaaaggggatctgagtaaataatacccaaaattagaaaataaagaggaaaaatggaacagaaataaaagcgatagggatctgagtaatgaacacaacaagatgaaatacacacacaaataaactaacaaaataaaaatattacgtctcatatattttccagggaaacaaacggtagaactcgtaagtagattggagaggttctgtgctgaatcgtatttggtacctccattttcctcttctttttttcattttgtttgcaaagttaggggttttatgggggaaatttggg

SEQ ID NO: 13481 - DNA, 757 bp, Gossypium hirsutum
  Clone ID: GOSHI-09MAY01-C645_3
aatattttttttttttttagaattaaaatattatgtttaaataaatgagcattctacctcacgacttatctgatctatagtaactcggccagatataaagaagtacaagacacgtaataattaacaatcatggttaaagaatctagtacacaaggtacctacaaagccctgtttcaataacaccaaattcaagttccgaataagataaacgaccatggaatgcaacattaaataacattccacttgaagaagtgctaagccttggcttttccaacttgaagagattgaatcctttactacaccttcaatatttatatgactttcaactttgaagccccggggactttggcggtggccccaatgcctgattaggcccgaatctgcttacgaatgagggcagtcttactggaatgaccagagttagttgttacactagctgtcttatcatgatagcgtctgttagtgtggcttcggctaccatttgtaacaggactcctagtttcttcaactccagaagattcaaacccctcatccacatcaacagatgccgcaatgcaggtgattttttcttttgcaaccttgaatccatcatcaactttaggatttccttgcttctccctagcaccaatgtccaaacctgacatgattcgatagggatttcgacacaagatacgggtcagatcccgaaaaaatagcagacacggcggtgtgggaaaactaagatgagaagagaagaaaaagaaaaaaattgatttgc

SEQ ID NO: 13482 - DNA, 1432 bp, Gossypium hirsutum
  Clone ID: GOSHI-09MAY01-C645_2
aaaaattaatgaatttaaatttagaattaaaatattatgtttaaataaatgagcaatctacctcacagctcatctgatctatattaactcggccaaatataaaagaagctacaaaacacgtaataattaacaatcatggttaaagaagctagtacacaaggtagctacaaaaccctatttcaataacaccaaattcaagttccgactaagataaacgaccatggaatgcaacattaaataacactccacttgaagaagtgctaagccttggcttttccagcttgaagagattgaatcctctgcgccaagtttttccatgaatctaaaggcttactgggacaacacagcttcttcttcaacacaagtaacctcttcaaaataagcaaaatattttccttctcgttccccaaaacaagtcatgtgagtggcagattcccttgttgataaacaatagtttcagcaacaagcatctctgtggcaccttgaataccgcgcccaggcgtgtttggagataaggtgcctcatcacgggttcctgtaatgagtatccaccggcaaacttctccagttcactcttcctgcctttcgtaacaggaattgccaagaattcttcatatatacgtcggtatagttccaatatttgaagaacctcagtgtctgcctcttcctttgttgcgaaggcagtatgcccttcctattcccagtaacaaatatcgacgactcctgaatgccaaagaatcgtgtgggattgataaacgtcccattcgaacagacattgcacccctggttgagcttctgggcctggtgaaggttggggtttcttcagctttgccaagaagattacataggtttgtccaataaggggaatatccagttgtgcaaaaggggaaatgatttccaattcagcactgctttttcccatgtttcccttattgccctttcagcagcagactccccaatttccaggtaaccagcaggaagagtccaaagaccaaaagatggttcaatatttcgcttgcatagtagaatctttctatcatgctcaatgaggcaacccacaaccatttttgggttttgataggcaatttttccacagagggtgcaaatagctcttatcttctcttctccatcaggaatttcatgctttggtgggccgccacaccgctggcagaacttgatcttacggacattgccagctaaatgaactgcaacggaagaagaagaggaagaaggggcatctgagttggactgggacggagtcgaaagcatccgaatcactctaaaagacagcgatttgggagttgagttgtagcttgtttttgaggaaattaaagaaaacccatcaccggaatgaggcttctttagtctttgagagataaacccagatgaacacccaagaatttgtatagcttttagcattaggaagttgaaac

SEQ ID NO: 13483 - DNA, 1559 bp, Gossypium hirsutum
  Clone ID: GOSHI-09MAY01-C645_1
agtaaaaatatctagtcatcataaaaaagaaaaagagcatgcctttgttctgacagttaaactcgtactaagaaagcatcagtgaaagttcttttgcctgtagcattcaattccaacaggaaactcctaagactagaaactttttttattaagggtagggaagattttggcgtttttatctccaaaccgaattgtcagcgaaatattgcagtgcttagagctcatcatgtgcatcttccttgtcctcatcgtctgatttggtattggaatcagactcatgcccttcagtatcatcagcaccatcttcgtcctcagcatcggaatcaactgggtcatcctttgattcctcctcctctctttttctctgcctcctcaaatgctgccttttcagcatccttctgcttgccccatgtttcttcagctagtttcttggcatactctacatcatcggcaactaagatgttatcaaacattgttccagattttacctgccacaattcaataccgacatacttcaagttggggaaaacatagagatctggatcatccttgaaatctgggttgtcaatcattggtgccttccacttgcccttgtagttggggttcttgattttctttggcttccatgggcccttgtactcggggttgggaattgttgagggtgtccattcaccatcttcttcatcatcccaatcttcaggcttcttagcatcaggatcaggaatctcttttggaatgtcatcataaccctctggctttttgtcttcaggatcagggatgtattccttgtcatcccaatcttcaggcttcttggcctcaggatccttgatcttctttggtgggagaagatcccaatcagtgtataagctaccagtttgtttctcaacattatcaataaggatgctgtaggtagcatccggacggagaatgaatgtataaacatgagtgagttggtcagtctcacaaggaacttcctttttgatcaagtggtttgtcccattgtatgtaagaatagcatgtactttcttggtgctgtagccgcagatatcaggcccaaacatgatgctgtacggggtgtcaccaccaaatttcttctggtcaatgtcaccactgagcaacttcatgtagccaccaccacagtcaagcttctgctcgtgcttcacagaaaattggaagactagagtcttgcccttgttgttaacttctgggaactcagctgaaatagcataaaacctgtagtcttcactagtttgaatacctttgtcattaggatctccattccattttccagaagtgtaattccattccccagccatgttctcatcctttttccagtcagattttacccaccgactttcccatccatcttcgaagcgttcttcgaagaaaacttcagcagaggcgatggcgacgagagagaggagaataaagataggaaattagggaaccgtttgtgattcgccatggttgtactcatctaagagaaaaaagaataagtagagctgcgggccgggcgcggagaccgattctgggttcctctacatattggttgaactcac

SEQ ID NO: 13484 - DNA, 668 bp, Gossypium hirsutum
  Clone ID: LIB3582-040-P1-K1-A12
gtcagctagagcccgggataacaaagcagcggaagaacaatgagttcctcctccacagctcttcgggaactgcagcaggacctcgaaaacaaagccaacgatcttagcaagctccagaaagatatagccaagaaccatcaagtcaggaagaagtacactattcagttaggagagaacgagctagtcctcaaggagttggatttattaaacgaggatgcaaatgtgtacaagttgataggtccagtgcttgtgaaacaagatttagcggaggctaacgccaacgttcgtaagagaattgagtacatctctgctgaattgaagcgacttgatggatctcttcaagatttggaagagaaacaacacagcaagagagaagcgatattgaaggtgcagcagaggattcaatctcatcaagctggaaaagccaaggcttagcccatcttcatatgttttgccttggtgaaaactatcattctagtggcatgatattctatgacccatagttgtaaaatcatgattgcatgccgtggttggagctgtaatccagtgttcttgaaccatagttgtaaaagttacagtgtgtggttgcctttttaactatgatccttaacagtcatggcaagatcagaagctgttctaagcaatgcattttctgccttattggtttg

SEQ ID NO: 13485 - DNA, 485 bp, Gossypium hirsutum
  Clone ID: uC-gsflnu33B004d06b1
ttttcacacgtccggagaaaaagagcaaaaagggattggaaattgaagggtaccgagtggaagggttgtcaataggagggcatgaaacttgcattatttttcccactcttaacctagcatttgatatcggtcgatgcccacaacgtgccctttctcaagatttcctttttatttctcatggccatatggatcatattgttagttttttcctttctctctttctttttcttgtgttcttgttcttgcttttggtagtctaattattggttttcctctttttcttttattagatgctgaattgataataatgttagaaaattaggtgattactaaagaaatgtactctgcttaaagaatttattgtttgaaggtagaattggaagtttcttcttatgaatctctgttttcaggtacttcaaattgtgtagatgtttacggttttttttttaatgtgctattttcttcatgttgattcctacattact

SEQ ID NO: 13486 - DNA, 521 bp, Gossypium hirsutum
  Clone ID: LIB3582-017-P1-K1-D11
cgaagatcctcatcatggtgaggggaaaagaaaaaatgaggcgcatagataacgatacgagcaggcaagttacattctcaaagcaacgaaatgggctactaaagaaagcttttgaactatcagttctttgtgatgctgaagtcgctttaattaccttctctcctagaggcaagctctctgaatttgcaagctctaggggctttgggatgtagaaagcgacaatgatggccaacaagaaggctgcgttttgctggtttatgttaatgtggcttttagcaagaaaactgtttggaaaggtttggctttgctgaatgatgatgaatatcttgtttatatagtgttctcttttatcatttatgtatttcttgtgtcgcatctttgtattttgatttgctgagtttctattgttattgactcctgttacaaatactttacatttacgtgtctcatattataattgcatctgaactattatagccgaagtgccaaaaagatttctcctttaagaatgaaaatgatta

SEQ ID NO: 13487 - DNA, 419 bp, Gossypium hirsutum
  Clone ID: LIB3145-006-Q1-K1-F5
ctctgatggcaatacaaatatttgagttgattgggtggcatcaacataagactcttcctactgggtaccgtgaaattatggagtctgctattgaacgggcaataagggaaacatgggaagaggcaggtgctgaagtggaagtcatttccccttttgcacaaatggatattccctttattggacaagttagaataagcatccttaatttacttctgtatctcatgtacatttatggaagatgtttatgtatctaacatcgctttgtcttttttggagcagacttatgtaatcttcttggcaaagctgaagaagccccaattttcaccaggaccagaatcatccgagtgcttgctctttgaattggacaacattcccttctttggaattttctcccatttttgttactttgaatttgtata

SEQ ID NO: 13488 - DNA, 537 bp, Gossypium hirsutum
  Clone ID: LIB3829-023-Q6-K6-D9
gcgagggccgccctttttttttttttttttttttttttctgttaaatattccaggtttatttcaaggagctaatccaacctgtttccacactgttttttcattcccttgcaagggatacatttaattaacacataaatgtgatcatatttggtatctatgtgaattcatgacttgaaaagagaaaatggaaaaaggaagaggagagacaaatgagtaggagctaagaaaaatcagaggagaaatgtaaaggcagagatgaagtaggataagaagtaaatgatgatgacaaggaagatgctcatgatgagctctaagcactgcaatatctcgcagacaattcggtttggtataaatttttccctaccctttattttaaaaaaaaagttctagttttaggagtttcctgttagaggaaaaaggaattgaatgcttcaggcaaaagaactttcactgatgctttcttaatatgattttaactgtctgaacaaaggcatgctctttttcttttttatgatcactagatatttttactattc

SEQ ID NO: 13489 - DNA, 528 bp, Gossypium hirsutum
  unsure (1)..(528): unsure at all n locations
  Clone ID: AI729565.1
caatgtagttccatgagcatgcatttaaagtagcaaaaaaatattactgattacagtgacagtctaagctccaaatctagctcttgtgtgtcacttgattctaaattttgactgctcgatcccaatgagttgctgagatgtttcttgcttcttgagtgtgaatcctcaacatgtaggtttaaaagttgtggtcatgtttggttgtgcaaaatgttgggtgtttaagaagccactgtttggctgggaatcaccatatctgatgttttccctttgatcgtattctccaacccccatttgggaccaccgaaacccatattctttcccaaagctccattatacttcaccacaacaagtttatccaaaagctgcttagattcagtaatatctgcacaagacataggtgntaagttatcataaggaacaacaagcacttcatcacttgcactgccttcgctctcacttgtgctctctacttggtccctgtccagcgtgaaaagaagtcgtgggcaagtacaaacaaggcaaaag

SEQ ID NO: 13490 - DNA, 544 bp, Gossypium hirsutum
  Clone ID: LIB3582-044-P1-K1-H8
ggaagtttggacactttatctttttcctcggctcctcctccctgcagcgccttccagcagccgactgttaaacaacaagcaaaacccatatctcctgtgtaatgaatattttctagaaatatacctttcaaccattcaactaaatcaagggtcgcttcttattaccaaaacgttgaattacatacagaagacatgatgggtgctagtcgctatcttcctccgctatttagcgtagctcccatgatggaatggactgataatcattataggactcttgcgcgccttatctccaaacatgggtggctttacacagagatgcttgctgctgaaactattgtttatcaacaagggaatctggacaagttcttgggatattctcctgaacagcatcctgttgtccttcaaattggtgggagtaaattagaaaacttggcaaaagccactgaacttgctaatgcatacaactatgatgagattaatttcaattgtgggggtcctagcccaaaaagtgcagggcatgggtgctttggtgttcgtcttatgc

SEQ ID NO: 13491 - DNA, 537 bp, Gossypium hirsutum
  Clone ID: LIB3825-003-Q1-N6-D4
aacaatcatgattaaagaagctagtacataaggtagctacaaaatcctgtttcaataacacctaattcaagttctgactaagataaacgaccatggaatacaacattaaataacactctacttgaaaaagtgctaagccttggcttttccagcttgaagagattcaatttttccaagtttttccatgaatctaaaggcttactgggacaacacagctttttcttcaacacaagtaacctcttcaaaataagcaaaatattttccttctcgttccccaaaacaagtcatgtgagtggcagattcccttgttgataaacaatagtttcagcaacaagcatctttgtgtaaagccatgcatgtttggagataaggagcgcaagagtcctataatgattatcagtccattccatcatgggagctacgctaaatagaggaggaagatagcgactagcacccatcatgtcttctgtatgtaattgaacgttttgggcataagaagtgacccttgatttagttgaatggttgataggtatattt

SEQ ID NO: 13492 - DNA, 586 bp, Gossypium hirsutum
  Clone ID: LIB3829-009-Q6-K6-A6
gcgttcgcggcacgctgggcggtcgcgtgggtgtctgctcattacatgagtacaaccatggtctaatcacatccgttccctaatttcttatgctctattctactctctctagcaggcatcgtctctgatggaggtctcttctacgaacgcttcgctagatggatgaggaaagtcgtctgggtagaaatctgaacctggaagaaagatgagaacatggctgtgcgaatggaattacacttgtggcaaaaggaatggggatcctaatgactaatgcttcaaactattgaagcactacacgttgtatgctatttgagctgagttcccacatgtaacaacaagggcaagactgtagccttccaattttctgtgaagcacgagcagaagctcgactgcggtggtggctacatgaaggcgctcagggatgacattgaccagaagaaatttggtggcgacaccccggacagcatcatgtttggtacctgtatgttggcggatacagcaccaataaaggacatgccattcttacatacagtgggacaaatcactcaatcaaaaaggaagctccttgcgagactgaccaacttac

SEQ ID NO: 13493 - DNA, 527 bp, Gossypium hirsutum
  Clone ID: uC-gsflmaxxa027c08b1
gctaaaaaaaaaaaaaaaaagcgcagaaaaaaaaaagaagagctaaaaagaacgatgtcgcaaagtaaagtgacgatggaggtcggaaacgacggcgttgcagtcatcaccatctccaatcctcctgttaacgctttagctattccaataattgatggattgaaggagaaattcgctgaggcgacggggcgaaacgatgttaaagctattgttcttaccggcaagggaggaaggttttccggtggttttgatatcaatgttttcacgaaagttcatggaaccggtgatgtgtcggtcatgcctgatgtatctgttgatcttgtcactaatgcttgagaagattgcaagaagcctattgtggctgctgttgaaggattggctctcggaggtggcttagaattcgcaatgggttgccatgcacgtattgcttgctctaggactcaacttggcttgccagaattggcacttggagtgaatcctggtttggaaggacacagtgtcttcccaggcttgtagggctttcaaaa

SEQ ID NO: 13494 - DNA, 385 bp, Gossypium hirsutum
  Clone ID: LIB3189-053-P1-K1-G11
ggaaactggaggcagcaaagatgattcagcacaaaattagaggagtccagaatgacgcgctgcgagtcgttctccacggtgttaggagcgaccttgtcggatctcaccctctctaatctacttaggaatcagcaatccctactaccgtttgtttccctggaaaatatacgagacttaatattattattttgtttatttatttgtgtgtgtgtttcatcttattgtgttcattactcagatctcaaacgcacgtttgagcatagttcatcgaccgcattatatttgtgaaaaaaaagtggtttagggttttttgtggcagaagggtcttatgattcttattaactcgacataatgattcttttttaaatttcctaaatatacctat

SEQ ID NO: 13495 - DNA, 592 bp, Gossypium hirsutum
  unsure (1)..(592): unsure at all n locations
  Clone ID: LIB3584-006-P1-K1-F5
ccccgcgtccgataactaatagnaatgtatcaagttatttgttttctctttcttatttctttttctcttaaaaaaattaggttgactgtgccctcatttgatcttccatagagaaataccaaaactagaaagcaagatctgaagacttcattaaacctattcgttgctacctttagaactaatagaatgtatcatgttaaacccatagactctgcattctactgcccttgtccaccatggatatttgttgacaggtgacctgtaatggaaccatgaactttctataaagcattttcataaatgctcgacttttttgtgtcacttgcaatgcaaactaaaggtctacactatcatcactgatggtaatgacagtatttcagagtgggaaagacatttttaatgaatcaatatgtttataacaaattcaaccaacagtactaagctacaattggagccgaatttgtcaccaaagaattacagattgataacaaattgtaactttgcaaaaaataacagtcatcaaaatcaaccacaaccaagatgtccaagcattagacagaaacgagataagagctgcgaaactggaattata

SEQ ID NO: 13496 - DNA, 585 bp, Gossypium hirsutum
  Clone ID: LIB3829-010-Q6-K6-G7
atttcctcatcttcttcctcacatttcattcgtcccaaaaacatttctattcctcttttatacaaacaaaaaacatggctacaccgttgcttcatcttcttcctttaccatgcttcatttagcttcattgttctccatttttgtattagttaacgcaagaatccctgccccggtgtttacactggtggatcctgggaaactgctcatgtcactttctatggcggcaacatttgtcaactttgtttacctaatgtcttaatgatctatagatgatttcatattttctataggctcatcttctgaaggttacatctccaagtgctttaccatagatctttaaaacacgcaatgtctgcttccatgttagttgatattgttaaatgtgtcgctacatttttcagtgtttgatggatcgtctaagcccaagacagaggccggtcttctctgggtttacaaaagctgagattgaaaaaatggaaaaattgttcatggaatcaagagagctgctgcagagtaaagagtcttgtcaaaaacttgcaagaaattttagttcatcctcaggtcgtgctagtaagcccatcgtta

SEQ ID NO: 13497 - DNA, 607 bp, Gossypium hirsutum
  Clone ID: LIB3825-008-Q1-K6-B4
cttcaatctggttcttttgccctctcagtttctgcttggatttctgccgcttcagggactcgtccgatcagggctttacgacacgctattgctttcgccccaaagctgagggaactctttgatgaacctctgtacatgatagaagaattgaaccctccttatcgcgggccacaaccccaatagccgctttactttgtctaccgtcgtatgctgcatcgaaattgattttgactaccttgtccactggctttgtccatatttttacagatatggaagattgcaacctattttaaccaactgcatcaagatctgaaatatagctatgaacaaatctccctacttcttttccagatttaccatgttttttaggcaatctattgttcctgtctccccagatggcccatactgcaacacaaaagattcgatgctgaggagtcgagctttgtgagaaaacccaggttagccactgtagaaaccccatttgattgtcttgcaaaaacctatgaaaagataactctctccatactgctattgtagcaggacattcccggaagagatggtccatagtttcagttcctgaactacagcgaggacatactgacgtgtt

SEQ ID NO: 13498 - DNA, 545 bp, Gossypium hirsutum
  Clone ID: LIB3584-016-P1-K1-D12
ctcgttggtatcataaaataatctcattcccccggtttcaagaaatggcagagaaatcgtgcgtgaagcgccttcagaaagaatacagagcactttgtaaggaaccagtttctcatgttgttgctcgtccatccccaagtgacattcttgaatggcattatgtgctggaagggagtgaaggaacaccttttgcaggtggatattactatggaaagatcaagttccctcctgagtatccctacaaacctcctggaatcaccatgatcacccccaatggacggtttatgacacagaagaaaatatgcttgtccatgagtgattttcatccagaaagttggaatccaatgtggtctgtatcaagcatactcacagggcttctatctttcatgatggataacagtcctaccactggcagtgtaaacactacagctgctgagaagcaacgcctggcaaaaacatccctttcttttattgtaaaaaccccacattcagaaaattgttttcagaatattttgataagtacaacaagcagcaactgcttattt

SEQ ID NO: 13499 - DNA, 415 bp, Gossypium hirsutum
  unsure (1)..(415): unsure at all n locations
  Clone ID: LIB3148-053-Q1-K1-A11
aacatcacactgtagttgctacggaggtcggggaagtgttcacttggggatctaatagaggatggagcaatttaacaaattggaagaaacacgatttaagttggaatcaaattgaaagctttcaatcctttaaagctctaatgcatggcgataacttacatgagaaatggcatactggatcaatcagccatactgctttctagccatggttgtctaacttacatgaactgcaaaatattgaaggtgttgtagaggattcaatctcttcaagctgaaaaagccaaggcttagcacttcttcaagtggagtgttatttaatgttgcattccatggtcatttatcttagtccgaacttgaatttggtaccttatgtactagcttctttaaccatgattgntaattattacgtgttttg

SEQ ID NO: 13500 - DNA, 565 bp, Gossypium hirsutum
  Clone ID: LIB3582-041-P1-K1-C6
aacttgtttgttcttcgtcttaaaactctcaaatggataaaagaggtccaaaatcaaagaacccagaaccaggaaatcaaggaaacgattatctctgtttgttctttgttcttcgtcttgaaacttgcattatttttcccactcttattcaactctgaaatattccttgttttgtgcataatctgttttttttttgacacttttagctctgaatctctgaatctttgactaaatggatgcgattatctctagtaaatattactttcttttttgctttattgaagcgaataaattttgggattgtcaatttagtaaaagtttcatatacctaaggatccaattatagagtttgccgaagcacttaggtttgagactaacctggcttttaccgtcttgtgggatattgcttcaggaagagatcttaagaagttcctctatgtatgttgttactctctagggcaactttgcagttcataaaattgaatttttggatttttacagtttgctttcttgtaaagtaaaaatgatgtttgatttttgtttttggttccaagggaaaagaaaa

SEQ ID NO: 13501 - DNA, 581 bp, Gossypium hirsutum
  Clone ID: LIB3825-024-Q6-K6-E1
ttcgaacatttctattcctcttttatacaaacaaaaagcatggctaccgctgcttcatcttcttcctttaccatgcttcatttagcttcattaatctccattttcgcattaactaacgcaagaatccccggtgtttacaccggtggatcctgggaaactgctcatgccactttctatggcgggggtgatgcttctggcacaatgggtggtgcgtgtgggtatgggaatttatacagccaaggctacggtgtcaacacagcggctctaagcaccgcattgtttaacaatggccttagttgcggtgcttgttatgagatcaaatgtgctaatgacccgaggtggtgtcatcctggtagcccttctattttcatcaccgccactaatttttgccctcctaatttcgctcttcccagcgataatggtggttggtgtaacccgccacggcctcattttgaccttgccatgcctatgttcctcaagatcgctgagtaccgtgccggtattgtccccgttttttttcgactgtgccgtgcctgaagccaaggggaatacgattcactatcacccgttttccgtttctt

SEQ ID NO: 13502 - DNA, 284 bp, Gossypium hirsutum
  Clone ID: LIB3189-024-P1-K1-D5
gtccttttttgagggaaaaaagactattattatgattgacaaatttagctataactttctttgggggtctttgtacaatcaagcacatatatagcattttctgttaaatattccaggtttatttcaaggagctaatccaacctgtttccacactgttttttcattcccttgcaagggatatatttagtcaacacataaatgtgatcatatttggtatcccgttcatttccctgcagttgtcaagctttagacagcttcttaatttatggccttccttcttttcc

SEQ ID NO: 13503 - DNA, 268 bp, Gossypium hirsutum
  Clone ID: LIB3189-015-P1-K1-B12
gcgggaaaaaattccaggtttatttcaaggggctaatccaacctgtttccacactgttttttcattcccttgcaagggatccatttaattaacacataaatgggaccatattgggaatctatgggaattcatgacttgaaaagagaaaatggaaaaaggaagaggagagacaaattagttggagctaataaaaatacccaggggaaatgtaaaggcagaaattaaatttgttaaaaaggttattttttttttttttagcaaagttcta

SEQ ID NO: 13504 - DNA, 551 bp, Gossypium hirsutum
  Clone ID: LIB3829-023-Q6-K6-B4
gtcgacccacgcttcgcgtacaacaaaccccacgtaaagaatctctttcgcttcctctccgttagactttcctttcctctcttcgctttcttttattatagtttcagctttttttctgcctcgaccccaaacgaaacagggggtggggttttattttcttgtggcccagaccacttttaggtttcagaggaatggcggagaaatcgtgtgttaagcgccttcagaaagaatatagagcactttgtaaggaaccagtttctcatgttgttgctcgtccatccccaaatgacattcttgagtggcattatgtgctggaagggagtgaaggaacgccttttgcaggtgggtattattatggaaagatcaagttccctccagagtatccctacaaacctcctggaatcaggatgatcacccccaatggacggtttatgacacagaagaaaatatgcttgtccatgagtgattttcatccagaaagttggaaccctatgtggtctgtatctagcatacttaccgggcttctctctttcatgatggataatagtcct

SEQ ID NO: 13505 - DNA, 403 bp, Gossypium hirsutum
  Clone ID: LIB3148-035-Q1-K1-H2
cccacgcgtccgcaacacgggtcttgaagaaaaaaaagctgaagatcaatgttcataggcctgtggggacaagggttgtctttgatgaggaaggcaacacacaagctccacttgctatgttggctgacaagacaagtggcgatatactgcttgaccaaggtattacattatcccttctgttggcctatgttgctgcgattttttattattcttgaaatacctgagtctggcacccatgtttgactcatgtttggacatgatgggtatagaagtatgacccttcaaaagtatggaaaaacttggaaaaattggatatatctgggtcaaacacatacctggattcaacattcacaacccaatataagttattggctactcttctgcaacttttaatggataaatt

SEQ ID NO: 13506 - DNA, 447 bp, Gossypium hirsutum
  Clone ID: LIB3197-028-Q1-M1-D4
ttcaattcctgcttctattctcgttggtatcataaaagaatctcattcccccggtttcaagaaatggcagagaaatcgtgcgttaagcgccttcagaaagaatacagagcactttgtaaggaaccagtttctcatgttgttgctcgtccatccccaagtgacattcttgaatggcattatgtgctggaagggagtgaaggaacaccttttgcaggtggatattactatggaaagatcaagttccctcctgagtatccctacaaacctcctggaatcaccatgatcacccccaatggacggtttatgacacagaagaaaatatgcttgtccatgagtgattttcatccagaaagttggaatccaatgtggtctgtatcaagcatactcacagggcttctatctttcatgatggataacagtcctaccactggcagtgtaaacactaca

SEQ ID NO: 13507 - DNA, 453 bp, Gossypium hirsutum
  Clone ID: uC-gsronu33B132f03b1
tccacgcgtccggaaagtatttggcatcgtttgaagcaaatggggtttcagtcactgtgcatgaatgcagtttgcttaaaagcttttccacttcattgataatagcaaacttgtatgtagctatatatccctgtgagtacttccaattccagaaaattcgcaattctttttctagttttagggaaatatagctatctgtacacgaccaagataccagcctgttccacagactctacattctgctgcccttgtccaccatggatatttgttgacaggtgacctgtaatggaaccatgaactttctataaagcattttcataattgcttgacttttctgtgtcacttgcaatgcaaactaaaggtctacattatcatcactgatggtacttacctctggaaaattcttctgttcacagattgagattgtttgttagtatggttcaacctgcaact

SEQ ID NO: 13508 - DNA, 486 bp, Gossypium hirsutum
  Clone ID: uC-gsflmaxxa090a12b1
cccattcttccgccatatttgtagaaagaaaacataggagggattaaaaataatagagggggttataaaattaatactgtattagcttacttacagggctcctatctttcatgatggataacagtcctaccactggcagagtaaacactacagctgttgagaagcaacgcctggcacaaacataccattcttataattgaaaaaaccctaattgtggattcaattttggtcttttatgcaagtaatagctgactcaatgtttaaaatcaaaatatttcaaaaatttgaaaagagcttactggaaccggctgaaactagccggctgatgttttaaacgacagcgtttttggaccgtgatacctcagatgagattcagacggtgctgcctttaaagaaaactcgttctttgcgccacttttttatttgatggggttttttcaccacccatttttcaattttttggggaccttctttttttttttttaa

SEQ ID NO: 13509 - DNA, 444 bp, Gossypium hirsutum
  Clone ID: LIB3197-034-Q1-M1-F11
ttttgttttacattttcttattattgataaagaatccccttcaataataactttttcccactgcatgttaacgccgatctggagggctttacgacacgctattgctttcgccccaaaggctgagggaactctttgatgaacctctgtacatgatagaagaattgaaccctccttatcgcgggccacaaccccaatagccgctttactttgtctaccgtcgtatgctgcatcgaaattgattttgactaccttgtccactggctttgtccatatttttacagatatggaagattgcaacctattttaaccaactgcatcaagatctgaaatatagctatgaacaaatctccctacttcttttccagatttaccatgttttttaggcaatctattgttcctgtctccccagatggcccatactgcaacacaaaagaatcgatgctg

SEQ ID NO: 13510 - DNA, 397 bp, Gossypium hirsutum
  Clone ID: LIB3145-015-Q1-K1-G9
ggactcagcggctgaaggaggagtataaggctttgatcgcctacactcagatgaataagtccaacgacaacgattggttccggatatccgcagccaatccggaagggactcgttggaccggcaagtgttggtacgtccataaccttctcaaatacgaattcgatctccagtttgatatccccgttacttatccggccactgctcccgagctcgagttgcccgaactcgatggcaagactcagaagatgtacagaggaggaggaatcaaaggatgacccagttgattccgatgctgaggatgaagatgatgccgatgatactgaagggcacgagtctgattccgataccaaatcagacgatgaggacaaggaagatgcacatgatgagctctaagcac

SEQ ID NO: 13511 - DNA, 373 bp, Gossypium hirsutum
  Clone ID: LIB3189-007-P1-K1-E9
caacaccttttttcaatagcttcatttccaccactgcaacaatgccacatttctctaattctgtgcaagcttaagtatgtcaagcttggctaccaatatctcgtcaatcatattcttacacttactcttatacctgtcatggctggtgttcttattgaggttcttcgtttaggccctgctgagattgttaatctctggaattcccttcattttgatcttgttcaaatcttgtgctcttgtttctttattatctttgtagccactgtttacttcatgtctaagcctagaagcatttaccttgtggattatgcatgctacaaacctcctgtcacttgtcgtgttccttttgctactcttatggagcacttcaggc

SEQ ID NO: 13512 - DNA, 417 bp, Gossypium hirsutum
  Clone ID: LIB3083-011-Q1-L1-D10
cccaacttgtagtatgtcggtattgaattgtggcaggtagaatctgtaacaatgtttgataacatcttagttgccgatgatgtagagtatgccaagaaactagctgaagaaacatggggcaagcagaaggatgctgaaaaggcatcgtttgaggaggcagataaaaagagagaggaggattcaaaggatgtcccatttgatttctattcttttgattaattattttcctttttttctgtatgtcttttgttttttttttatccttatttttttattttttcttttttgattctttttttttttttttattttttttatttttctttttttttttttttttttttattttttattatcataatttattattttttttatttttttttattattttttttttttattttttttatttta

SEQ ID NO: 13513 - DNA, 415 bp, Gossypium hirsutum
  Clone ID: LIB3149-020-Q1-K1-D8
ccatttttgttactttgaatttgtatatcgaagatgttaaatctgggaaagtaaagtttcactgtggcaccattaacaaaagtttaagtgttctcttgttgcttttacttggttaagaagcgaataaagaagcctatctatgtctactaccaactgggcaatttctaccagaatcatcagagatattgaaggtgcggcagaggattcaatctcttcaagctagaaaagccaaggcttagcacgtcttcaagtggaacgttatttaatgttgcattccatggtcattcatcttagtcaaaacttgaatcttgtgttatggaaacagggttttgtagctaccttgtgtaccagcttctttaaccatgatggttcattattacgagttttgtagcttcttttataattggcctagtta

SEQ ID NO: 13514 - DNA, 429 bp, Gossypium hirsutum
  unsure (1)..(429): unsure at all n locations
  Clone ID: LIB3135-022-Q1-K1-F8
aaaagagggaactcgtttttgaaaaccctaagcagaaggaagaaatcgaagtgaggttgtccactgcctttgctccgccgccagccatgaagttcaatatcgccaacctccagtacgagatgccagaagaagctagaaatcgacgatgaccagaaactcaaggggcatgcaaatgtggaacctcttttcaacagcttggccttgcagcaatacattcttttatgctcacaggtatgttaaaaaatttctcatttggaaggtgtgatgtggacctcttgttggatacattatgtactcgtaccattcaaatccgtgaaggaagcatagttaaagctcttgattgtaatgctgctgtggctagtcgggatgcattggcaaagacagattatgctcgattgnttggttggcttgttgataagattaatatat

SEQ ID NO: 13515 - DNA, 418 bp, Gossypium hirsutum
  Clone ID: LIB3272-031-P1-K1-F3
ggccatctctatgcgctagatcttacactgtcttattaattgccaatcaaactgtcgatctctcttctgcacatcgaaccttattattattgtaacaacataaaataaccttatacccccagagtgccgaataaaatcggcatcaagcgcgttcagaaagaatacagagacactccagtagggaaccaagtaatcatgttgttgctcgcacataacacaagtgacattctcagaacggcattaactagcgtggaagggagtgaaggaacaccgttggcaggtggatattactatgaaaagatcaagttacctcctgagtatccatacaaacctactggaatcaccatgatcacccccaatggacggtttatgacgcaaatgaaaagatgcttgtccatgagtgattctcatccagaaa

SEQ ID NO: 13516 - DNA, 416 bp, Gossypium hirsutum
  Clone ID: LIB3197-022-Q1-M1-H11
cggacgcgtgggcaaacccccatctacaattatctattcttcttttgcttttttgttcgttttttttttctctcagatcataaattattttttgtttagagaagtaaaaggttgatccaatgagttccagtacgccatcatctagcgctggaggtgttggatccgctgattctgctgctcctagaagaaattccaagcgacccaaatactctaagttcactcagcaagagcttccagcttgcaagccaatcctcacgccacgatgggtcatatcagcctttatgcttgttagcattgtcttcattcctattggagtggtctctctgtttgcttctcgagatgtcgtcgaaatcattgatcggtatgaaactgcatgtgtaccggacggctacaaaaatgataaggtcacattcatc

SEQ ID NO: 13517 - DNA, 384 bp, Gossypium hirsutum
  Clone ID: LIB3146-058-Q1-K1-G12
gtcattttggatagaaaaattctccattgttgggatgatgtctccgtaactaaagaaatggtctgttttgcaaacagtaattggtattttgggtgcaaccttaattgataaactcgtaaggtggaataacaaccatcagtatgagtttctattaatgtcctcctaatatcaaactctagagtctagaatccaggcacctcggtgtggataatatattgtaactagatttatctgtcaaactgacgatgaatctaataatttggttttgcatcctttagatattgaaggtgcggcagaggattcaatctcttcaagctggaaaagccaaggcttagcacttcttcaaatggaacgttatttaatgttgcattccatggtcattca

SEQ ID NO: 13518 - DNA, 426 bp, Gossypium hirsutum
  Clone ID: uC-gsflmaxxa069c05b1
gaagttttcaacaaagataagactctagtcttccaggtgttctgttaagcatgagcacaagcttgattgtggtggtggctacatgaagttgctcagcggtgacattgaccagaagaaatttggtggtgataccttatacagtactttgtttgtctctcctttctctttatttttatcttttttctttcttctctcttttctcattcttttttttcatcattttcttctctctttttttacctttttttctcattcttttttttctattgtcttctttttttttattctctttcttctttattttcattatcttattttttcttttcttctcttatttcctccctctattttcctctctatttcttatcttcctacttatatttttcttctctttctatcatactcattttcctcccctctctattt

SEQ ID NO: 13519 - DNA, 286 bp, Gossypium hirsutum
  Clone ID: LIB3149-036-Q1-K1-E11
gtattatctgaatgatcctcgagattctgtgtctgttcggccattggacttgcaccacagcatggtttttcgtctcggcctctccaaggaaccagtctgtcctagttttatttgagattttcattgactacttcagttttgtcccatgaaggaagtcactgcttatcttttcattttttccttattgaatttatccgttatcttccttttttttcattctcattccacatttaatttattttttttatttgtgcgtaccctctaaaattatattttccactttgtc

SEQ ID NO: 13520 - DNA, 207 bp, Gossypium hirsutum
  Clone ID: uC-gsflmaxxa095c11b1
cccatgcgtccggcgcgtcagctagagcccgggataagaaagcattggaagaacaatggggtcctcctccacagctcttcgggaactgcagcaggacctcgaaaacaaagccaacgatcttagcaagctccagaaagatatagccaagaaccatcaagtcaggaagaagtacactattcagtcaggaccgatcgagcttgtccctat

SEQ ID NO: 13521 - DNA, 1008 bp, Gossypium hirsutum
  Clone ID: GOSHI-09MAY01-C665_1
tattgttttgtccatttcctccaaggacccatctctacctctttcttgagagtgagtgactgtatgtgtttgaaaatattactgagagagagagaatgcactcttttttgttttctggtgttgcctgccatggcactacaaatcccacgtttttctctgtctgcttctgccttctttacagagatagttgcttgaatttcctttttttcattttcttagttcataataattgtactttgctgtttgatcataaatatgtactttggcttggacaatatacaagaatgtcaagctcccacaattctgcaccagaacaactctgctacatcccttgcaacctttgcaacatcattcttgcggtcaatgttccctgcagctgcttgtttgaaactgtgacagtccgatgtgggcagtgcaccaatctgtgttcagtaaacctggcagcttcctttcaatcaagggctggaaaagatgtccaggtgcctaattacacatcatcggagtacagaattgacttagggtcttcctccaggtgcaagaacaagttaccaaagcgagcaacaactataaacactaccactcaagaaagggttgttaatcgacctcctgacaagaggcatagggctccttcattgtacaatcagttcatcaaagaggagattcaaaggatcaagctgaacaatcctgatatcactcacagggaggcatttagcactgctgctaagaatttgggctcgcttccctcacattcattttggactgatgctggagactgacaatcaacctaagctgaatgatgactcaactgagccattccatcagctgcttaagtgaataaatggctattgataattactaaaatgttataatatatatatatatatattatacctataaatatgtatgttgttgaaataaaaggctttcgttatgagagctgtatcaactcataatttgtttgtttaaatgcactttgctttattaatctatgtcatgattgatgttatt

SEQ ID NO: 13522 - DNA, 640 bp, Gossypium hirsutum
  Clone ID: LIB3828-012-Q1-K6-F6
gggggcaggcagtgttgagtattgactaccctaaaaaatgaaaaaattaaataaaacaaagccctagatattgtactagttcgaagttaaaggaaagctctatatacttccaaaaacattttttttctttttgctttggaagatcttagaactttatatgaggtcttgttcttcaaacacccacaagttttaataagcaaatgatttgtatgtgaaagggttttataagctaaaattttttacatgatttttgcaggtcaatgttccatgcaacagcttgtttgaaacagtaacagtcagatgtgggcagtgcaccaatctctgttcagtaaacctggcagcttcctttcaatcaagggctggaaaagatgtacaggtgcctaattacacatcatcggagtacagaattgacttagggtcttcctccaggtgcaagaacaagttaccaaagcgagcaacaactataaacactaccactcaagaaaggattgttaatcgacctcctgacaagaggcatagggctccttcattgtacaatcagttcatcaaagaggagatacaaaggatcaagctgaacaatcctgatatcactcacagggaggcatttagcactgctgctaagaattgggctcgcttccct

SEQ ID NO: 13523 - DNA, 852 bp, Gossypium hirsutum
  Clone ID: GOSHI-09MAY01-C635_1
cccacgcgtccgcccacgcgtccgcccacgcgtccgaaaatcgaaaatcgcccccgactgattgacctttgttttagagtggtagagtctaaaaatgtctgagcatcaagagcagactgagaggagaaatgggcaccccagcatgtctcgctatccctctcctactgctacctatgaggatgttcttcaaagtcctgaccttttctgggaaaagctcaaagcttttcacatatctctcggcttcaagttcaaggttccggttgttggaggaaaggctctggatctgcatcaactcttcgtggaagtcacatcacgtggaggtctcgaaaaggtaataaaagatcgcaaatggaaggaagtgattgtgggctttagatttcctacaaccattacgagtgcgtcttttgttttaaggaagtattatttatcattgctttatcactttgagcaagtctattacttccgtaaacaactctctccagtctcaaccccaggcactgccagtgagagccttgtgactggatctgcaaacgcaatggaagatgcctctacaaaccaattaacagctgttggaactcaggagttgcagattggcagttctgtgacggggatcattgatggaaaatttgataatggctatctggttacagttaggttgggggtctgatcaatttaaaggtgttctatatcatatcccccaaatgcatcaactgtctcaaagttcaaatacttcagatgtacctcctcgacgccgaaagagatcccggttagcacaggacccctccaggccaaaatcaaacaggaatggttataatcatttctatgctgagcattatgctcaactcaaaccta

SEQ ID NO: 13524 - DNA, 465 bp, Gossypium hirsutum
  unsure (1)..(465): unsure at all n locations
  Clone ID: LIB3582-051-P1-K1-C10
ttgccgtccgaaaaaaagttaagaaaaaagaaaatggggagatcgggccaaactgatttacctttgttttagagtgttagagtctaaaaatgtctgagcatcaagagcagagtgagagtagaaatgggcacgccaacatgtctcgctatccctctcctactgctacctatgaggatgttcttcaaaggggttgtgttttctgggaaaagctcaaagcttttcacatatctctcggcttcaagttcaaggttccggttgttggaggaaaggctctggatctgcatcaactcttcgtggaagtcacatcacgtggaggtctcgaaaaggtaataaaagatcacaagtggaaggaagtgattgtnggctttagatttcctacaaccattacgagtgcgtcttttgttttaaggaagtattatttatcattgctttatcactttgagcaagtntattacttccgtaaac

SEQ ID NO: 13525 - DNA, 1072 bp, Gossypium hirsutum
  Clone ID: GOSHI-09MAY01-C625_1
gcggggtactttacctgtagtaggcgaatgcctggttcacttggttatgaagagcaggatgctaaaacctttgcttcttggggtattgattatttgaagtatgataactgcaataatgatggctcgaagccaacacaaagataccctgtcatgactcgagctttgatgaaggctggccgccccatcttcttttctctgtgtgaatggggagatatgcaccccgcgcgtccgggtgctcctttaggaaatagctggaggacaactaacgacatatccgataattgggaaagtatgatctctagagctgaccagaatgaaatttatgctgaatatgcaaggcccggtggttggaatgatccggacatgctcgaggtggggaatggagggatgacaaaagatgaatacatagtacatttcagcttgtgggctatttcaaaggcacctcttcttcttggttgtgatataaggaatatgacaagagacacgatggatatcatcacgaatagggaagtcattgctgttaaccaagatccatacggttttcaagccaagaaggttaggatggaaggcgatcaagagatttggtcagctccactttctggttataaaattgccgtggtcctactcaacaggggtcctgttcgttattctacaacagctcgttgggatgacattggtctagaccccaagactgtggttcaagccagagacctttgggagcacaaaacactgaagacaacatttgtgggcaatttgacagcaacattgagaccgcattcatgcaaactgtatgtattgaagccaattgcttaaaaccatcatgtttttaggctttttgccactattcccttgaagctgcagtcatcatttataccctgtaattctagatgtgccatggaattattatttatttctttttaagatcagtacatgaatttagtcattaataagatggaggaagctaagctttcctctttaattagatccaaaaaaaaaaaaaaaaaaaaaaaaaaaaaaaaaaaaaaaaaaaaaaaaaaaaaaaaaaaaaaaaagggaggaaattaaaaaagaa

SEQ ID NO: 13526 - DNA, 1545 bp, Gossypium hirsutum
  Clone ID: GOSHI-09MAY01-C185_2
gcagggctctgtcactagggtttcgaactttccttgatttttttcctctgaaatcgctgctttcgaaggcaatatgagacccattttctgtggaaactttgagtatgatgcacggcagtctgatttggaacgactcttcagaaaatttgggagaatcgaaagagtagatatgaagtctggatttgctttcatatatatggaagatgagagagatgctgaagatgccatccgagcacttgatcgaacagaatttggtcagaaaggacgtaggcttcgtgttgaatggacaaagcatgagcgtggcattagaaggcccgagggtggggggcggtggatcaagaagatctgcagcaaatacaagaccttcaaagactttatttgtcatcaattttgatccttaccacactcgaactagggatttggaaaggcacttcgagtcatatggaaagattgtaagtgtaaggatcagaaggaattttgcatttgtacaatatgattcccaagatgatgccaccagggctttggaggctacaaatatgagcaagctgatggatagagttatttcagttgaatatgcagtacgagatgatgatgatcgtcgaaatggatatagccctgagagaggtcgtgataggtcacctgagagaggtcgtgacaggagacgatctccaagtcccttccgaagagagaggggtagccccgattatggtcgtggctctagtcgtagcccttataggaaggagagggggagccctgattatggtcgtggccacggtccaagtctttataagagagatagaggtagccctgagtatggccagatcaccagccgtagtcctcagagaagagagaggaccagctttgaccatgctcgtggctccagccgaagtcctttcaggaaagagagggctagccctgagaatatccaaggctctagccgcagtccttataggaaagagaagcgtagtgctgaaaatgatcgtagccccagtcgcagtccatatagaagagaaaggcccacttctgacaatggtcgtgcacccagccatagcccatatggaagagagagaattagcccagagaatggccgtggtagcagccctggttctatgccagaaagaacggccagcccttatggtggtgaagctgaaagcccagtcaatgaaagatatggaacccaatctcctgccgcagaggtatgattaggatctagagaaagcatttataggaggaaccttcgtcttcatggcagaactcagttggaagtgtttctattcgcttttcttttgtgacgaaaactgtttcggcaattacatttacagctggattctgacctttcgctgtaccgggtagttttaaaagcctagatttctagttaggtgcaatggatatatatatatcctgtttactttgaactcgcagtaatatgttttatgtactcggtttccccaacttttttgttttttatgtctgatttgatttcattagcttaaaaaaaaaatgtaaccagttaataccaagcctataaaaaaatggaaaatataa

SEQ ID NO: 13527 - DNA, 876 bp, Gossypium hirsutum
  Clone ID: GOSHI-09MAY01-C185_1
cagggctctgtcactagggtttcgaactttccttgatttttttccctgaaatcgctgctttcgaaggcaatatgagacccattttctgtggaaactttgagtatgatgcacggcagtctgatttggaacgactcttcagaaaatttgggagaatcgaaagagtagatatgaagtctggtaagtattggttctctatctacattatattgattattggctccatgtgagaatttgggcttcatcccctgccgcctcttttagtatattctttcatgctacccgcgcaatttggctggacgtgttggttgtaaaggtgtcaagagtattttgagcttgaaaagctgtttcttattgaatatggcacagtgaaaaatctattccacatggtttttatcttcactatgcaaatggagccaagctgggttttttattctgaacttgagttgctcaaaaagataattgtttgacgaattttttaagtagcagctgtctgtttctgatttcagcaatggataagtatatatacaagtcagaggttacaaaaaaatgagcgattgtttatttagaagtaggagcttcctttgttgggactttagtcatttcgaatctacagatgaagatggggtccaggatatagtctgtgtgaatatatactgagttttatgcattattcaacatgataggtcaaaagcaatctatagtgagacaggcttttatgcgatttcatttccaatctctccctctcactcttaaacaacataataaacacgatagtcttgatactgtatttaaaaactagctttcattgaacgcttaccccaagtataacattctttgattgtatatgtctggaaaaataaaaatatggagcaattt

SEQ ID NO: 13528 - DNA, 467 bp, Gossypium hirsutum
  Clone ID: LIB3585-048-Q6-K1-D11
cccacgcgtccgcccacgcgtgcgcccacacgtatcttaattatagataaattgtttgacaaatttttggagggggaactgtctgtattctgatatcagtaaatgaataattatatatacaagtcagaggttacaaaaaaatgagtgattgtttatttagaagtttgagcttcctttttgtgactttagtcatttcgaatctacagatgattatggggtccacgatataatctgtgtgaatatatactgagtaatatgcattattcaacatgatttgttaaaagcaatctatagtgagacaggcttttatgatatttcatttgcaatttgtgcctgtaactttaaaaaacaaacactaattttgatactgtcttaaaaaattatttttaattgaaaccctccttctaatcataacattatttttgagtggtatttttttttaaccaataaacaatttatattctttt

SEQ ID NO: 13529 - DNA, 642 bp, Gossypium hirsutum
  Clone ID: LIB3828-014-Q1-K6-C6
gggctctgtcactagggtttcgaactttccttgatttttttccctgaaatcgctgctttcgaaggcaatatgagacccattttctgtggaaactttgagtatgatgcacggcagtctgatttggaacgactcttcagaaatttgggagaatcgaaagagtagatatgaagtctggattttcttgggatgtaatggaggagctcctcagaattctgtttcatgcctgtgacgagcttcctcttcttgctttcaagaagagtcactctaatccccaatggcatcgtcatccctcattttcctcgggcattttttcctttcattcctcatgactttttcccagcctcaaattcagacatgtttcaaggtagaaacattactgacctcatggcagaggctgcagaaaatatggagaaagcacactaattccttgacccacgtgagacatccaattttggattcttgttccttgacatcacttagttcatcacacaaggatttgctttcatatatatggaagatgagagagatgctgaagatgccatccgagcacttgatcgaacagaatttggtcagaaaggacgtaggcttcgtgttgaatggacaaagcatgagcgtggcattagaaggcccgatggtgggggc

SEQ ID NO: 13530 - DNA, 313 bp, Gossypium hirsutum
  unsure (1)..(313): unsure at all n locations
  Clone ID: LIB3583-047-P1-K1-B2
ccagcgtccgcccagcgtccgcccagcgtccgcatactcaacatttctttggcgcaggnatttcttgggnatgtaatggagagctcctcanaattctgtttcatgcctgtgacgagcttcctcttcttgctttcaanaagatcactctaatccccatggcatcgtcatccctcattttcctggggcagtggttcctttcattcctcatgactttttcccagcctcaaattcagacatgtttcaaggtagaaacattactgacctcatggcagaagctgcagaaatatggagaaagcacactaattccttgacc

SEQ ID NO: 13531 - DNA, 807 bp, Gossypium hirsutum
  Clone ID: GOSHI-09MAY01-C155_2
ccccgcgtccgcccacgcgtggcgggggcgcgtgggcggacgcgtgggttttctctttgggtttttcagtttgaattcaatgttatttggcgccctccttgccctttcattttgtgaaattgttttccaggtccattctgccaaaggttcttcttactttagaaaagaggggggggggggagctgaaccttgttaatctcagtgacaaaccccaatggttcttggagataagtccagaaggaaagggtcccggggtgaaggttgggggcgggggggtggctgattctgatgtgattgttgggatccttgaagacaagttccctcagccttctttgaaaacaccccctgaatttgcccatgttggatcgaaaatatttggtacttttatcacatttttgaagagcaaggatgcaaacgatggatcagagcaggctttggttaatgaactgaaagcattggatgaacatcttaagggacatgggccattcattgctggggaaaagattacggctgttgatttaggtttgggaccaaagctgtaccatctcgagatcacacttggccatttggtgaagtggactgttcctgaaagcttgacttatgtccacaattacatgaagtcgattttcggtcgggaatctttcgtgaaaactaacgctgcgaaggaacatgtgatcgagggatgggcaccgaaggtcaatgcatgaattttacttcaaaagctttaggtttttcaaactctttctagagcatataaactatgaaagtgtgtagaggctgtgaaaactagatgaaaactgggtgttc

SEQ ID NO: 13532 - DNA, 856 bp, Gossypium hirsutum
  Clone ID: GOSHI-09MAY01-C155_1
tcccacgcccccggtgcttcctacttcatctcaactatcaaacccagaaagctcaaaggaaaaaaaagatggctttggagatctgtgtcaaggctgctgttggtgcccctaatgttcttggagactgtccattctcccagagagctcttcttactttggaggaaaagaagatttcctacaacatgcaccttatcaatatcagtgacaaacctcaatggtttttggagataagtccagaagggaaagtaccagtggtgaagtttgatgacaaatgggtggctgattctgatgtaattgttggaatccttgaagaaaaataccctcagccttgtctcaaaacccctcctcaatttgcctctgttggatcaaacatatttggaacttttgtcacatttttgaagagcaaagatgctaatgatggatctgagcaggctttgcttaatgaactcaaggcattggatgaacatcttaaggcacatggcccattcattgctggggaaaagataagtgcagttgatttagctttgggaccaaaactttaccatcttgaggttgctcttggccatttcaagaaatggactgttccggaaagcttgactaatgtccgcaattacatgaagtcgatattcagtcgtgaatcgttcgtgaaaacgcgggctgctaaggaatacgtgatcgccgggtgggcacctaaggtgaatgcatgaacaaactggaaacagtgaggtgtttgaagcgtatgagttatgtaataaaatgtgagggatggtgatgtaataaaatgtttgaatctatgagtgtcaatgctactaagtaattggttagtctttgtccaaaatctgaatcctgttctaac

SEQ ID NO: 13533 - DNA, 496 bp, Gossypium hirsutum
  Clone ID: uC-gsflmaxxa090c07b1
agctggaccccctgggggcccgggccgcaatatccgggtcgacacaccacgccgcgatgtttcgtgggcggacgcccggttttagagatgtgggttaaattaactgctggtgccgcatatattctcggagattgtccattctgccaaagggttcttgttactttggaggaaaagaatgttgcttacaggcagaacctttgggatctcaatgacaaacctgaatggtgcttggagataagtccagaccgaacggtaccattggtgaagtttgatgacaaatggggggctgattctgatgtgattgttgggattattgaagacaggttgcctgcgccttgtttgaaaacaccccctgaatctgctcatgttggatcgaaaatatttggtacttcaatatcattttagaagagcatggatgcaaacaatggagcaaagcacgattgggttattgagctgaaagcgttgcttgagcatcttaagggaaatgggccgttca

SEQ ID NO: 13534 - DNA, 406 bp, Gossypium hirsutum
  Clone ID: LIB3146-061-Q1-K1-C10
cccacgcgtccgcccacgcgtccgcccactcgtccgcccacgcgtccgggcacatggcccattcattgctggggaaaagataagtgcagttgatttagctttgggacccaaactttaccatcttgaggttgctctgggccatttcaagaaatggactgttccggaaagcttgactaatgtccgcaattacatgaagtcgatattcactcgtgaatcgttcgtgaaaacgcgggctgctaaggaatacgtgatcgccgggtgggcacctaaggtgaatgcatgaacaaactggaaacaatgaggtgtttgaagcgtatgagttatgtaataaaatgtgagggatggtgatgtaataaaatgtttgaatgtatgagtgtcaatgctactaagttggtaagtatttaat

SEQ ID NO: 13535 - DNA, 413 bp, Gossypium hirsutum
  unsure (1)..(413): unsure at all n locations
  Clone ID: LIB3493-001-P1-M1-H10
gaaaagatcatttcttgattctcaaatttttctctagaggaaaaaatggctttagagatctgtgtgaaagctgctgctggtgcccctgatattcttggagattgnccattctgccaaagggttcttcttactttggaggaaaagaaggttccttacaagttgaaccttgttaatctcagtgacaaaccccaatggttcttggagataagtccagaaagaaaggtaccagtggtgaagtttgatgacaaatgggtggctgattctgatgtgattgttgggattattgaagacaagttccctgagccttttttgaaaacaccccctgagnttgcccatgttggatcgaaaatatttggtacctttatctcattttttgagtnncagggtgcanacaatggatcagagcangattt

SEQ ID NO: 13536 - DNA, 359 bp, Gossypium hirsutum
  Clone ID: LIB3585-030-P1-K1-G4
attcaatgttattttgcccaccccttccaactttcattttgtaaaattgttttccaggtccatggggccaaaaggttcttcttactttggaggaaaagaatgttccttacaagctgaaccttgttaatctcagtgacaaaccccaatggttcttggagataagtccagaaggaaaggtaccagtggtgaagtttgatgacacatgggtggctgattctgatgtgattgttgggattattgaagacaagttccctgagccttctttgaaaacaccccctgaattttcccatgttggatcgaaaatattttgtaccttttattaacatttttaagaagcaagcatgccaaccgattggatc

SEQ ID NO: 13537 - DNA, 836 bp, Gossypium hirsutum
  Clone ID: GOSHI-09MAY01-C145_1
cttcaatgttttgtgaaggaagcgtccattgcctctctcttgcttatgtggcagacaatgttccggaaggtcgacgagcatcagcttttgggattctttcaggcatcgggtcttctgccttcgtctgcggaactctgtctacccgtttcctctctactgcttccactttccaggtcgcgacagcaatggggatgctgtcagcggtttacatgagggttttcctcccggattcgatcgtaaatgataatctttctactccaattatgtcagaaggaaaacttgatggcattgttaatcaggatgaagagtcagacaagaaaattcagatgtttaaaaccctaccttcaatagaagatatgcttgtcttgttgaaaagcagcttgacgttttcacaagcagcaattgtttcttttttcagcactctttccgatgtcggcctccatgcttctttactgtattatttgaaggccaggtttcacttcaacaaagatcagttcgctgatttaatggtcatcactggaattgcagggactgtatcccagcttcttctcatgcccatactagctcctgttcttggagaagctaaattgctgtcaatagggcttttctttaactgtgtacatatgatcttgtacagcattgcgtggtctttttgggtaccttatgcagcagctctgttttccttattatatgttttttcacagccatgtataaggagcatcgtgtctaagcaagtcggaccctgtgagcaggggaaggctcaagggtttatatcaggcataggttcctttgctaatgttgcttctcccttacttttctctcctttaacagctttg

SEQ ID NO: 13538 - DNA, 1082 bp, Gossypium hirsutum
  Clone ID: GOSHI-09MAY01-C115_7
aaaatggaaataaaattagctcaactgtacttatttgtagctacttgactttaaccacaccactttttgtgatgtaccttcaaaacctaacactattatttttccccaagtttttcccgcgcgtccgcgtcatgcctctcctctttttctggctctctcatggaagctattaaatgacaaagctctcatcattctccaccatgtttagcagccaacactacctttcgagatcgagacattggcttattctgtagcttaaaactttatatagcatcaatgtgcgggggctttagttgatatggttggaggagttgaggtgtgagtaaagctaattatataaatatagcttaaacatctgcatcagctatgaatagaggggttggtgttattgtagattatacagaacttgaagatgtatcctactctttaatatcaagtttactggtttaacgtctggcttcaaatgtggtattaactatcagcctccaactgttgtacccggaggagatctcgcgaaggtgcagcgagctgtttgcatgataagcaacaacacagcagtggctgaggtgtttgcacgcattgaccacaagttcgatctcatgtactcaaagagagctttcgtgcatgggtatgttggtgagggcatggaagaaggagagttctctgaagctcgtgaggatctggctgctctcgaaaaagattatgaagaagtcggagccgaaggtgtagaggacgaagaggatgccgaagactattgatgttcgtatgctgaaatatttacttttgaatatcagctctgtgtgtaagggtattcctatcttttgctcttgtgaagcactgtcttcctgtgtgctgtatgattgttaaattgtgcccatcatttgcctaagggctttttatgctatcaatgaagtaatatttatagttgtgtttgtcattttttgttataaatgtgtcttctatttatgaaaggtgttccataaacaacatttatggttgctgtaagattgtcaaattgtacccataatctgtctagaccctttttatgccatcaatgaagtgatattcagatctgtgttgcc

SEQ ID NO: 13539 - DNA, 669 bp, Gossypium hirsutum
  Clone ID: GOSHI-09MAY01-C115_6
gccgaccttaaagaggggaaatgctcgcccttctgtcgtgttcagttcactcattatcctgggccttcatagttccatgccattttccctaacaaatttatttagatctgatcagatttaactcagatccttttgtatcgagtcttctaagttccagatctttacttattttgaccttaggcagaaagaaaaagaagagatgagagagattattagcgtccacattggtcaagctgggattcaagtcgggaattcatgctgggagctttactgtcttgaacatgaaattcatcctgatggaaccatgcccagtgacacctcagtcggtgtagcacacgatgctttcaacactttcttcagcgaaacgggttcaggaaagcatgtaccgagagctgtctttgttgatctggagcccactgttatcgatgaagtgcggactggcccttatcgccaacttttccaccctgagcagcttatttctggcaaggaagatgctgctaataactttgccagaggccactatacaattggaaaggaaattgttgatctctgccttgatcgagttaggaagttagctgataactgcactggtctgcaaggttttatggtgtttaacgctgtcggcggtggaactggttctggtttgggatctttgttgttggagcgctc

SEQ ID NO: 13540 - DNA, 740 bp, Gossypium hirsutum
  Clone ID: GOSHI-09MAY01-C115_4
accggccccgaggacccggcgcctgcggtcgctaccatcaaaacgaagaggaccgtgcagtttgttgactggtgcccaactggtttcaaatgcggtattaactatcagcccccagctgttgtccctggaggagatcttgctaaggtgcagcgagctgtttgtatgataagcaataacacagcagtggcagaggtgtttgcacgcattgaccacaagtttgatctgatgtactcgaagagagcttttgtgcattggtatgttggagagggcatggaagaaggtgaattctcggaagcccgtgaggatctggctgctcttgagaaggattatgaagaagttggtgctgaaggtggagatgatgaagaggaaggtgaagaatattgatgctactatcgcaatatcatttattttgaagatgatgggttcaccctgtgagggtatcctgttctttcttattcgtgtgaggtttctcaaattatgcctatggaataaatttagtcatgtttgcttgtcatttttttgttgttagaaatgcttgtcttttacttatgatgctccataagaacatgaatagccttacaagctattgttctgtttttcatgttgtaagatttgtctaatgcctttttatgctatcaacggagtgatattttatgtttaaaaaaaaaaaaaaaccaccggatgagtatgattcttcaaaataaataaaccgtgggtgagtatgattaattgttttaggt

SEQ ID NO: 13541 - DNA, 768 bp, Gossypium hirsutum
  Clone ID: GOSHI-09MAY01-C115_3
cccacgcgtccgccctcgcgtccccccacccctgcggctgtgtttgagccttcaagcatgatggcaaaatgtgaccctaggcatgggaagtacatggcatgttgcttgatgtatcggggagatgtcgtccccaaggatgttaatgctgctgttgctaccatcaaaacgaagaggaccgtgcagttcgttgactggtgccctactggcttcaaatgtggtattaactatcagcctccaactgttgtacccggaggagatctcgcgaaggtgcagcgagctgtttgcatgataagcaacaacacagcagtggctgaaggtgtttgcacgcattgacacaagttcgatctcatgtactcaaagagagctttcgtgcattggtatgtttgtgagggcatggaaaaggaagagttctctgaagctcgtgaggatctggctgctctcgaaaagattataaaaaagtcggagccgaagtgtagaggacgaagaggatgccgaagactatgatgttcgtatgctgaaatattactttgaatatcagctctgtggtaaggtattcctatcttttgctctgtgtagcactgcttctgtgtgctgatatggttaattggcccatcatttgcctaaggcttttatgctattcatgagtatttttaaagtggtgcaaaaaaaaaaaaaaataaaaaaaaaaaaaaaaactcagggggcggacaaattgctctaagaggtatcattatgtgcggtttaactgattgaaaactggtccaatac

SEQ ID NO: 13542 - DNA, 687 bp, Gossypium hirsutum
  Clone ID: GOSHI-09MAY01-C115_2
gcaccttctcagccttcagttgagttcccaccctcccctttgccttcatagttccgttccattttccctaacaaacctgcatcagatccgatcagatttaactcagatccatctgtatcgggtcttctaaattccagatctttacttttctcgagtaaaggaagaaagaggaagggagagatgagagagattattagcgtccacattggccaagctgggattcaggttgggaattcatgctgggagctttactgtcttgaacatgaaatccaccctgatggaacaatgccgagcgacacctcaatgggcgtcgcacacgatgctttcaacactttcttcagcgaaacgggttcgggaaagcatgtgcctagagctgtctttgttgatctggaacccactgttatcgatgaagtccggaccggcccttatcgccaacttttccaccctgagcagcttatttccggcaaggaagatgctgctaataattttgccagaggccactatacaattgggaaggaaattgtggatctctgcctagatcgagttaggaagttagctgataactgcactggtctgcagggctttatggtgttcaatgctgtcggcggtggaaccggttctggtcttggatctttgttgttggagcgcttgtcggtggattatggaaagaaatcaaagctcgggtta

SEQ ID NO: 13543 - DNA, 1654 bp, Gossypium hirsutum
  Clone ID: GOSHI-09MAY01-C115_1
tgcactcactgggtctctctgtgtactgtcttccccttttccatttctcgtatgccttctccataacattcgtctctcagatcctttcctcttagatcatcaaatccattcctttttttcaccaaaacatgagggaaatcataagcattcatataggtcaagctggtattcaagtcggtaactcatgttgggagctttactgccttgaacatgaaatccaacccgatggaatgatgcccagtgacacctctgtaggtgtagcaaatgatgctttcaacactttctttagtgaaactggttcagggaaacatgttcctagagctgtgtttgtggatctggaacctactgtgatcgatgaagttaggactgggacttaccgacaacttttccaccctgaacagcttatttctggcaaagaagatgctgccaataactttgccagaggccattatacaattgggaaggaaattgtggatctttgccttgaccgtgttaggaagttagctgataactgcactggtttacaagggtttcttgtgttcaatgctgttggtggtggaactggttctggtctgggatctttgttgttggagcgcttgtcggtggattatggaaagaagtcaaagcttgggttcaccatctatccttcgcctcaggtctcaactgcagttgtggagccttacaatagtgttctgtccactcattcccttcttgagcacacagatgtggctgtgctcttggacaatgaagcaatttatgacatatgccggagatccctcgatatcgagaggccaacttacaccaatttgaaccggttgatttctcaaatcatatcgtccttgacaacttctttaaggtttgatggagccattaatgtggacattacagagttccaaaccaatcttgtgccatatcctcggatccatttcatgctctcttcttatgcgcctgttatctcagctgagaaagcataccatgaacagttatcagttcctgagatcacaaacgctgtgtttgagccctcaagcatgatggcgaagtgcgatcctaggcatgggaagtacatggcatgctgcctgatgtatcgaggagatgttgtgcccaaggatgttaatgctgctgttgctaccatcaaaacgaagaggaccgtgcagtttgttgactggtgcccaactggtttcaaatgcggtattaactatcagcccccaactgttgtacctggaggagatcttgctaaggtgcagcgagctgtttgcatgataagcaataacacagcagtggctgaggtgtttgcacgcattgaccacaagtttgatctcatgtactcaaagagagcttttgtgcattggtatgttggcgagggcatggaagaaggtgaattctcagaagcccgtgaggatctggctgctcttgagaaggattatgaagaagttggtgctgaaggtggagatgctgaagaggaaggtgaagaatattgatgtgcttatgcaaaatcatctattttgaagatcggttcaccgtgtgagggtatgcccaccctcttttcctatatccttcctatcgttctttatttgtgaggtttgcgaaattatgcatgtaataggcctaggatcttttcatgctattaatggaataaatttagagttgtgtttgc

SEQ ID NO: 13544 - DNA, 595 bp, Gossypium hirsutum
  unsure (1)..(595): unsure at all n locations
  Clone ID: LIB3828-007-Q1-K6-A3
ggttgctgctaactcatggnaatcaccattttcggtttgccatttagcctttgaaacttttatgtgggggtaatttacattatggtccatgtagatcacaagcctttaattttatcaaatttaaccattaaacttctattattaataaattaggtcacttatgctaagtccataaagtaattctaatggaaaagttggttaatcgtgcataccttaccgagcatgaaattccaaagttggttatgcgtggaaagcaagtcatatgtgcatgctaagacagcttttgcagtaaaattatttaatggaattagaataagtgacctaatatgttagttatagaagttcaatgatacactttgatgaaatcaaaggtttgggacttgaatgaaagttgataaactcaattgtgttggactgttctttgggttttttcttgttaaatttgcaggtctcaactgcagttgtggagccttacaatagcgttctgtccactcattcgcttcttgaacacacagatgtggctgtgctcttggacaatgaagcaatttatgacatatgccggagatccctcgatatcgagagaccaacttacacc

SEQ ID NO: 13545 - DNA, 389 bp, Gossypium hirsutum
  Clone ID: uC-gsflmaxxa040f09b1
ctccacgcgtccgcccacgcgtccgcccacgcgtccgcggacgcgtgggcgagggcatggaagaaggtgaattctcagaagcccgtgaggatctggctgctcttgagaaggattatgaagaagttggtgctgaaggtggagatgatgaagaggaaggtgaagaatattgatgtgcttatgcaaaatcatctattttgaagatcggttcccagggtatgcccaccctcttttcctatatccttcctatcgttctttatatgtgtgaggtttgtgaaattatgcatgtaataagcctaggatcttttcatgctattaatggaataaatttagagttgtgtttgcatgtcatttttgttagaaatgcttgtcttttacttttgaaagatgct

SEQ ID NO: 13546 - DNA, 618 bp, Gossypium hirsutum
  unsure (1)..(618): unsure at all n locations
  Clone ID: AI054514.1
ctctgtgtactgtcttccccttttccatttctcgtaaacaaagtccataacattcgtctctcagatcctttcctcttagatcatcaaatccattcctttttttcaccaaaacatgagggaaatcataagcattcatataggtcaagctggtattcaagtcggtaactcatgttgggagctttactgccttgaacatgaaatccaacccgatggaatgatgcccagtgacacctctgtaggtgtagcaaatgatgctttcaacactttctttagtgaaactggttcagggaaacatgttcctagagctgtgtttgtggatctggaactactgtgatcatgaagttggactgggacttaccgacaacttttccaccctgaacagcttatttctggcaaagaagatgctgccaataactttgccagaggccattatacaattgngaaggaaatgtgggatctttgccttgaccgntgtaggaagtagctgatactgcactgttacaaaggttcttgtgttcatgctgtggtggtggactggtctggctgggactttgtgtagacgctgtcgtgatatgtaaaagcaagctgtttacattacctcacaagtntaacagtggg

SEQ ID NO: 13547 - DNA, 351 bp, Gossypium hirsutum
  Clone ID: uC-gsronu33B044g03b1
cccattcttccggatttttcagccataaaacccggaattgctccagacctgaaatttggtgcatctggcccttttacagatgtaccatggggaaccggctctggtactggatcacacgtgatgaacctcttgtcggtggattatggaaagaaatcaaagcttgggttcaccatctatccttcgcctcaggtcccaactgcagttggggaaccttacaatagtggtcagggcacatatctcccttcttgagcacaccagatgtgggtcgtactattggacaatgaagcaatttacgacatatgccggaagttcccttgatatcgagaggccaacttacaccaatttgaaacc

SEQ ID NO: 13548 - DNA, 484 bp, Gossypium hirsutum
  Clone ID: uC-gsflnu33B136e02b1
ttcttttttttttctcgactcatccaacctgcaagacactagttagacaacaacaacttgacgacaaccacaatagccacacagcctcaacccggcaatgagaacctgtgaatgcataggtatcaaacgcataccaattccttcttccatgccctcaccaacataccaatgcacgaaagctctcttcgagtacatgagatcgaatttgtgttcaatgctgtcggtggcggaactggctctggtctgggatctttgctgttagaacgctcgccggaggattatgggaaaaagtcaaagcttggcttcaccatgtacccttcaccacaggtctcaacagctgttgtggagccttacaacagagttctgactactcattcccttgttgagcacaactgatgtggctgtgctcttggataatgaagcaatttatgacatatgccgtcgttgccttgattttgagaggccaactacactaacttgaacc

SEQ ID NO: 13549 - DNA, 448 bp, Gossypium hirsutum
  unsure (1)..(448): unsure at all n locations
  Clone ID: LIB3493-030-P1-M1-F7
gttaactctcattttaattatccattacagtccttatccaatgccgtggtcgtgacataacattctccctaacaaaggtatttaaatctgatcaaaatgaactcaaatcctatccaatagggtctcataaatgccatatctttactcctttggtccttatgaagatagcaggagagactactctgagacatcatcagcgtccacattggacaccctcgaattcacctcatgaatccttgataggagctctactgcctagaacatgaaatctatcctgatgtaacctttcactatgacacctgagatggtatatcacacgatgctatcaacactctcttctgctaagctggatcaagaaagcatgtaccgagagctgtctatcttgatctggaacccactgacatctatgaattgcggactggcccttatccncaacttttccaccctg

SEQ ID NO: 13550 - DNA, 204 bp, Gossypium hirsutum
  Clone ID: AI725754.1
gagaaagcataccatgaacagatatcagttcctgagatcacaaacgctgtgtttgagccctcaagcatgatggccaagtgcgatccaaggcatggcaagtacatggcttgctgcctgatgtatcgaggagatgtggtgcccaaggatgtgaacgctgctgttgctatcatacaaacagctcgctgcaccttagcaagatctccc

SEQ ID NO: 13551 - DNA, 4056 bp, Gossypium hirsutum
  Clone ID: GOSHI-09MAY01-C125_1
ctcctctatatccctttttgtatttttcatacaacaaaaaaaaaatgacaccttcggccggttcattttccggcgaccgagatgatgacggcgatgccacgaagaagaagaagaagcaacggaaagttccattgttgaagctgttttcatttgctgatttttatgaccatgtgttaatgggattgggatcactaggtgcatgtgtgcatggtgcttcggtgcctgttttcttcattttctttggcaaattgattaacattataggaatggcttatcttttccctaaagaagcttctcataaagttgcaaagtattcgttggattttgtatatctcagtgtcgctattttattttcatcatggatagaggtggcttgttggatgcataccggagaaagacaagcggcaaaaatgaggatggcatatctaaaatcaatgctaaatcaagatataagtttatttgacacagaagcttcaactggagaggtcatttctgcaattacaagtgacattattgttgttcaagatgccctttctgagaaggttgggaatttcatgcattatataagcagattcatagcaggtttcagcattggctttgctagagtatggcaaatcagccttgtaactctctccatagtcccattgatagcccttgctggtggcatttatgcttatgttgccactggtctcattgctcgagttcgaaactcatatgtcaaagctggtgaaattgcagaagaggtgattgggaatgtaagaacagtacaagcatttgcaggggaagaaagggctgtgaaatcatacaaggatgctttgatgaacacatacacatatggtaaaaaagctgggttaacaaagggtcttggccttggttcactgcattgtgtgcttttcgtttcgtgggcattgcttgtttggttcacaagtattgttgttcataaaaacatcgcaaatggtggggattctttcactacaatgcttaatgttgtcatttctggcctgtcgttaggacaagcggcaccagacatatctgcgtttattcgagcaagggcagctgcgtatcctatattcgagatgatagagaggaacacagttagtaaaaccagctcgaaaacgggccgtaaactaagcaaagtggaggggaacattgagctcaagaatgtatctttcagttatccgtctcgccccgatgtggtcatcttcgataggttctgccttaacatacctactggaaagattgtagctcttgtcggagggagtggctcggggaaaagtacggtcatatcattaatcgaaaggttttacgagccacttgcaggagaaatattgttggatgggaataatatcaagggccttgacctcaaatggcttagacaacaaattggtttggttaatcaagagcctgctctttttgctactaccattagggagaacattctatacggaaaagacgatgctacagtcgatgaaataacgcgtgccgcaaaactttctgaggccattgcctttattaacaatctccctgatagatttgagactcaggttggtgaaagaggaatacaactatcaggtggacagaagcaaaggattgcgatatctcgggcaatagtgaaaaatccacctattcttttactcgatgaagcaacgagtgcccttgatgcagaatccgaaaagagtgtgcaagaggcacttgatcgtgtgatggtggggcgaacgacggtggtggtagctcacaggcttttctactattaggaatgcagatgtgattgctgttgttcaaaatgggaagattgttgaaaccggtactcatgatgagcttatttcgaacccgaacagtacttactcttcgctcgttcagcatcaagagacatcgcctttgcaacgctacccttcacaaggtcctactttaagtaggccactcagtgtgagttattcacgagaattatcccgaacaaggacgagctttggtgcaagttttcgttctgaaagagactcagttagccgtgctggtgctgatggaatcgatgcagggaaacaaccttatgtttcacctggaagactgtattctatgataggacctgactggtattatgggttctttggtaccgttaccgcattgattgccggagctcaaatgcctctatttgctctcggggtttctcaagctctcgtagcctattacatggactgggaaacaacgtgccacgaagtcaagaagatcgccatcctgttttgttgtgcttctgtcataacggtcatcgttcatgcaatagagcacctatgttttggcatcatgggagaacgactcactcttcgtgtgcgtgaagggatgttttcagccatcttgaaaaacgagattggatggttcgatgacttaaacaacgcaagttccatgcttgcatctcgtctcgaaaccgacgccacgtttctaagaggtgtagtcgtggaccggacatcgattctcatacaaaacgtaggcttggtcattgctgccttcatcattgcattcatcttaaactggagaatcacacttattatcttggccacttttccattgatcataagtggtcacattagcgagaaactattcatgcaaggctacggcggtaacttgagcaaagcatatctaaaagcaaacatgatcgccggcgaggctgtcagtaatatgcgaactgtcgctgcattttgcgctgaggaaaagatccttgatctttatgcccgtgagctcatagagccttcggaacgttcatttaagcgtggtcaaattgcagggatattctatgggatttcccagttcttcatcttctcatcttatggccttgccttatggtatggttctgttttaatggggaaggagctagctagctttaaatcggtcatgaaatcgttcatggtgttgattgtgacggcattagccatgggagaaacgttggcactggtcccggaccttctaaaagggaaccaaatggtggcatcggtgttcgagattatggaccggaagacgcaggttgttggggatgctggcgaagagctaacaaatgtggaaggttccattgagctaaagggtgttcactttagttatccgtcgagaccggatgtggtgatattcaaggattttgatctgaaagttcgttcagggaagagtatggcgcttgtgggacaaagcggatccggtaagagctcagttcttgctcttatacttcggttctacgatccaacatctgggaaagtgatgattgatggcagagacgttaagaaactaaagctcaaatcccttcggaaacatatcggattagtccaacaagaaccagctcttttcgccacttcaatatacgaaaacatcctatacggcaaagaaggagcatctgaatctgaagtggtcgaagcggctaaactcgccaatgcacatagtttcataagttccctccccgaaggttactcaacaaaagtcggcgagcgaggggtacaactctcgggtggccagaaacaaagagtagccattgctcgagctgtcctcaagaaccccgaaatcttgctgctcgacgaagccactagtgctctcgacgtcgagtcggagcgcgtggtgcagcaagctctcgaccggttaatgaggaaccgaacaacggtaatggtggctcataggctgtcgacaattaaaaatgcggatcgaatatcggtcattcagggtggacgaataattgagcaagggacacattcgagcttaatcgaaaatcggaatggaccgtactttaagttaatcaaccttcagcagcagcagcaaatggaacaatagtgtcaaatttcagtaagaaaatgaagaaacaggttatgcagttgctttgtttaaatattttactttcttttcttcactaaatttggattcatcttaactagagccattctttccatatgaagaaaataataataatacatatggaagaatattgtaacaagtgggatttttttacaataacatggatatgattaaaggtgttaataaatcagattggattgagtttgggccaaaaaaaaaaaaaaaaaaaaaaaaaaaaaa

SEQ ID NO: 13552 - DNA, 666 bp, Gossypium hirsutum
  Clone ID: GOSHI-09MAY01-C395_1
cggacgcgtgggtggctctataataggttatgtagatggcaccttagacaaacctgcatatacatacttcaagttctgaatcattcatattgcaatcgggaacattgcgaacgtagcacttgttctgagtgcctctctatggtgagatacatgcaattcttttcgggacgctgaaacatgttgcaatcagggaactgcatacatttcatttgggcccgcggtcgcgccggtcattctctacacatatgtatttcatatgttagcccctcccccggaaggtacttttgacaatgaagatgggaatgttccccttaagatccctcagaaggatggctctccagagaatgttccattgctggagcaagaggcttcatcaatggattcagacaattcaaacaaaggaaagatcctagctatggtaataggtgcagtgcctgttctgaagaaaataatatttacaagagatgctccactttatttctttactgacagttgtataattcttgggaaagctatgattccatgcatcttgttggcattaggaggcaaccctgttgatggaccagggcctggaagttcaagaattggtgtccgaacactggtggctattataattgggaggttaatcttggtgcctcctgcacggctgggcattgtaacactggc

SEQ ID NO: 13553 - DNA, 782 bp, Gossypium hirsutum
  Clone ID: GOSHI-09MAY01-C355_1
cccacgcgtccgcccacgcgtccgctcctctttctcccatggctgcctccgttgatcctctcgttgttggtcgtgtcattggcgatgttgtcgacatgttcgttcccaccgtcaccatgtccgtctactatggttccaagcacgtctctaacggatgtgacattaagccttctatggctatcaaccctcccaaagttgccatcgatggccttcctgaccagttttatactttggtgatgactgaccctgatgcgccaagtcccagcgagccaaccatgcgtgaatgggttcactggatcgtgtctgacattcctggaggaaccaaccccactcgagggaaggaaatcctggcatacatgggtccacggcctccagtaggcatacatcgctacatactggtgctgttccaacaaaagggcccgttgggtgcggtgcagcaaccggcgacaagagctaacttcagcactcgatttttcgctgaccacctcaacttgggactgcctgtggctactgtctatttcaacgcccaaaaagagcccgtcagccgaaggcgttgaatctcccacgcacacttctcactctacatatatataaaaaatatataaatataaaactggttcgactctttaactttataaattagctttggccaagtgtagtcctagtacgtacgtttgagaagtgtatgtctctttgttgggtttatatttgatgctaagttatcgaacttttatgccgattaactgagcttccttattctaatttgagttaatcaagtcctt

SEQ ID NO: 13554 - DNA, 376 bp, Gossypium hirsutum
  Clone ID: LIB3196-050-P1-M1-D4
ctggtgatgatttaaaccaggtggtgactgaccctgatgcgccaagtcccagcgagccaaccatgcgtgaatgggttcactggtacgttgtttcccgcccccccttgtttttgagaaaatattttgtaatcatgttgctgatcatttcgtaaaccatcacgcaatttgctttcgtcgctgtttcaggatcgtgtctgacattcctggaggaaccaaccccactcgagggaaggaaatcctggcatacatgggtccacggcctccagtaggcatacatcgctacatactggtgctgttccaacaaaagggcccgttgggtgcggtgcagcaaccggcgacaagagctaacttcagcactcgatttttcgctgaccac

SEQ ID NO: 13555 - DNA, 561 bp, Gossypium hirsutum
  Clone ID: GOSHI-09MAY01-C345_3
accagctgttcctatcctatccgtggtcgtcccagtcttgacaaccgattcatttgattggacctgcagtgacgaaggtccagccaggcacagtctgatatataggggcttggttcccatcctggcagaagggtcagccaaggcaactgatgccgaatccaccgaggtcatcttagaagctgcaatgaagtcagctacggagaagggattgtgcaagcctggtgatgccatcgttgcactgcaccgtatcggggctgcttcggttattaagatctgcatagtgaagtgagatgatgtagagagccatggatggacatcaaaagctggctttttcgatattgcatttaattatccctttattgttcttaaaaatctaagctggttccactttgaatattcagctgaaacactgttttgtctcagcttctgatgacctgctagttaatcgttaatgctggatttcttgcccccaaatcttcggatttaaattaagtaatcatgtctcatgtcggatccatttttatacatggaaatgaagatattatatatttcaattgcatg

SEQ ID NO: 13556 - DNA, 1200 bp, Gossypium hirsutum
  Clone ID: GOSHI-09MAY01-C345_2
cttcgtatgatgacatcttgggatggggagttcccaataggaccgatgtggccgctctttcctttgtacgcaaagggtctgatcttgtcaatgttcgtaaggtcctcggtccccatgctaagaagattcaattgatgtcgaaggttgagaatcaggagggtgttatcaactttgacgagatcttgcgtgagactgatgcatttatggttgcccgtggtgaccttggaatggaaattccggttgagaagatcttcctagcacaaaagatgatgatatacaagtgtaatcttgcaggcaagcctgttgttactgccactcaaatgcttgaatccatgataaagtctccgaggccaacccgggctgaagcaaccgatgttgctaatgctgtcctggacggtaccgattgtgtcatgctcagtggtgagagtgctgctggagcctatccagagcttgccgtgaagatcatggctcggatttgtattgaggcagaatcttcccttgactatggagcaatcttcaaagaaatgatccgatcgactccacttccaatgagtccactggagagtcttgcatcctcagctgtacgaacagctaacaaggccaaagctaaactcatcgttgtcttaacccgtggtggaacgacagccaaattggtcgccaagtacagaccagctgttcctatcctatccgtggttgtcccagtcttgacaaccgattcatttgattggacctgcagtgacgaaggtccagccagacacagtctgatatataggggcttggttcccatcctggcagaagggtcagccaaggcaactgatgccgaatccaccgaggtcatcttagaagcagcaatgaagtcagctacggagaaggggttgtgcaagcctggtgatgccatcgttgcactgcaccgtatcggggctgcttcggttattaagatctgcatagtgaagtgatgatcaaaagctggctttttagatattgcatttaattatccctttattgttcttaaaaatctaagctggttcaactttgaatattcagctgaaacactgttttgtctcagcttctgatgacttgctagttaatcgttaatgctggatttcttgctccccactctctcgggtttaaattaagtactcatgtctcacgtcggatccatttttatacatggatatgaagatattatatttctcaatt

SEQ ID NO: 13557 - DNA, 1219 bp, Gossypium hirsutum
  Clone ID: GOSHI-09MAY01-C345_1
cccacgcgtccgcccacgcgtccgcttttctcttcactccacatctcatattccttcatttctttctaaatacttccatttttttgattttttttaagtgaaggaacagtgaaaagcaacaggaaatggcaaatatagatatcgatgggatcttgaaggagcttcccaatgatgggcgtatccctaaaaccaagatcgtttgtactttgggtccggcttcacggtccgtacctatgatagagaagctgttgagggccgggatgaacgttgctcgcttcaatttctctcatggcagtcatgagtatcatcaagagaccttggataatcttaggtctgctatgcacaacaccggcatcctttgcgcggtcatgcttgacaccaagggccctgagattcgaactggattcctgaaggatggaaaagctgttcagctgaaggaaggccaggaaattactgtaacaaccgattacgaaattaagggagatgagaagatgatctgcatgagctacaaaaagctggctgttgatctgaagcctgggaataccattttgtgtgcggatggtacaatcactctttcggtgttatcctgtgatcctgctgctgggactgtgagatgccgatgtgaaaacacagcgatgatcggtgagaggaaaaatgtcaaccttcctggtgtcgtggtggatcttcccacactcactgagaaggataaagaagacatcttgggatggggagttcccaacagtattgatatgattgctctttcctttgtacgcaaagggtctgatcttgtcaatgttcgtaaggtcctcggtccccatgctaagaagattcaattgatgtcaaaggttgagaatcaggagggtgttatcaacttcgacgagatcttgcgtgagactgatgcatttatggttgcccgtggtgaccttggaatggaaattccggttgagaagatctttctagcacacaagatgatgatatacaagtgtaatcttgcaggcaagcctgtggttaccgccactcaaatgcttgaatccatgataaagtctccgaggcaacccggctgaagcaacgtgttgttatgtgcctgacgtgaccatgtgaatgctcagggtaaatgctgtgagctttccaactgcggagaatggttcaatgatgaggcgactccttgttgagcactcaagaatgacgtgatccttcagagcctgagagtgtctattca

SEQ ID NO: 13558 - DNA, 454 bp, Gossypium hirsutum
  Clone ID: LIB3583-012-P1-K1-G1
cccacgcgtgggtaagaagcaagagaatatgccaactatttttgtcgacggaatctcatcggaggttccaagtgctgggcatgtccctaaaaccaagaccgtttcaactttgggtcctgctccaaggagctactttaccaatggggaaacgtagcgaggcatacaccatcaacttattgtgccatacctctcattgctgcaatcagtatcgtcaatagaccagggttagtcttaggactgctatgcacaacatccgcatactttgcgcggtcatgcttgacaccaagggccctgagattcgaactggattcctgaaggatggaaaagctgttcaactgaaggatggccaggaaattaccgtaacaaccgattacgatattaacggatatgagaagatgatctccatgagctacaaaaagctggctgttgatctgaagcctgcgaataccatttt

SEQ ID NO: 13559 - DNA, 459 bp, Gossypium hirsutum
  Clone ID: LIB3585-004-P1-K1-H6
atttcatagatcacatgctgactagccaggttcatgagatagtagcaccaggaaacggcagatatagatatcgatgggatcttgaaggagcttaccaatgatgggcgtatccctaaaaccaagatcgtttgtactttgggtccggcttcacggtccgtacctatgatagagaagctgttgagggctgggatgaacgttgctcgcttcaatttctctcatggcagtcatgagtatcatcaagagaccttggataatcttaggtctgctatgcacaacaccggcatcctttgcgcggtcatgcttgacaccaagggccctgagattcgaactggattcctgaaggatggaaaagctgttcaactgaaggaaggccaggaaattaccgtaacaaccgattacgatattaagggatatgagaagatgatctccatgagctacaaaaagctggcttgtgatctg

SEQ ID NO: 13560 - DNA, 359 bp, Gossypium hirsutum
  Clone ID: LIB3147-009-Q1-K1-G5
cggacgcgtgggcggacgcgttcgcggtcgcgtgggcggacgcgtgggcgggggagaagatcttcctagcacaaaagatgatgatatacaagtgtaatcttgcaggcaagcctgttgttaccgccactcaaatgcttgaatccatgataaagtctccgaggccaacccgagctgaagcaaccgatgttgctaatgctgtcctggacggtaccgattgtgtcatgctcagtggtgagagtgctgctggagcctatccagagcttgccgtgaagatcatggctcggatttgtattgaggcagaatcttcccttgactatggagcaatcttcaaagaaatgatccgatcgacttcactttca

SEQ ID NO: 13561 - DNA, 828 bp, Gossypium hirsutum
  Clone ID: GOSHI-09MAY01-C375_1
ttcttttgaaagagggcaggcaaattataagaggaggatgaaattaacctcctcttttctttttcttattgtgcctcctctcagatcttagctttttttttttggccagatttggcacttgggttttcttttgattattgggtcattgctgaatctggatttttcccagaaaaattttaaagctgtatcgattgatcatctatctgggtagcttattattattattttttggctttttgggattcttttcgttttcatttctctctctacaatatcccggtgaagctaaattctgggttttgttcggttgattgatcgtggaaagatctgttcgtttccaaattttgaatcagagagaaaaaaatcatttttgtataaaataaaggaaaaaaaagatgtttgagaatggaaagctatttattggtgggatatcttgggacaccaatgaagggcatctcaaggagtatttcaatacttttggtgaagtgatagaggcagtgatcatgaaggatcggaccactgggcgtgctcgtggtttcggtttcgttgttttcgctgaccccatcgttgccgagagagtagtcaaggagaaacacagcattgatggcaggatggttgaagcaaaaaaggcggttcctagggatgaccagaacgttatgagtagaagcactagtagcatccatggttcacctggtccaggcaacgcaagacagattttcgtaggaggtttagcatctacagttacggagagtgatttcaagaagtattttgatcaattcgggaatatcacagatgttgtagtgatgtatgatcaaaacacacaaaggc

SEQ ID NO: 13562 - DNA, 748 bp, Gossypium hirsutum
  Clone ID: GOSHI-09MAY01-C315_1
ctttgcccatttctttcttgtgatttctctctcttcaatggcgtcagtaacagagtcgattgccgccctctcttttcctactacttcacgctctagaacttcattctcacggccggcgatgatgatctcacagccggcggtttcttcgtatagctgccgaggtttgccggaatttaaagggctgaaagtccaatcctattcactgttctcgttcgcgtccacgaattccagatatcctagggtttccaagcatagtggacgcattgtttgcgaagctcaggaaactgctattgacattccagctgtgaccgatgaaacatggcaatcacttgtgctcaacgcagatggacctgtactagtcgagttctgggctccttggtgcggaccatgccgcatgatcgatcccgtaataggtgaactagcacagcaatacgcaggaaaactcaagtgcttcaaactgaatacagacgatagcccctcgatcgcttcccaatatggaatccgaagcatcccgacactcatgatcttcttgaatggtgagaaaaaagtccctctgattggggcgggcccaaaaactactctatcagcaagcatagagagattcttgtagatagcgattcataagaagtgatattgactgatggaatcatggaagtgtccagcactcatcacccacttggctttggttagatgctttatttctctctatgtgatgttgaaaattttcctacttttatgtcaaatttgg

SEQ ID NO: 13563 - DNA, 466 bp, Gossypium hirsutum
  Clone ID: GOSHI-09MAY01-C305_2
tggatgctccaatcatctgcttatcttcacaggatgtgcctacaccatatgctggaacattggaggaatggactgtagttcagcctgcgcagattgtggcggcggttgagcagctctgccagtagttgtgatagcagtaatagtgattccatagttgaagttctgttaatcttgtcgtgtttagtacgaaagcagttcctttgcaacatcgttttcgatctctaattcctgttccttggcaattttgtcagttcaaacttgcaagttttcatcaggttgaggcccttgtgatcttgttctttcttgactaaaatggcaagtaagatccttaagcaatagttataggtagaattatggaaaataactctgtactttccatttctcttcacattgctatacacttattagacaaagtcgtgtaattttttctattaatatggcatggcaaatgaatcttaatttggtt

SEQ ID NO: 13564 - DNA, 1600 bp, Gossypium hirsutum
  Clone ID: GOSHI-09MAY01-C305_1
tcttaataatacatttgccgtcgcgtggctttgaaataaaatttcgtttgtatttttcgccggtgcaaatccaatggctgcgatcttccaaggagttggagctgccgcagctttgtcatcctcaccgtccaattctttcgattccaagaaattcgtttcctctccttgtagacccttctccgtgaggaaaggagccagctttgcagtggtcagatccgatggaagagtaaatctgaaccctaagggccgaagggcccaacaattgatttccaatgcagtcgcaaccaaatctgatagcgccgctgcttcttcatcctcgaaaccagggcatgagcttttactttttgaagctctgcaagagggtttggaagaagaaatggagagggatccccgtgtatgtgtcatgggcgaagatgtgggtcactatggaggttcatacaaagtgaccaaaggactggcaaaaaaatttggggaccttagggttcttgacaccccaattgctgagaactccttcactggcatgggaattggggctgctatgactggtttgagaccagttgttgagggcatgaacatgggatttctcctccttgcttttaatcagatctccaacaactgtggtatgcttcattatacatccggtggccagtttaccataccaatagtcattcgtgggcctggtggtgttggacgtcaactgggggctgagcattctcaacgtcttgagtcatactttcagtcaatccctggaatccaaatggttgcatgctccaccccatacaatgccaagggcttaatgaaggctgcaatcagaagtgagaaccctgttatcctttttgagcatgttttgctttacaacctcaaggagagaatcccagatgaggattatatctgtaatcttgaggaagctgagatggtaaggcctggagaacatgtcactattctaacctattcaaggatgaggtatcatgtgatgcaggcagcaaaaactttggtgaacaagggttatgatcctgaagtaattgatattaggtcattgaaaccatttgatctttacaccattggtaactcagttaagaagacacatcgtgttcttattgtggaggagtgcatgcggacaggtggtattggtgctagcttgaccgctgccatcactgagaatttccatgattatttggatgctccaatcatctgcttatcttcacaggatgtgcctacaccatatgctggaacattggaggaatggactgtagttcagcctgcccagattgtggcggccgttgagcagctctgccagtagttgcaaatttgcaatagcagtaatagtgatgccatggttgaagttctgttagtcttgtcgtgtttagttcgaaaccagttcccttgcgacttcgttttcgatcatctaattcctgtttcacgagttatgttagtgttatgtttgttgagttgttcgtgggtttaaggcatttagtttgaaataggtctgcactccagttgctgtcacattactacacacttatgagacaagccagtgtgtgtaattcattttgtctaaatttttcttatgaatgtggtagtgcaaataatctcattcttc

SEQ ID NO: 13565 - DNA, 463 bp, Gossypium hirsutum
  Clone ID: LIB3583-052-P1-K6-G11
gctagcttgatagctgcgattaccggggagggggagggggtacttggatgctccaattatgtgcttatcttcacaggatgtgcctacaccatatgctggaactctggaggaagtgactgttgttcagcctgcccagattgtgacagccgttgagcagctctgccagtaattgcaaatttgcaatagcagaaatattgatgcatggttgaagttctgttagtattgtcatgtttattttgaaaccattctcttgcgactttgttttagattatataagtttcacgagttatgttagtgttatgtttgttgagttgttcgtgggtttaaggcatttagtttgaaataggtctgcactccagttgctgtcacattactacacacttatgagacaagccagtgtgtgtaattcattttgtctaaatttttcttatgaatgtggtagtgcaaataatctcatttcttc

SEQ ID NO: 13566 - DNA, 421 bp, Gossypium hirsutum
  Clone ID: LIB3197-022-Q1-M1-D8
gcgccaggttacgcatatccaaacaggcaggtatgcggtcttaaaacctaccgacgctcttgccatagcattatatacgacatgagtcctattttcagtcaataccgggaattcaaatggttgcatgctcaaccccttacaatgccaagggattaatgaaagctgctatcagaagtgagaaccctgttatactttttgagcatgttttgctttacaacctcaaggagagaatcccagatgaggattatatctgtaatcttgaggaagctgagatggtaaggcctggagaacatgtcactattctaacctattcaaggatgaggtatcatgtgatgcaggcagcaaaaactttggtgaacaagggttatgatcctgaagtaattgatattaagtcattgaaaccatttgatctttacaccat

SEQ ID NO: 13567 - DNA, 580 bp, Gossypium hirsutum
  Clone ID: LIB3543-028-Q1-K6-G3
gcgttcgcccagcgtccgcccagcgtccgggaatggagagggatccccgtgtgtgtgtcatgggtgaagatgtgggtcactatggaggttcctacaaagtgaccaaaggactagctacgaagtttggggaccttagggttcttgacacccctattgcggagaactctttcactggcatgggaatcggagctgctatgactggcttgagaccagttgttgagggtatgaacatgggatttctcctccttgcttttaatcagatctcaaacaattgtggtatgcttcattatacgtctggtggccagtttaccataccaatagttattcgtggacctggtggtgttggacggcaacttggtgcagagcattctcaacgccttgagtcctattttcagtcaatacctggaattcaaatggttgcatgttcaaccccttacaatgccaagggattaatgaaggctgctatcagaagtgagaaccctgttatactttttgagcatgttttgctttacaacctcaaggagagaatcccagatgaggattatatctgtaatcttgaggaagctgagatggtaaggcc

SEQ ID NO: 13568 - DNA, 406 bp, Gossypium hirsutum
  Clone ID: uC-gsronu33B141f06b1
ttccatctttctttttcaaaaaaaaaaaaaaaaaaaaaaaaaaaaaaaaaaaaaaaaaaaaaaaaaaaaaaaaaaaaaaaaaaaaaaaaaaaaaaaaaaaaaaaaaaaaaaaaaaaaaaaaaaaaaaaaaaaagataaaaatggcttgagacaaaaaaaaaaaaaaatgaacatgggatttctcctccttgcttttaaaaaaatctcaaacaattgtggtatgcttcattatacgtctggtggccagtttaccataccgatagttattcgcggacctggagggtgttggacggcaactttgaaacaaagaattctcaacgcctagagtcctattttcagtcagtacctggtatttaaaaaggctgcatgtttatccccttacaatgccaagggattaatgaaggct

SEQ ID NO: 13569 - DNA, 403 bp, Gossypium hirsutum
  Clone ID: LIB3146-046-Q1-K1-E3
gcttgatagctgcgattaccgagaatttttacttctacttggatgctccaattatgtggttatgttcacaggatgtgcctacaccatatgctggaaccctggaggaagagactgttgttcatcctgcccagattgtgacagccgttgagcatctctgccagtaattgcaaatttgcaatagcagaaatattgatgcatggttgaagttctgttagtgttgtcatgtttattttgaaaccattctcttgcgactttgttttcaatatataagtttcacgagttatgttagtgttatgtttgttgagttgttcgtgggtttaaggcatttagtttgacctttgttttttcttgactgaaatgggcagcaagacctttaagcagtgttacatgtaaggtactggaa

SEQ ID NO: 13570 - DNA, 966 bp, Gossypium hirsutum
  Clone ID: GOSHI-09MAY01-C335_1
gtaagattcgccaattacagagtgaagatatgctcaaaggaaaggaattacctgtggcatttgtgacattcaaatctcggtggggagcagcaatggcggctcaaactcagcagcacacgaatccacttctatggatcactgaaatggctcctgaaccgagtgatgtctcatggaggaatctatcaattcaatacaaaatcttgcctgtttataaaataggaggcattcttgcagcaacacttctcactattttctttgcagtgcccgtcaccgctgttcaagggattgctaagtttgagaaacttaagaaatggtttcctccagcaatggctatagaattcatgtaagaactctttttcttcagtttccattacctcttagactcaactctaagtctccgatacggagatgtatctggaacgggtatactctttttatggttctttgagttgacatattttattgaaccatagaccaggattatcctcagtggtgacagggtaccttccaagtgcagtcctcaaagggttcatatacattggtccatttgcaatgcttgggatcgctaaactgggtgggtccatctcaaaaagcaaagaggagatcaaagcttgcaacatggttttctattttctggtggggaatgttttctttccgagttcgatttcaggctctctacttgatgagattggagaatatgtcagttatcctaagaatttgcctaaacatcttgctgctctcgtctcttctgaggcagatttcttcatgacatacatcctcacagaggggctctcagggttttctttggaagttctttagccaagattactaatatgggattttataaaatccctgacttactggcgatgaaaagaaaaagatctttatctgtattcactgtaatattaccgggttaatcacattgtgtacctttcaatactgattggcatagtgtatgcagacatt

SEQ ID NO: 13571 - DNA, 521 bp, Gossypium hirsutum
  Clone ID: LIB3582-021-P1-K1-H12
cacgcttgttctaagcaggaggtatgtgaggcatgcaaatctcggtggggagcagcaatggcggctcaaactcagcagcacacaaatccacttctatggatcactgaaatggctcctgaaccgagtgatgtctcatggaggaatctatcaattcaatacaaaatcttgcctgtttataaaataggagtcattcttgcagcaacacttctcacaattttctttgcagtgcccgtcaccgctgttcaagggattgctaagtttgagaaacttaagaaatggtttcctccagcaatggctatagaattcatgattatcctcagtggtgacagggtaccttccaagtgcagtcctcaaagggttcatatacattgttccatttgcaatgcttgggatcgctaaactgggtgggtccatctcaaaaagcaaagaggagatcaaagcttgcaacatggttttctattttctgttggggaatgttttctttttgagtttgatttcaggctctttacttgatgagattg

SEQ ID NO: 13572 - DNA, 971 bp, Gossypium hirsutum
  Clone ID: GOSHI-09MAY01-C255_2
cccacgcgtccgagcacttctgaacaagatggcagtggaaaaggtggggaggaagaagatgatgatagtgacaacgatgatgcggctgaagctgaggacgcagatgagtctgacttggatttggcatggaaaatgctagatgttgcccgggcaatttctgaaaaacaacagttgggcgataccatggagatagcggatattttatctgctttggctgaagttgccttggaaagagaggacattgaatcttcacttggtgactaccagaaagctctatccattttgctacggctggttgaaccagatcaccgtcaaatagctgaactaaattttcgaatatgtatgtgtttggaaattggctcaaagccccaagaagcagttccatactgtcagaaagccatatcagtttgcaagtctcggctggagaggctcagaaatgaagtaaacaattctttagaatcagcatcatctgtcgctgcttctgaattggataatggtgtacaacagtcctcaaatggctatcagactgtttcatctgtcaaagataaagaagcagaaatcaacacacttgctggtcttgctgaagacctggaaaagaagcttgaagatctacaacagctggtctccaatccaaagtcaattgttgcagacccccgcggccgggcatctgccagggcatggggtggtgagaagagtccatcaccttctgtgcttagctcttcacagatggctcctgctaacagtgatggtcattttgattctcctactgtttcaactgctaatacaagtggggttccggcggtcacacatctcggcattgtaggaagaggagtaaagcgcgttttgacaagtacagcaatggtagaatcaaacccgataaagaaacctgcaattgaaccttcatctgacaaaggagatagcagcagtgcgtcttgatgtttcggatcttagatcccaggaataggtaatca

SEQ ID NO: 13573 - DNA, 728 bp, Gossypium hirsutum
  Clone ID: GOSHI-09MAY01-C255_1
gagaagctgggtttgccgctgagggggcagagagaggatcccgggctttcaaagaagatgattttgccgaagccgctgattgctttagtcgcgcccttgaaatcagggttgcgcatcatggtgaacttgcaactgaatgtatcaaggcttactatctctatgggcgtgcactgctgggcgaggctcaagaggaggctgatcctttgggttctgtaccaaaggagggtgaggctcagcaagatgcgaagaaagaagggtcgtttaaaagtgctttaactcgtgaaacttcagttgcttccgtatcaagcacttctgaacaagatggcagtggaaaaggtggggaggaagaagatgatgatagtgacaacgatgatgcggctgaagctgaggacgcagatgagtctgatttggatttggcatggaaaatgctagatgttgcccgggcaatttctgaaaaacaacagttgggcgataccatggagatagtggatattttatctgctttggctgaagttgccttggaaagagaggacattgaatcttcacttggggactaccagaaagctctatccattttgctacggctggttgaaccagatcaccgtcaaatagctgaactaatttcgattgatggtttggaattgttaaaccccaaacagtcatctttcaaaacctatattgcatctggtgaagctaaaatgataccattttgacactcttgtgtgttg

SEQ ID NO: 13574 - DNA, 580 bp, Gossypium hirsutum
  Clone ID: GOSHI-09MAY01-C265_1
cggacgcgtgggcttcaacataataatctcaaggattgggatcagtgttcgtcctccaaaacccagaaaaaagaaggtttcgaatcgacttcaaattctgacaagtaattgttaaaattttgattgagggtccttcggatttcctctggtaaatcctttcagcgctctcaagttggttcccaaagagagggtaaaaagcctgggaatgctggaagatgtgcctcatcgttcaaaattccatttttgaagttgatgagcttacggcttttcgatcctttttcatctttgatgattctggatttggagttattggcgaaccatcactaactctccatgcacagaagcagaattggcatataagtgatacgagagcaccttttctggtattgcgtgaactttgcggagacggttgagctcattataataccagaactacctgctgtgtaaattacataagttgtgcttgccagggttagttgatatctctatatatttagttagttcggaatggaaaataaaccaagtgtgttaaacacaaagtatgaaaatggtcgggtacttggccaaggtacctttgcaa

SEQ ID NO: 13575 - DNA, 1156 bp, Gossypium hirsutum
  Clone ID: GOSHI-09MAY01-C215_1
cttgatttttatttaagttcattgcttgatccatttccatcccagcaaaagcctgaaacagtattaatcgtcgataaaatggaaggacaaggtgaagatgttaggctgggagcaaataagtacagggaaaggcagcctataggaacagctgctcaaacccaagataccaaggactacaaggaaccacctgctgcaccactgtttgagcctgccgagttatcctcatggtccttttacagggctggcattgccgaattcgttgccactttcttgtttctttacatcaccgttttaactgtaatgggtgtcgctaaatcttcaaccaagtgttctactgtagggattcagggcattgcttgggcttttggtggcatgatctttgctcttgtctactgcactgctggcatttcagggggtcatattaacccagcggtgactttcgggctgttcttagcgaggaagttgtcgctgataagagcagtcttttacatgataatgcaatgccttggagctatatgtggcgctgccgtcgtaaagagcttccaaaagacccaatacgaaaggctaggcggcggtgcaaacacggttagctcgggatatagcaagagtagtggccttggtgctgagattgttggtacctttgttctggtctatacggtcttctccgccactgatgctaagcgtaatgcacgagactcccacgtccctatcttggcaccgctgcctattgggtttgctgtgttcctggtccacttggcaacaattcccgttactggaacaggcattaatccagctaggagcctcggcgcagctcttatttacaacaaggaccaagcatgggatgaccattggatattctggttaggacctttcattggagcagccttagcagctttgtaccaccaaatagtgataagggccatccctttcaagtccaagtaagggagtgagggaggaaacaggtgcttgataagcgccagcctacgatgatgtgttctccattatcattttctcttccaaggagtgagtttgatgtttattcttcatctatgtaattaatggtcggttaaggaacgaagcatgggcacctatattgtactagtggtggttccatatcaatggttttctctaatatgaattgaaatgatgcacgaca

SEQ ID NO: 13576 - DNA, 2371 bp, Gossypium hirsutum
  Clone ID: GOSHI-09MAY01-C235_1
cactatataatcctcactttctatcgactcttcccctcacaaaaccctaaacctccaaactccaaaaatatcctctttgaagtagggtttttgtaacttcttttgctgatattcagccgctgtttcttatatctctcttttaatcccataaaaatcataagtcagttttgaaaatctccttaagtcttcttaaactatgggaaaatcaagcaagaaatcaaaccccaaagttgaagcagctcctgctgtagctgctcctaaatctggaaagaaaggtaagagagatgctgaagaaactcctgaaaaacaagtggctgcaaagaagcagaagaaaaacgatggagtggcacaggctattgtgaagaaagaggttgaagctaagactcagaagaagaaggaggaaactagtagttcttccgatgactcttcagaatccgaagatgaacctgcaccagtgaagaaacaggctgctgtcgtgaagaatggatctgtacctgcaaagaaagcaaaacaagctagcagttctgattcttctgactcgagtagcgaggatgaagaagctcctgccaagaatacaaagcctgtagttgctaaaaaggctgctgttccagcggctaagacagtgaaagccgatagcagttcggattcttcttctgacgatgattctgatgaggatgatgaacctgctgcaaaaaaagaagtagcagctgctaaaaatggtgcagcacctgttaagaaagcagagtcttcagattcttcagatgcagatagcagctcggatgaagatgatgaaaaatcaaagcctgctcctaagaaagcaccaactgctgttaataaaaaggagtctagtgatagttcagaaagtgacagctcttcggatgaagatgttaaacctcctccaaagaacgtaccttcagcgactgcaaaggctaaaactgaatctagcgacagcagctctgaggaggattctgatgtagaggatgtacagaaagcacctgctgtgaagaaagcttctgctcctccccccaagaaggttgaggattccagcagtgactcctctgatgacagtgagtctgaggatgaagaggctcctaagaaagaggctaaagttgctaaaaaagcaagcagtagtgaagaggaagaatctgaggaatcagatgatgacgaggaaagtgacgaagaagaagctccaaagaaaaaagacacagatgtggaaatggtcgatgctacaacacctgctaagcaggacttgaagtctgcaaagaaagctccccaaacacctgtaactcctcaaacccaatccacaggatcgaagacactgtttgttggaaacttatcctttcaaattgaagatgctgatgtaaggaatttctttaaaggtgctggtgaagtcgtcgaagttcgtttttcctctgatgctgaggggaactttaagggctatggacatgttgaatttgccactgcagaggctgcacagaaagccctggagttgaatggggaatatttgatgaaccgtgctgttagacttgatttggctcgtgaaaggggtgcatatacaccatacagtggcaatgggaacaattcattccagaaaggtggaaaaggtcaatctcgaacaatattcgtcaaaggacttgatgcatcactcgatgaggatacgatcaggaattccttgcaagaacactttggttcctgtggagagatttctagggtggctataccaacagatcgggattccggtgctgtgaaaggttttgcgtacttggatttcaaagatgagggtagtttgaacaaagctctagaacttgatggatcaaaacttaataatcaatccttgtccgtggatgaggcaaaacctaaaggcgattttggcagtggaagaggtggtggtaggagtggtggatggagtggaggaagggatggcagtggccgtggaggtcgcggtggtcggggaggaagggatggtggtggccccggtggtaggcgtggcggtggtggtcggtttggtggtggcagaggtggacgtggaacaccttataataagccaaaccttgctgctgctggcacaggaaggaagactacttttaatgatgaggattaatgaagttggaggttccaattagctatgtttaattgtttttggtcatgtaccaaaaagaaatggttttggtttagattaagctttgttttgttattatatcttaattaattagcatgttgaatctcacagttttattattatatgccttgtactagaattttcccaacaattttatatattttgcaagtctagtaaattttcccatttgtctagtgtctttctggtatacacgattttcgaaccatttatatattttgcaatatttataat

SEQ ID NO: 13577 - DNA, 636 bp, Gossypium hirsutum
  unsure (1)..(636): unsure at all n locations
  Clone ID: AI055389.1
caaactccaaaaatatcctctttgaagtagggtttttgtaacttcttttgctgatattcagccgctgtttcttatatctctcttttaatcccataaaaatcataagtcagttttgaaaatctccttaagtcttcttaaactatgggaaaatcaagcaagaaatcaaaccccaaagttgaagcagctcctgctgtagctgctcctaaatctggaaagaaaggtaagagagatgctgaagaaactcctgaaaaacaagtggctgcaaagaagcagaagaaaaacgatggagtggcacaggctattgtgaagaaagaggttgaagctaagactcagaagaagaaggaggaactaggtagttcttccgatgactcttcagatccgaagatgaacctgaaccagtgaagaaacagctgctgtcgtgaaaatggnatctgtacctgcanagaaagcaaacacgtaancaggtctgattcttctaatcgagtncgaagatgaagaagctnctgccagaatacagcgtgtagtgctaaaagctgctgtncagcggtanaacgtgaagccatngcattcgatctcttcgacnagatctgtgagatgatgacctgtgcaaaggagtacactgtaaatgtcacactg

SEQ ID NO: 13578 - DNA, 1466 bp, Gossypium hirsutum
  Clone ID: GOSHI-09MAY01-C225_1
cttttcttacgggcatgtgagagggatgcatctggatgtcttcttttgaagggtgcctctttcccagtctccaaaccattttggccaatgatgtgactgagttcttgccttatgcattccagctgttggctcagcttgttgagctgaacaaaccacccatttctccaagttacatgcagatttttgtacttctcctctcccctgattcatggaggagatcttcgaatgttccggcccttgtgcgtctgcttcaggctttccttcagaaggcacccaatgaggtcaatcaggaggggtgactgaatcaggtgctgggtattttcaacatgcttgtctcatctgctagctcagatgaacagggcttctatgtcttgaacactgtgattgagaatcttgagtatggtgtcatatctccatatatgggtaatatttggaatgtcctctttatgcgcctccaaaacaaccgtacagtaaagtttcagaagtctctggtgattttcatgtcactcttcttaatcaagcatggggctacaaatctagtggacacaatgaatgcagttcaggacaacattttcttggttattttggagcagttttggattcccaatcttaagctgattactggagccattgagcttaagttaacggcagttgcttcaaccagactcatatgtgaatctccggtacttttggatcctgcagctgctagactctggggcaagatgctggatagcattgttactcttctttctcggcccgagcaggatagagttgaggaagaaccagaaatgccagatattgcagaaaatgtgggatttactgccacttttgttaaactttacaatgctgggaagagagaggaagatcctttgactgatgtgaaggatccaaagcaattcttagtagcttcattggcaaaactttctgcacttaccccagggggatacccccagatcatcaatgaaaatcttgagccagcaaatcaagcagctttacttcagctttgcggcatttacaattgccaaatagtttgagttgcagggtttttctgttatctttattttggtgcattaccttgagcattcgtttgtcagcaattgatgcttttcgacacaaaagttggaaggattcagatgtggtgatggattttgcggttctactggttggcagcaaagtgagccccccacaatagtttatggatcttgtttggcatgcctatatatatccacaagttgcaggtcctgttgtgttatggtgaaagagagcttgtagtgtaaaacattgccttcaattttccttatttttgaaattacttgaatgctgaaacccaaagttggcaccaggggatgagacttgttcctctgaatcgggtttttgcctctgttgaccggcgttgttttgaaacataacaacttttgtttttgttctgggttataaatgaaagccaaattcaatgtttttttttt

SEQ ID NO: 13579 - DNA, 438 bp, Gossypium hirsutum
  Clone ID: GOSHI-09MAY01-C38996_1
gctggttctacttcgttatcgacacccgaaggtgaagtcaacagcctgatgcagcaggtggctgatgattacggattagaggtctccgttgggttgccaaaccctgctgctcaggctgttccgacgaagactgaagagaagggcgacgaggatgatttgtcaaggcggcttgcggagcttaaagctcgaggttagaatgaaaatggttgaattttatttgaatgagcttgtaatattatgataacattatgatgtttgggattataattgctgcttatatagatcataatctgtttgtaaatttgactgaatttgttgctttacaatgtcattaatgctgatgcccctttagtgtgagttttccattttgcaaaaaaaaaaaaatatattaaaattttattaaatataaaatatattttttttttttttttttttttt

SEQ ID NO: 13580 - DNA, 698 bp, Gossypium hirsutum
  Clone ID: GOSHI-09MAY01-C38956_1
ctactcaccagattcagcaaaatctattgttgttacaaaaactttcccaatcacgttttacttaaaagctatactgccacaactactactttgttaatttactgcaaaaatgaaggtgacgaagaaaaagagtgatgctactgctcaaagagcatggaggctactgcgtctattcttgttatggactagaaaaagtggggtgctcaggagacggcttatgatggagctaaggttggtgcctaagttcctcaagggtctaggacacacatccccttctcctcctggccaaatctattttaaggaacgccagcttttcattcgatgagacacccattttccaggtgaagatgcaccgtcccgcttccatgcgcttccttcttccttgcatgagcactcaggatgtggatttcgattacgatttcggcatcgatggagaggacggagtttacgggtacgatagtggaatcaagagtcactcttgtgaaaagcagggggaggaacaaggaaatgataaggacagggagaggactgcttgtacattaccgctggaggaagaagagattgattccaaggcgggtaagttcattgctaactcctatgagcaaatgaagttgctatgaccaatgaagttcgagacaattctaactgaatcactgaaagcttacagagcgcagtaaggtaccaaatctgatcttttc

SEQ ID NO: 13581 - DNA, 777 bp, Gossypium hirsutum
  unsure (1)..(777): unsure at all n locations
  Clone ID: AI055128.1
ccagattcagcaaaatctattgttgttacaaaaactttcccaatcacgttttacttaaaagctatactgccacaactactactttgttaatttactgcaaaaatgaaggtgacgaagaaaaagagtgatgctactgctcaaagagcatggaggctactgcgtctattcttgttatggactagaaaaagtggggtgctcaggagacggcttatgatggagctaaggttggtgcctaagttcctcaagggtctaggacacacatccccttctcctcctggccaaatctattttaaggaacgccagctttcattcgatgagacacccattttccaggtgaagatgcaccgtcccgcttccatgcgcttccttcttccttgcatgagcactcangatgtggatttcgattacgatttcggcatcgatggagagggacggagtttacgggtacgatagtggaatcaagagtcacttctgtgaaaagcaagggaggaacaaggaaatgataaggacagggagaggactgcttgtacattaccgctggaagaagaagagattgattccanggcgggcgnagtggttgttaaatgtctcttaacgagcgggaaagacttgaagaagaagagctacagcgtatacgacaaagcattggctttttttgcgctatataatnatagcggtttttaaatttttttttgtagtgataatgggctagaatacttttttaccaaaaaatattacatcacggcaaacttcgcattatatattggttgtgaggan

SEQ ID NO: 13582 - DNA, 560 bp, Gossypium hirsutum
  Clone ID: LIB3829-023-Q6-N6-C4
agataggaatggggagatcattattgataaatgggcaaacacttgaatcctcgttagttacaaaaagaataacaaaatcccgcggtgtctttatattttatttaaaaaaaaaagaacactgtaaaagccgcaaactcaaaggaaaaataaataaaggaaggagaagaatgcagagttttgtgacactaacatgcgcctctgttaagcatttcagtgtattccagataagaaatttgtctctgcaacttcatttgctcatagaagttagcaatgaacttacccgccttggaatcaatctcttcttcctccagcggtaatgtacaagcagtcctctccctgtccttatcatttccttgttcctccccttgcttttcacaagagtgactcttgattccactatcgtacccgtaaactccgtcctctccatcgatgccgaaatcgtaatcgaaatccacatcctgagtgctcatgcaaggaagaaggaagcgcatggaagcgggacggtgcatcttcacctggaaaagggtgtctcatcgaatgaaagctggcgttccttaaaa

SEQ ID NO: 13583 - DNA, 1021 bp, Gossypium hirsutum
  Clone ID: GOSHI-09MAY01-C38916_1
cctttcttcacccattctccttcagatttactttctttcttcctttcgttttccttttcttttctatattcttgtttcactcgactttcgtttgtttttatacattcattatccggaatccgattggctttcttttctttttctttttcaatttttttgggcaaaatctggtgctgatttatggtaaaattagggtttcgttttgagtttccctctctttaatatggttccgtggggcggcctcacttgctgcttgagtgcagccgctctttatcttcttggaatcagcagtggcagggatgcacagattctcaagacggtcactcgagtcaatcagcttaaggaattggctcaattgctacatattgaaagtagagtgattcctttaatcgttacaatctccggaagagttggttctgagaccccaattaattgtgaacatagtggattaagaggtgttatagtagaggaaacggccgagcagcattttctaaagcacaatgatgctggttcttggatacaagattctgctttgatgctttctatgagtaaagaggttccgtggtacctggatgatgggacgggtcgtgcatatgtagttggtgctcgcagcgcagcaggttttgcactaactgttggaagtgccctcgcggccgattcaggccgatcaattgtacgtggaacattagactatctccaaggtctcaagatgcttggagtcaagagaatagagcgtgtgcttcccattggttcttccttgactgttgttggtgaggctgtcaaggatgacgttggaacaattcggattcagaaaccccataaaggaccattttatgtgtcccccaaatctattgatcaactcatttccaaccttggaaagtgggctagattgtacaagtatgcttcgtttggactgaccatctttggcgccttccttaaaaatcaccaagcatgcaatcctttatttcttggagagaagacaccgacgggaattgcagcgaagggttcttgctgctgcagc

SEQ ID NO: 13584 - DNA, 475 bp, Gossypium hirsutum
  Clone ID: LIB3543-052-Q1-K1-A1
cccacgcgtccgcccacgcgtccgcacaattcgcatctaattgcttcttcattttatccctctctctttctctctcatccccataatatattaaattaaataaaagcttttaactttactaatttcttgtgtcttggacctttcttcacccattctccttcagatttactttctttcttcctttcgttttccttttcttttctatattcttgtttcactcgactttcgtttgtttttaaacattcattatccggaatccgattggctttcttttctttttctttttcaatttttttgggcaaaatctggtgctgatttatggtaaaattagggtttcgttttgagtttccctctctttaatatggttccgtggggcggcctcacttgctgcttgagtgcagccgctctttatcttcttggaatcagcagcggcaggttgtgttttccgttaccaggcatacatgaacagtgaata

SEQ ID NO: 13585 - DNA, 520 bp, Gossypium hirsutum
  Clone ID: GOSHI-09MAY01-C38866_1
cggacgcgtggggtctcttgatgcgcatgcgcagaaagcattagattgcccttgtgtatctgagctgcggaatggcgcttgcgggactcaatttacagaggctttcctttgttttctcaaaagcactgctgaagaaaagggttcggattgcgtgcatccctttgtagccttgcaaacctgcatcaaaggtaaccccgatgcatttcctaaaaacatcattgaagataaagaagtcaagaaagaagaggaaccaatccaagaatataaaatctatcctcctatatggttcaaggaatctcacaaaccaaaaccaaaaccaaagccggagctctatcactcctgctcattctttttcattgcttatgctatttttgattgataaattgtatcatttaagtcttggttatgaaaagacttgtgtcatctgtgaatagagagagttaaagatgaccaaatttggttgctcacttacgatcattgaaaaacgatcttattgaaataaaaatcaaacttttattgc

SEQ ID NO: 13586 - DNA, 396 bp, Gossypium hirsutum
  Clone ID: LIB3147-001-Q1-K1-C2
cccacgcgtccgtatgaaatgaatgcacataggttttggaggggttaaggttgaattcatcttcagttcagttttcacctttgtccctgccttatgcctcagcatcatgttaatgttagtcggtttacaacataatctagtcttaatctaagttgtgtcatgcaatgcagagtttaacatgccctgtctgggatatacttatatatacaagagaatcatattctataaaaaaaaaaaaaaaaaaaaaaaaaaaagaacaaaaaaaaaaaaaaaagagaaaaaaaaaaaaagaaaaaaacaaaataaacttgagcaggaaaatcaataccaatttaaaagtgtggactaaaaaaaaagggggggcccttttaagggtcccaagtttacttacccttg

SEQ ID NO: 13587 - DNA, 349 bp, Gossypium hirsutum
  Clone ID: LIB3147-001-Q1-K2-C2
cccacgcgtccgtatgaaatgaatgcacataggttttggaggggttaaggttgaattcatcttcagttcagttttcacctttgtccctgccttatgcctcagcatcatgttaatgttagtcggtttacaacataatctagtcttaatctaagttgtgtcatgcaatgcagagtttaacatgccctgtctgggatatacttatatatacaagagaatcatattctataaaaaaaaaaaaaaaaagatcaaactaatgacctagaaaggaaaagaaagatcaacgattactgactaaagatggaagacccatggattaacctaagcttagaagactaaaattattgaacgc

SEQ ID NO: 13588 - DNA, 789 bp, Gossypium hirsutum
  Clone ID: GOSHI-09MAY01-C38706_1
caccaaacaaaggaatcctgcctttctttgtaggagcaatggaaaaaaatgacaatcggaacacacctcaagataaggtaaccaaaaagcaagaggaagacgatgtatctgcctccctttccctttccctttctttcccttttccagagatggagcggaatgtaaaacccgttcctaaaccagagcagcagttgcctgaaagacatcctgtgaatacatcgctgctactattccagggcttccctgaaaaataaggctcctgatgaggagggtcctaggttgttaatgccattacagtttcctacttcatgaatgtggtaataatgtatactactatggccttgcattggggtttgtaggaaaatccacattcccatctgttcataacccatacagaacttagcaattaacttctcatttgtttttttttttggttcttttttttttcgagggcatagacatagtcgcggctgtttgtatataaagagaatgaaagccggcttacttcggaatatcgacaagaaatttgcaaaccaaagccttgagatctggaaaaacccctttttttaaaaaaaaaaaaaaaaaaaagaaagaaaaaaaaaaaaaaaaaaaaaaaaagaacaagtgcaaaaaagagaacaaaattttaaataacggaacctaaaattcaggggggcgcccttaaaaagaaaaacagtttaaccgcgaaaaatcggatgaaaaccaatttaatatggcgcgcaataaataaatctatggggagctggttaaaaatcaaagaagtggaaa

SEQ ID NO: 13589 - DNA, 189 bp, Gossypium hirsutum
  Clone ID: GOSHI-09MAY01-C38736_1
cccacgcgtccgtgcagttctgaattactagaaaaccaagtcaagctcttatttttggtggccataaatttgcacagtgctcatattttcggggttgatcccctgagctaacttctggatgagggtgactagcaaaagaaatggctgttttttcttcaaaaaaactgttggagtaacatcatgatcacc

SEQ ID NO: 13590 - DNA, 422 bp, Gossypium hirsutum
  Clone ID: GOSHI-09MAY01-C38646_1
gaagacgggccgacccgagcgacccgtgtgtgattgaggaatgaggtatctcattttcattacttgtttacttcataataaaatttgcttaagtttaacctctgagttgcatctctgacttcaaacaaaaaaagtgtaaggaatcattgcctccctcccatactcaaaaagtgtaatagaaatcaatttcagaaagctttacagagctgttttaggacttgggattttgtctgttgcaggtttaaacatgttcaccttttctttccatgaaggttccaaatatgctgtcagtttctgtatttaagcataggttaattaaaatttcttaccttttggatttaaaatttcaagttaaataatttatattgttaatatttttcatcccccccacacaaacctctactaaaattcactcaaaactt

SEQ ID NO: 13591 - DNA, 691 bp, Gossypium hirsutum
  Clone ID: GOSHI-09MAY01-C38196_1
caggtattctttgcaggcatgttcttcgtgttctatccagtaataactgtttccatattccagacccatacctgcccagccgttggcgtttgaatagttcgtcttccataaacccattaagcaatgcaacgagagagcactccgaaaagattcagttgctagagtccttgacttcagcactcatagcagagtcagtcgaaacaaaggaacgcctcgatgttgcttgcgagcaaaccgccatggttctttcccgcatcaaggaccttcctaggacgacacaaagtgcaaatgatatcgtattcaattgtccatcggatttgatcttaccagaggtagaagatgcagatggaattgttcaaagcttcacaatggggacttctcatgaacctctcacttcaggaaagctgaaggatagaaggccaagagatgggattgatataactctaaaacgaagacattattctgattcttgctgtgggcatttcgaacatgattcatcagattgcccaatgatggaaggggtcaatttgaatggagatgcattaggatatatttaagttggagcattaaaagcctttagtaggtttgctgacaacaaatgcttgatgttaatgttagttactcttccaaattttagatggaaaaaaaagaatcccataaatccaaatgtaaagatctgtcttaggattac

SEQ ID NO: 13592 - DNA, 381 bp, Gossypium hirsutum
  Clone ID: GOSHI-09MAY01-C38136_2
tcaaaaacaaacaagcaatccttggatgctgatctccaaacatgacgctgatgagctaaacatggacttaagctctaatggtggatcatataagccagtgcgaagatgcgttcgaagaagccaaaattaactccccaataccagaactgcattcgttacttggcaagatgattttcaacagtataaacattggtgttgatatggttgattttgagaacaagaattaattttaaataatctataaatgacatgaattctataattgtttatattttgtaaaaaaaaattattttaatttgaatcccctttacattttgtttcatctatttttccttcctagtacaaaatttatcaaatcaacaattagtctgatattgggcc

SEQ ID NO: 13593 - DNA, 844 bp, Gossypium hirsutum
  Clone ID: GOSHI-09MAY01-C38136_1
cgatggagatgaagcttttaaccctccttatcctcttctccttctctgcatataccgcggccccattagtagctttagcttcatctccttccgagagtcagtcccccagctcttctgaagtccagccaccccaaacagtttcgaaaataccttccaacgccaaccctaagcttaaaaaaatctgtcaagaagttaatcaccccaccgaatgtgttacaacagctggtccattcctaggtgaaactgctgatataagtcccgtgactgttcttcaagctgagattgaagcaattgatagcaaggctaaggaagccttcgcaaaggctacaaaactcgcagcggatcccactacctcaaaaaccatcacttttcccctaaatatttgcattgatggttacaaagccattctcaaaaacaaacaagcaatccttgatgctatctctaaacgtgacgctgatgacctaaacatggagttaagctctaatgtggatcatataagccagtgcgaagatgcgttcgaagaagccaaaattaactccccaataccagaactgcattcgttacttggcaagattattttcaacagtataaacattggtgttgatatggttgattttgagaacaagaattaattttaaataatctataaatgacattaagtctataattatatatattttgtaaaataatttattttaatttgaatgccctttacattttgtttcaaaaaaaaaaaaaaaaaaaaaaaaaaaaaaaaataaaaataaaaataaaaataaaaaaaaagaggggcgggccgcttactagagggatgccaagacttacggtacggcgtgcatggcga

SEQ ID NO: 13594 - DNA, 451 bp, Gossypium hirsutum
  Clone ID: GOSHI-09MAY01-C38086_1
atcggagttggatatgctcttatgattgctcctgtttacacagctgaagtctctccggcttcctcccgtggtttcctcacctcattccccgaggtgttcattaatggtggtatattactggggtacgtatccaactatgcattttcgaagttaccaactgacttagggtggcggtttatgctcggcgtcggagcaatcccgtcggttttcttggctgtgggtgttttagctatgcccgagtcaccgcgttggctggttatgcaaggccgactcggtgaagccaagaaagttctggacaaaacttcggactccattgaagaagctcaacttagactaagtgaaatcaaagaagcagccggaatcccacaagtatgcaccgacgacgtcgttaaagtccaaaaagcgaagccacggcaaaggcgtgttgaaagaaatactattatacccaaca

SEQ ID NO: 13595 - DNA, 827 bp, Gossypium hirsutum
  Clone ID: GOSHI-09MAY01-C38076_1
cccacccgtcccccctatcattgctgctctttgtttcgaacacgctcacttaatctaatgggatgaggttcacagtggacaggcttttgatccagataatccagatcatatgaagtgggtctacgatgaggctgtcaagagagctgaacttttcggcattccaggagttacttattctcttactcagggtgttgtaaaaaacatcataccagccattgcttccaccaatgcaattatatctgctgcatgtactttggaaaccttgaagattgcatcaggatgcagtaaaactctatcaaactatcttacgtataatggtgttgaaggtcttcatacaaaagtgaccgaatttgtgaaggacaaggactgtctcgtctgtggtccgggtgtcctcattgagctggacactacagttaccctaaaaaagttcattgatatgctagaggaggatcctagggtgctgatgacaaaggcgtcgatcacatatcacggaaagaatctatacatgcaggctcctcctgttttggaagagatgacccgatcgaatctagagttacccctatatgatctcatggataaaatccccaaagacgtcctccatgcaactggtacgatcaacaaggatgacaaaaagtcatctggtttaagaaaattacgagttgttttcaagggaatagatggggttgcagatatggatatggctggtggtgcatgatcctcgcaatataaaatcatactgatattgttagacaaaattttcaatcatctctgcagtatttatggaagaatatatgttgggatccagttactattacattttgaacttt

SEQ ID NO: 13596 - DNA, 533 bp, Gossypium hirsutum
  Clone ID: uC-gsflmaxxa090d06b1
acccacgacgtccgcccacttttttcgcatcttacatacagggtgtatgtaaaagagagaggggtattatttaatatgcttccatcagatgcaacctatatactgctgcatgtacctttggaaacttttgaaagattgcactcaggatgcagtaaaaactctatcaaactatcttacgtataatggtgttgaaggtcttcatacaaaagtgaccgaatttgtgaaggacaaggactgtctcgtctgtggtccgggtgccctcatcgagctggatactgcagttaccctaaaaaagttcgttgatatgctagaggaggatcctaaggtgctgatgacaaaggcctcgatcacatatcacggaaagaatctatacatgcaggctcctcctgttttggaagagatgacccgatcaaatctggagttacccctatatgatcttatggataaaacccccaaagacgtcctccatgcaactggtacgatcaacaaggatgacaaaaagtcgtctggtttaagaaaataaccagttgttt

SEQ ID NO: 13597 - DNA, 454 bp, Gossypium hirsutum
  Clone ID: GOSHI-09MAY01-C38396_1
gcaggagcaaaactctgataagacactttggaaacttggaactcttcctgttggccttttagctttctacgggctgacagaaccacttgatcggagatggcatgtgttaggtttaggttacgatcttaacatcgacaaccgcctgatcgagagtgcagcagtcattcacttcaatggaaacatgaagccatggctaaaactagccatcggaaggtataagcctctatgggaaaggtacataaatcttagccacccatatctccaagaatgtgtcacaagttagacaaatgtgctctgtgctctatttttggttccaattgctcgacctccaatgatataaacccatgaaaaggccgatcgcggaaattcttttttgacattgttaggagatttgacatatcttttttggtagtttttttttttttggttcatcataagatcttgaaaaggaaaa

SEQ ID NO: 13598 - DNA, 483 bp, Gossypium hirsutum
  Clone ID: LIB3584-048-P1-K2-F1
agtgattacatggcatagaaggcaattttggtgcagggtttgaaggatgttggttttaaagtattcccatcaagtggaacatactttgttgttgtagatcacaccccttttggtctagagaatgacattgcattttgcgagtatctgatcaaggaagtctgagttgtggcaattcctactagtgtattttacttgaacccggacgatggaaagaatttggtcaggtttaccttctgcaaggatgaagaaactttgaggtctgcagttgagaggatgaaggaaaagctgaagaaaaagtgattaaatgtatcggaactaggtttatcggccaaggtatgtgactagatttggctatgagaacttgtaatccttgacaatcaaactggaggttgagtaatgactcaaaccaaacctatgaattctattattcgaataaaatgagttgtgtatgaaatataatgcttctgttgcttttgaggatag

SEQ ID NO: 13599 - DNA, 386 bp, Gossypium hirsutum
  Clone ID: LIB3145-053-Q1-K1-E12
cggagttgtggcaattcctactagtgtattttacttgaacccggacgatggaaagaatttgggcaggtttaccttctgcaaggatgaagaaactttgaggtctgcaattgagaggatgaaagaaaagctgacgaaaaagtgattaaatgtatcgcaactacgtttatcggccaaggtatgtgactagatttggctatgataacttgtaatccttgaaagatcaaactggacgttgagtgatgactcaaaccaaacctataaattttattcgaataatagaattcatcgtaagagtgacttcatgctgaattgctgcatctcaagaagttgaggcggaagagactattgtaaaactaaagcatctggaaagccttgtttaggagctg

SEQ ID NO: 13600 - DNA, 659 bp, Gossypium hirsutum
  Clone ID: GOSHI-09MAY01-C38306_1
aggggctatggaaaggtggagttgggcgagttgaggaggttgctgtttagagatggtaatggttaattgagggaggggagctagtgtatagacgaggcaaggtgttgaatggtgaaggcagtggggtgcttgattggtgttggtaacggaggttttggcttctgggttagctcagacaaaccaagaatcttgctgtgctactgctgtcttctttttttctgaaaattttgctaacgtccacttcttcttgttgcagggtgcttataacggagcactggcgtgggactttggtggaagctggtgtgtgcagcagggtggttgatgggatttgtcggcagagggtatggtggtggcagtaatcggttgatgagatggtgactatgtgagggaccgaaatgcataatttgtgaaagtcaaagggctttttatatatacataccattgggttaaagcccaaaacttttaaaacatgactcaatttaaattaatgcaataaaaattcttctaatctaaataattagtggcttggcttaaatcacttttcaagagcaaatttttctattcaacatgatagaagttttatttatttttcttgatgattattcattctagagctaaagaaaaaaagcaaagattagtaggtgatgctgatggcaact

SEQ ID NO: 13601 - DNA, 633 bp, Gossypium hirsutum
  Clone ID: GOSHI-09MAY01-C38236_1
ggaaaatcttttcactggttaccagaaactgagcaggaaatccgatttgcaaaaaaagaaaaaaatgaaaggaatagaagtagattatatttatagctagagttagggtttccttgattctgggttttccacttttttcctccttttgtaaagggaaatttagaaaaattaaattattttaattgtttttttgtaaaggaatttagaaagagtaaatggcagatggttactggaatcggcgacagccaaatcctccgatgctctcttctggtgggatgcttaaacgaccacgtactgattacgatgctccgccctctggaccacgttcagcccttgagatgcctagttatttggcaagagatgatgatcatggtgggcatctgtctgtgagggatacaaactctattggatcagcatatgatcgttatctccagagtgcaaaactttcttcttttacttctggagaagctagtgcatttggtgggtcaggaagggctgttggtggtgcaatgcctgttcatccaatagctgatcctcccctgatgggtcgtcttggatctgctgctccagatctgtcaccaaatggtcataatatcggttatagtggtcaacatccagtggatgcaattgcaa

SEQ ID NO: 13602 - DNA, 412 bp, Gossypium hirsutum
  Clone ID: GOSHI-09MAY01-C39816_1
tgaagaaagaaatgatgtctccacatattaggaggatggctcagcctcctgtaggcaatgcagaagcaaggctcgatcaaaacggtttagtggtgaagtgttgcttcgtttgaagatcgtcgcagttgtatcaacataatgtatatgcgatctatacgctagatacatccagcgcaccggcttagcaccatcaatatatatatgcttcctctgtatggcaaagatgtccctggctccacctaatggtggttaaataaagcgaacttcttaatgaagtgatgacatttgtcaatttatgacttgtgctcgctgctggtatccatgatatgttaggtggccacccattttgttttcttggttccctgggttttggttccatttgatgtaattataatgtaatggaggacaacat

SEQ ID NO: 13603 - DNA, 950 bp, Gossypium hirsutum
  Clone ID: GOSHI-09MAY01-C39516_1
gatcgatcttcttctgcagagttcagttttcgtataatagttagcgcatctctttcaactcatacatcttgaaaacccagctcttctgccatgacaatagcttgtaaacacgcccttgcctcggccataaatggatctgaaatattatcccatggaaaggtacaggctgccataggcaaaccctctttatcacgtgcaatgattcctgaaatagagcttcttgtgattcgattaaatgaggcgtcgaaattaattttgatggtgtcattatccggtggtttccagactgagtctttcatgtcatgtgtattctgtaatatctcccccatactagaaatttctgtatagtaagccttgataaatccaacaacttcatgtacctgctctctgactctttcatgatatagcttgttgcgattataccagatggcccagtaagcgatagatttgattttgcatgcttccagactcttattttcaaaatccgctactaaccatgttttccaattggcttctctgttgcatgttgaaaatggcatctccgaaccccgcaaaacctgctgtgtgaaggaacactccctaaaaagatggtccaccgactcctcctcagatctgcataccgggcataaaggattgacagccaattgacgagcttttagattatgcaaagtgggtaaatagttgttagcaattctccacataaaaatacgaattttgcatggcacttggagctcccataattttgtaaaaaaattagtaggaagttcattatgtattctagtacccccctctgtaattagccatctgtatccgctcttagctgtatatgtcccagtattatcccctcgccataccaatgcatcttgtggtctactatttgccaatggaattgtgagaatgcgcttcaactaaaaaaaaaaaaaaaaaaaataaaaataaaataaaaaata

SEQ ID NO: 13604 - DNA, 552 bp, Gossypium hirsutum
  Clone ID: GOSHI-09MAY01-C39536_1
gcaaatgaattcacttgactcgacatatagagaaatctcagacatatatgatgtaaatggaggaaagggtttatctagaagttgtatccaaaagcttccaatgcaggaatttcattctattgagaggatcaaatcaagggaggaatcttattgttcaatttgcatacagggattagtccgtggagaaatggcaagaaatcttcccagatgtgggcacgtctttcacttaaagtgcatagatgaatggctaagcaggcaaggaacttgtcccatgtgtagagagcatgttcttgacgatgatggtgaagaagtgtaaatcaggaaattttgattcacaaaaaattgagttttccttttttgttctgaaatctggtgtatatatagagtcatagaccattgcacaagggttttgtagcaactttttgatatttcaaagcagtaaagtagcggtgatattatatattattcagatttagattgaagtcttaattttgggtattggttcaatatatttaaaatatttgaatggtcatattttttcatacattgatg

SEQ ID NO: 13605 - DNA, 394 bp, Gossypium hirsutum
  unsure (1)..(394): unsure at all n locations
  Clone ID: LIB3147-010-Q1-K1-F5
ggccgaccacgcgnccgcccacgcgttcgcccacgcgaacggcgggttttggcatgaaatacactcagacgggggcgcgtgtttctcttaaagtgcatagatgattggctaatcatgcaaggaacttgtcccatgtgtagagagcatgttcttgacgatgatggtgaagaagtgtaaatcaggaaatgttgatttacaaaatactgagttctccttttttgccctgaaatccggtgtatatatagagtcatagaccattgcacaagggttttgtagcaactttttgatatttcaaagcagttaagaagcggcgatcttatatattgttccaaacttacatactcgttctttcaatgttttatttttttttttcattgcctccttaaatttaatt

SEQ ID NO: 13606 - DNA, 806 bp, Gossypium hirsutum
  Clone ID: GOSHI-09MAY01-C39526_1
gcgttcgaaagagtctctctattgtctcttctctttcattgattctcatccagtccagccatggcctacataacttgaatccttcaatcttttaacttttcattgttctttcctgtcccaacgccctcatccaatttgtttgatagaggcgttttttatatttgaaccaaaaaaaaaaaaacgatcactgttttttctcctacgcagaggagagattaaatcactgtttccgaataatttggagtaagcttttcaaagaagagaagaagaatccaagttttctcaacgaaaatggggctgatttcggggattttgctggggataatcttcgggatttcattgatggctggctggcgtcatatgatgaggtaccgaagcaccaagagaatcgccaaggccgctgatataaaagttcttggagctctcaacagggatgatcttaagaaaatttgcggcgataattttcctgaatggatatcttttcctgtctatgaacaggtgaagtggctgaacaagcaattgagcaaattatggccttctgtagcagaggcagcatcagcagtcatcaaagaatctgttgaaccactcttggaagaatatcgacctccaggaattacttcactgaagtttagcaaattgtctctcggcactgttgctcccaagattgaaggtgttcgtgttcaagccttaagaaaggttcaatcacaatggatattgatttccggtggggttggtgatcaagtataattttaggtgttgaaacagcacttgttgcttcaataccaattcagttaaaggatcttcat

SEQ ID NO: 13607 - DNA, 411 bp, Gossypium hirsutum
  Clone ID: GOSHI-09MAY01-C39486_1
cccacgcgtccgggggaaggggttctctgctagggtttcgaccctagcaccctcatgccgccgccgtcgtgcccaccgtgaagccatcgcgaatggcgcccgaaaccaggtgcactggaggagacgtgcgtggcgtgcgtggagggcgataaccgctggcacacacgcgcggaaaggcctggtggttgcggcgctggctggggttgaatgctattagggtttggttttattttttggtgaaataagcttagggttagtggtttgggtctttataactattgggctaggtatcgggcctctgtaactgggtttgggattaggttgatatgttgagctaaaattttgtaatttggattgcgtttggactttacattttttttgggtatttaattttatttaattaggttttgg

SEQ ID NO: 13608 - DNA, 240 bp, Gossypium hirsutum
  Clone ID: LIB3147-009-Q1-K1-H3
cggacgcgtgggcagaggggaaggggttctctgctagggttgcgaccctagcaccctcatgccgccgacgtcgtgcccaccgtgaagccatcgcgagtggcgcccgaaaccaggtaaatcgcttttttgcttcttattatgattttttaaaaaagtgtgatacaaagagaggacaaacaaaggacgacaactctgagaaaaaaggacaacaaagaccttcaaatcgctctttgattctct

SEQ ID NO: 13609 - DNA, 608 bp, Gossypium hirsutum
  Clone ID: GOSHI-09MAY01-C39756_1
ataaacctcaatatatatattggttggagggtcagggttttgagagtaaattgaccttggagagtgatgtagattctggagtatagatatataaatatgtgcatgtaagagtttggagatggattaaatataatggggggtggggtggctggctttgcagattcccaagggagtgggggtgttggtttgttacataaatatattggtgagagaaagttagggaaaagaaaagcatgtttaatatttagaggaagtcataaggtgtgaaaggctagaagaattgattgttgaacgaacatatgaaagggtggggaggagatggcgggtcccttaaccacagccgaaagcaaagcagaggaaattttctgagatgggtttggcggatttacgggttcaacgttgaagcttgagctgttttttgtggtcattgagatcatgagattgattaaagtccagcttcccatctgatgatataaattaaatatcaaaaccaaaggaacaatttatttggggtttttttcgagtggattgtgtgttcacgcgtttggcatgtgtggcacgcaggtgtgtatgtgtgctttttggcgggaaatgcctctttctgtgtg

SEQ ID NO: 13610 - DNA, 618 bp, Gossypium hirsutum
  Clone ID: GOSHI-09MAY01-C39776_1
gcaaatttcgctcatttgattgttttattttgattaaaaaaaaggtgctttacaagcagaagaagagccagggtacctaagggcaacaggctgttggttagcatcactgttttgggaagtgctgggccgatccgtttcgttgttaacgaagaagactggtttcttctgttatagatactgctttgaaagcctatgctcgtgaaggtcggcgcccggttctaggatccgctatcagtggtttcttcctttattgccccagtgctggatcagatgcactgaatccatgggagacaattggatcacaaggggcaaggaatttcattttgtgcaggaagccaagcaatgagaaaatggaagatgatggaagatcagcaaactcagttactgggaaaggaagtgggaattggaaggcatggatcaacaaatcactcaatcttaagatttcttctcattattagataattctcataccctttatcatcgtgtgcttcttgggctagctttactttcaagctaaggacttgtacaatggatatgaccatgttagaatcttggttatcatccatgggatgtttattcaggaataaaatcaagctgttattcggtgtttttgctttg

SEQ ID NO: 13611 - DNA, 347 bp, Gossypium hirsutum
  Clone ID: GOSHI-09MAY01-C39156_2
aattgagacggcaacaggagcgaagaaggactgcttcggcttcattgaagtgatcgttcacaaggatgatactagcaaagagctgttggagtggggctccagggtttctgctgcgaatagccgacccccaaatcctcagtaaattcttggcgctgccttcagcacatgatgctttatgctttgacctatttaagttgatgaaaatttatggtatgaaagctgagtttttcaacatttttccaaaatttgcggagtgcttgctcatatttgtgtacatcactttcaacgtcgtttccggtaatgaatgctatgttctggtttttttaatgctatgttcccgttttttt

SEQ ID NO: 13612 - DNA, 992 bp, Gossypium hirsutum
  Clone ID: GOSHI-09MAY01-C39156_1
gctggacctatttacaatgattatagctctgttgggtgctgtttgcttcttaagaaagagaaggcgattattgtgcagcctgatcgggtggtcattggtaatgggcctgcatttgggtgtgttttgatgaaagacttcctaagagagcttgccaagaggcttaagcacaataatactgcttatgagaattaccataggatttttgttcctgagggacaacctttgaaggcagcacctaaagaccctttgagggtcaatgttttgttccaacatatacagaagatgctttctagtgactcaccgtgattgctgaaactggggattcttggtttaactgccagaagctgaagttgcccgccggagcccgcgcggccttccaaatgcagtatggatcaattgggtggtcagttggtgccactcttggatatgcacaggctgttccggagaaacgtgtcatcgcttgcattggtgatggtagtttccaggtgaccgcacaagatgtgtccacaatgctgcgatgtgggcagaagaccgtaatcttcctcataaacaatggtggctacaccattgaagtcgagattcatgatggaccatacaatgtgatcaagaattggaactacactgccttggttgatgcaattcataatggtgaaggcaagtgctggacagccaaagtattttgtgaggaagagcttatagaagcaattgagacggcaacgggagccaagaaggactgcttattgctttattgaagtgatagttcacaaggccgatactaccaaagacctgttggagggggggctctagggtctctgctgccattagccgacccccaaatcctcagtaaattctacagttggctttttgctttaacctttggagtttctgaatgcagagttaaaaatctgtagttttcaacattttgcaaaatttacagagtgcttgctcatcttgtgtaaattcattttcagtaatgaaagctatattctgtt

SEQ ID NO: 13613 - DNA, 608 bp, Gossypium hirsutum
  Clone ID: GOSHI-09MAY01-C39106_1
ctcgtcgcaagaacattggaatctgcgtgctcacgggatctgggaccgtttctaacgtgacgctccgtcaaccttcttcagcaactccgggagctaccataactttccatggcagattcgacatcttgtccctctccgccacgttcctatcccaaacgacgtcgtgtcatgtgcccaacaggttctccatctctttggctggtcctcaaggccagatcgttggtgggttcgtagctggctcgttggtagcagcgggcaacgtgtttatagtggctgctacgttcaacaacccttcgtaccatcggttgcccgttgaagaagaagcgaggaacgcggggtcgtctggtggtgccggtggacagtccccacctttatccggtggcggcggggatagtagtcacggcggtggggcagattcttgtggggtttcgatgtacaacaatcacatgggtgggtaaaatgtcattggggctccaacagttaaaccaccaccacggccttactaaggacttacaagttttttttacctttttgggttttttttaaaaaaaaaattttattttttgaagccccggggaataaaggaaggttaaaattttttccccttt

SEQ ID NO: 13614 - DNA, 1421 bp, Gossypium hirsutum
  Clone ID: GOSHI-09MAY01-C39086_1
gcgccctcgcttgcgcccacgcgtccgcttttatctcatgaaatgcaagagtttctcctctttttgataaatacttaatttcgcttcatttgagtcttctttcttaaatttcgtctaaaaatcctctcccaatttcatttccaaagcttttcaattctcttgattgttcatatattataaatttcttctttttcagccatgggtgttgcagttctaaaaccagacgattgtttgaagctaccaaatcccgtgaaacaacgaaatagtctttgccttaatccgaaccgatcgaatcggtcacacccaaaccgtaaaactcggtctcctaccacctcccctccttcccagtccgccggccccaaggtaccgcctaaagatctcgtgatgggtcaagttaagatcctcaaacgcggtgaggttctaaaaaaaccgacgccggagaagtccgtcaggttcgaaaaggaaaacattgacgttgcagatctgggttccactaaccgtttgggtcctgaacccggttccgttcctacccagatccgactgaccaagtcaaacaacaattagaaggtcgtcccagcctctttttatgctgggtcggcctttataacctcgccgcctccgagttccgtcccgatgccggtgttttgcaccaagaagatcagcgttaccgtaaagaacgacgacgccacgagcgacttaaggaggatattaaggctcgatttgtagtcatacccagaaattaattcgtgtcagtttctcgttttcatcgtttgggttctctcttatatttcgatcatcccttattttttcaaggggaaagatcgaaacaggagtaggttttagcttttcaaatagtgttctttatgttgtatagcgtaacttgggtcttagatttgctgatttgcttggtttagaatgcaaaggtgtgtctgggttttcgtctataaactctcagtcttttttttttaatttcctcacagaaaaatgtaatttctagtttgggaaaaaggatatatttggtgggttatcatctgaattaggattagtctaaatttcgtttgattgatatatgtataatcggttattgatttgttagtgaagttgcgtttgatttctgtgttaattattgctgttgtttcggtggagtttcgataaccaaagattactgctacaagagagtatttggaataatcatagttcggaattttatacgatctctggaaatgatgagggaagaaggcgtttcctgtttaagggtctgaaaaacaaatcaaaagatgatagattgatcccccatcaaagcttcccaaactgtacggaatgtttggagtaaggtttctaaaaaagagctgtaatagaataggcctataattagtaattcaattgttgtaatagaatttacaaaaaaaaaaaaaaaaaaa

SEQ ID NO: 13615 - DNA, 447 bp, Gossypium hirsutum
  Clone ID: GOSHI-09MAY01-C39076_2
gtgcggacgagatcatatggcttacagatctgcttatttccctgtcaaggatgtgattgatggggatttgtgtgagcagtttccgaccctacctctggatctgcagagaaaaattgcagacgagttggaccgtactcctggggagatactgaagaaactcgaagaagcccgaaacaagatcatttgagatagcagatagcatcaaaggtcaagttctcttttacccggattgcgggataccaattgcggttaagaaggctttagcacgtcggaatccaaggcagatgagggagaaattgggacgatggagtcgaaagtcgagaacacgagaccaagaatgggagtattgtataagtagttatgaggcaaactaggtgtgttagtggcggcaaaaaatcagtattagctgctgcagattcgagtatttgctgctgttattgcagtttt

SEQ ID NO: 13616 - DNA, 869 bp, Gossypium hirsutum
  Clone ID: GOSHI-09MAY01-C39076_1
gggacatccaagagtcattccatttttgcaagtataggagggatgaaaatcaactgtatatattcgctgatgatgttggtcccagatggcttactgcatcataccatatagatttcgacaccatggctggtgcagacaagttcgggaatgtctattttgtgcgcctaccacaagatgtctcagatgagatagaggaagacccaaccggtggaaagataaaatgggaacagggaaggctcaatggagctcctaacaaggtagaggagattgttcagttccatattggagatgtggtaacttgcttgcagaaggcatctctgataccaggtggtggagagtgtgttctttatggtacagtaatggggagcttgggggcattgcttccattcacttcccgtgatgatgttgacttcttttctcacctagagatgcatatgagacaggagcacccgcccttgtgtggacgagatcatatggcttatagatctgcatatttccctgtcaaggacgttattgatggggatttgtgtgagcagtttcctaccctacctttggatttgcagagaaaaattgcagacgagttggatcggactccaggggagatattgaagaaacttgaagaaatccgaaacaagattatctgaggtagctaacggcatcatgtttaagtgtacctggagttgtcagcacgagttgccggtagtcagtcgtggtgtcacagttgtgaggagcaattgcctgaggcaagtcaagttgaaaacgagaggtaacgagtcaagtcgagaaggctaggcaactgagggggataattttatataatcaaacaaaactagttggcgttagaagcaaaaattagtgttagtattcgt

SEQ ID NO: 13617 - DNA, 504 bp, Gossypium hirsutum
  Clone ID: GOSHI-09MAY01-C39006_1
aaacttttcacttgtgccagtgagaacaatggaggaaaatttgcatacgtgcatgttgctgtagcatactatattatgattcgacggagggatatataatttttttagtgatgtagtttttgaaactcttggcagggaacttacaagtgtccaaggtctatcagactggttggattctgcatatagttatttggcaatggttaattacccgtatccttcaaactttttaatgcctttgccgggacatcccataagagaggtctgcaaaaagattgatgggtctcctgccgggtctagcattctggagcatatattcaatggagtaagcgtatattacaattatactggagaggttgactgttttcaacttgatgacgatcctcatggcatggatgggtggaactggcaagcatgcactgagatggttatgccgatgtctagtgatcgaaacactaacatgtttccagcatatgattgggattactctgctttccgagaagggtg

SEQ ID NO: 13618 - DNA, 629 bp, Gossypium hirsutum
  Clone ID: GOSHI-09MAY01-C39316_2
atgctactgaagcaatgggtgaatcaaggtaacctgacattcttaatactatgggaacacttgcttttcgcgtgggcggccgcgtggggttttgggcggctgcatttagcacacatcagttggaagcagttgaaggttgggagcagattgcctccactgcttttgaacattttgaacaggagggcaatagagtaatctcaattgaagaattggcacgggagttgaatgttggcccttcagcgtattcattcctcaaagactggatcagggtctcggatggaaagctaagcttgcttggatataccaaatttttacatggtgtggcgcttcgcagctcaaatacaagacatcattaatctatagccgttgatatataatcttaaaattcatggcatttagaatgacttgtgataatttttttttttttcaaaaattatttttggtttagggggaaaaaatgtgcataagtgaatattgttagtgagattgtggaggaaaagttacagtgagaggattgattttgctcatgtcccattttttgcttatcgtgcatgtatgaatgtgggtgtcgggcttccagattttgagctttgaattaagattacttagactaaaagtcgacgcggccg

SEQ ID NO: 13619 - DNA, 1182 bp, Gossypium hirsutum
  Clone ID: GOSHI-09MAY01-C39316_1
gtcattttgtcatcttcaggtgttgtgcatcgtgacttaaaaccagagaacttcctttttacttccggtggtgaaaatgctgacatgaaactaattgattttggtctttctgactttattagaccagatgaaagactcaatgatattgttggaagtgcatattatgttgctcctgaagttttgtacagatcttatagtatggaagcagatatatggagcatcggagtaatcacctatattttgttatgtggaagcagaccattttgggcacgtacagaatctggaatttttcgttctgtgctaagatcagatcccaactttgatgatatgccctggccatctgtctctccagaggccaaagattttgttaagagactcctaaacaaggatcaccgaaaaagaatgacttctgttcaagctctagcgcacccttggttgcgggatgacagtcgtccaatccctcttgatatattgatatataggttactcaagtcataccttcatgcttcaccattgaaacgtgctgccctaaaggctctttcaaaagcattgactgaagatgagctggtttatctcagggcacaattcaggctgttggaaccaaacagagatgggagtgtgtctctagaaaattttaaaatggcacttgctcaaaatgccactgaagcgatgggtgaatcaagggtacctgatattcttaatgctatgggattgcttgcatacaggaagatgtactttgaagagttttgtgccgctgcaattagcacacatcaattggaagcagttgaaggctgggagcagatagcctccgctgcttttgagcatttcgaacaggagggcaatcgagtaatttcaattgaggaattggcacgggagctgagtgtaggcccttcagcttactcattcctcaaagactggatcagaatctctgatggaaagcttaattttcttggatataaaaaaattttacatggcgtgacgtttcgtagctcgaatacaagacttcattagtttttttagccatttagccattgattattatacagtgtcttaccattcatgacgttttgatttgactttttttcaaacaatttttagccgttcatattatttagtcctttaaaatttataacattttgaatgacttgtgggggtttctttggtttttggttttttttttaa

SEQ ID NO: 13620 - DNA, 463 bp, Gossypium hirsutum
  Clone ID: GOSHI-09MAY01-C39266_1
gaagcctaaagtcggcagttgattttaattctgtccaagtcccccctagccaccctctcaatttcgatgagactatactagaggacaatgcgcggcctttgccatcaactgaagttgatgaaagccaagaagttatatccgatgagccaatggcttcagaagaacatgatgctgaaaaagccaagtcaaaatctactacaagcaagcaaaacgagaagttatatgcagtagaaggtatgtttaacccaaaaatgaagagggcagagaaaaagagaaagaaaaaagccaaaaacaaatcaacattagggggtgatgccatggatgatgaaggcgactatgactttggtgtggattatgtgaaggggaagggtcaaaatacttgtggggtgccaatgtcaggtattgaagttgatgagtagtaagaaactaaacatacctggaaatctcaaaatggctcatcttt

SEQ ID NO: 13621 - DNA, 453 bp, Gossypium hirsutum
  Clone ID: GOSHI-09MAY01-C34916_1
gctgaacgggtctatcgtgaactatccaccatactagagggagaagcagacctggagtgggcctgcattatggttcaggccttgaatttgattctactcacttcttctgagctatctgtgcttcgggaacttttaaaacagtcacttgttaatgctgctggaaaggatttgtttgttggtctttgtatgcttcatggtgccattcacccatggccattttaagtctttgtttgttggcacaggcatatcagcatgcaagtgcccgggttcagtccttggttgaggaagatattaatgtcaagttcttggttcaccttgataaattgattcgcttgctcgaaactcccatctttgcttatcttagattgcagcttcttgaaccaggaaggtatatatggttgctgaaagcattgtatggtcttttaatgttacttccacagcaaagtgctgcat

SEQ ID NO: 13622 - DNA, 473 bp, Gossypium hirsutum
  Clone ID: GOSHI-09MAY01-C34906_1
tgacttgccttgacttccactttcagacatcttctccctctcttcgcttctgatttcactttcagatggattggcaagggcaaaagctagcagagcagataatgcaggtgatgctattggtatttgcagtggtttcatttggtgctggttatgtgttgggatcatttcagatgatgatgctcgtatatgccggtggcgtgaccctcaccgctttgattactattccaaattggcctttcttcaaccgccacccactcaagtggttggatccaagcgaggccgagaagcatcccaagccacaggtagctgtgagttcaaagaagaaatcctccaagaagtagggtcattttggtttcatcttagcatcattagaaagttgctaggggtatgaattgatgttttctgccttctttccatctagtcggctaggtttctcaaagtttttgaactataataaacaattagtttgagag

SEQ ID NO: 13623 - DNA, 880 bp, Gossypium hirsutum
  Clone ID: GOSHI-09MAY01-C34856_1
tccgattttccattctcttctaagcagcagtggttctcccttcctcaaagcttccggctctcctcctcatctctgcctcaccatttctgtctctcagcttcgtcttccttctccatctttctgctccatagatctgtcgaggtctagagacaatattgagacaaggtcatagaggaggatagaaaatatgtaccctggtcgcgatgcaggttaataactcatggagtgttgtgaagagactacctgtgagggcggactcttcctacagttgggggctggcatttaaagcaggcggaaacaatttactagtaataggagctggaggtcatggagggcatgatgatggagtaaatgttctgcattcttagaatccagaggagagaaacagggatggacaagagtggaatgtgcttgctgtcaaggcacgggcaggtgcttttgtgtataattgtgcggtaatgggctgttaatgagagttgccgcatctttggtgcaaacatcgacatctggaagaccaagatcaacgatcttctatctgttataatttttattgtctcagtatcattaattttattgttctttttcccattttatgattcagaagaataattgacctcgaatcaatttcttaaagttatcaaccgaatgtgttgatccctctattgcaagcattaacctcaaaccaagtaatgactagttccatttatcttgtaaaaaaaaaaaaaaaaaaaaaaaaaaaaaaaaaaaaaaatttttttgtcttatttttaataaaaaatcataattactaacgcttttatgctacataatatcttatttttagcgccatctaaaataaattctttggccggcgctgtacaaagtctggactgggaaaacc

SEQ ID NO: 13624 - DNA, 230 bp, Gossypium hirsutum
  unsure (1)..(230): unsure at all n locations
  Clone ID: LIB3147-006-Q1-K1-C6
gatccctctatctgttataatttttattgtctcagtatcattaattttattgttctttttcccattttatgattcagaagaataattgacctcgaatcaatttcttaaagttatcagccgattgtgttgatccctctattgtaagcattaacctcaaactaagtaatgactggttccatttatcttgtactttggcattgaattcatttctcgtaattgcttttaanana

SEQ ID NO: 13625 - DNA, 775 bp, Gossypium hirsutum
  Clone ID: GOSHI-09MAY01-C34836_1
ggcgtcttccaagaacccaaaccataagagcttagttggcatagattccaaaccttcaactctgtcagtaggtctggtgaactcgaatggggatttcaaagagccaaaggcaggaactaatcaggagatgattcataattccgttgcctattttgcagatatttgcagaaaagaaaatcagatgatgaagcaagctcttctagctaacctggcatacgtagagttagaactggagaatccattgaaggctctttcagcggcacgatctctcttagaactacctggttgttcaagaatctacatctttctaggtcatgtctatgcagcagaggccctctgcttgcttaacaagcctaaggaagccgtggagcatttgtccatttatttgtccggccccaataaggttgaatctccattcagtcaagaagactgtgagcagtggctaacagaaaaacccatcgattgtgaagaaccaaacggaggaggaggaggagcagcaacagctgccaagaacccttcccccgagggcatgcaggaattcatgtttcttaagccagaagaagcatgtggaacactttacgcaaatcttgccgcctggtacgcaacacaaggcgaactagatcgtgcccaccaatgaacgacacaagcattatcgctactacccaacagggctgaagccaccatgagccgcaatttacatcgatctcgtgctcggtaaggcacaagaagctctatccaaggtaaaacgttgtagtcatgttaggttcctttcaag

SEQ ID NO: 13626 - DNA, 558 bp, Gossypium hirsutum
  Clone ID: GOSHI-09MAY01-C34566_1
atccatcaaaatcgacatctcttgttgtttacagtgcaagggcaatgtgttcaattgactttggaaaggcagtagatgaagatgatgaaagtcagttggtccatgaagcatgggtgaagcttcaaggctctatcaccaataagaaattgaaatatttgttgatagatggtcgtcaaacagagtcaaaacatactagtagaaaaaataattttgagataattggttttagagacccagttttatttattggacacctttctaaaaattccatcttgatggtagacaaaccatggatggaagtagttaaatcttttgatactgccccagttcagagacatatatatgggacataacttcctgtggacgaaaggatgttcatcacttgagtgccttgttaggagaagaaaaaaatgcagcatccaattaccccatttggagtcccactttaacgttaactatatgttgttacaatgggggtggtagggttgggggatcaaaagcattgtgttgtgtattgtactcaatttttgttaacgagcttatattagtttttctgtt

SEQ ID NO: 13627 - DNA, 769 bp, Gossypium hirsutum
  Clone ID: GOSHI-09MAY01-C34796_1
acctggtgtctagaagaaaatattaagctgagatctcagcctgctcttgttccacttgctgttaatgatgagctggcttttgtagctggcattccttgttctttaaatactccatcttccagtccagaaaagatgctagagaaaaggcagttgttgcgtgatgcagtaagaaaagagatgggttgggaagataatgatatgcttgtgatgtccctaagtagcataaatgctggaaagggccagctcttccttcttgaggcagcacacctcttcatcgatcagtatcctttgcaaactggttctgaagttaaaaaatcattggatatcaggcatgatcattccaccttgggtgtaaagcatcatttaagaggtttggttttgaagtcgagcaacggtgatttatcttctagagatttgcggaccagaaacagtcacagaaggaagatgctgtttgatagccaaggaacagaagaacaagctcttaaagttcttattggggtctgttgggtctaagagcaataagatatcttatgttaaagaaattctagaattttgtcttagcatgctaagttgtagagtctgtactctgactctacactacacgtcttgttttctatttaacaacagaagttacgtctgaactccaggaactagaaaacattgggagatgctggtgacatggctatggtctcgggtaggatgatctgagcgccaaaaatttgtccagtgaaagttttcgctctgtgtccgtgccagtttgcaaatctgt

SEQ ID NO: 13628 - DNA, 365 bp, Gossypium hirsutum
  Clone ID: GOSHI-09MAY01-C34726_1
aaaacattgagggtttctttccttatggttctggctgtccaaagacatttcctgccgcgcgggccaggcttgtcttttctatgatctcattgacaacaagagaatctggtttgatatttggcgacaatcctgtctataccaatagagttgttcagtgggcagagtgggaaattgaattttttgtacgtttggtgaaggaaaatgcaccaccttcagagacaatttctgcactacgtgcagctagcatttgtgttcaggacagccttaactactgcttattgctggaatcacaagggttgaaactctcgaagttgcttctggtgctcttgcgtccgtatcttgaggaagttctggagttgaatttt

SEQ ID NO: 13629 - DNA, 1229 bp, Gossypium hirsutum
  Clone ID: GOSHI-09MAY01-C34636_1
tgcctatgcgttcgatttatcctagattgtcactcagatatctttgtctgggttggacaacaagtcgataccaagaataaattgtaggctttgactattggtcagaaatttcttgagcatgattttctcttagaaaaattatctcgtgaagctccgatatacatagtcatggaagggagtgagccaccctttttcacgcgctttttctcatgggactccgcaaagtcttctatgcacggaaattcgtttcaaaggaaacttaccatagtgaaaactgggggtacaccaacagtcgataaacccaagcggagaacgccagtatcatatggtggaaggtctagtagtgtgccggacagatcacaacgttctagaagtatgtccttcagccctgagcgagttcgtgtgaggggaaggtctcccgctttcaatgcactagcagctgcatttgagaaccctaatgctagaaacctttctactccgccacctgtggttaaaaaactctatccaaaatccgtgactccggattctgcaaaaaagtctgcagctatagcagctcttactgcatcgttcgaaaaacaaccaccaccagctcgagagaccatcatacctagatctgtgaaagtgagcccaccgacacccaaaacaacaccaacaccagagcctaactccaaggagaattccatgagtagcaaactagaatccctcactatacaagaagatgctaaagagggtgaagctgaagacgaggaaggccttccaatatacccttacgaacgtctcaaaataacatcaaccgatcccgtttctgagatagatgtgaccagacgagagacatacctgtcatccgaggagttcaaggagaaattcgggatgaaaaaagacgcattctataaattgccgaagtggaaacaaaacaagctaaaaatggctcttcaactgttctaagtcccccctttgattcatctgtgctatttattcaaaacccgctttcaaatgagagtgcagtgggaagaacccgaacccgttttctcaggatcgaaaaaaaaagggacagcatcagtgcatatttagctgcttctgctcccctaagaagcttttggtttttctcttttttgggtcattaatagacatatctggatttcaacccccccccctttttttctcatctggttgtttggatgtctagaaaatttgtcctttttcttcttggcttttctttgttgtttctg

SEQ ID NO: 13630 - DNA, 469 bp, Gossypium hirsutum
  Clone ID: LIB3147-004-Q1-K1-B9
acgtagacgcacgcgttcgcaagaacatgcttgagagggtcagatttctatacgaggaatgccttccaatataccggatcggacgttttagaatcacatcaactctgaccgtttaagagatagatgtgaccagacctgagacatacctatcatacgatgagttcaaggagaaattcatgatgaaaaaagacgcattctataaattgccgaagtggaaacacatcaagctaaaaatggctcttcaactgttctaaaagccccctttgattcatctgtgctatttattcaaaacccgctttcaaatgagagtgcagtgggaagaaccctaaccctgttattcaggatcgaaaaaaagggacagcttcagtgcatatttagctgcttctgttcccctaagaagctgtggggtattctcttacttgggacattaatagacatatcttggattttaactcccttcccttttatt

SEQ ID NO: 13631 - DNA, 455 bp, Gossypium hirsutum
  Clone ID: LIB3147-004-Q1-K1-B11
tcgcttgtaagattctttaaatggtgtacttactctcgtagaatgccttctcatatacagtttcggtacgtataaaaataacatcaaccgatcccgattctgagatagatgtgaccagacgagagacatacctgtcattcgaggagttcaaggagaaattcggtatgaaaaaagacgcattctataaatagccgatatgtaaacaaaacaatctaataatggctcttcaactgttctaagttccccctttgattcatctgtgctatttattcaaaacccgctttcaaatgatatttcattgggaagaactttaaccctttttctcaggatcaaactttatgtacatcattattgcatatttagctgcttctgcttttttaaaaagctgttatattttatatattctgtgtcattaatagtcttatatagattttaacccctatttctgttttttt

SEQ ID NO: 13632 - DNA, 454 bp, Gossypium hirsutum
  Clone ID: GOSHI-09MAY01-C34626_1
gattcctctcaacaatattccaggctttggggattcgagaagcttctgtttagagagtcaagaacgggaattcggcgtgacaggaaatatgcaattcaggcgaagaatgcattcgcaacgggagtgcatatgtcggagaatgttattgggaaaacattacataaaacagaaacaaagattcgttattatcactatcacaacaccattaccgtacaccaagagctatgcagagagtacctccctccctctgccaaaaacaatgtcacttggttcaataagctaccctatgtctacgatgataacatgaagaaactggccaacaccatcaaggaattcgagcataaaaccattggagacctcggttctctatgaccccacaccccacattccactccagcagctaccacatgtatcagtttaatgcgttaatggttgagcattcatggcatatgtg

SEQ ID NO: 13633 - DNA, 624 bp, Gossypium hirsutum
  Clone ID: GOSHI-09MAY01-C34176_1
cttcaggctgcttctaaaaaaaggggcgggaaaaaaaaaaaagctttctcttttctctgtagaagagaatacgttaaaggctatggaagggtgtggaacagtggaaagatcaattagagcagttgaagagtcaattgggagccatgggaagaatcagttggagaaatgtttgcatgaagcgcttgagtatttgaatcaaataccccctgttcagttatatgctgctattgctgtcttgctcatttctaccctcttgcttttgtccattcgcttgttcaaacacgcaaaatctaataccgttatgctcactggccttagtggaagtggtaaaactgttcttttctatcagcttcgtgatggttctgtgcatcagggtaccattacatctatggagccaaatgagagcactatcgtgctaaattctgatagtaataagaagcgtaaaagcaagcctgtccatattgttgatgtacccgggcattctcgtctgcgtcccaaactggatgagttcttacctcgagcagctggcaattgtgtttgttgttgattctttggagttcttgccaaactgccatttagcttcagagtatctgtatgatattctgactaaggccagtgtggtca

SEQ ID NO: 13634 - DNA, 388 bp, Gossypium hirsutum
  Clone ID: GOSHI-09MAY01-C34166_1
agacatctcgctcaggattacagttgttggtcgagtggaatgcccgacttgttgctctggcggttccatggggactacaaaggtgaagccaaactcgtcgaggttaagggccctagagatcaactctccgaacaacaaagagcatggctgctgcttctaatggattggggattcaacgcggaggtttgtaaagggagccctacaggatcatccccttgtggttagttaccctactaaaaacctggtttactcgggcgtatttgaaagtgttgtatagttatgtataccatgtgagtatattcaattatttcaagtttttgttttacgtgtatttggactgtcaaattcttatatacttgatctaaatatgcaatcgatacatgttatt

SEQ ID NO: 13635 - DNA, 547 bp, Gossypium hirsutum
  Clone ID: GOSHI-09MAY01-C34116_1
ctcaaccaaaaagcactctttctttgttttcccctcgtcattcacacttcaaacaaaaacatactcgtcttttaggctttgaagaacgctagaggcagtctgtcacagccaaaggccttctttgaaactgtactctgtccaaaggcctttgaaactgtgctctgtccaatatgagtatggagaaacaatatttggattgcctactagtcccgatggggattcttttaatggtggcctaccatctatggcttctctatcgaatcttaaaacatcccaccaagactgtcatcggcgtcaacgccatcaaccgccgtttttgggttcaagctatgatggaggacgggtcaaaaggagtattggcagtgcagtcgctgcgaaacaatataatggcgtcgaccttattagcatcgacggctatcatgttgagttccctcatcgccatcttgatgacgagtgggagcagcaatagatcgtcctggttcttattctgagatagaagcgacgttgcattttcgatcaagtactttgccatattgcgttgtttcat

SEQ ID NO: 13636 - DNA, 685 bp, Gossypium hirsutum
  Clone ID: GOSHI-09MAY01-C34376_1
ttttcatagaaattaaacctctgcgattagcagcagcattcgaatgtagggaaagaagaaggtgaaagggcttctatactgcaatttgtgatggtggatgcgtggtggtcccttcttggggctgccatcccggctgtaattgcagggcaagcttttagaatgaagaaaaagcatgccgaagaagagagaattaagagtgccaggggaagggagaagacctcggatgatatcttcgtttgcgagagagtctgcacatcaaagcgaatgttgaaaaaagttggggcattttcaaaggatccaattcctgatacttgtgtaactgtttgtggtgtgtctgagctcgatgcttgctctgatgcttgtgctcggaccgtttgtgttaaccaacatcaggtacccaactggaatgacatttgccttcgaaggtgtcaaagtgaatgtcttagactatctgcttcccattcttcttagtgcaggtcccatacttcttagaacattggcttttaattacagtgactgccatatcagtttcaaaacatgggtctctcaatggtgtgatccttttagtagtcattacgtgattggtgaatttgtttttgtgttttgacaattagtggttaaaaaggtcgtttgaatggttctttgcatatgcttcatattatgatctcccaccggtaaacttaat

SEQ ID NO: 13637 - DNA, 313 bp, Gossypium hirsutum
  Clone ID: uC-gsronu33B134d12b1
ttttctcttacacccaccctttggaaaaagcagggggagtcttttgaagggaaagatgtttgtgaaagggcttatatactgcaatttgtgatggcggatgcgtggtggtcccttcttggggctgccatcccggctgtaattgcaggacaagcttctagaatgaagaaaaagcatgccgaagaagagagaattaagagtgctcaggggaagggagaagagctcggatgatattctttgttgcgagagagtctgcacattcaaagcgaatgttgaaaaaagttggggcatgttcaaaggatccgattcctgatac

SEQ ID NO: 13638 - DNA, 821 bp, Gossypium hirsutum
  Clone ID: GOSHI-09MAY01-C34216_1
gcctttttcacaaaaactgggcatattattctctattttagggataaaatgaaaccctatctcttgaaattctgcctttttgctttggatgtctctgatgagtgctccaatggccaatttgtcaaaatctgtactttggcatttctttattacagtttttgagtctcccattatttctagattgtttaagcccatgtaaattcctaatctctgggttgtaatcttgtatgtgcattcgccgtaaacggagttgctatatcggagtgaacgaccgtctttgatgccaagatctcgctcctcacatctcgtactatcagacccgaagcagatttgaaagattgttggtcaaaggctacatcaaaaaagattgcaacctttgttcttcgattaacatgtttagggcctctgtcaacttgaaagattaaccaaagcccacaacagaaaagttgacactgttcactagtcccccgactaaaaacccaggacactgtcaaaatatatgattactatcttccttatattggcgacaccgagggcaataatcgtccacagccactttcttatgcttgaggttaataagagtaggaataaaactccatgagattcttcatactgtaattgtaacttttgagggaatgtataaattccgtagctttctgtagaatttcttgggttcagcctggataatataattactaggacaccaaggtaggctcctgggatagtttataggcgactctttactaagaaatcaccagactattctctttctcccaaaaaaaaaaaatatgtttttagaaaactcaagggatttatttaaa

SEQ ID NO: 13639 - DNA, 606 bp, Gossypium hirsutum
  Clone ID: GOSHI-09MAY01-C34206_1
cccacgcgtccggtaacagtcaatattgagagagagtgagaaagatgggagagacagacaaagacagggaacaggctgagcatggatggatctaccaactgattctgttgtttctccgcccatgcactgcctcttccctggctctgcctcctccatttttttcctccctctttttttatttaactttttcaccttatcccattttggaattattattatgactgtaatttagatccaggttcatgataggtaccttttaacaaggtaattgtggtgacttttgttgagccccaatggccccagctcttttttcttcattttctctctattcttttcaatccaagtatagagattattcgttttactggtaatggaaatttgcattttgattctccaaccatttccaggaaccttattgttttttccactatcaccattgattggggggaaatgacacaataagaagacttgaataaatgctgcattgctttaagtgacagactggagatagatagaggagaggaagaatatcaggtttaccacaatccagcttttaaattcaccccgtggcatggccactaggtttctgatacaggttgtttgggc

SEQ ID NO: 13640 - DNA, 932 bp, Gossypium hirsutum
  Clone ID: GOSHI-09MAY01-C34226_1
gtcctagggttctaattttttcactcattttcctctttcccccctcgcggccggtcgaattaagtaaaaagcggaagatggctgcaagcttagcttccagatgctccagggtgggacgttcattgatggatggccttcgaaacaacttctctaatttaccaatcacatcaagagagacaacatttggcagtttcctgtatcagcaacaaaggactttcatacagatgagaactgttctcaaagtagtggacaactcaggggcaaaaaaggtaatgtgtatacaagcattgaaggggaagaaaggggcaagattgggagacaccataattgcatctgtaaaggaagccatgcctaatggaaaggtgaagaaaggaaaggtggtatatggtgtggttgtgcgtgctgccatgcagcggggtcgttgtgacgggagtgaggtcaagttcgatgacaatgcagttgttcttgttgacaagcaaggccaaccaatagggaccagagtttttgggccagttccgcatgagctgaggcagaaaaagcatgtcaagatcctcactttggcagggcacattgcctgaggcatggatccatcatattttttcccccgaacacaagttttttttagcaatccaagcatttagatattttcatgttgtcccaatagcaggaaaaaaatgggaagagggaagaactaatctgttgtttctatcacaatcctgggcaatgattagtagatgtttgccttatctttaatgagaatgcaatatatctgatgagacaaaattgcattgatgacctcatgctgttcaaacctggttgaataattaggagatgctcagaagagtctttttgtagaaaaaaaattatgatattgaaaagtagttcgcagttacatttgacagttaattcatgcccttgaagtactgctattt

SEQ ID NO: 13641 - DNA, 453 bp, Gossypium hirsutum
  Clone ID: LIB3135-028-Q1-K1-G8
agctattggaataggataattattcttgtagcttgatgtgagagtgataagagttttgttgaatgttcaatattgtaagtgtatggcttaagtcctgataatattccatggttctatgataattgcctttgtggtattttctttgataggtaacccttatatttcattttattctgcagcaacaaaggactttcatacagatgagaactgttctaaaagtagtggacaactcaggggcaaaaaaggtgatgtgtatacaagcattgaaggggaagaaaggggcaagattgggagacaccataattgcatctgtaaaggaagccatgcctaacggaaaggtgaagaaaggaaaggtggtatatggtgtggtgtgcgtgctgccatgcagcggagtcgttgtgatgggagtgaggtcaagttcgatgacaatgcagatgttcttgttgacaagca

SEQ ID NO: 13642 - DNA, 412 bp, Gossypium hirsutum
  Clone ID: GOSHI-09MAY01-C35986_1
tttagttccagttcgtgaggtgaatttcttaaggttttgcaagcggcatgctgaaggggtttgggcagtggtggatgtgtccatcgacaccctccgagaaacttcaggtgcacccacaacatatgtcaaatgtaggaggcttccttctggttgtgttgtgcaagatatgcctaatggatactccaaggtaacatgggttgaacatgtagaatacgacgagagtcaagttcaccatctctaccgccctttactaagctccggcattggctttggtgctcaacgttgggtcgccaccctccaacgccaatgcgaatgtcttgctatcctcatgtcctccactgttcccactggagaccatactgctataacggcaagtgggaggcgaagcatgttaaagctagcgcagcggatg

SEQ ID NO: 13643 - DNA, 408 bp, Gossypium hirsutum
  Clone ID: GOSHI-09MAY01-C35976_2
ggagaattaaggtccatttaaacgcattgaagaagtacacttacgggaagcatattgttgcgcgtgtagagaaacttgttgctgctggagagaggagaattgctgctcagtctgtgcacccttcttaaatcggtgtaggaaagagacatgtttgtacagctaacagaatctatgtgaagctttcccttcttccccccatatgtagggtcatggttcttctacctatcttcttagacaggtaagtaagaactgtatgaaaatataagttgttgcttgccttgtaccaggaaaaaaaactgtacattgtgtagcttaagggtttatacatagaaatggagccaaagctgagagtttcagcggtgccattgaactgttgaggcccccccccgtatgagtaacataaaataa

SEQ ID NO: 13644 - DNA, 556 bp, Gossypium hirsutum
  unsure (1)..(556): unsure at all n locations
  Clone ID: LIB3829-002-Q1-N6-G5
tgttttttttttttttttttaaagggaaaaaaagagtaagtgtcattaaagcatacattggaggggnggaaaaaaccagtggcctcacctaaacatcaacagctctccacaagccaacattttgtacagtggcggttatcatataaactgggctcaccattttttaaatttttacacccttaaaaactcgtataatcattcgatctcctctgcatgtagcattctgttgtgtccgacaacagaaacctcgggtttgctcgattctatgtatacaatcttaagctacaaaatgtacagtttccggtacaagcaacaacttcttttatttccatacagatcttacctgtctaaaaagataggtagaagcatagctctaagataggggaagctctcgtaatagcttctgttagctgtacaaacacattatttcctacaccaactaagcagtagggtgtggagattgagcagcaattctcctttctccaacagcaacaagtttctctacacgcgcaacaatatgttttccgtaagtgtacttcttcaatgcatttaaatg

SEQ ID NO: 13645 - DNA, 371 bp, Gossypium hirsutum
  unsure (1)..(371): unsure at all n locations
  Clone ID: LIB3148-059-Q1-K1-D5
gcatattgttgcgcgtgtagagaaacttgttgctgctggagagaggagaattgctgctcagtctgtgcacccttcttaaatcggtgtaggaaagaaacatgtttgtacagctaacagaatctatgtgaagctttcccttcttccctccgtatgtagggccatggttcttctacctatcttcttagacaggtaagtaagaactgtatgaaaataaaggtgttgcttgccttgtaccaggaaaaagaactgtacattgtgtagcttaagggtttatacatagaaatggagccaaagctgagagtttcagctgttgaaatccanannaaaaaaaaaaataaaaaatataaaaaaaaaatataaaaaataaaaat

SEQ ID NO: 13646 - DNA, 425 bp, Gossypium hirsutum
  Clone ID: GOSHI-09MAY01-C35916_1
atgcgatgatatctaccacaatctccggtaatgcctaccaaatccttgtggaagctcttgctccggcgcccatctattggtcagccaccctcttagtaactgttgcatgcaatctcccctacatggcccatatatctttccaaagatgtttccacccattggaccatcatatcatccaagagatcaagttctacaagaaagatgtcgaggaccaaggcatgtggtctcgggagcgatccaaggcaagacaagaaaccaagatcggcttcacagcacgtgtagatgcaaagatcacgcaactgaaagggaagttgcaaagaaagcaaccgtctatggaaatacagagtccacatcgtcaatcatagcattgctcatgaatttagtttcttttggaagttttttagggtctttcttgccgtttatag

SEQ ID NO: 13647 - DNA, 426 bp, Gossypium hirsutum
  Clone ID: GOSHI-09MAY01-C35906_1
cggaggcagcgcgaagaaaaggcatgggttgaagctcaaatccgggctgctgaatatgctgccaaaatgaaggcggaatctgaaattgaaaaagcaacgggaaagagaaagagaagccgctcgacttgcactgcaaaagatggaaaaaacagcagagattgaacagaatctggagattctaaaggaactggaaacgttgttaggatgttgtctgtacagtaatcaattttatggtcgaaaaagtggagcatgtgaaagggtaattgaaggaggagcttatgggatgataaaaggtgagaatccactccataaactgggtttattcttcaaagacgagtacttttgaagacgaggaggatgaggacgcttttcttaatgaagacattgtttgtgaagaaggagaaatacttgtattaaaaacatgat

SEQ ID NO: 13648 - DNA, 361 bp, Gossypium hirsutum
  Clone ID: GOSHI-09MAY01-C35926_2
tttgggggaatgttccttaacctactatgatacaacgggttaggcttatgatgctggtctttcaaggtcttgggcccgagtcatgggtatgcattctaaaaactcacgtgttgttataagacctttagtttgtgctgtttatgcattaacgttagccaggtttgtcggaaagaagtttagttaacccctgctttcctttcttttattagcaattgggttcctgtcgcctacttccatgctattccaatcatccgaacatcctgggatagtctctaatgttgtaccttgtgcaacacatttgaatttatcttttttttcttttttcgtttctggtcggtgcgaaatgctcatccttggcatt

SEQ ID NO: 13649 - DNA, 546 bp, Gossypium hirsutum
  Clone ID: GOSHI-09MAY01-C35926_1
gaccgctttaacttgtataggatcgaacaagaacttgggactgaaattaagcaaatccctccacatatcgaccaggctatttactgccggtgatttttgtgggatgtttccttagcctactatggtaacaacggttaatgatgctggtctttcaaggtctcggtccctagtcatgggtgtgcattctaaaaactcaggtgttgttataagacttttagtttgtgctgtttatgcattaacgttagccaggattgtaggaaagaagtttagataagtcctgctttcctttcttttatatttcttttattaacaaatggtttcctgtcgcctacttcgatgctattccaatcatccgaacatcgtggaatggttttaaagttgtaccttgtgcaagaaatttgaaatttatctttttttctaaaaaaaaaaaaataaaaaaaaataaaaaaaaaaaaaaaagataaaaaaaataaaaaattaacaaaaaatgtataaataaaaaatgggcggccgaattctatgttcaacccttacatccgcttaaat

SEQ ID NO: 13650 - DNA, 295 bp, Gossypium hirsutum
  Clone ID: LIB3146-053-Q1-K1-C7
gatcgaacaagaacttgggactgaaattaagcaaatccctccacatatcgaccaggctgtgtactgccggtgatttttgtgggatgtttccttagcctactatggtaacaacggtgagcaaccatgctcatctgaattttagattacatgcacaaagtaatttctttgtgatctttttccatatccagaatgttctctgattttgctctttgctatttataccggcgtttgttaagttaatgatgctggtctttcaaggtctcggtccctagtcatgggtgtgcattctaaaaac

SEQ ID NO: 13651 - DNA, 662 bp, Gossypium hirsutum
  Clone ID: GOSHI-09MAY01-C35866_1
cccacgcgtccgattttgcttctttggtggtgggggaaacataaatttcattgcctataaccaagaatgatagagcatccatagttggagatgctatagactacatcaaggaacttcttggaactgttcgtgagcttcaattactggtggacaaaaagagatgcggccaagacaggagcaaaaggcttaagactgaagatgctgctagtgctgctgatgcaggggatgttgagttcaagtctttaggtgatccagaccaatgctataatacttccttgaggagttcttggcttcaaaggaagtccaaggattctgaggttgatgtacgcctcgttgatgatgaagttaccatcaaacttgttcaaagaaagaagatcaactgcttgctgtttgtgtccagactcctcgatgagcttcagttggacctcctccatgttgccggtggcaacattggtgactactacagctttctcttcaacaccaagatatatgaaggctcttctgtttatgcaagtgccatagccaacaagctcattaatgtggtggataaacaggatgcagcagctgctccaccaaccagtagcacttgtctctagtttttcagtgaaggaagagtttcatatttatgtctatctatgtttctagggaaataaagtagcttc

SEQ ID NO: 13652 - DNA, 888 bp, Gossypium hirsutum
  Clone ID: GOSHI-09MAY01-C35806_1
tctgttttgttttatttctccacgaaaccgcctcagtctgggttcctcaaccatcatccttccggagtagattgattgagattcgaaactactctcatcagtcccccatgattgtcgctgagagtatacccattgagattcctaacattatggcctgtaatcctgcatatgcttctgctgcaaatgaagatgaaacgttattattaaggacagttttcaatgctagaatctcacctatcaggccccgaaccaccagactcgaagtcgatttggagttttttttttgtcaaaagctgcatcaaactaaatcatcaccctcgtattctcttcttgttgtctgtggcttctatccatatcttagattaactataaagcacagcaaaaaagtcagcactatttacaagtacccctcttgaaaacctaggtaagccattctcaaaagctttgaatcatttatttatgacccaaaagaggtttaaattttaccagacctctattattgtggggattgtcgaaagacatgataactatcttcttcctaagtaccacagtgaggacatatagtatttgtggccactcgtttatgtatgagatttactaggggagggatgtaattctaggaaattcgtcatattgtgattgtaattttttatggtagctgtagattccatagtttcttgtagaagtccttgatttcagcctgtattaagtaattattaggacatcttgtaatagtttataagcacttcgaactgagaattcactagagggttctccttcccacatttggaagtcgtcgtgaattgtttccgctagaggaatctgtaaaattttctgagctatatctgctggaaaggtactgtttattaaatccgccttccaagtact

SEQ ID NO: 13653 - DNA, 611 bp, Gossypium hirsutum
  unsure (1)..(611): unsure at all n locations
  Clone ID: LIB3825-019-Q1-K6-E2
cgaaaaccgcctcagtctgggttcctcaaccatcatccttccggagtagattgattgagattcgaaactactctcatcaggtgcaagtcatctcccttttctaaagcttattgcgcaagtttatagacataaacattttctngacctatgaataaacggaaaattaatttcttgaaaacgagatttttttgctttgaatatctcaaataatagccccaataactgatttatctggttttgttgtttggcatttcttgatgattgttcgtgagtcccccatgattgtcgctgagagtatacccattgagattcctaacattatggcctgtaatcctgcatatgcttctgctgcaaatgaagatgaaacgttattattaaggacagttttcaatgctagaatctcacctatcaggccccgaaccaccagactcgaagtcgatttggagttttttttttgtcaaaagctgcatcaaactaaatcatcaccctcgtattctcttcttgttgtctgtggcttctatccatatgtaagattaactataaagcacagcaaaaaagtcagcactatttacaagtacccctcttgaaaacctaggtaagccattctcaaa

SEQ ID NO: 13654 - DNA, 448 bp, Gossypium hirsutum
  Clone ID: GOSHI-09MAY01-C35596_1
cccacgcgtccgcccacgcgtccgcccacgcgtccggataagtgggagttatctggtgatgagcgatgttgttgtgtgaccactactaaaataaatgcgaagggatccggtggtgcttcagacgggtacacttgggtgagtgtgcagcagaagtggttagaaggatatgaaaagaaggatacatcaatttggcttttctaaggtactccgcaacatcgactctggaatcagcataaaaaattctataggaataaatgtatccaaatttcaatagctttactattttgacatatatttgattaattcataggcaacttaggaaatggctctataattagataaactgagatacataccttggcttatctcttgtgtgattcatcttattttttatgctctcgcagtgtacagcatctgtgtcaaaaatttgcattatcctttggatttc

SEQ ID NO: 13655 - DNA, 565 bp, Gossypium hirsutum
  Clone ID: GOSHI-09MAY01-C35526_1
tcccacgcgtccgctcctctgctcttcttaaccccccccccctctctctcctttctctccttcgcaattctccaacaacagatatgtctactgtaatgagacctgtgtctctggttgactcaacttgccttgtttctttgccttcactcttcaccacttcttccaagcttccatctcttctctcacttccttcaaagcccatcaaccttgtcctcttatcttcctccactcagccaaccttatcctccctcaaaacaaaaacccatttcccttccctcgttgcctttttggcccagacgtcagattgggctcaacaagaggaggaaaacgacaccaccctaaccattgatgaccaaggaactgaaagtgaaggaggggaatcaacatgggaaaatgaggagagtgatggggctgaagcaagtttgtctgattgggaacctcaaggtgaggttactggtagtggttcagcagatgaggatgcttccgaaccttctgaggaagctaaattgttcgttgggaatctgccttatgatgttgatagtcaaaagcttggctatgctttttg

SEQ ID NO: 13656 - DNA, 761 bp, Gossypium hirsutum
  Clone ID: GOSHI-09MAY01-C35446_1
ctttttctttccatctcaaaccgtgcatgggtgctatctgaatcagttcctcagaaatcaatccatgaattcactgtcaagaatagcaaaggccaggacgtggaccttagcatgtacaaaggaaaggttctccttgtggttaatgttgcttctaaatgtgggtttacggattcaaattacacccagttgactgagctttacaacaaatacaaggacaaagggttggagatcttggcatttccttgcaatcagtttttgaagcaagaaccaggtaccagccaagaggcagaagagtttgcttgcacaagatacaaggctgaatatcctattttcaaaaaggttcgttgcaacgggccgaatacagaacccgtcttcaagttcttaaaagcaaagaaatctggtttcttgggatctaggataaagtggaacttcactaagtttttagttgataaggatggtaacgtcctctctcgctatagcccaaccaccacaccactggccatagagggtgacatcaagaaagcattgggagtggatacatgaaaatataggaggtggagggaaaatggaaactaagaacaatgtaaataggatgaaagcggtaggcgtggcccataatattgtgtaccactgtgagacctcatgtgtaatgataatcgctgctcgagtttgtaaaaagtagtagttttacacctgtgatagtttctttgctgcatttaagcctattaatttcctactttggaatttcattgttgttactt

SEQ ID NO: 13657 - DNA, 436 bp, Gossypium hirsutum
  Clone ID: GOSHI-09MAY01-C35406_1
gaaagattcgatctcttttgctagaaacgggactgaatggcggtccaatcagtgaaagtaggcaacgtgttctttgggtgcatctgaccaagatattaaggagttcttttcgttctctggtgacatcgaacatgtcgaaatgcatggcaataacgagcgatcgcaagttgcatatgttactttcaaggatccacagggagcagaaactgctgttcttctttcaggggcgacaattgtagatcaatcagttaccatagagctggctccggattacaagccacctgctactgcctctgcaacacctgcaacacagaacaaagaggccggccaggccgaatctgctgtccagaaggcagaggatgttgtaaccagcatgctagccaagggtttcattcttggcaaggatgcagtgaacaaagcaatagccttttatgag

SEQ ID NO: 13658 - DNA, 546 bp, Gossypium hirsutum
  Clone ID: GOSHI-09MAY01-C35716_1
ccgatacgagtatctgccatcgatgatccagcattggctactttctgtgaaccggttgagaagtcaaattcgagccactctttcactgcaggattagctcacagtgttggccttaggaagcaaccgctgcgtgtatacagcatggtgaaatatgcagcaatagcacgaggcgatgctgaaatattcatgaagtttgcgaggacagggtacaaggaaaagatatgggatcatgcggccggcgtgatcatcatacaagaggctggtggtgtggtaactgatgcgggaggttccccattggatttttccaaaggtatcttcttggaaggtcttgatcgaggtataatcgcttgtggtggagcttaactacatgaaagaatcaccaaatctgttgatgctaggtggaactgttctagtctatagtcatttttataaattttgttcattgattgctacaaaaagaaaaaaaaatggttggcctagtgaaggtgctaagccatagttgtgttttgttcatttgtgtttataaaaagctcaagatattagggt

SEQ ID NO: 13659 - DNA, 480 bp, Gossypium hirsutum
  Clone ID: GOSHI-09MAY01-C35736_1
aactgatcgaaaactctatctctttaacaatgataacccatataaaaccatataaggccattcgggggtcaattttttcgtgatactggggaaagtgatttaacaattttttaaaaaatttgtgtttaggttatctgagcctggcttgtgcaagtcagggagcaaggacagcagaaaggcgaagcaagccctattctttctgaactgctacgtcttgaggaacaggccaaacaacaatatgtgggtcgatggagcaaggtgcctggtgctactgaggcttctatctgggatttaccttcatctgctattagtgaccctaataacttggatgtgatgggtcttctggctacaaataagggtaagccaatggaaggtattatggagcaagttcgtgatggtagtactattcgagtctatctactcccagattttcagttcgtgcaagtgtttgttggtggtatccagtccccttcaatgggt

SEQ ID NO: 13660 - DNA, 480 bp, Gossypium hirsutum
  Clone ID: GOSHI-09MAY01-C35686_1
acgcgtccgcccacgcgtcctagtgtacagcccgtcactcctactgaagtgaccatggaagaaaaaggctccaatgagaatatattagaaaaagatgctcacccgtcgccattggcagataaggagcactcggagaaggcaaataggtgtgaatttgtacaagggctattattatccaccatctttgatgggggcttataatcaagacagaaaagagtagacggttggtgacttccaaatttctagcgcacatgccgttgcccgtcagccatgttcttgcattgaacattctgattcttcaatatagaagctaggatagattcaagaatgtaatgtaatttatttaactggttgatgcttatcaattaggccacaacagagttcagactcttgtatttttcccgtttaaagcatcggttcataaatgccaatagcagctttagttaaaccttacatttgctagtgaatgtaaagcttcat

SEQ ID NO: 13661 - DNA, 586 bp, Gossypium hirsutum
  Clone ID: GOSHI-09MAY01-C35646_1
cagacatccagatgttctttcccaagttgctcgtggaattgccaactttgcaaaatgtgaatctcgtgcatctactaatggtatacgaagcgggagatcacttcttatcgatgaaggtgcacttccatggattgtgcaaagtgctaacaatgatgctgcacctattaggcgacacattgagctcgcactgtgtcatttggcacagcatgaagcaaatgcaaaggacatgatgtccgggggtgccctctgggagctggttcgcataacacgggactgttctcgagaggacattagaagtcttgctcgccgaacactgaattcgagcctgttatttcgatctgaaatgaggcggctaaggatagagttgtgattgaggtgaagttttgggcctttttgtaacctgttctaaaagtggcatgtcaggaaaacaacatatctcgacactgtatagtcttaaaggtcgagagaatggtgtaataccaccctcagcgctgaaagagcttccacaggcttatgtaaatgaatctggggtgggtttgtagtagtattaattatttatgctaggttctttcgttgagcttaacgt

SEQ ID NO: 13662 - DNA, 701 bp, Gossypium hirsutum
  Clone ID: GOSHI-09MAY01-C35676_1
ccccgcgtccggggatatcccgggttattttgcctggaccattcattcctttccgcgagtagtgcagggactcatcatgcacaagttgcttggaaaaagttcacccggaaatgttctttgagttgtcatccattcccttacataaggatggctcaagcggtaagcttagcattgtcccgctctcacttgatagtccctggtatttttggcttgggaggtggacgactggcattggcgcagaggaaggtcgcagagacagatcattacccatcaccaaattctttggatagtcgtgctcaagatggtcatgcttttgtttcttctatactactttcagtgatagaaggtgttatcttgctagtgagggctatctatcttacaattctgttctctccgagtataataatggcaccatttgccgactcttgtggcctcaaattcaggaaaatatggcttgaagtcgtgcatcgcacacttgaaacggcaggtccatgcattcataaaatggggtcaatgggcagcaacgcgaccagatctcttccctaaagatttatgcaccaagctttcagagcttcacagcacggctcctgaacacagctttgctttcacaaagaaaactattgaaagagcatttggccgtaagctttctgaaatatttgacagttacgaagaggaaccggtggcttattgaagtatagctc

SEQ ID NO: 13663 - DNA, 409 bp, Gossypium hirsutum
  Clone ID: GOSHI-09MAY01-C35616_1
tggacttttgcatagtataagacggagataattggatccatgtgccgccgatcaagggttctctcgtcatcaacgtcggagatgcattgcagataatgagcaatggaaagtacaagagtgtggaacatcgtgtggttgccaacggaagcaataacagaatttccgtccctattttcgtaaacccaagacctagtgatatgatcggaccattgcccgaattaatcgaaaacggtgagaagccgatttataaacaagttctttattcagattacgtcaaacattttttccgttaagcacatgacgggaagaaaacagttgcgcttgctgaattataaatattttaatcccatagttgtaaacagtcgtagatttgaaaacaataaattgcaagcataaaagctgttattaa

SEQ ID NO: 13664 - DNA, 553 bp, Gossypium hirsutum
  Clone ID: GOSHI-09MAY01-C35606_1
atggcagaacattgttggtagcaaaatgaatcctgagcgatctggatgtatgttaaatcaccaggattgtactttcagaagcaaggaagttgactttgctgattcaaagagacacaaattgggtggtgagaatttgtggaagaactttgacgtgggaaagacacacaaaaggaaatggagatcgcatgcaggaaaagtttatggcttttcccaaccaaataaagaccccaagtgattttaatgttgaaaattcagagaagacaaataaacctagtgtttcaaagaggcttaagtatgatcttccccttccattgacttacaagcgaagaaagcctcaagccagaaacacatcggacctcaccaattcactcagaacaggtatcgatataagaactagtagttcaaaagaatcaaaccaacctttggggaacagggtaaatgcattcaagtttaaaattcttgggtcctatgaacagggaagcttaaatagcatgtcgaggaacaaaaatgtaattacctccttggtataataaaatccttctcttatggttct

SEQ ID NO: 13665 - DNA, 554 bp, Gossypium hirsutum
  Clone ID: GOSHI-09MAY01-C35196_1
cgacccacgcgtccgatttgcatttgttttattagtaattcatttttcaaacaaaaacaaatatcaatggccaagattgctttgcttctggtattctcattggtcctgattctatcaatcaacagcgccgtaggtcacgacgcccccgcaccttcccccgaacagacaaaccaggaaacttcagagtatgcagacgccaccgggcagaatgaagagggtcttgacgagattgtggacgcaatgtcaccggaaatggcaccagcaagttcacccacaatggcatttgaagggtcttttggacccggaccagctatgaccattgaagacggtgcggcggagggagagggagaggcagaggcggagggagcgccagaaagttagatacgcagtaccagtatatttaaataaggatctcgatccatatgttcgttatcttactattttggtatttcatccctcataaaagaaaagtgaaccataactgtaaagttcacgaccataagtaatatatttatttatttacctgcccacccacccacaattgatttcgtgtt

SEQ ID NO: 13666 - DNA, 644 bp, Gossypium hirsutum
  Clone ID: GOSHI-09MAY01-C35186_2
ttttaagggaagtgagaagctccttgagctaggctcaaattactccatgggttcaaacttgaaggagaatgaatctgaagtacggaaccaaggattcttcatgtcaccaatagtcttcttcatctgttagtagccattgttttgacaatcatggtataagaggatcacccacatcaacagtcattggaccttccaagcatcggcattcaactcttggggatcccgattttgtggagaattacttccaaggtgacatacatgtgcaatatagtgacttactggggctgttcgagtatggggttttcctcctcatgctaattacctatttctaggcgactatgttgatcgtggcaagcagagtttggaaacttttggagataaccgagaagtggaacatggcttgtctgtaaaattgccagttcaaaagttaattctccaagctacatcacattgaaaatttgtgccagaactatgttgggtggtgtcctttttggtgatctcaagaacaaaaaagaaatggctgattatgcatgcacacttgaagaagtgcagtagcattaattctctgcaggaagattcctagattcaagcttatatgcaaaatgtgagttatatatctggagaagggaatgataggctgctta

SEQ ID NO: 13667 - DNA, 1338 bp, Gossypium hirsutum
  Clone ID: GOSHI-09MAY01-C35186_1
gaagattatgccttcttactaaaaggacatgaagatcttcgccaggatgaacgtgtcatgcagctttttggcttagtgaacactctgctggagaactctagaaaaactgcagagaaagatctatctattcagcaatatgctgtcattccactatctccaaacagtgggttgattggatgggtccctaattgtgataccttgcaccacctcataagggaatacagagatgccagaaggatcaccctaaatcaggagcacaaatatatgctaagttttgcaccccacgcggcccatttaccactcatttctaaagtagaagtattcgagtatgctctactaaatactgaaggaaacgatctggccagagttctttggttaaaaagtcgtacttctgaggtgtggctagagaggaggacaaattatacccgaagtttagctgtaatgagcatggttggttacctcctcggcttaggtgatcgtcacccaagtaatctcatgctgcggcgctctagtgggaagattctacacatagatttcggagactgttttgaagcctctatgaaccgggaaaagttccctgaaaaggttcctttccgcttgactagaatgcttgtgaaagctatggaggtcagtggtattgagggaaatttccgctcgacatgtgaaaatgtgatgcaggttctccgctcaaataaggatagtgttatggctatgatggaggcattcgttcatgatcctctcattaattggcgtcttttcaatttcaacgaagtcccgcaaatctcaatgtttgccagtaatcatgcccctgctgttataaacacagaagaaactgctcaaagcaaagagcttggtcaacctcagcggggggcacgtgaaagggaacttcttcaggctgtcaatcaacttggtgatgctaatgaggtattgaatgagcgggctgtggtggttatggctcgcatgagtaacaaactgaccggacgtgatttttcatcttcatgctcatcaatacctgcatgttccatgcaaaacgtagttgatcacagcacattaacttctggagataaccgagaagtggaacatggttttgtccgtaaaattgcaagttcaaaagttaattctccaagctacatcacatgaaaatttgtgccagaactatgttgggtggtgtcctttttggtgatctcaagaacaaaaaagaaatggtatatttgtgcataacattttgtatacatctgtaatttatgtgtatataaagtatagattacaaatatctcgtctctttctggccatgtattgcatacgcattattttaaattaatattttttgcagtgttc

SEQ ID NO: 13668 - DNA, 570 bp, Gossypium hirsutum
  Clone ID: GOSHI-09MAY01-C35166_1
cccacgcgtccgcccacgcgtccgccctcgcgtccggccacgcgtccgctgagctctccctagaggaaaaaatccaatggagaattgaactcaggaatcccacctccgatccgataacgccgtaacctacgaatcaccctacccactctacgccatggccttatcttccacgcccgccgtcacccatctcaactaccaacgcatcgctctcggcagtttcatcgaggattacactaacagagtccacataatctctttcgaccctgaatcacttaccctcataacccacccatctttgtcgttcgaccacccttacccacccaccaaacttatgttccaaccccaccggaaatcccctttctcttcctcctccgacctcctcgcttcatccggtgactacctccgtctctgggaagttgggcactcttctatcgaacttatctccgttctcgacaacagcaaaaccagcgagttttctgctcccttaacttccttcgattggaacgacgttgaacccaatagaatcggaacatccagcatcgacaccacctgcaccatttgggacatcga

SEQ ID NO: 13669 - DNA, 694 bp, Gossypium hirsutum
  Clone ID: GOSHI-09MAY01-C35106_1
attttctgcaaattgggtgttgaaaagtttgtttagcagagtccggttttagcttgaaagcttacttccttgttgcactgggtgtgtttgatataagttgcatggtgttcattaaggatgttgaagcagctggggagtgtggaaagactccatttaggtctgctgcggtaagtttaagcccatgcttaggagctgctgggaacgcaaaggcaaaagttccgcctgcttgctgctccaaggttggtgccttacttaaggcttctccgaggtgcctttgtgctattttattatcaccattggcaaagcaggctggaatcaaacctgggattgccattggcattcccaaaagatgtaacattaggaacaggcaagctggaaaaaaatgtggaagctacacagtcccatgagacaaactaataccttatacaagaagagaagagagagcttattaataaacaagtgcagcattgcatttgcatggtcattgctgattcatccttccaaagcaattgtttatgtcgtttttaatgtaatcttcagcagctaagttacattatcatcttaattgagcaaatgctatttttatgctcactttccattatgttagtattatttcaaaaataatttctctttctctttcactaccgatttgtatttgatatcttgataatatataaaacttacttttatattt

SEQ ID NO: 13670 - DNA, 681 bp, Gossypium hirsutum
  Clone ID: GOSHI-09MAY01-C35136_1
cttgtcagcatctgggttaagggctctgagatatgctcgggaggtagaagggattggccaagttgttgccttagataacgataaaggggcagttgaagcttgctcagcggaacataatgttcaatggttctgtggcttgttcaaaagtggaatcacatcttgctgatgctcgtgtgtacatgcttactcacccaaaagaatttgatgtggttgatcttgacccctatggttccccttctgtgttcctggactcagcagttcaatctgttgtggatgggggcatgctgatgtgcactgcaactgatatggcagtcctttgtgggggtaatggggaggtttgctattccaaatatggatcatatccattgagagggaaatattgccacgaaatggctttgaggatcctcctagcctgcattgagagtcatgcgaaccggtacaagcgttatattgttcctgttctctctgttcagatggacttttatgtccgtgtttttgttcgtgtatacacttctgcaagtgcaatgaagaatactccccttaagctctcatatgtctatcaatgcattggttgtgattcttttcatctacagcctattgggagaactgtttctaagaataccagtgtgaggtatctcccaggctttgcacctgttgtccctcaagagtgtagtcattgtc

SEQ ID NO: 13671 - DNA, 1157 bp, Gossypium hirsutum
  Clone ID: GOSHI-09MAY01-C35126_1
agcagatgagagatccactaccatagccaaagttgaaaaggaaacactcaaggaccgccttagaggagtttcacacactagaacacacttgaaagaaagatatttatcgactgatataaacaacatacttcatgggattgaaaacaacgaaagctaaaacaccgactagggaacggcacatccaacagaaatacacccaaaagctatgatgatgatgattggaaacttaaacccataacttgatgatgaaattctccaggaaccatggctatgaaatcgcctcaggtgaagggaggctttgatttacaacagacttttacatagaaagcctgcaaaaaactgagatggatagaggccatctgcaaaagagcccaagtccccaggaaaaagaaccaagtcatagagccaacccgcatggctacttagttgaaccgaaaaactgtgccgaatgtttttgctacccgtgggagatgaccatacgagattgatatttctactgtctttaacgccagaagtgtagttgttcagtggctcgacccccgattagacaaggatgtcgcatctccacaagctttccacgagcagctcaatggtttgggtgctgattgaattgcagtgctggagattcaaccccaccagggtcttgcccaatttttttaggaaggtcatgcttttgtttgatactcctgaacaacctgaaaacgaaaggacttgcaagttgagttgctctgcgtgagacaaggctgcaataccgacatcggtgattgcacaacttgacacatccaagtcgctgaggaaaacacaattttctgcagctgctgccaaacttgcatcagtaatcctcctgcaaccgttgagattaagcaactcgagggttgcgccatgtagcttggtcaagtgcaaaacgacctcatcggtccagtttaagcagccgctcagacccactttcaccggtcccgccgcccgacgcgctggaagaggcagaagacctgcatctgtaatggcgcaaagtccgctcaggtctacgtgctgaagctgagggcacaacctgcccaccatagccaggctggctgttccgaatcctcggcagttccttatagacaaggatttaagggaattgcaagaggaagacaaaggagcttccaaggatatatcct

SEQ ID NO: 13672 - DNA, 1094 bp, Gossypium hirsutum
  Clone ID: GOSHI-09MAY01-C35356_1
aaacaagaatccctattcccccccgcgtccgcaatttgggtgaaatgaaatttcatcttttgtttgaaaacttttgacgtaaaaaaagctcaagtttttgcttgaaatcgttggcaaacgcagacagtttttcctcttcactggctttatcctcaatttctgtgtctccaaagttccacaggtctatcaagtaaaatgtctgaatctgagcaaacccaaacccaaacccaaaatccagaccccaaaacacccgagcccaaggttcgagcagttggtctcgctgagtatagctggtgcagagccgtgcccggtggcactggcatcactgtcttgtccctcctcctctctaatgtccccgatatctcattccttgaagcactcctttgcaggctccaagtttctcatcccatcctccgttccagggtccgctttgatgcttcctgcaacactttttacctcgtaacgccttctaacccccatgttcaaatccaatcctttgatcttcaatctacttctcacatactccaaagctccctgggcgattcccacatcgattcccaccacgttttactcgagcacgagttgaataggaactcatggaaccgcactgatggtgaccaagctgactgggatgtctttttcgccagcctttacactataagagacgcaaggtggtttttggtgttccggctacacacgtcagcttgtgaccgcgctgccgcggtgggactgttgagggaattattagagatggtgggtggcggaagagccaaggcggaggaggagatagagcaagaggtggggattgaagatttgattcctagtggtaaggctaataagcctctttgggcgcgtggggttgacttgcttggctactccttgaactctttcaagctggcgaatctcaacttcattgatgctaattcggctcggcactctcaggttgtgaggttgaagatgaacccagatgataccgacaggcttgttgctggctgcaaatcaaggggtattaaactctgtggagccctggcagctgctggtatgattgcaactcggtccaccaaacccttccctgatcatcaaaaggaaaaata

SEQ ID NO: 13673 - DNA, 563 bp, Gossypium hirsutum
  unsure (1)..(563): unsure at all n locations
  Clone ID: LIB3543-039-Q1-K1-B2
catctccaanaanatattttcttgaccaggnaactttttaaagtgaacctttttggagaagtcaattagggtgataatgggttgccttctttttgcttgtttttctgcttccaagaatgaaaaagaccagcatgtggtggatgggacttcctctattgatcagaaacctgaagccaatgaagctgttcaatcaagtaaagaagattttgggataccctttaatcccattatagtgaaaaaagagaagctaggggagctattgaataacagtggtgaagagaagttaagttttgatttgtatgtgaagactcatgaggaattggctgttgaatcatctgagaagttgttgaaaaatgatgaggggaaggagagtgaggagactgtagtttttaagcctcaaaacaatagatatcagaacagtgcagaaagtgaggatgaattgaatgatttggatttagaaataaatgatttagatgatggtaatgaggatgatggcattgaaaaggctaaaaatgagtcacaattggtaatanaagagtcatctgagtcactgttttctttgt

SEQ ID NO: 13674 - DNA, 424 bp, Gossypium hirsutum
  Clone ID: LIB3145-013-Q1-K1-B5
agtcaattagggtgataatgcgttgccttctttttgcttgtttttctgcttgcaagagtaaaaaagaccagcatttggtggatgggacttcctctattgatcaggttagttttgttcttcactttcattgtttatgattcttggtttttttttttttaataaatttataccatccagaaacctgaagccaatgaagcagttcaatcaagtaaagaagattttgggataccctttaatcccattatagtgaaaaagtaagttatggtaatccagtttcagacccttttttgtaaattattatttatgtttatgcatgtgttgatttgcttgtttcatgtcaatttatgtagagagaagctaggggagctattgaataacagtggtcaagagaagttaagttttgatttgtatgtgaagactcatg

SEQ ID NO: 13675 - DNA, 750 bp, Gossypium hirsutum
  Clone ID: GOSHI-09MAY01-C35266_1
gattgaacagctgtaggaaaccttaatgattactggtttacctatccctgtaactttgtatcccactggcagatggccaagttctttaatataaggttttagttgacttggcggggagagggatctttttctttgatgagcattattccattattggatacagttgttcatcggatggcaagtatgatatcaaaacgttattatatgcctcacctcatgtaactcatgtctggtctcttgcttgatgtaaagtggtgaagatgggtgtggttaatggtacctattagcttgtgagcggtaaatatgaggttggttctgtaccgctcctgttctatcatccatgtatttcagtgatgaacctgaatatctgaggaaaactgtttgtataggtgtgaagctaggggcaatcatatacttcatttcacttggcaggcaggtcaatcgctggctgtatttgagagataagatgtgaccactaagagtgaataggcatgttttttatcagtgcacttgacattaggttgcttgcttgttcttacaattttaacatgttgggtcaatcgttttgcaacactgtgatgctgcatagaaatggagaaaatctgcctacggttaacaggcaaaacgaatgtttatccacaaagtgctccgttctgtgcgtacattgaatactgtgaaaatcctcgaattacgtgaagcaattcatcatggtaaactctattgggtaacttaacttaattactggggggg

SEQ ID NO: 13676 - DNA, 560 bp, Gossypium hirsutum
  Clone ID: GOSHI-09MAY01-C35206_1
cttgtaataaaaagcttcaaaatttggacttgggaaataatttaatctctcaatgggcggaagtgaaggcactggattcattagtccatctgaagaatctcaacctacaaggaaatcccatagccgaaaaagataaattggctaagaaggttaaaaggttactgcctaacttacacatattcaatgcatgaccaattgataaaagcataaaaaacaaagagggtgagatcgtcaacattgcttcgcatagttcagatattcacatggaggagaaaacaggtcggaaaagaaaaaggaatcccgaatttctggtgtcggttgagaaacaagacgttaatcatgatagtaatgctactgcttttgataccgagaaagaatcgaagaggaaaaagaagaaaggaaacgacaaactgacagaagttcccgttgctgaggacgacgtcgtcgttgagaaggaagaaaagaagaaaaaaccgaaggtcgaacgaaaaggaggggaaacaaatggtaaagttctcaacttcaatgcacgaggatggtaccaccgggtgaagagaaac

SEQ ID NO: 13677 - DNA, 442 bp, Gossypium hirsutum
  Clone ID: GOSHI-09MAY01-C36976_2
cgacaattccacgccctcgcccaatccgacactcacagggaattaataataatatctccctctggcgctgactatgctttccaaaggcattatggatgtgagacttgggctcttattcctctttgtattgggtgcaagctgggtttgcgatgctagacaactagaagccgctccggtagtactctctggtgcatcagttgtgcagacaaaccaggggcaagatgaggaagtagtagaaaacattgtttggaaggacaatgtgtgcacattgtgtgaggaatttgctactgaggcaattaatttcctttcacaaaacaagacccagactgagatagttgaggtgcttcacaagagttgctctcgtattccttcttttgagcagcagtgcatcacactggtggactactatgttcctctcttctttgtggaaatctctttgata

SEQ ID NO: 13678 - DNA, 871 bp, Gossypium hirsutum
  Clone ID: GOSHI-09MAY01-C36976_1
gtgcgattttgcgcaaaatctttgatgggattttcttatagtacttctttgctgaaacttgaaggctttggtttctctttcatcctacatgttgtggtttagtttcaagtattgaaacacaaagaatatgacttgttgcattatggatgtgagacttgggctcttattcctctttgtattgggtgcaagctgggtttgcgatgctagacaactagaagccgctccggtagtactctctggtgcatcagttgtgcagacaaaccaggggcaagatgaggaagtagtagaaaacattgtttggaaggacaatgtgtgcacattgtgtgaggaatttgctactgaggcaattaatttcctttcacagaacaagacccagactgagatagttgaggtgcttcacaagagttgctctcgtattccttcttttgagcagcagtgcatcacactggtggactactatgttcctctcttctttgtggaaatctctttgatacaacctgaagttttgtgtaaagaggtcaacctatgtcagaaatttgcacttatctctacacaaatccgtgaagattgctgtggggtgtgccaccatgctgtttcagaagtactaaccaaattgaaagatcctgatacacagctggagataattgagctccttttgaagggttgtgattcagtgcagaactacgtgaaaaagtgtaaaagcctagttttcgagtacgggcctctgatccttgcgaatacagagaattttctggaaacaactgatgtttgcaccatactccatgcctgtaatggtgcgaagcaacactggtggcagattcataattgtagcctcaaaccacaaggaaatgctgtttgtaaaataagtttt

SEQ ID NO: 13679 - DNA, 1186 bp, Gossypium hirsutum
  Clone ID: GOSHI-09MAY01-C36926_1
cggccgcgtgggttcgagggttataggattggctaccgcagaaccaatttgatcaatcgaagtttcatctctctttcttctatcctgcaaaccctatagaaatttcctcaagtgattttacgagaatgtctcgggtctatgttgggaatttggatcctcgggtcactgagagggatctcgaagacgagtttaggatttttggcgttctccgcagtgtatgggtagctcgaaggcctcctgggtatgcgtttattgagtttgatgatcgcagggatgctattgatgcaattcgtgaactggatggaaaaaatggttggcgtgtggaactttctcataattcaaaaggtggtggaggccgtggtgggcgccgtggtgggggtgaggatttaaagtgttatgagtgtggtgaacctggtcactttgctcgcgaatgccgctcgcgttatggatcacgaggcctgggaagtggccggcgtcgaagccccagtcctcgtcgccgtaggagtccaagttatgggcatgggcgcaggagctatagtccaggaagatctcctcggcgccgcagcatatcacctcgtcgtggtcggagttacagcaggtcgcctccatatcgttattctcttcgtgattcaccttatgcaaatggagattaaagtgggtactgaagcaaaatctgaaatgacagcatctatggcaaacaaatattcaaatactatagtttcaaataggttcagtgagcaaaaaaggatttaggttacttgttcgttttgtgacggttaggttgttagagcttgtggttttgcatggcttccactctgcaaagtgttagggttccttggacccccttctgcggtagcttgcttactgtcctcagcgtataaaactcggaggtcctgtttcttactttatatgggtatctacttattttattgtttactgttttggcttaatcccctatctattttttttatttctcactaacttcttatctatttatctacttttcttttatttcttttctttcatttacttcttttattttttttttttgctgtttctttttttattttctttttttctctctgtttcctttttttctatcctttctttttcttccttttcccttctcttctctttctttcttttcttctttcttttcaattttaccttttttccttttcctttt

SEQ ID NO: 13680 - DNA, 668 bp, Gossypium hirsutum
  Clone ID: GOSHI-09MAY01-C36546_1
ctttttctacttcactctcttgaaaaaggaagagaagaaaaacttgtttgttttcttcaatcaaaaccgggtttcctagcggtgcccgtctcatcagatcggatccggtctttttttcaggtcaattgggttttcgaatattttatctggtatctcgataatggccggtgaaatgactttggagaatcctgaacccatcaatgcggttccaaagtctgaagctgttcccaaattggctgagcaggatgcgaattctggaaaaattggaatggcatctgatttgacttccacaatatcttcttcaccatatgaatcttctggtgcaaaagctgagagtcatcaagacttggttggagaacctggtttcaatcaatctactagctttgaaaattattactacccaggttatgatgggtcattcactcaatctgatgacaagggttattttcttaccgatggttcacttacaggtgtgcaatcggaaaatgggtccttggtctactatttgcctggctataacccatatgctactggggctctaatgggtgttgatgcgcaatgccttggtcaacaaccatattattcatctggatattttcagcctcctgtttcctatgcatcagaagccatgccttgttactcatgggattcaacatatgcttgagatg

SEQ ID NO: 13681 - DNA, 550 bp, Gossypium hirsutum
  Clone ID: GOSHI-09MAY01-C36576_1
tctgtaaagttgcattatcttctggcgacgcgaggaacaaaaagaactcagtaatggctaagccactcaaggaacaagcctttgctacaccagaagcagtggctgaacttgttcagaaggtacattcagctattcagcgagaacttccggttgtgatagcaaagatgaaactttatttacgggggggcatcaacaagaacaattcttttcaaacctatcaagacaaatattgtggaagcccatatccagattcaatctcttttaaaagcagagtattctccagaagagaaacgtacaatcaacatggtctcaatagaagaactggaatcacagcttgacaatctcttgtaaggagctaacaaaaggtcaatcaaattctttcaactcgactcggatttctttagtaaattttggctaatacacaccctggttcagtctgttcataaggttatactgatagataagtcgaaaaaagtcctcatacaaaattgcccgctcttcacaattttcctccctcacgcccatatcttggctaccattgttgatcata

SEQ ID NO: 13682 - DNA, 1058 bp, Gossypium hirsutum
  Clone ID: GOSHI-09MAY01-C36516_1
atcatttttctcgatccatgcttttttcgatctggaacaaaaccattgcttagtgattggacttccgatcaagggaaagctcgtcaaatcaattcagaattgactgataaatgcgttgtgagtgatgcattgaaaagcacattcacgggcgcgtgggttttgtttggtctcatttccgggactgttttcctcttatgtactggtttcttcttccggttatacggatgggaatttctacatgaggcattgctctaccatcttactcgcacggatccaagacataatttttccatctatttctaccatatctatcttaactatgaacgcgagctttcggttcttgaaaagctcgtctcctttttgcctcagtttatagtgcagctagtcctcattttatgcttcgcaaaggatcttgtattctgcttctttgtacagacagtggcatttgtagcattcaataaggtaatcacggcacagtacttcgtctggttcttttgtctcttgcctcttattttgccatggagcaatatgaagcttaaatggaaaggcctatgttgcattcttttgtggatgggagctcaaacccattggttattatggggttacctgctcgagtttaaaggcaaaaacgtctttctacagctctggatggcgagtttattgttcctggctgctaatactttcatattgatcgtgcttattcggcaccataactacggtcctgtatttagacaacatacagacttgaagacaacaaagacaacatgaaaaaagtgcgagtgactggagagcttagatttcataactttcttgtagcatagcttggaaaaaccatcactggagcatcaaattgaaccatcactggagtatcaaattggaacatatcccatttcctttttttgcatatttttggtgttttgaagggttttcatgtactattttccttaacagaaattgttgatcaagttcttgcttaattagtagtacatttgcttactaataacactatgctaaattttgtattatacttttatttcaaggaatacatccaattatgc

SEQ ID NO: 13683 - DNA, 358 bp, Gossypium hirsutum
  Clone ID: LIB3146-053-Q1-K1-E8
cggacgcgtgggtccgggactgttttcctcttatgtactggtttcttcttccggttatacggatgggaatttctacatgaggcattgctataccatcttactcgcacggatccaagacataatttttccatctatttctaccatatctatcttaactatgaacgcgagctttcggttcttgaaaagctcatctcctttttgcctcagtttatagtgcagctagtcctcattttatgcttcgcaaaggatcttgtattctgcttctttgtacagacaagggcatttgtagcattcaataaagtacggtacgcgaatttaacttccctaacttcattttattgacaattgtcgttttttt

SEQ ID NO: 13684 - DNA, 555 bp, Gossypium hirsutum
  Clone ID: GOSHI-09MAY01-C36776_1
gtcaagattttttctcactcacaacaataagaaagaaaataggaaatggcaatggcggaagagaaagaatcaacgtcgattccactgagtcaagccgaaaatggtagtaccgatcccgaagatccggctaagtctccacctagctcccccaattcctccactcgcaaggcatgttgttttgttctccagagttggttctcgaagaagttcatgactggatgcgtggtcctttttcctgttgcagttacatttttcattacttggtggtttattcagtttgttgatggtttcttcagtccattatacgagcgacttggcgttgacatatttggactgggatttatcacatccctgctctttgtcttctttgttggtgtttttgtttcatcatggatgggagctgctgttttctcagtgggagaatgggtcataaagcaaatgccctttggtaggcatatatactcagcctcgaaacaaataagtgctgcaatatctccagatcaaaatactacagcatttaaggaggtggctatcattcgtcatccacgtgtgggt

SEQ ID NO: 13685 - DNA, 488 bp, Gossypium hirsutum
  Clone ID: GOSHI-09MAY01-C36766_1
ggaggctgcagtgcttaagaagtttaagtctctgaaacacgtgccaatttggaagcaggagaggcccaaaagcataagagggggggatgaactgaagatatacagagtatatcctgttggcttgacacaaagacaggctttatataccttcaagttcaaaggggatgctgatctcaggagccacattgaaaacaacccttgtccaaagtttgaagtcatcgtccgctagattgaaggtcacattatctcaactttacgaataggtgacagattccccatctcagtgctgtttgctgaaaatagttcctgaaagatcaaggcaacctcatgcgggtgttaagaatatcatatatatgtatcattgatgggcttggttataattttactgatggctctgttagttttagctcactttgcatctgaccctttgagatttagcttcagaattcttcaaagcattaataaaaagattggataatttaattttt

SEQ ID NO: 13686 - DNA, 311 bp, Gossypium hirsutum
  Clone ID: GOSHI-09MAY01-C36706_1
tttggagttgtttctcagatagttgatagagaagtcacacttgaggccgcccacgcgtccgcctatacattcggtattcccgaagcaattgtttccccttggttgcagtttcagactctattagcttttatgtagtacaatattaataccaatgtccatcgtcttaggttttttatttgttcacttttgcacattgagttgaatgctgttgctatacatttcgactaaatgttagtgtattttgattgttggattggttgtttgtagtgaatattcaacctttattttaattttatatttttagttttatc

SEQ ID NO: 13687 - DNA, 486 bp, Gossypium hirsutum
  Clone ID: GOSHI-09MAY01-C36736_1
tctatgcgtccgcccacgcgtacggggagctcgggggttctgcgccgttcggccttcatttcatcacggcgacgatgaaagatgacttttggtgacccccccttttgctcctccgtttactccaacacggtgtttatcgatttaagccctgaagtcccatctccgatttcgatttttagcgaaggagatgtggtctccgacagttcattcgcgaaggtaaatcctttcctcttcgctttattcactttcgaggagaaaaaacaaaaaccgagtacaatcgaaagaaaaaaagaacgcccactagtttgaatcggaaaattaccttcgaatataggggggcttttctttggatttgatatctggatctttggttttggggtggcgtaaaaaaaataccaagactcaaaatctggctttatagccgaaaggaaagaggaaaaattaatgaaaaatcaaatacaatggttggcttttttgttctctttg

SEQ ID NO: 13688 - DNA, 358 bp, Gossypium hirsutum
  Clone ID: GOSHI-09MAY01-C36726_1
cccacgcgtccgattttacatgaacccgcaacgtgccaccaccatctggtatgtcccccgcaagaagagtattttcagccagcaagatgacattctaactgctgccgagaactacattgaagagcatggcactcacgaatttgaaaggcttataaccaaggctgagaaagaagaaagaatccgacgcagcaacaactacatgatctttgatgacgattatatatattgacttgttttgtaaactagcaactttctttgttgtaagaaatgctatttaatgatgtatcatcttggcttaattatcacattttcctttttttgttcaaacatttcggagcactatttaaagttaatattt

SEQ ID NO: 13689 - DNA, 870 bp, Gossypium hirsutum
  Clone ID: GOSHI-09MAY01-C36166_1
cccacgcgtccgggagtcagaaggaggcttcccttatgaagctcatatgtttcctgaaatggaatttgtgtgaatgcttcccagtatcacaaaatcatgaccatggacgtatctgatgcttttcctttcctgcaagctatcatctggtcccatacttgaggcactacatgttgaccctgcatctggtgtgtctcttgataaagaaaagagcaataaagtgtcaaaaccagcagtaagtggattaccaacattagccaagttgacaaaagcaagtgcctccggaggaccctcaaaacaggggcagattgagaagaaagaaactcctcaagagcggctaaaaaggattatgaacagacagttaaacaagcaaattaagaaagacactgctgcggaaatggctaagaagcgagagcaggagcgccaaagactggaaaaacttgcagaaacaagccgtttaagtcgtcaaaggcatcgcagccgcagtaggagttacagtcgctctcctccaagaagatatcggcggagtagaagtccaagtaggagtaggagttctagaagatattattctcggtcacgatcacgatctaggtcccactcttactctcgttcacgttcacgctcaaattcccgttcacccagggtaagaagccgttcaaggtactgagaaggtgattgccataaatgttgcaggcaaagctatttgatatattatgtaaggcgatgctagttttgggtagcttgtcaatatatatgcgaaatgttgtagggtgtttttgagttgcggtatcttcttatcaatctattgggcttttgcattttatgtaatataaataagtaatttttaattccagtaattgaaatttgactctt

SEQ ID NO: 13690 - DNA, 435 bp, Gossypium hirsutum
  Clone ID: LIB3146-023-Q1-K1-A6
gcttgtcctatcacattgtttcttgtgttctatttatgatttgatgagctgagtgcctctatagttaagaaggacactgctgcggaaatggctaagaaacgagagcaggagcgccaaagactggaaaaacttgaagacacaagccgattaagtcgtcaaaggtaccaaatccacagtcgcagtaggagcaatagtcgttctcctccaagaagacatcgacgaagtagaagttctagtaggagccgtaatcgaagatatgtttctcgctcacgttcacgatctaggtcccgctcttactctcgctcgcattctcgttcaaagtctcgctcacccaggtaaaatgcttggcagtgaagacttttctctgaatgatgcttggaggctgatttaatgatggtataaaaaatacagggtaagaagccattcaaagtactg

SEQ ID NO: 13691 - DNA, 626 bp, Gossypium hirsutum
  Clone ID: GOSHI-09MAY01-C36106_1
ggcgcgtgggttaattttccctctttactttccccctttgtcaagaaaatggctcttaaagctgttaatgtcaccgacgtccctaacctcgaccaagtcccagaaaacacgcttctctgtctctctactcgtctcgttttaattccgaaggttggagttgaacagtgaagcaacgtttaaggtaccgaagtttttggtaatagggcatagagggcatgggatgagtgggttacaaagctctgattcgaggatgaaagccattaaagaaaacaccattctttccttcaattccgctgctaaatttcccattgatttcattgaattcgacgttcaggtgccgaaaagggactgccctggctttggaggtgataaaaactggccatgagccaatcacaggaaagtaaagaaagccattgtggttttttgtaggtgacgaaagatgactgccctgtcattttccatgacgactttatcttctctgaagaaaatgtaagttacatattttccttcaaaacttgcatcttatttagcgaggttatttaagcttgtcaaaattaaatttttatttcagggtactgtcttcgaaaaaagagtcacagagttatctctggaggaatttctatgct

SEQ ID NO: 13692 - DNA, 1284 bp, Gossypium hirsutum
  Clone ID: GOSHI-09MAY01-C36036_1
tccactttctgactttctacagatccaaacacgcacctttttctttcctttcccatttttgtccatactacaacgactcttggtggaggaccctttttctctcttaatattcgtcttgataagtagggtaggccatgtgagtaacgcttgggcagggacaaggatattggtcctgttagtgtgcagaagatgggaaaatgcaagggttgtgggaaattagcgaggatgttgccaagggatgggcctgtgaatgctcactattcatctctactgtgttcccctgttgtgtctgtttgggattgcattgtccgcaagatgagatattcctatagacctgagtgggtgtagtagtcttggtgttatattagttcgtactaagacaataaaattagaaataggtagcatcaaaacttttattttagggaaaaggctaaaaagtaaaaaagagaaaagctttatagggaaatgtatacgagttagaggaacctgttaaagcaaaaactgaaaactgggttttaaagcattttaagtattcatggataacaaggcatgtaacaaaatgcaaacagtagtgagtaaagcgaaaaagaagcaggtgaaggatgagttggaacgtattaaacaagctgagaagaaaaagaggcggttggagaaagcccttgctacatccgcagccatccgttctgagctagaaaaaaagaaacagaaaaagaaggaagaacagcagaggcttgatgaggaaggtgctgcaattgctgaagccgtcgctttgcacgtcctacttggtgaagactctgacgactccgctaacattatgctaaacaaggaagaggggttcaactgctggggttatggtatatatatggatggaggaagggcctatcttccccatcaacttcacccaaactgtcaaggctgggtctcaaatgcatatagaactggggacggtgactggtccttctcatatggaagggaggtgcaagcaccatttttggagaatggaaggttaggaagtggcggacttccagttggtctgattgcagcacaggctatttcagcactccaaatcacagaggatgcaaaggtcctccactgaggctagacaaagcgttttgttgtttggtcataattctgaataataatgactctctggtatatgtatatgtatatgtatatgtatatgtatatgtatatggatatggatatgtcagtcatatgttgtggttgctgcttctgtgtatcgaactatcctatcctgctctcttctgtctgttaaccatacta

SEQ ID NO: 13693 - DNA, 575 bp, Gossypium hirsutum
  Clone ID: GOSHI-09MAY01-C36306_1
tgcaaatgtcaaaattctccttgtattctgatgatcgtcagaagtctggtctggatgccatttctgatatatattcaatattacgagatgaagctgcaagggctaacaagatggacgtgagctatgcccatgcattgaattggatatctagaaagggatatagcgaagctcagttgaaagaatgtttagaggaatatgctgccttaaacgtgtggcagatacatccccacacttttgatatccgatttatagatgcttgaagttgctataaaaccacttggaagattaagctgcatccatttgccaagttcgaaattaagagatagttgtccgctgtacccttttaagttagtagttaatatttgcagagttgagtttgaaccttgtttgactgtaagattgcaagtgattatgttcttcacatgcagcaagataaaaaacgtttctgtttcaacttttactttctactaatagcgaaagagatgatgattgttcaacttactgcattattgtactgaattcaccatctcatgtttagcttgttggaattgaatattaatgtaatggaatattta

SEQ ID NO: 13694 - DNA, 768 bp, Gossypium hirsutum
  Clone ID: GOSHI-09MAY01-C36326_1
cccagcgtccgaaatattcaaggactgctttaatctcccatggaggagagattcgccgccttggaagagattgattgcccgtgactgactcacaaggaggccgaaacgacagaaataactgattctgtccttaacaggatattgacatctcggggattgcgtggagagcaaactgcagttgtgtcccttgatgatgttgacttgagacctagcagcacaaatggtactgatgttatgtcctcccgagttcattctttgttccgtcaaagacaatcacaattatgaagagttgcaagatttacttctctgtcatctggattgaattcaacagaaaggatagttgaagcatatctccgtagcaacctgatgggaagaaaccaggagcagccaccccaggtggatgatagagattcgttctcaagcattgctgctgtaataaactcagagaatcaaatggacacggctgttgaaatagactccgaagtatcactttcggcttcatcttccagaaggagaaatgatagtttcagagtttcagatgttgacagcggtgactctcgagcacatagaaggagacgactgaactaggaccatgtttagttcacaaagaattcagctatagtttggatgtgaatcaaaatgttaccatcatttccttggagaaacaaatttgttgggatctagaaagcaggacccatctttagttttttactctcccatgtacataaacaatgtatgtgataatcttgtttttaataattgttttgc

SEQ ID NO: 13695 - DNA, 791 bp, Gossypium hirsutum
  Clone ID: GOSHI-09MAY01-C36256_1
caaaaactgtgttgtgttaagagaatggttgtggaggcagaaattgatcggttgccaatagacttgttggctcatatactggtgatgatcacttctttcaccgatttagcccaggcaagtggggtttgtaggaaatggaaacaaggggtgaaacaggctctggctagaagacacaccctgagttttgctggttgtaaaatggacgatgactccacttctcgtcttgttcgtcatgcttatagcctcgaagaactcgacatttcaaggagtcgttggggttgccaaataactgacaatggactataccaaatctcattagcaaagtgtgttagcaacttgacatcagtttccctttggggtatgacagggatcactgataaaggtgttgttcaattgataaccagagccaattccttgaaacacctgaatattggtggtacatttatcaccgatgaatccttatccgcaattgcccatagctgtccacatttaaagagcatcgtgctatggagttgccgtcatgttacagaaagtgggctgtttgttcttgtcaataaatgtcgtaaactagagtcgatcaatgtgtggggaactagagttcccttagactgtttcattggtttgcttactatccgaccagctcttcaaataaaaccacaaggtttgccattaaacatcggagcagtcgccaccatgttacctgttgtttaaggtgttcatccttctggggatttcgattattgtcatatgaatttgttgattcaataaattgaacagaagattctcccagg

SEQ ID NO: 13696 - DNA, 1100 bp, Gossypium hirsutum
  Clone ID: GOSHI-09MAY01-C36206_1
aaggcattgaaagccattttggagaaagattaaggcttgatcaacatcgtgtagcttggagtcctcagcgtgttctggcttcaccaggtcaaacagatatcagttcttccgcagtcagacctgctccatcttcactcgaaatcccaaagcattctcgagatactgggggctctgacacaaacctaccttctcctactccgaaccaaaatccctctggtgggaataagggacaagcatttgaaagcaaatggtcacctacccctggtcagtcatcaggtcctcttccggtacctaatccattccgaggaggtgccgtagggctgcaaccccctactgttgtttcagagagtgggagcccagctgctcccgtagtgcattcacatccgatggtgtcaagtgaatcactcaggagacaggtcaatgttcaggcctcagttaatttaggtgctgatttgaaaaatgcaggtgtatctatccagaatttggttcaatctttgagttctaataatcctcctgctgaaactcatggaccgggttctgtctcagtttcaaggcaagaagcagttgctgtaccctctatgcctgccactggaactcaaaggtggacaaacgcttcaactcagaagcttgagccaaatccctcccttgccatgcctgctcaacctgctgcttatagtcactggaatgacgcatcacaggccggtcaattccctggggttttccaaactcctggtcaaccaaatatggtgccatcagaatcctggagacctgctgttccagttcagtcaaacgttcaacttcctgctccaccaaatttaccttggggtatgactgtccccgataaccaaggtgccaccgccctgagacaggcaccagggaatcaaaaccctggttggggaccaataccagggaatcaaaacatgggatggggtgcactggtccctgcaaatacaaacatgaactggggaccatctagtcagggatcagcatctgttaatccgaatcaaaattgggctccacccggccaaagacaagtacccgggaatgtaaatccaggttggtctgctcctgggaatacaatccaaggatggacaccacct

SEQ ID NO: 13697 - DNA, 782 bp, Gossypium hirsutum
  Clone ID: GOSHI-09MAY01-C37916_1
cttaaagaaactattgaatggggtggccgaaacatggacaagaaaaagagcaaacttgggggcattgtagacgatgatcatcaaactgataatagatttaaagatattcgcattgaaaggacagatgaatttggtcgaattgtgactcctaaggaagccttccggatgctttctcataaatttcatggcaaggggcctggcaaaatgaagcaagaaaagcggatgaagcaatatcaggaagagttgaagctgaagcaaatgaaaaattcagatacaccttcactttcagtggagaggatgagggaagctcaagctcagctgaaaacaccctaccttgtccttagtggtcacgtcaaaccagggcaaactagtgatcctgcaagtggctttgctactgttgagaaggattttccgggaggcttgacgcctatgcttggtgatagaaaggttgagcatttcttgggaatcaagcgcaaggctgaggcagggaattcaggccccccaaagaagcctaaaccttgaaaattgtaagatgttgtatggtttgggtatgatgaaagatgaagatgggagatggctgcctcctggtggtcaaggtatctgtacccacctgttgaactcaaatccaagtagtagagaaattttcccccttgattttacttggttttttgggaccatgaaaattggtgctcaaaaaatgatttttgtattgtgtaagatttgccctaattaagctgatgccaaatgcggtattatttaaagctgatttatgtttgcctctt

SEQ ID NO: 13698 - DNA, 780 bp, Gossypium hirsutum
  Clone ID: GOSHI-09MAY01-C37816_1
cccaaatcatatatattttaattttcaaattaggggttttgattctgagtgaaaaggggaaaaaatgaaagcttcactgaaatttcgcgaagagaaaaggcccgtgttaagagcgaaaatacctctgagcatattcggctcgccgtttcaatcaggactcctcgccggcgaaactaaggagcttactttagatctttctaccttcttcgaatctggaccgtccatcaaggtcgcctaccgacctaatgacacgtggaacccattctctcttatcgtcaagactggaactggacccttcggttctcccatctccagttctatgcttatgagtgctgagttcaacctccttggccatggaaaccctagcttcatgctccacttcaagcctcagtttggggatttctccatcaagaagtcacagtcttcgcttttcgataaagccgtgaagccaagagatggcgtcgttttggaggacgcctcgtcaattgaagtgatggatatgcctgctgttaacggcgattccatcaggttctttgccgagaaaagaaaactagcggatttgagttcgagggatatcgcggggattctgtccggaataaaggtagcagcgaggaccacagtgccagtgaagggaaaggcgttggtcaatttccggtggggaatgaggatcccgtcagagatgaagagcggcgtatgcggaaatcgtgatccgaagactggagtttctttgacgaagattccatttctggtgatggataagattggtatcgaacatgtgga

SEQ ID NO: 13699 - DNA, 710 bp, Gossypium hirsutum
  Clone ID: GOSHI-09MAY01-C37486_1
cggacgcgtgggcagcgggctagatctatgcccgtttcgagatttgtttcttcttgggtccactttaagcgcatggacgctatggaaaagggacctaatgtgaaagccgattataactcggatagcccagatgacgaaaacggtgaagacgaagaagatgggcaagaccaagagttttacgacgatgggtataaaaacggcagcctaaatacgagaagtgtacaaaagttgtacagaaatgggattggaaacaacggtggaagtgtcagcggtgacgggaatagcggtgggttcagaattaggatcccaaccggagttagtatagctcagccagggccaagattttatggaaaaatagatcacaagtacggtgcaaacccaaatcctaaccccaatattaacgcgaattctcactcccagtacagggtaattttggtggggccggctccggatcggcttatgggactaggattttaagagggtttgaggatctgcccgagaaaacggcagcatcagggaagagggaaagggaaagagttgtctgtttcagagatggtgtcagctatttaggtgttttgagatgggttcgcaaggatggagcagatgaagacgcatatggccagggagatttagtcgatcaggatgtagatggagatctattggcccctgatgtttttttttgttcagtttttcatattttaaatcattat

SEQ ID NO: 13700 - DNA, 956 bp, Gossypium hirsutum
  Clone ID: GOSHI-09MAY01-C37466_1
ggtttttttatctcaatttcaaacatgtttttggaccatcatcttgttcctttttatggttctaaattgtcatgtaaatgaagcagctttggtattgcctaagaatgtaactgtaactgcagtttttgtgtttggtgattcaattgttgatccaggtaacaacaacaatctcccaactatagctaaaggcaatttcttaccttacggtcgagatttcaaggatggaccgactggacggttctcgaatggcagagttccttctgatcttatagctgaagaatttggtgttaagggattggtacctgcttatcttgatccaaaaacacagctacaagatctccttactggtgttagttttgcctctggtgctgcaggatatgatcctctcactgcaaaaaccgcgaatgtaataccgatgtcgggtcagttagagctgttcaaggaatgtataaagaagataaaaggaggagtgggtgaagagagagctgcaactataatttcagaagctatatatatagtgtgtactggcagtaatgatatttcaaatacttatttttctactccgtttaggagacctcattatgatatcaatggttatgcagagttcaacgcccgctatgctaatcagttcttgcaggacttatatggattaggagcaagaagaataggttgttggggttgccaccaatagggtgtgtgccatctcaaaaaaccataggtggaggcaaaaacaggattgctatgaggctgaaaaacaattggcaattgcctacaatgccaagctctctggtgtgatagattctcttaaagctgtttacactttgcctgacacaaagctcatctttcttgacatttactatcctcttctttccctcatccaaaaccctgcaaaatatggttttgaagtagcaacaaaaggatgctgtggcactggactaataaaaactattattttt

SEQ ID NO: 13701 - DNA, 409 bp, Gossypium hirsutum
  Clone ID: LIB3145-042-Q1-K1-E3
attcaatcaaacccctgcctccatggtactttaacagcttagtgtttacaattgtcagggactaaaaaataatatttctatttgcagctgaagaatttggtgttaagggattggtacctgcttatcttgatccaaaaacacagctacaagatctccttactggtgttagttttgcctctggtgctgcaggatatgatcctctcactgcaaaaaccgcgaatgtaataccgatgtcgggtcagttagagctgttcaaggaatgtataaagaagataaaaggaggagtgggtgaagagagagctgcaactataatttcagaagctatatatataagttcaacgcccgctatgctaatcagttcttgcaagacttatatggattaggagcaagaagaatagggttgttgggg

SEQ ID NO: 13702 - DNA, 660 bp, Gossypium hirsutum
  Clone ID: GOSHI-09MAY01-C37426_1
cccacgcgtccggtcgctcttagccttttactcttttactttactccttggagtactcgatctcgacaatataacccccccccccccaaccctttttttttcctttaattcaaagccacaaagccaactcaaaacccacaaaagccaaagcctaggtacacagaaactacaaaaagaaatagagaaagaaggtatggaagtaggggtgaagatggggatgaaaggaggaggagatgaagtgggaggtaaggagaaggagaaaatggggtatgaagagacagagctgaggctagggttgcctggtgatggtgaggttgtaaggaagagagacttctcccacactgttgatttgaagcttaaccttatttccacctctccaactgatgacaaggacaaaaatattgtcccttctcaccttgatcctgctaagcctccacctgccaaggctcaagttgtgggattgggccaccggtccggtcatttccgaaaagaacatgttagccacccaaaagagcagcgccagcgaggacagtggtgagaaggccgcctttgtgaaggttagcatggacggcgcaccctatctccggaaagtggacctgaggatgtacaaaacttaccaacaactcttcgatgctctagctaaaatggtcagtcttcact

SEQ ID NO: 13703 - DNA, 756 bp, Gossypium hirsutum
  Clone ID: GOSHI-09MAY01-C37696_1
gctgcggaccactcatttccagcaactgaagcaacaacagctaatgaagcaacaaaacgcgttggcgtggggagggttgaagcagcaacagcaaaaccatgtggtccaaaacagaggaaggtatgccaataggactttgggtttggccccatctgcgtggccccctctgcagcagcagcagcagcagcagcaacagcaaccccagccactgaacggatcgggtatgcgggctgttttcttgggcaatccaaatgggaaaagggaatgtgctggaactggtgttttcttgcctcgtcgcgttggaagcttttctgatcctcgcaagaagacagcttgtcctactgttttggttccagctagagtggctcaggccttgaacttgaatctggatgagattggggctcaaccccagcttcagcaccctcggttcaacccaagcttcacttctgatgctgctgctttgaggcttcgaagtgggggaaattttgtgggaaatcaaaagccgcggagtttgaggccacagcaagagatgagtcatgaagttcttttaccgcaggagtggacttattgactcaaacctgcatgcggtggtggctttctaattgttggttctcttgttttaaacgtttttttttaagtttagaaattttaaggttagaaaaaaaaaaatgggaaaaaatttgatatttgctataggaaaatatactatactggatatataggtctaaaatggacaatgggaatgaccaagatatt

SEQ ID NO: 13704 - DNA, 439 bp, Gossypium hirsutum
  Clone ID: LIB3145-045-Q1-K1-C9
aaccccagcctcagcaccctcggttcaacccaagcttcacttctggtagcaatagtacttaattgatccctgaaatccgaatcgattcatttttgtttatatcctttttaactgtttagttatttggtttttggatttgtatgtaattgtagatgctgctgctttgaggcttcgaagtgggggaaattttgttggaaatcaaaagcagcggagtttgaggccacagcaagagatgagtcatgaagttcgtttaccgctggagtggacttattgactcaaacctgcatgcggtggtggcttactaattgttggttctcttgttttaaacgtttttttttatagtttagaaattttaaggttagaagaaagaaaatgggaagaagtttgatagtttgctatagggaaaatagtaatatagtgggtatataaggtttaagat

SEQ ID NO: 13705 - DNA, 1185 bp, Gossypium hirsutum
  Clone ID: GOSHI-09MAY01-C37686_1
aaaaaggaaaagtcgaagatcatggcaactacaccaccaactcggagccccgaactccgaaaagacccggttacaaaccaatgggtcatcttctctccggcccgagccaagcgtccttccgatttcaaatccaaatcgccgcaaaatcctaacaataattcttcatcatgccccttctgcatcggcaacgagcaccagtgtgcacccgagatatttcgcgcccccccccacccgtccgggaaactccggggtattgagaacttgtatccagctttaagcaggaaactcgatcacccaaatggccagaatgacgattcgagtagcgagttgagcgggttgggttgggttgtagcgggattcgggtttcacgatgtggtgattgaaactccagttcactcggttcagttgtcggatttggatccgagtgagattggtgatgttttgattgcctataagaggaggattgagcagattaagcagtttgattcaatcaaatatattcaggtgttcaagaaccatggagcttcagctggggcttcaatgagtcactctcacagtcagatgctatctcttcccattgttcctcctagtgtttctactcgactcaacagtatgaaggagcattttaatcggagagggaaatgtagtctctgtaaggtccaatcaaaggacctcttgattaatgaaaccagccatttcttttccattgctccatatgcttcttcatttccattcgagatatggataattccccgagatcactcttctcattttgatgaactggacaataagaaggcagttgatctcggtggcttgctaaaactcattcttaaaaagatggctttgcagttgaataaccccccattcaattttatgatccatacttcaccaatacagattactgactctgagataccttatagtcactggtttttacagataatacctcagttaactggtgtaggaggttttgaactcggatctggatgttacataaaccctgtttttcctggtgatgctgctaaaattttgagggaacttaatgttcctatatagggattaggagctgattaacatcatactagtactgtgaaatcatattgcaataagacaatggttcaaacaatgtgcgtgaggaaatctcttgtaaacctatttaagccaaagctttctaattttatctat

SEQ ID NO: 13706 - DNA, 549 bp, Gossypium hirsutum
  Clone ID: GOSHI-09MAY01-C37656_1
cagaaatctttgcaaatgcttcacaaacccatcttcctctcagtcaatccgcaagcttcatcggcgccggatgcacctccaccatcgacgcgattttaatcggacccccaaggatctgatgaccctttgaccggagaggcaaaggaggaatgaatcgacaccgaatcagtaagccaatcctttccccaccttttgtattttcatgacaaattcaaaatagagaaagaaaataaagaaaatgaagaagtaacaaccaagattaatgaacgaatcgctttagagtatatttgcttccgtattcaaatgctatttaagcgtaatatatgaaaaagggagggaaataatcagatcttaaatcacctctttgaaaactgctttttttcaaactctcttttgataccgattttttactactatttattattattgcttcaaaataagacagaaagaacacataaaagcaaagaaaaggaacaacctttggggtttgaattcgatttctctttcaaaatcgcctcttttttttagtattcgatatctgtattcaat

SEQ ID NO: 13707 - DNA, 465 bp, Gossypium hirsutum
  Clone ID: GOSHI-09MAY01-C37646_1
atcagcaaacatgttgaagacttttgatgttcttgaagtttcaagaaggtatgggtctttttataagattcaaccctcaccaaaatatatattggggttaaaatataaggcattgtttctacatttggagccttctatgttactagaaacaaaggacgtcgagctaacatccttgttggtgcagacagcttcttcctaggaggagctagcaatgcaggtgcggtgaatatcacaatgttgatcataggacgcattcttcttggtgcaagcatctaaatgtgtttggtattttaggtatccaacatttattgatgcacttcagagatttggatgatcctttttacaatgcgtgcacctgtttgccatgttaactttgaatctttgaatctttgaatctttagatttaggatttgtttgaattatccttctaattagttactttttctcattttctacttggataga

SEQ ID NO: 13708 - DNA, 1370 bp, Gossypium hirsutum
  Clone ID: GOSHI-09MAY01-C37676_1
ataatattgaattgttatttgttgttttctcagctgcacctttctctggtaatagtatatgttgggtggaagtgcaatagatgatgattgggagttcacctctccttccaatggtattaagactgtggttttagttggacgtaccggcaatgggaaaagtgcaactggcaatagcattcttggaaaaaaatccttcaaatcaagggctagctcatctggggttactagttcttgtgaattgcagaaaacagtgctcaaagatgggcaaattttaaatgtcattgatactcctgggttgtttgatttctcagctggatctgaattcattggaaaagaaattgtcaaatgtattgatcttgccaaggatggaatccatgcagttcttgttgttttctcagttaggacccgcttttcacaagaagaggaagctgcattgcgtagtttgcagactttatttggtagcaaaattgttaactacatgattgtagtgtttactggtggggatgaactggaagaaaacgaggaaacattggaagattatttgggccgcgagtgcccacagccattaaaggacattctaggtctttgtggaaaccgacttgtactttttgacaacaagactaaggatgaaaccaagagagtgacacaagttcaggatcttctcacacttgtgaacatggtcatagaacagaatggtgggcaaccatatactgatgagttgtttgcggaactgaagaaaggggcaactaaacttcgtgatcaacaagaagtggttgctgctctaaagggctactccaagcgagaaatatccgaatttaaggagcagattgaaagatcatatgaagagcagcttatgcgaattactgaaatggttgagtcaaagctgaaggagacgactgtcaggttggagcagcagttagcagaggagcaggcagcacggctgaaggcggaagagttggcgcagttagctcaaatgaaatcaaatgatgaaatccggaagcttcgagagaatctagaaagagcacagaaagagacagaggagctccgcaagcaagctgctcggtgtgccatcctgtgactgccgctacaatgagaagatgcctctcttatgctattatatttattttcaatgttttaaattgctataatgcttttaaatcctgcgtaaatgattttaagcttttccaaagtcaactgtcttatcttcatgcctctttgtaaatattgaagtgtataagagatttcaacacactggttttattgttgtgatatatctctttcttatttgatgaaattaaatgttgtatggggcagtccattcagctaccacataccaatagagtaaatgcttaactcaaattcaagaaacg

SEQ ID NO: 13709 - DNA, 678 bp, Gossypium hirsutum
  Clone ID: GOSHI-09MAY01-C37626_1
agaacataaaaagaaagaaatgacaaaaacttctctgatcatccttgtttctttggctctgggcattttgtcttcactcaatttggcttatggagccgcatccgatcaaaacaagttcaccgtcgtgggtcttgtttattgtgatacttgtcgtgttgaatttcagactagcataagcgaacctatttctggtgcaacagtaaaattggaatgtaggaatcgaaccagtgaaaaaattacttttcaaagcccagaaataacaactgatgctgcgggaagctacaaaattgaagtgacaggagattatgaagactcagactgtgatgtcaacttggtgaagagtccccgagcggattgtaatgatcccacagaagcgtggaggaaagccagggtggaactcaccgcattggatggtgttaccggcccaattcgctttgccaacaatcttgggtttaaaaagaaagaagctcttccaggttgtaaaaaagttcttacagacatgggttattatgagcttaaggatgaacttggaagcgaagccgtgtgacatatttgttctgacttgttctcgtgtaataagaattgagtcattatgagtatcttactgtatattcataatttattcaatttttttattaataaagtcatgaaaaaagagagatgattttagcattgatc

SEQ ID NO: 13710 - DNA, 453 bp, Gossypium hirsutum
  Clone ID: GOSHI-09MAY01-C37196_1
cccacgcgtccgcccacgcgtccgttcctctgaaagcccttcttgctttaatctgcttcggtggggggttgggttggtttacacagaaaaagatctacagaagaagagttgaagagtgtggtttttatttccaggacttggatctgatggggatttgcttaggtgccagacttaatgagagtccatgcaacacagggctgagttcgaagtatgtttgcagtgatgggaaagatacgagtagtacaagcagcaaagcttcatcattttcagcacctttgactccccgaagtgagggtgagatcttacagtcccccaatttgaagtgtttcagtttcgcctatctcaaaatggccactaggaattttcgtcctgacagtgtgctcaaggaaggcaggttcttgctcagagtttaaggcttgtatcgatgagaattcattagctggtgtcaagcct

SEQ ID NO: 13711 - DNA, 749 bp, Gossypium hirsutum
  Clone ID: GOSHI-09MAY01-C37176_1
cctcacaaggattgcctgtacctagaaatgttttaattcctcgtactaagggttttgggtcggccgtaagtcatatgcgttcatttgttccagctatttatgatatgacagtggctattcctaaaagctcaccttcacctacaatgcttagactgttcaagggacaatcttctgtggtgcatgtgcatgtcaagcggcgtcttatgaaggaacttcctgaaacagatgaggatgttgcacaatggtgtaaagatctttttgtggagaaagacaagttgttggacaagcatatagctgaggacactttcagtgaccaaccattgcaggatatcggtcggcctattaaatctcttctggttgttgcttcttgggcatgtcttgtggcttatggagcttataattttctgcaatggtcttcacttttatcatcatggaaagggattgcattgtcagcagttgggttggctattgttaccatactcatgcaaatcatgatcctattctcacagtctgagcgttcaactcctgctaaggttgcacctgggaagcccaagaacaacagtgagagttcagaggcaagacgagacaagcagcagtaggtcgagcttttcctcacaggaaagttggtctggagccatattttcataaccctaaaatgtgtactctgtatcactttcacttacaatcagtatgttttcgttttaaacatactatcaggtttcaatcctatctgcatgcctattggtcac

SEQ ID NO: 13712 - DNA, 433 bp, Gossypium hirsutum
  Clone ID: GOSHI-09MAY01-C37086_1
caggacttgcatcttgattggccaacacgctttaatatttgcctatcaaccgcaagagggctagcttatcttcacgaggagtctatgccaaggattgttcatagggatgtcaaggcaagcaatattttgcttgatgcagagctttgcccaaagatatctgattttggattggcaaagcttgatgatgacaagaaaacgcacatcaccactcgcgctgctggaacaattggctacctggcaccagagtatgcgatgcgtgggcatcttacagagaaagtagatgtttttggctttggtgttcttgctttgcagattattagtgggggaccaaactcatattattccgcagaaaatgtcagaatctatcttctttgattgggcgtggaccctgcttgatatttcccaaatttcgagctcttctcgatcccatatt

SEQ ID NO: 13713 - DNA, 548 bp, Gossypium hirsutum
  Clone ID: GOSHI-09MAY01-C37066_1
ccgggtcgacctcgcgtccgatttttttttctctttaatttttttaaaaaattattgcttaaaagatacagggaccccatttgaaaacaaaaatgacccgccaacttgttgttcttgctttggttttgattgcccttgctggtctggtttctgtcgacgcttcatccgccagtggcagccctgcaagtgcaccaactgaagcttctatagatggtagtactgctagttcctcccctccttctcaagctaccgctccaagtcgtagcagtggtgtcacttttgaccttgatagatagatcaaaaatagaacgatcaagttaaatataataagtaaataattctatcatttggactggtgagttggttgtttcgctgtagagccatattcataaggttcatccatagaatgattctcaaggaaatgccgccaaatcattaaacaatttgcaattttaaaaaatcgtggggtttgggcaattaaaaaaaaaaaaaaaaaaaaaaaaaaaaaaaaaaaaaaaaaaaaaaaaaaaaaaaaggggcggccgttt

SEQ ID NO: 13714 - DNA, 783 bp, Gossypium hirsutum
  Clone ID: GOSHI-09MAY01-C37036_1
ctcactttgagccaaggcttagagtgcaaatccgaatgcagagcttaaagcttttggtaacaagtcgtcgttgtgacagtctaatccggttgaagagaaacctatcctcgcttccaatcaattcttctgctgatgatcttcaaaatcaagtgctggttgaaggtaaagcgagttctcgagtagcgattctcaacagaccttcgtctctcaatgctctcaatacaaatataggcgctaggttgcatgaattgtacgcatcttgggaagatgatcccaatattggatttgtggtcatgaagggcagtggaagggcattttgtgcaggtggagatattgttgctctttatcatttgataaatgaagggaagatagaaaagtgtaagggcttttttaggacgttgtatagctttatataccatcttggtacatatttgaagcctcatgtgtctattttaaatggcattacctgtggagtgggggagctggaatttcgatacctgggacatttcggcttgcgactgatagaaccgtttttgctacccctgaaactcaaattggcttccatcctgatgccggagcatcctttcatctctctcgtctacctggtcacttagagagtacttgggtctgacaggagcaaaactcattggggctgaaatggtttcttgcgggcttgcgacacactactcaacactgataagcttccactgattgaagaagagcttggaaatttggttaccgatgatccttctgtcattgagtcttgtttggagaatatagtga

SEQ ID NO: 13715 - DNA, 449 bp, Gossypium hirsutum
  Clone ID: GOSHI-09MAY01-C37396_1
ctgaacatggctgtttgctcgctaaagctcaagcgctgggaataagccatcggacactgttccatcgtgttatcagaagatgaaaataatgtgaaagcaatgttcagacgtggaaaggcccgagccgaactcgggcaaacggatgctgcgcgggaagactttctaaaggctcgcaaatatgcacctgaagacaaagcgattgcaagggagttacgtatgcttgcagaacaagacaaagctatataccagaagcaaaaagagatttataaaggaatttttggaccaagacctgaacctaaacccaagagaggtaattggctaatccgattatggcactggcttgtgtcactattctattacatgtttaggcgtgaaagagtgaaagctgattagtttaagctccgaaagattttcccaaaaaaataagttaatcaaagctttaaatcatt

SEQ ID NO: 13716 - DNA, 647 bp, Gossypium hirsutum
  Clone ID: GOSHI-09MAY01-C37236_1
acggatttcagatcggcatcacgaagaagtgtccctcggaaacttaaggaggttccaattcagggaacttcaggttgcaacacataacttcagcagcaagaatatactaggcaaaggcggtttcgggaatgtgtacaagggagttctgcaagacggaacaatagtagccgttaagaggcttaaagacggtagtgccgctggtggagagattcaattccagactgaagttgagatgatcagccttgcagtgcaccgcaatctgcttcggctttacggattttgcataactcctacagagaaacttcttgtttatccctacatgtccaacggtagtgtcgcatctcgtctcaaaggaaaaccggtgttggattggagcacaaggaagagaattgctctaggagctggcaggggattgctataccttcatgagcaatgcgatccgaagataatccatcgggatgtcaaagcagcaaatatattgcttgatgattattgtgaggcagtggttggagatttcgggctagcgaagcttttggatcaccacgattcacatgttacaaccgcagtgagaggcaccgtgggacatattgctccagagtacctctccacaggccagtcttcggataaaacggatgtgttcggatttg

SEQ ID NO: 13717 - DNA, 763 bp, Gossypium hirsutum
  Clone ID: GOSHI-09MAY01-C30876_1
cccacgcgtccgcccacgcgtccgcccacgcgtccgtccagagattgtagaattggttggcaatgcatcggcaaagcaagtcctagacattgacaagcaagatggggcagagaaagtaaaatatgctctgcggtcggtttttacccaactcatgtcagctagcaaggagatggcaaccaaatcaatagcaaaactgaaaagtcggctgcacgcagaaagtcagttgaggtgtctaactgagaaggaacagttggtgttacacttggaaaagcaatacccgggtgacataggtgttatatcggccttctttttcaattatgtgaaacttaatccgggtgaagcattgtatcttggggcaaatgagccccatgcatacttgagtggagagtgcattgaatgcatggcaacgtcagacagtgttgtccgggcgggtcttactcccaagcaccgtgatatcctaactctttgctccatgctaacatataagcagggctaccccgacatcctgaaaggatttccattgagtccatacatcacaaggtatctcccacctttcgaggagtttgaggttgattcgtgcattcttacaaaaggggcatcaacggtctttccagccattccaggcccttctattttccttgtatttatcgggaagggcacatttcgcattggatcacgggaggacatatgactgaaggagatgtgctctttgcaccattcaacacggagattaccattactacatcgtctgaactgcagctat

SEQ ID NO: 13718 - DNA, 413 bp, Gossypium hirsutum
  Clone ID: LIB3148-044-Q1-K1-F11
gagccccatgcatacttgagtggagagtgcattgaatgcatggcaacgtcagacaatgtggtccgggcgggtcttactcccaagcaccgtgatatcataactctttgctccatgctaacatataagcaggtacaattatttgatcaagggtttgataattttctatttgagagtaaaaataatttgttaagagtgataccacatataggcttttctttttctgttttagctgaacttttgctctatgaactttaattacacgatgacacaggctactgctttatttatttgtcaagcactaatactttatttctatgtgacttgatttggtatatttctttgtcttttcccaacggggcagtttccttgataacataaggcgaaatattatgcacatttttgcttggatatag

SEQ ID NO: 13719 - DNA, 451 bp, Gossypium hirsutum
  Clone ID: GOSHI-09MAY01-C30496_1
tcatcatattatccgaacatgcaggaaccagtaatttatcggtgaagtttcatctctgaaggtgtggggtccgggtggtgcgcggaattgctcattcggttctgtacttgtagtcatgtatcttaattcattgaagatctcaaaatgattgctgcacgctagctgagattcatggaaggatgggctttattagcatcgtgacacaccaatttggttttctactatgcttattgccgcaggcctgttggtgttcatgcctttcgaccaacctgcatgtgtttacgccccggccccgtcgttttaatacataattaggtaattattgagtattgctcatctttttatgcattgttgattgcatattatggctgtcagattcccaacttatctattctgagatttagctgcatatttggttataagtgtcgatctatctgaatgcttgcggaca

SEQ ID NO: 13720 - DNA, 505 bp, Gossypium hirsutum
  Clone ID: GOSHI-09MAY01-C30446_1
tggcttggactacctaggcaaccccaaccttgttcatgctcaaagcattcttgctgtcctcgggttccaggttgtcctcatgggactagtcgaaggattccgcatcaatggtctccccggagtcggtgaaggcaatgacctttaccctggtggccaatactttgaccctcttggtcttgctgatgaccctgtcacatttgctgaacttaaggttaaggaaatcaagaatggctggctagccatgttctctatgtttggtttctatcgttcaagccattgtcacacgcaaaggtccactggaaaatctcttggaccaccttgacaaccctgttgccaacaatgcttgggtctatgctaccaagtttgtgcctggatcgtaaattaacagccctggatcgaactcgttccattatttgcttgtatctatcctctatgtacctgtagatttcgcatcactctgaaattttaaacctgtatcactaagaagtcaatgaaattcatgatc

SEQ ID NO: 13721 - DNA, 957 bp, Gossypium hirsutum
  Clone ID: GOSHI-09MAY01-C30736_1
tgctccccaatggtacgatgctggaaaattcgaatacttcgcatcctcctcccccctaggggtgatcgagttcatattgttccactacgtcgagatcagacggtggcaagacatcaagaacccaggatgtgtgaaccaagatcccatcttcaagcaatacagcctgcccccacacgagtgcggataccctggtggcgattttcaaccccctcaactttgctcctacacttgaggccaaggaaaaggagcttgccaatgggagattggcaatgttggccttcttgggattcataattcaacacaatgtgactgggaaaggaccatttgacaacctgttgcagcacctctctgatccatggcacaacaccatcatcaacacaatcaggggttattaaattcaatttcccagtttttgagtttccttttttgttttttaattcaagatttcaatcgtcttctcattgcaaacaaagtagctccaatttacaagttaaatttccgattgcttcgtttcttattcatattttcaaactaatgataataaatgttcatcttaattttctacaaaagagtattttagtgtacattttgggggatttgggagtaactttcaaacccatccccattaaaactatgcttaaaacaaattaaaaagaaaagaaaagaaagttcatatacaggagcctttatcatgttaagcaggaaacactggccagatatcagattccatcagaaaaactccattgctgggtcaattctatcacaataaaaggcacaagcaggaaaagtttggattctgattcatatctgtgagtcacttcaactacaaattatgacattgaccagatggaggtgtttgattcataaaagtcgattttgtttgctgatggtaagaattcccatcaaacatggcaatgccacaaggacctgaagaagttatccaagcttgatgaccac

SEQ ID NO: 13722 - DNA, 382 bp, Gossypium hirsutum
  Clone ID: LIB3146-046-Q1-K1-B11
cccacgcgtccgggtcaatgtcataatttgttgttgaagtgactcacagatatgaatcagggtccaaacttttcctgcttgtgccttttattgtgatagaattgacccagcaatggagtttttctgatggaatctgatatctggccagtgtttcctgcttaacatgataaaggctcctgtatatgaactttcttttcttttctttataatttgttttaagcatagctttaatggggatgggttggaaagttactcccaaatcctccaaaatgtacactaaaatactcttttgtagaaaattaaaatgaacatttattatcattagtttgtaaaaaataatctgttattacaatctatttaaacattgtgtttttttatacat

SEQ ID NO: 13723 - DNA, 590 bp, Gossypium hirsutum
  Clone ID: GOSHI-09MAY01-C30656_1
aaatgaactcagccatggtctgtaactgaaaaagaaaaagttcatcactccatcatcgtcctcaaaaaaccaaaacaaaactgaatacacgaatctatgtcaatatccatggccttgttttctcctccttgtcctacctcctctgtcaaccccaatttcacccacaaacccactctttttctccctcttaagaaaccctttctttcgctttccactcctaagtctttaccagacaatggagctggagtttcagcttctgttcctgccgttgaagacccaaaacccagtcagaatgaccccgtcctcgaaaaggccgtggagggatcttctgggcctaacggggcggctaccagcactgaaattgaggttttgagcaagtttgaggatcctaggtggattggaggaacttgggacttgaaacagtttcagaaaaatggcaccactgactgggatgctgttattgatgctgaggtcaggaagagaaaatggctccaggataatccagaaactaccagtaatgacgaccctgtagtgtgtgacactgccatcataccttggtgggcatggatgaagagattccatctaacctg

SEQ ID NO: 13724 - DNA, 736 bp, Gossypium hirsutum
  Clone ID: GOSHI-09MAY01-C30676_1
cctcgtgccggcacgaggaaaatggttcgggccaaacatgtttcaaagggagtttgaaagctgcggatttggataaggacgtctcggcaaaggaaaaattaattttgttatggagagaagcattcatgaagtcatataaggccatggacaaagagttgaggtctcatcctaatttggactgcttctgcagtggtagcactgcagtcactatagtgaaacagggctccaatcttttcatggatacatcggggattctcgagcggtaatgggatcaaaagacaacaacgacttgatggtggcaatccaattgacagtcgatctcaagcctgacttaccaagagaagctgaaaggattaaaaggtgcaaaggaagggtatttgcattgcaagatgaacctgaagtatgtagagtatggttgccatttgacgatccaccagggctagccatggctcgagcgtttggagatttttgtttgaaggaatacggtgtcatctccatgccagaattttcccatcgtttactcacagaaaaagatcaattcattgtcctaccatcagatggggtatgggatgtattgagcaatgaagaggtagttgagattgtatcatcggctccgtcccggtcatcagcagccaggatgttggttgtctcggctgcacgagaatggaaactgaagtaccctacttcaaagatggatgattgtgcggttgtttgcttttcttttggatgggaaaat

SEQ ID NO: 13725 - DNA, 429 bp, Gossypium hirsutum
  Clone ID: GOSHI-09MAY01-C30186_1
cccacgcgtccggctgtcgaagaatacgaggatagattttaacatctacagccggaatacatcatctacaagctcaacggttccttgtagcagtgacaagtgcgaacaacagagaaaatgttcttcaccttcaagtaattgtccttatcaagttatctatctatccaatggcacctcgtcgatcggggttttggtggaagatgtcttgcgcttgactacggacgacgataaaacaaacaaacccgtcgacgccaagattactttcggttgcgggaagattcagactggatcgttcttaaacggtgcagctcctaatggtcttttcgggcttggtatggacaatatatcagttcccagcatattagcaaaagaaaatgttacatcgaattcgttctctatgtgttttcgatctgatgggatcggaagaat

SEQ ID NO: 13726 - DNA, 628 bp, Gossypium hirsutum
  Clone ID: GOSHI-09MAY01-C30386_1
ggaaaacgttacgtttccagcactggggagccattgaagaaagttgagttgagccatggctcttatctccaatcctccggacgattcgcgcgacctctgtctctgccccatcccctaagcttcccccttctatctcttcaccccaacgctttcccttcttaaccaaacccctccgacccaatgccttcaatctctcaacatcatcatcagctcctgatcagaaatggagggttaacgtttctttcttcccagctttttttaacaaaggcaaggacgctaaggttctcaagcaagaccttcttgattgcattgcaccacttgaccgaggtgccgatgccacccccgtggaccagcagagagttgatcagtttgcaagcaaacttggagcagttaatcccacaaagcagcctctgaaatctgatttactaaatggaaaatgggagcttatttacaccacttccaaatctattttgcaaactcagagacccaaattcctaagatcttctacaaactaccaagcaatcaatgtggatacatttaggcccaaaacatggaatcttggcctttcttcaaccaggtgacagcagatttaacacctctgaatgcaaggacagtggctgtaaaattt

SEQ ID NO: 13727 - DNA, 423 bp, Gossypium hirsutum
  Clone ID: GOSHI-09MAY01-C30366_1
agtttctaaagcaaactccggaataccggttccaagctctttcctcttcctttgctaactgttctactttacacgttggatcacacgtctttctttcttcttcttgtttctttcatttccttcttgttgtagctgccagttttttaagtgtcatacaggagatttagagtacaagaggagaatatttttgtttagcttagtcgcctccgggatataacggctgaattgttttaattttgacaagcgtgctaaattgtgtgatggtaattgtatcaaagtgagaagaatctgtatgatggccactgctgctgtgattggacttagcaccggaaagagactcttgagctcttccttttcttattcggataccgtagataagctgtcgtatgctggtgattatggatcttcatattatcaaactcc

SEQ ID NO: 13728 - DNA, 599 bp, Gossypium hirsutum
  Clone ID: GOSHI-09MAY01-C30296_1
cccacgcgtccgcagagatctcagaactcattccacctcaccaccatttcatcattcataagtgcaccttccaaagctaagggcctctgagccttgttgtcatccaatcaattccaacaaaaatcctccattgttgatggttcaagcctttccatcatacatttgacacccatctctttgcataaaaattatgcaaatgaggaccctcaatgcagcaactccaagtttgacacctctctcggttctttctgagacaagaaccgaggccagaaaagcaccattgctccccattgcttcaccactcaaactacccaactccccggcttttattaagacccaaccagctttgcaccagtgtttgtcaagaaccttgcatgggggtttactgcttctgccatcacttctccccaatggtttcgctaaagccttgtcatacgaggaagccctacagcagactacgggattctcctcgtctgttgattttgacccaaatgggatccttgataccgttgtcagttttgtaactgagaatcccacggttatagctggtggcaccgttgctttagcagttcctttgattttgtctcgtctgctaaaga

SEQ ID NO: 13729 - DNA, 759 bp, Gossypium hirsutum
  Clone ID: GOSHI-09MAY01-C30286_1
atttatattatattttctcaagttctggtttcaatggcgttaacttaaaaagtaaaccctagagaagcagagacagtagcagtcttaaaaacaccttgaaccggaaacagtcgacgacgcagctaaacatgtcggaaagagaagaagattacgattctgatgcacccgaagagttttcaaatcagcagggaataaagcaagatgagaacataagaaaaatccagaaagaaaacaaggccagggttcgtcgtgagggaaaagaacgtcgaaggctttgggctcagaggaaaacaccccgtcaatctacaaaggttgaaaaggtccaagaagatgtagaaactgatgaggaatctcaggctaagaaggggttgcttcctaccaacatcgttgaaatgcttgcgtctcgtgaaaaacaagttttcttatccgactccgaggatgagaaggctgaggtaaatccaattccgagaaagaaaaagaagaaaaactcaggggttgaacccgttattttgaacgacatgccacctcctcaatgcttacaaagctccttggagttcttgaagaaagggaaaatgcaggttccaagatcatctttggttttaaagaactctaaccaagtactccgccttagttgtgccatatcaacttctgggttacgtgaaagttgtaaaagactgtaatgaagtttgctagtgtccttctgaacctgagattgtgccaatatttctaaaaaagggttcaatgcagcctattcctatt

SEQ ID NO: 13730 - DNA, 724 bp, Gossypium hirsutum
  Clone ID: GOSHI-09MAY01-C31966_1
tgataaccgaatcatacgatgctctcttctctttatatctcaacctctctttccgtttctccgatttctccgccgtctacttcccgctccaaattccggccacctcgctccgccgctacttacacttcgcaacaacagaaaggatcgacgaacggttacctaagccgtcaaggaatggcgacgtgcacgtcgttgtacgaagttctagggattcccgtcggtgcttcgaacgaggaaatcaaatcggcgtaccgccgattggctagagtttgccatccagacgtggcggcaatcgatcggaaagattcgtcggcggacgagttcatgaagatccacgcggcgtacagtaccttatcggatccacaaaaacgagccgtatacgatagtaagcttgtatggagaaaccaacggccgttgacttccggttctagggcttcaggttataggggggggagtttgggagaaccgatcagtgctcgtaaacccgagtcgactcagtcacgctaccgaggtgggaggtgaactcatcaacgatttttaaacttacatggatctggacagttaatcagtcaagtccatgtatatattttaagcctgtttacttacgacggctaaaaaataacgaccggtgaatttaccggaagaatttccttcgttaatggtgccacgtcttttatgtatgaacttgtgtggctttgttgaggtcaataacctagacttttat

SEQ ID NO: 13731 - DNA, 338 bp, Gossypium hirsutum
  Clone ID: uC-gsflnu33B093a01b1
ttttatacactatttgcggttgtccgaggtgtggggcgtctacttgccgctccaaattccggtcacctcgatccgccgctacttacacttcgcaacaacagaaaggatcgacgagcggttgcccaagtcagcgaggtatgggcgagatgcgcttaacaagactgagtttgaggggttcgcgttggcgctgctaccgcggcagtaacatcagcagcaacagcatcagctaaaggatgatattgccactggagaaccaataccaagagcagaagcagtcacagaaactgtggccgagacaaaggaagaaagcattcgctcatgctgacacacgagatgat

SEQ ID NO: 13732 - DNA, 496 bp, Gossypium hirsutum
  Clone ID: GOSHI-09MAY01-C31876_2
cccacgcgtccgctgaacgaagaccaagacctagaatttgaatctgaagaacgtgataggaatgatgaggaagatgaagaagatgatgatggtggttatgggagtgagaacggggaagagggaagtcctaaaaatttggattcggaggttgtcgccgaaaataccgaggttaagaatgtgaagttacccaatctaacggttaaggaaaagaaagagctggcttcttacgctcatggtttagggaagaaattgaagtgtcaactggtgggcaaatctggtgttactgataatgtcattttctcttttcttgagactcttgaagccaatgagcttctgaagatcaaaattcaccggacctgtcctggacagctacaggatgtggtgagccaacttgagcaagcaacccggtcactcgtcgttggacaaattggtcggactgtgatcatatacaaagcctagtctcaccaaaatgaaggctgaagagaaaaagaaagag

SEQ ID NO: 13733 - DNA, 933 bp, Gossypium hirsutum
  Clone ID: GOSHI-09MAY01-C31876_1
caagacctagaatttgaatctgaagaacatgatagaaatgatgaggaagatgaagaagatgatgatggtggttatgggagtgagaacggggaagagggaagtcctaaaaatttggattcggaggttgtcgccgaaaataccgaggttaagaatgtgaagttacccaatctaacggttaaggaaaagaaagagctggcttcttacgctcatggtttagggaagaccttgcagtgtcaactggtgggcaaatctggtgttactgataatgtcattttctcttttcttgagactcttgaagccaatgagcttctgaagatcaaaattcaccggacctgtcctggagagctagaggatgtggtcagcatgagaaagcgggcgcgtggctttgaacaaaggggcctaacacaacctgatataaccagtacatggagagccatggaggcactttacgactcccgaaaggctagagctattggagtaagcaatttctcttgcaagaagcttgaagatctgttggaggtggctcgaattcctccagctgtggttcaagttgaatgccatcctatatggcaacagcctaagctacatgcattatgtaaatccaagggagttcatttaactgggtactcaccgctgggctccccaggcacaggtttcgtgaagaaagaagttctgaagaatccagttgcgaatatggtagcacagaaattgggcatgtcccctgctcaagttgcccttcgttgggggctgcaaaagggtcatagtgttttgcctaagagtacaaatgaagtgaggatcaaacaaaactttgatgttttcgattggtccatacccgaagacttgttggctaagtttgctgaaatagagcaggagaggctgatcaaaggctccgttttcgtacacgaaacattgggtgcatatagaagcattgac

SEQ ID NO: 13734 - DNA, 786 bp, Gossypium hirsutum
  Clone ID: GOSHI-09MAY01-C31506_1
aaacggcagacgaaaccaaagaacacaaaacgaaaaacgcgatctttacaaacatggagatgagtttaacccaaatagccaagccaccaccatgtcttgttaacaaaaattctctttttacaaacaaaaatagagtaaaatccactgtagaagctctaaggaattcatatccaaaaagagcaacactatccagtaattgggatgtctctaatttatcccctctttcttcatcttcaacaactccaacttggtttcccagatttgaagagcttgacactaccaacatgcttcttcgtcaaaggattatatttttgggttctcaggtggatgacatgacagcagacttgattataagtcagctgttacttctcgatgctgaagactctgagaaagacataaaattgttcatcaattcacccggcggctctgtcactgctggaatgggaatatacgatgccatgaagatgtgcaaagcagatgtttcgactatttgtctagggctagctgcatcaatgggtgcgtttctcttggctaccggtacaaaagggaagaggttttgcatgcctaattcgagagtgatgattcatcaaccacttggaactgctggaggcaaagcaacagagatgagcatacggataagggaaatggtgtaccataaggttaagttgaacaagattttatcaagagttacaggaaagcccgaagatcagatcgaagtagatacggaccgggataatttcatgaatccttgggaagccaaggaatatggtctaatcgacggagtta

SEQ ID NO: 13735 - DNA, 448 bp, Gossypium hirsutum
  Clone ID: GOSHI-09MAY01-C31486_1
gccacgcgttcgttaaaagagaaacaaagaacagatgattcgggaggccaaatacaaaaatataaacacatggcagcagagacagcgctaagaggatcgcgttcgagttctactgggtgcaatctaaatgggtttcaaaggagaccaacccctttatcttcttcaactcgttttctgggtcttcgtcctcgagcttcttcttcttcaatttcctcttctttatcccacttcatggggaagtgtcacaattggctcaagacttcctatttcatcgtcaacacaaggggaagagaaggaacttctctctctttgctatggccgctgatgagtcaaagcgtgctgtacctttgaaagattatcccaatattggaattatggctcacattgatgccggaaagacaacgactaccgaacgtattctatactacacaggaagaaactataaaat

SEQ ID NO: 13736 - DNA, 429 bp, Gossypium hirsutum
  Clone ID: GOSHI-09MAY01-C31796_1
gggatagagaattgtgacctgagattattggcttgcaaagacccaattgactatggaacaagaagtatggtaagggatagagcaaggttggtttgggcagaaaacacgcaagcaaggagtgcttgcattgatagccctgatagctatgattatggagcttataaatggaccgttcagctcgttaccaacgatagtccgtctcgagaaaatactttttcctatcttgtggggtcttatgactctcagcacatttgggaacttggagagcacaacagaatggctggagggtgttttcaacatcattgttcttactaggggacttcttctagtcacaatgttgattggtaacatcaacggggtttttgcatgcaacaacgtgccagaaaacaagcaatgcaattgaagatgaggaacataaactggtggatg

SEQ ID NO: 13737 - DNA, 848 bp, Gossypium hirsutum
  Clone ID: GOSHI-09MAY01-C31186_1
catatgttcaattactggaattgactgcatgggaggttttcacccttcattggatgccattcttgaaggactcggttatgcagctcctccaatcatggcccttcttttcatattagatgatgaagtagtgaaactttctcctcatgctcgtgcaataagagatgtcgaggatgaggaattaaggagcttcttttatggaatggcaccttggcagttcatacttatggtcgctgcaagctcagttggagaggagcttttctatagggcagctgttcagggagcattggctgatatattccttagaggcactgaattggtttcggatgctcgaggaatggcagctttgactggtgtgctacctccctttgttccatttgctcaagcatttgcagcagtaataactgctgctcttaccggttctctatattatgtggctgcctctccgaaagatcctacttacgtaggtgcaccagttcaacgatcccgttctgctcgtgaagatctgaaaaagctattcgcagcctggtatgagacgagacaaatgaaaaagatctactctccccttttggaaggaatattggcccttttaccttggatttgaatggatcgagacaaacaacattcttgcacctattataacacatggtatatactccgccgttattctgggacatggtctttggaagatacatgaccaccggagaaggctacgccagaggattcaacagcttaaatcagaaggaaagaactcaaccaaactatgaagaagctgctgacgcgtaaaaaaaaatcaaggcatggaggaattttgtatatcgcacacgagtctagtgaaaagtagaaataat

SEQ ID NO: 13738 - DNA, 407 bp, Gossypium hirsutum
  Clone ID: LIB3148-057-Q1-K1-G8
ttccttagaggcactgaattggtttcggatgctcgaggaatggcagctttggtatacatgctgttctacgaattgtatatgctaatctgtgactggtgtgctacctccctttgttccatttgctcaggcatttgcagcagtaataactgctgctcttaccggttctctatattatgtggctgcctctccgaaagatcctacttacgtagttgcaccagttcaacgatccggttctgctcgtgaagatctgaaaaagctattcgcaggtgctcattctacccataaaacatcattcattcaatggtatttttccattgtaaaatttcaggaggctcatctttatccatggccttgaggcaaacctaatataattgcatcactgggaactaaatgttgtgatccgacag

SEQ ID NO: 13739 - DNA, 483 bp, Gossypium hirsutum
  Clone ID: GOSHI-09MAY01-C31166_1
ccggcccgcatttccggggcggacgccacgcgtccgaatacaaatacccattttcaccaccatcaaaccacatcccacagacatgggtgcccacgaagaagaagccggaggtgaagagtacttgtttaagatcgtgctgatcggtgactcagctgtgggaaaatcgaaccttttgtcacgttttgctaggaacgagttcgacaataactcaaaggcaactattggagtagagttccaaacccaatgcgtggaaattgatgggaaagaagttaaagcacagatctgggacaccgctggtcaagaaaggtttcgagctgttacttctgcttactatagaggagctgttggtgctcttattgtttatgatattactaggaggagtagctttgacagcattaaacgttggcttgatgaacttaccactcattgtgatactacattgacaagaatgctggtggggaacaaatgtgatttggagaacat

SEQ ID NO: 13740 - DNA, 421 bp, Gossypium hirsutum
  unsure (1)..(421): unsure at all n locations
  Clone ID: LIB3145-039-Q1-K1-E9
ctcaaatgcattagctgtggcagtgattgcttctgttgcatggataacttatgagatatgcttgaaagcaactgatccatggaatganangtggcaaantgcttggatcatcacagctttctgggacatactttcgttgccctactttggggtatttgctacctttgggcaccatctcaaagctcccaacgatatgcatactcggaagatgtgggagaggaattcgatgatgaagaagctcaatctctaactagggggcaatcgaacggcgatgtgagtttagtcaagcaggagcaaaagaatggaaatgctgctatctccgatgaggaagatgaatctgaagaggataaaagggagtaaaatccatcgccggaacatggtttctatcaaaccaactttcgagcggatcccacgtgaagat

SEQ ID NO: 13741 - DNA, 398 bp, Gossypium hirsutum
  Clone ID: LIB3146-051-Q1-K1-E2
ctttaattaatctgtgttttcattacttataccactaattgtcagatatgcatactcggaagatgtgggggaggaattcgatgatgaagaagctcaatctctaactagggggcaatcgaacggcgatgtgagtttagtcaagcaggagcaaaagaatggaaatgctggtatctccgatgaggaagatgaatctgaagaggataaaagggagtaaaatccatcgccggaacatgttttctatcaaaccaacttttgagcggatcccacgtgaagataagcgtgttatcctcagagcaatggtttttcgaatctgataacttaatattttgacttatgtctatgttttctgctggaggtaagagagaactagtagtttacatcatattttgtccatattt

SEQ ID NO: 13742 - DNA, 364 bp, Gossypium hirsutum
  Clone ID: LIB3120-015-Q1-K1-F4
agagaatatcagtgaagttggacatctataggaaattctcaaatgcattagctgtggcagtgattgcttctgttgcatggataacttatgaggttgttttgtctagatttcaatttctttcttggttggaattttcaagaatggtggatctgattcgttcggcattacagatatacttcaaagcaactgatccattcaatgagaggtggcaaagtgcttgaatcatcacagctttttgggacatcctttcgttggccctactctgggttattggctacctttggcccccttttaaaacctcccaccgggccgccttattcctttaaaaagtcctttcaagccactttccaaccttacccttaaa

SEQ ID NO: 13743 - DNA, 491 bp, Gossypium hirsutum
  Clone ID: GOSHI-09MAY01-C31046_1
gtgacaacctcagaacacactccactccagagtccagacaaactaaattcagccatgaaggcaagctaataaaaacactcatcacttcatcaataacccaacactcaaaaagcccatatccatggctacgttttctcctcctcctctacctacatctttctctgtcagaccacacttaacccacaattcaactctttctctccctttcaagagaccctttcttctactatccactattcccaagtctttaccagacaatggagctggggtttccgcttctgttgctgctgtcgaagacccagcatccaaccagattgaaaacgccgcggaagtctctgctgggtctaacggagcggctatggccacatcggctgcaaatgctgaagttttgagcaagtttgatgaccctaggtggattggaggcacttgggacttgcaaccagtttgcaaaagatggaaccaccgaccgggatgctggtattgatgcctaa

SEQ ID NO: 13744 - DNA, 341 bp, Gossypium hirsutum
  Clone ID: LIB3272-044-P1-K1-C5
acgcctgcataaaaaattgactctcacaaagaaagtctcctggatttattcctctcaaggaggtccataattgggggggggaatcaaaccacacttaacccacaattcaagtctttctctccctttcaagagaccctttcttttactatccactattcccaagtctttaccagacaatggagctggggtttccgcttctgttgctgctgtcgaagacccagcattcaaccagattgaaaacgccgcggaagtctctgctgtgtctaacggagcggctttggccacatgggcttgatatgctgaggttttgagcaagtttgatgaccctaagtggattggag

SEQ ID NO: 13745 - DNA, 421 bp, Gossypium hirsutum
  Clone ID: GOSHI-09MAY01-C31296_1
gcggagggagaaatgaaggtttagcagattacatccgaaactctactcggggtaaaacaggctaaatacgtcttggttcttttctgggaagacattgttcattgtcttaaaatgatgatgtactttgagctcaacgtcggtggggtgattcgatacttatttctttccactttaaattgatcagcgcaacagattcaggttggaagattcgactatctgaagaatgtaactgtggtgataacagagtgcatgcctttcaatttcatagacatgcactgcatctgactgctcgggtggacatatattcaacttagctataagcttaatctagaaatagccttgaggttcaatcactgaactgccatcgaacatctgtgattctcattgttgacttctacatttctacaatattttggtatct

SEQ ID NO: 13746 - DNA, 814 bp, Gossypium hirsutum
  Clone ID: GOSHI-09MAY01-C31276_2
gtctttggaccacctccctccctccgagcagctctgttacgttcattgcaacatctgcgacactgtccttgcggttagtgttccttgcacaagtttattcaagactgtgacggttcgatgtggccactgcaccaatcttttgccagtgaacatgcgtgggttgcttatgccctcggctaatcagtttcatttgcctcacaatttttttcactccttcccataatcttctggaagagatctcaaatccttctcccaacattttgctgaatcaaggcaacaccagtgacatcaccttacccactcgtggagtagttgatgagcttccaaggcctcctgttatcaacagacctccggagaaacgacagagagtcccctcagcgtacaaccgattcatcaaggacgagatccaacgcatcaaggcaggaaaccctgatataactcacaggggagccttcagtgcagctgcaaaccctcccgcccgcttcccacatattcacttcggcctaatgcctgatcagcctgccaagaggactaacgtgcgccagcaagaaagcgaggacgttctcatgaaagatgggttttttgcttcagctaacgtcggcgtcactccgtactaatcagtgagctaagccatgggggcttccattcattgtctttttctccatgtttccaccattaagtctctctctcttactccttttcttcttcttcttcttcttcttcttcttcttcttcttctttctctcagtgcagcaattaggcaaagcttgtgattagcagttgatggagagctaagaactgagaaaaactcgct

SEQ ID NO: 13747 - DNA, 383 bp, Gossypium hirsutum
  Clone ID: GOSHI-09MAY01-C31276_1
cccacgcgtccgcccacgcgtccggtgcgccagaaggcgaggacgttctcgggaaacatggcggttttgcttcagctaacgtcggcctcactccgtactaatcatgcagcaattaggcatagcttgtgattagcagttgatggacagctaagaactgagaaaaactcgctgctcaagtttggctactctgttgttgctattaattattataacccattggctactgctgaaccggcctttatactttcatggctggatatcaagctagcaatatccaacaatgcatgtaattttagtcttagataatatcctgtgtctaccttctccttgcatttgaaaaactaaaactcgctcctttaatcaactactattagtttaagctc

SEQ ID NO: 13748 - DNA, 618 bp, Gossypium hirsutum
  Clone ID: GOSHI-09MAY01-C32836_1
cttcttcctctcatctgctcttcctttctaaaaccctaacaaaagggacctgtttttcttccctatctaccatgtccatcaaccttaacgcccatgcatttgctggtaaccccataagatccaaaacccctaaagcccatgacccactctccccttcttcagctttccggcccctcaaaacccatctcctccaaatccataattcacctcccttccacctcctccaaagtcccctcttttcaaggtcttgccttttagaaagggcagacctttagcttcttcgtctatcacagggaataatgatgatgatgtgcccatttggcatctggggtggatcagtttacctgattgtaagaattttctggggaaatgtggggtggacttgactgaagactctttggtttatttgggttcaaaggttgaagacgatgttgtttattgggctgttgatgtttctggggaaagtagattggtccctgaattgggtgacaaacagttttgctttgtggagcttagaacactaatggtggctactgattggtctgattctattgccatgggtgaattggctattgctggtcatgctcgagcattgcttgaatggcacaacctatcacg

SEQ ID NO: 13749 - DNA, 566 bp, Gossypium hirsutum
  Clone ID: GOSHI-09MAY01-C32506_1
cccacgcgtccgaaccatagttatgatgatcacatccatcaccatttccattctaatatatctcaaagacatcaacatagcaccaccaccatccttcctttgaactctatcatcataatcatcatatccatcatctcccttgtcttgattctctccatctttctaattatagtaaggcttcgtggacttaaatctggcaagaaacatggcagttgtaaagaaaatagtggcatccataatacaagcagcaggttcattgctcctactaccatagacttcaacgctagtccagatgtgaaagggaactgtttatatggaggtagtatgcgtaaacctgcaagtgcatacagaggggtgcaagtttttacttacaaggagctggaatttgccactgataacttcagtgaagctaatgtgattggcaatggtgggtctagtgtggtgtacaaaggagtccttgctgacggtactgtggcagccatcaagaggcttcaccgtgacagaaagcaaggggagcgtgctttcaggatggaggtggatctgctaatcgcttgaactctccttac

SEQ ID NO: 13750 - DNA, 458 bp, Gossypium hirsutum
  Clone ID: GOSHI-09MAY01-C32496_1
gaaattccaaatgaagataagaattttaccactagaatgcgcatcattgactttggaagttcaatagatgggtttacactgaagcatttatacggatcagctggaccttctagatctgagcaaactcatgattatagtccacctgaagctcttcttaatgctagttggtatcaagggcccacgagcacttctttgaaatatgatatgtggagcgtaggtgttgtgatcttagagatgatcttggggacaccaaatgtatttcagataagtgctctgacacgcactcttctagatcatcatatcgagggttggaacgaagacttgaaggagcttgcttataagcttagatccttcatggaattgtgcattctaatcactgggagttcctccaaacatcatcatgcgatgaaccaagctggcatgtcacctgcttcttggaaatgctcttgagaattttt

SEQ ID NO: 13751 - DNA, 500 bp, Gossypium hirsutum
  Clone ID: GOSHI-09MAY01-C32476_1
cccattcttccgcccacgcgtccgcgtttccatcaggcgtttttcttagaaacaaacgctcttttcttattatcttgtatcacttcctcatttttgaataaaccccaacacagtctctttttagccttctctatcttttttttaatcaaatttcgatctccgtttctctcttttatttttcgaaatattcagttttcttatatccctcgtttcgtcggtttttttttttttttttttgaatgcggttgggagggaacagtgagaaatggcgggaggaagtagccgtagacaggagggttctttagtgatcaataatacgaacgttttcgcggctcttgaaactctcaggaggaagaagaaatctgataaggaccgaggttcttcgaagaaatcttctttcaagtctcagcagcagccggaaaaagaagccgagccgcaggtcttttggtctccggcgccgcttacgggcaaatcgtgggccgatgttgatgatgaccatg

SEQ ID NO: 13752 - DNA, 745 bp, Gossypium hirsutum
  Clone ID: GOSHI-09MAY01-C32186_1
cccacgcgtccgaaccgctgaacacccttcctttgttgggttttcttgcgcagatcgagctgggggttgattgcaccatgcatggtttttcaatccagattagttccaaccttatcaaccggcttgctgaagatgatgagaaactgaagaaaagaacaaagaaaactaaaccccgagtgcctcgagagcctcgacaaccacaaacaaaggtagatcagacgcaaatacctgatgattctgaaaaacagaacaagactacaggctctggatggccagttccacctcctatgtttctaccggtaaaccaacctccttactctgcaactgcacagttagacccgattcgagctgtcgttaaagagagtgaaaatgttgtcgagaagttgcggaagcaggaggacaacatggtgcaagaagtaacccaaagagctaaggatctccatgagaaagagttcaagattccagaacagaaacctatgccctgtttagttgagaacaatgcttgcatggaatgcttcaaggagaatgtcaaagacgttaccaaatgcgctcctcttgctcaaaattacgcggattgtgctcgccgagttcggcagctagtgaaatcatctggtaagtaaagactctgatagtgactaattttcatgtcatgcaaagagtgaaatccattttgccagtttgagtgaaacttgaattttgacaatgcaaataaagtctgtagaaaacaaaaacaactaaattgtta

SEQ ID NO: 13753 - DNA, 936 bp, Gossypium hirsutum
  Clone ID: GOSHI-09MAY01-C32016_1
ctctcgcgtgcgcccgccccgtcggccacccgtccggcaaacactgaaaccgcccctattcggtttcgatcctaatgttctttatgtttttccaatggaatctctttcgcgttccctctccatctccatctctaatctacgcgagacctacccaattctcaacagccacttaccatcttcttcttttagtctgatcaaagcgccaaatcaacgaattggatttctcaaattcaactctgaaacctctcagtttcataggttttatctccaagctctaccccgagaggttcctgttgatgaaggtgaagaccagctgcagcctcttacccttaataatgggtttcgcttagtttctgaagacagtcaatctgtttatcagggtgattcaaatcagagtaaaagcagcgaaaaagatgtagataagttaataaaggttgaactccatggaagtggagcaactgggggtagcagagctggacttttcagaaccccaatttctggtggagtgcacagtgcaacttcagcacatggattacctcggccggccttagctgtccgtaatctgatggaacaagccagatttgctcatttatgcactgtaatgtctcggatgcaccaccgacgagaagggtatccttttggctctctggtagattttgcccctgattcaatgggccatccaatattttcattttcaccattggccatccacacacggaatttattagcagaccctaggtgtacccttgttgtgcagatacctggatggagtggcttatcaaatgcaagggtaacaatatttggtgatgtctatccacttcccgagcatgaacaggaatgggctcataaacagtacatagcaaaacatcaacaagggccttcacaacagtggggaaatttctactacttcaggatgcagaatataagtgatatata

SEQ ID NO: 13754 - DNA, 638 bp, Gossypium hirsutum
  unsure (1)..(638): unsure at all n locations
  Clone ID: LIB3543-008-Q1-K6-G6
ccccgcgtccgttttcttctttttttcacgtctgattcccatttcctaccaaccttctccttctttttcacgtctgaagcatcctcaccaaccctatccaagcctaaacccagatttctcagttttctcgagaaaatctgacttcggcatgagaggaaaggggtaacgatccaacacccagatccatctacacagctacttctccttgaaccaatttgaactgtaatgtctcgtatggaccaccgacgagaagggtatccctttggctctctagccgattttatgcctgattcaatgggccatccaatattttcattttctccgttggcaatccatacgcggaatttattagcagaccctagatgcacccttgttgtgcagatacctggatggagtggcttatcaaatgcaagggtaatgatatttggcgatgcctaccctcttcttaaacaccaacagctcaagagcatagagaaccaaggttggacaggggaaaagagaaagtagttgaatagccgatctgagactgttcgaatatattcgagattgttggttacagtcacctgctcgngggaggggatcgtcagcaattcgtcacactatctatcattttggtactactatattttgagctagta

SEQ ID NO: 13755 - DNA, 363 bp, Gossypium hirsutum
  Clone ID: LIB3120-026-Q1-K1-F7
gtgaattttgccaaagttggtgtacagattttataaacgaagtggcaaacactgaaaccgcccgttgcgttttcgatcctaaggggctttatgtttttccaatggaatctctttcgagttccctctccatctccatctctaatctacgcgagacctacccaattctcaacagccacttaccatcttcttcttttagtctgatcaaagcgccaaatcaacgaattggatttctgaaattcaactctgaaacctctcagtttcataggttttatctccaagctctaccccgagaggttcctgctgatgaaggtgaagaccagctgcagcctcttacccttaataatgggtttcgcttactttctg

SEQ ID NO: 13756 - DNA, 535 bp, Gossypium hirsutum
  Clone ID: LIB3582-017-P1-K1-C2
attggctatctcatagtcccaccgacattgagagctatattaggcctggttgcattgttctcacaatttatcttcgtcaagctgaggctgcttgggatgatgtaagcttgtttgcatgaaattatagattcttttatctcctatgcatttaaatgctattaatttcttcacaattttaatcgtctattattttgtcagctgtgctctaatctgagtttcagtttgagtcgacttctggattgttcggatgacactttctggaggactggatggatttgtataagggtgcaagatcagatagcattcatttataatggtctctttatcttgtctttatcagtattcatttaattgatatgaacaaataattggcaagcaagagtacttatgcatggaggtgtgaacacttgaccaatttatttttgtgctgcaggtcaggttctggtagatacgtatttacctcttggtagcgtccgttatagtaaaattgtgaatgtcaaaccaattgcagtatctgcaactgagagagctcaat

SEQ ID NO: 13757 - DNA, 306 bp, Gossypium hirsutum
  Clone ID: LIB3120-033-P1-K1-A1
agccgtacagataggattgtgtttaagttatttggtaaggaaccaaatgattttcctctgggcttgcgagcacagattcttgactggctatcacatagtcccactgacatcgagagctatattaggcctggctgcattgttctgacaatttaccttcgtcaagctgaggctgcatgggatgaacttcgctatgatctgagtttcagtttgagtcggcttctgcattggtcggatgacactttctggaggactggatggatatgtataagggtgctagatcaaatagcattcatttataatggtcag

SEQ ID NO: 13758 - DNA, 581 bp, Gossypium hirsutum
  Clone ID: GOSHI-09MAY01-C33956_2
gtttcctcatcaactgtagtcatcaatcctctttttgactttcccattcaactgcgtctttgaaccactgaaaaaataaatataaagaagcaaacgcacattcattcatccaaataccaatattcgaaatcttccctgtttcaattcgttgtgccttcggggggtcaaagaaacaatacagaggaagatggtgtcagcgacgattgatctgttgaagaaagagcttcctgttgaagaaggctctttggttctttcgaaagatgttaagactggtcttgttcttgttgatgttgttaatggcttctgcagcgttggagctggaaatctggtaatttttccccataaaatgcactcaatttattatattttggatgaacaggaatctgggtttttgtcttttgtttgttttttgttgtttcgtgttcatacaggctccagtgaaacctgataaacaaatatcttatatggttaaagaatctgcgagactagccaagctattttgtggggaaaaatggcctgcttttgctttccttgattaccatcatgctgatattcctgaaccttcctacccacctcattgc

SEQ ID NO: 13759 - DNA, 561 bp, Gossypium hirsutum
  Clone ID: AW187300.1
attggaggaagccgtaaccaaaacgcttaacaaatgggatctcagtttttacgtgaccctctttgttccctttttttctccttccaaacttgttctcacccacccacccttcctacttaaatactatgtggtcaatttcaaggaatctaagtttgcaatggttgcttgatcgtagtttcctcatcaactgtagtcatcaatcctctttttgactttcccattcaactgcgtctttgaaccactgaaaaaagaaatataaagaagcaaacgcacattcattcatccaaataccaatattcgaaatcttccctgtttcaattcgttgtgccttcggggggtcaaagaaacaatacagaggaagatggtgtcagcgacgattgatctgttgaagaaagagcttccttttgaagaaggctctttggttctttcgaaagatgttaagactggtcttgttcttgttgatgttgttaatggtttctgcagcgttggagctggaaatctggctccagtgaaacctgataaacaaatatcttatatggttaaagaatctgcgagaatagc

SEQ ID NO: 13760 - DNA, 572 bp, Gossypium hirsutum
  Clone ID: GOSHI-09MAY01-C33586_1
gagaaatctagaattctctcagagctccggtctagggccatcactgctcatccttgagctctgccgcgtgtggtcttagcgccgacgcgccatcctaagaaccaccgcacacggtggctaaggttcaaaaaaccctccctcgccagtcgtcgggaaaatcacgaagctcacggtggtaatctcgtcagcgttgatggaggcgtagaatctggttatgaggagccctgggtatgctaagaaggtgcattaatggcctcgattttagggagctagacagacgctcctcgaggcttctagaagacgttgcggcgctagaagaaagagggcagaaaccctagggtttcctgcttgggtctgtaatagtttgggccagttgggcctctttagtcctgggtctgtttgggtctgggtttgctggatgcttgtaactggatatgggcttttgtatttggccttaaggactgctttggggttttgggtagcaacagtgggcttgctgagtagggatggtttattgggttttggctaattgtaaaaggtctgtttaaaaaacttttattattatttttgat

SEQ ID NO: 13761 - DNA, 587 bp, Gossypium hirsutum
  Clone ID: GOSHI-09MAY01-C33446_1
gcctcatcatgtctcttatatgtgggggaggagtatttgctatggcagtgaaaaagttggggctttcttcgaatttggagttcgaaccgcatgaggctgattgcaagatcaatgggtctttactaccctctcatctgcttcttcttctttggatgtgttgggctatgttgtggagggggggggccttgaaatcttctgaaaggaaagggaatctattattgcttgatattaatcatttggcgttgtctgctgttgttgcatgtgctgaacttgatagcagctttgatttatggaattgtgatatagtaggcttggatgttcagcttcccgtgggaaagtttcttaattgggcaataaccacggcgccaatactttcagactgccttacacaatatgttaatagaagacttcaaatctcggttcttgcagaggatgaagcaggatcttcagaatctatttcaggagatttgtctccaaacgcatctcatgctttacttttaacacgtggaagggcatgggcgatttcccttgcacctagaaacaccatcactgaagaaattttgaaattatgcttttctgctgatatt

SEQ ID NO: 13762 - DNA, 458 bp, Gossypium hirsutum
  Clone ID: GOSHI-09MAY01-C33646_2
gcgtccgaccgtcagagtgaggaaactgcaaagattcctgcgacctcaggtgaggaaactacaagtggtcctgtggccctgcatgaggaaactctggctattccgacaactttggctgagggcagtccaactatgaccgcaaaattggatgaggaaactccaaccagtcccacaaacttagctgaggaaactttgacttctcccacatcctccggtgtggaagcttcaacagttctcgcaactaacagtgaggaaacatctgctgtttctacaactacggaaatggaaactttaccccctgcgggtgctgaaagtgtagaacctgcaacttaattgctttactgtcaaaactactcggaaatttcagaattgttgtaggggagaacacgtccagtggttctgatatcggtgtggggtttggtagggctgattcgagttgccatagaagaaagcaagca

SEQ ID NO: 13763 - DNA, 794 bp, Gossypium hirsutum
  Clone ID: GOSHI-09MAY01-C33646_1
ccacaaaataaaaaaaactgcgaaacactttcctgcaacccctcaggtgagggaaactacaagtgctcctgtgaccctacatgaggaaactctggctattccgacaactttgtcttttaacattccaactattaccccatatttgttttgttaaggtccatccatcccacaaacttatctgagaaactttgacttctcccacaacctcagtgttgaagcttcaacagttctcgaaactaacagtgaggaaacatcagctgtttctacaactacagaaatggaaactttaccccctgcgggtgctgaaagtgtagaacctgcaacttaattgctttactgtattacttggaaatttcagaattgttgtaggggagaatacgtccagtggttctgatatcggtgtggggtttggtagggatgattcgagttgccatagaagaaagcaagcaggtggcagatggctcatctggtgcaactcgagtcttgtgctcagattctttctttggtagaattatgcagtactgagtgtattgcccttcacgtgtgctccggctagtgtaatatataatcatttagatgatgacctttttcactgaagctaattcctagaggagaggacccagagaattgttgaatcaattctatttctttctgctgcgtaatcatatccatgtcgtacaagggattatcatgcattgcattatatcgaattatggagcccagctcctgattattgttttggttccttgtgaatttgatcagtaaaagcatgtgttatgatatttgtttttgct

SEQ ID NO: 13764 - DNA, 374 bp, Gossypium hirsutum
  unsure (1)..(374): unsure at all n locations
  Clone ID: LIB3135-007-Q1-K1-A1
gtgaggaaactccaaatattttttcgaccttattttaaaaaactacaaatncgcctttttgcaaacatttaaagaactcttactattcccacaactttatatgaggtcagtccaacaatgaccacaaaattgtatgaggaaactccaaccagtcccacaaacttatctgaggaaactatgactactcccacatcctccggtgtggaagcttcaacacttctcacaactaacattgaagaaacatcttctgtttctacaactacttaaatttaaactttacccccttctactacttaaaagtgagaacctgcaacttaatatctttactgtcaaaacaactcagaaatttcataatttctgtattatagaacaca

SEQ ID NO: 13765 - DNA, 714 bp, Gossypium hirsutum
  Clone ID: GOSHI-09MAY01-C33616_1
cggacgcggcaattaaaatcccagaattacttaaacaacaatggctacctatgaaggtaaagttttcactgaagaacaagaagctttggtggtcaagtcatggactgtaatgaagaagaatgcagctgaattgggtcttaaattcttcttgaagatatttgagattgcaccatcagccaagaaactattctcattcttgagagactcaaatgttccattggagcaaaacacaaagctgaagccccatgccatgtctgtctttgtcatgacatgtgaatctgcagttcaactgcgtaaagcaggcaaagttacagtgagggaatcaaatttgaagaaattaggagctacccattttaagtatggggtagttgatgaacattttgaggtaacaaaatttgctcttttggagaccataaaagaagcagtaccagatatgtggtcagatgagatgaagaatgcatggggtgaagcctatgatcgtttggttgcagccattaaaatagaaatgaaggcatgctcactagctgcatgatttcacaagttccctacattattgcttgttaattttgggtccaataagattgaaagttttcaatcatttaaacatgtaatgtaacatagctattgctcatcactactgttttttccccctagtttgttcgctcctgttctttttggccccttgtatctccataaataattggtaacgtaaca

SEQ ID NO: 13766 - DNA, 268 bp, Gossypium hirsutum
  Clone ID: LIB3135-055-Q1-K1-G6
gctgctattcctctcgcacgatcgctgtatacacgtatgcatgctacaccggtattccctatacaaggtttgacctcaccaatcatttcaaggcttaggcactaaaacctaagattgcctccctcttcggataaaaaaacttcttgtacatattggacactgtaccatcagccaagaaactcattgtcattctagagagactcatatgttccattgctgcaaaacactcagctgaagccccatgccatgtctgtctttgtcatgacat

SEQ ID NO: 13767 - DNA, 422 bp, Gossypium hirsutum
  Clone ID: GOSHI-09MAY01-C33196_1
cccacgcgttcgaagaatactgttaaaagcatatgcgtcaagtcgtcaatggtcaatagacacagaaatggcgaatccctcatgtgcttctcgcggcttctcgggaacctcaagcactgtcttcttccgatggtgccactacggcgagacctggtgagcgatctacgccgtacgcatctaacggtatgcgctttctagaaagcgtcgggatttccaatcccatcccggaccattacaggtcagaagactcttattctgatttcttatgtaaccaccttaagaccgacactgtacgacgtggacacatcacctgcttcaccaccgtctagccctctatactcaattcgatgggtgggttacacggacgggtaattgcagcaatattcagaaagagtggcgattgcgacagctaaaaacggggt

SEQ ID NO: 13768 - DNA, 709 bp, Gossypium hirsutum
  Clone ID: GOSHI-09MAY01-C33096_1
gccacttgggtctatcagactccgttgaagagaaaaacgatctttttgttcttggcactgaagatggtgttgatgaggaagatgatgataaagatgatgatgcagatgagagtgagggactaactggttttcaaaatatattgcaagatgtggttcctggtgcaaaggtcaaggtcgtgaaggtcacttcacctgggaaagtagaccaagattttgtatccaaggtgattgagcagataatagatgaagaagatgaagaaaaagatgttgatatagaaagcatagaagtggatgatgaaattaagagtgataatgaccaagagagagataaaattgagatggatacggataatggagttattgatagtgataggcaaagtgaaattgcagttaaagttgttgttggtggtcttgtacaaaagctttctggcaatggttcctgcatttgaatcacttagagtgcctgctaagctagtgaaaaaggggcacctagcattttcattttctatagaaaaggacgtaagtcaacaagatactagtctcaaggcaaagggtttgatagatagaaaagcaaagggtcaaggtcaacgcaccgcagatgaaataatgattgatcttgctaattttcgcggcagagagccgtgacctctcaaggtactcaaagatgttggtgaattgataaatcttactctcagccaagttaaaaatg

SEQ ID NO: 13769 - DNA, 1571 bp, Gossypium hirsutum
  Clone ID: GOSHI-09MAY01-C33396_1
ggtcggaatccgggtcgaccaagcgtccgggagctggttcagtaggcgtgagagccggaatcaaaatccggcagcaaaaatcctgaaaggaagagtgaaacaacccttccggcaacgaaggccgagggtgaaaatcctgctccagcctcaaagttctggaagttcctccagacaatgaatttgaaaagcgaataaggcctgaggtcataccggcgaaagagatcgacgttacatttgcagacattggtgcgttagaagagaccaaagaatcactgcaggagttggtgatgcttcctctccgaaggccagaccttttcaaaggtggtctcctaaagccttgcaggggaatattgttgtttggtcctccgggcactggaaagacaatgttagcaaaggccattgctaaagaagctggtgcaagcttcattaatgtatccatgtctactattacttctaaatggttcggggaagatgagaagaatgtccgagctttgtttacattggcagccaaagtctcaccaactattatattcgttgatgaggtagatagcatgctagggcagaggactagagtcggagaacatgaagccatgccgaaaaataaaaaatgagtttatggctcactgggatggcctcttgacgaggcaaaatgaacgtatcctagttcttgctgcaaccaatcggccatttgacctcgatgaagccataattaggcgttttgagagaagaatcatggtgggacttccgggtgcagagaaccgggaaaagatttttcgaactcttttgggaaaagaaaaagtagaagatggtctagacttcgctgagctggcattaatgacggaaggatataccggaagtgaccttaagaatttatgcacaaccgcggcttatcggccagttagagagttaatacagcaagagagattgaaagatctggagagaaaacaaagagttgttgaagtacaaaacaaagaagatggtacagatgaaagagtcattaccctaaggccattatctatggaagatttcaggcaagcaaagaatcaggtggcggctagcttcgcatctgagggagctggaatgaatgagttaaaacagtggaatgacttgtacggagaagggggttcaagaaaaaaggagcaactatcttacttcctatgaagggattcgttttacagttacagacacctcaagaagaattttaacagagaaaccatgattgaagtcatcctccattgacgaccagatgaaatactactaaagaacaagcaagcaaatcgatgctaaccaggagaagcaaaagccaacctgagaatctatccttgttgctagcctagtcctgtaatgatacaagaaaaggtttgtaatattattttacagtggtttgtgttgtacccgtacgagtgtagtaacttaaagagcttgttaaagggattagagtcataaagtactacataccattagtgtctgttatatttcaagccaaaacagaggcgtggaaatcgagtctatatcaacagctttgattccgtttatagatgatataatttgcagtatcgggggggggcggc

SEQ ID NO: 13770 - DNA, 458 bp, Gossypium hirsutum
  Clone ID: LIB3135-003-Q1-K1-D1
cccacgcgtccgcccacgcgtccgcccacgcgtccgcccacgcgtccgcccacgcgtccgggcacgcgttcgcccacgcgtccgcccacgcgtccggttttacagttacagacacctcaagaagaattttaacagagaagccatgattgaagtcatcctccattgacgaccagatgaaatactactaaagaacaagcaagcaaatcgatgctaaccaggagaagcaaaagccaacctgagaatctatccttgttgctagcctagtcctgtaatgatacaagaaaaggtttgtaatattattttacagtggtttgtgttgtacccgtacgagtgtagtaacttaaagagcttgttaaagggattagagtcataaagtactacataccattagtgtctgttatatttcaagccaaaacagaggcgtggaaatcgagtctatatcaacagctttgatttcg

SEQ ID NO: 13771 - DNA, 525 bp, Gossypium hirsutum
  Clone ID: LIB3828-026-Q6-N6-D10
aacaatcaaattaaaactcaatcaacttaattgtatattaacaaaatttgtcgacttactgcatcccatggatctaaaagaaaagaacgtcactaaattagaaaagaaaacagataataaatattgaaataatatatggtaataaagtggttctaactttcagacgacaacaattgctacattgcatggctttgcacttctgcaggcagcaatgcaatagtttttcatttttcatcttttcaagatcaccccatcaacatcggctttttcgaccggccctttttacacgaaagctatatccgcagccaattcataagaaagcaaactatgaaatatatgtatataataaataacagccactactataacttcttaatggaaatggtccaaagaaggtcacaatcagattgcaccgtcactttctcttccttaactatattcgatgtgcttactagaccaccaaattccatcgctgtgttatctgcaccacccatttgttaaaatcatataggatatataattagt

SEQ ID NO: 13772 - DNA, 416 bp, Gossypium hirsutum
  unsure (1)..(416): unsure at all n locations
  Clone ID: LIB3135-002-Q1-K1-H11
cccacgcgtccggnctaatctttgcgttcttgttgttggagcacttggtggacgatttgatcatgagatggggaacctaaatgtcatatgccgtttctcgtccatgcgaatagtccttttatccaacgatagtctcattcatctccttccgaggacttactgtcacgagatacatatccaaacttccgttgagggcccgcactgtggactcatccctattgggacgccatcaaaaagcagtacaacgaccgggcttcagtgggacctgaataacacagcgatggaatttggtggtctagtaagcacatcgaatatagttaaggaagagaaagtgacggtgcaatctgattgtgaccttctttggaccatttccattaagatgttatagtagtggctgttatttattatatacatat

SEQ ID NO: 13773 - DNA, 671 bp, Gossypium hirsutum
  Clone ID: GOSHI-09MAY01-C33306_1
gatacccatcatcgaagatgctagacatccggccaaataccggatgctagttggaatggtggatgtcatattttctgatgttgctcaacctgatcaggcgaggattctagctttgaatgcatcatttttcctaaaagctggtggtcattttgttatttcaatcaaggctaactgcattgactcaacggttccagccgaggcagtgttccagagtgaagttaagaaacttcaacaggagcaattcaaaccttttgaacaagtgacgctcgaaccgtttgagcgcgaccatgcttgcgttgttggtggttaccggatgccaaagaaacagaaagctgcaacataatgtttttgtagtcttgtttttaatccctaagtttcgtggctttggattaaaaatgatgaacatgttttgggatcgaacatctttcttttttgtactaaaaatcaaacttatttctactgatgaaaaagggctcttaattagacaaacaaagcacaagtatcatgtctcttatttttagagagggttcaatcattatttgagtttgggtttgacaataagtactattggggtatggaaatttctattgttcaaaaaaaaaaaaaatattttttcattaggaatttagtctttgaatttgataattgattgaatttaattaataaaaaaa

SEQ ID NO: 13774 - DNA, 472 bp, Gossypium hirsutum
  Clone ID: uC-gsflnu33B055a09b1
ttttatgttaagaaactgcaacaggagcaattcaaaccttttgaacaagtgacgctcgaaccgtttgagcgcgaccatgcttgtgttgttggtggttaccggatgccgaataaacagaaagctgcacataagggttttggaggcttagttttaagccctaagtttcgtggctttggattagaagtgatgaacatgttctgggatcaaacatctttcttttttgtactaaaaatcaaatttatttctactaaggagaaagggctcctaattagacaaacaaagcacaagaatcgtgtcttttatttttagagagggttcaatccttatttgagtttggatttgacaataattactattggggtgaggaaatttctgttgattagattggtacttgatatgttttcattaagaattgagtctttgaacttggttaatgtttttgatggagttttaaagaaatatgttttgggag

SEQ ID NO: 13775 - DNA, 419 bp, Gossypium hirsutum
  Clone ID: GOSHI-09MAY01-C28456_1
caaacggctataattgacgttacacaacacgaagcagaggcaaggaagggaattttagattttttcttttcttcaactctttcttaaactttaactctttactgggtttatttcgctagattttctctccttcaaaaatttggcctttttctttggggatttcttttctttttatttgaattctgaaaagaaatagttttttattttcaacatcagcattctttctgcggttgtttaatcatgtctggcggctactctaattcaaagaagactgatgatatctatgaaaaagtttgtggacagcaggcatcctttgcagcattgacgatgtctagattgcggtgtatgttgcgggggatcgatatccggatttgtatcgtccttctcatcgcaatcccggtgttcatgttcggcatata

SEQ ID NO: 13776 - DNA, 514 bp, Gossypium hirsutum
  Clone ID: GOSHI-09MAY01-C28476_1
tctcatttctccatatcgtagggagagacctcaatcaccgttccgtggagggggctttcttggcatgcctaaagaagctgagaaatacaaagctaatatgatggttaagtataccagaagcaataacaactcgcaggaattagtaccgtatcagagcagcagacaaggctcaggtcctctaagccctgcagttgagaaaactttgtatgtagatactgtgaatgaaatggcaagttcaaattccaattcctcggatacgaaagtccaaatggattccataggaaaacattcaaatacctcagaagtgaacaaagtgttggaagaacctgctaccatggaatctccccttcaagatacaaaaggccttagtctcttggatggaaaagccatattggaatacgaaaccgcagggtcagtcaaatccagtcgatcttctttcttcaacaaacctgatctcagaggtcaagcagaaatgatagattgcttcacacagaatggagacttgatcaagaat

SEQ ID NO: 13777 - DNA, 768 bp, Gossypium hirsutum
  Clone ID: GOSHI-09MAY01-C28776_1
aaatgaaagacacgcttaattagaaattttctctcctatttcttcgttcccttaattaaacacaaattcccattttttcccgctgaagaaattatgagtgatcacctggttttgggtgtcgaccgtctgatgaagccggaggagtcggatgctggtccctcaacggaggttccggggtcgtcgtgcttgttggagtctaaggagaagggggttgtcaacggagaggaggaggaggagccgctgattcagtcggcggagtgccgcatttgccaggatgaagattccattaagaatcttgagactccatgtgcctgcagtggcagcctcaagtatgcacatagaaaatgcgtgcagcattggtgcaacgagaaaggcaatataaagtgcgagatatgtcatcagccttatgaaccaggttacactgctctacctcgcacccaaactgaagaaacctctatcgatattggtggagtctggacaatctctggcaccccactggacttgcgtgatccgcgcctcttagccattgcagaggcagaacggcagtttttggaaaccgaatatgatgaatatgctgcatcaaatgccagtggagctgctttttgccgttcagctgcactaattttaatgggacttctgctattgcgccatgcattgaatgttcccgatcccgactcagacgaagatttgtctactttcttctctcttttctttattcgtgctgctgtatttctcttgccatgctacatcatggcctgtgccatcatg

SEQ ID NO: 13778 - DNA, 845 bp, Gossypium hirsutum
  Clone ID: GOSHI-09MAY01-C28686_1
cagctttagcattagacaagttgttttacttttagcttttatcttgaaggctgggacacgaaacttgttgattccactttgcaaagaagcgaaaatgccaggagctagaagcataggggtggctatggatttctccgctagcagcaagaacgctcttaaatgggctatagacaacttggctgacaaaggggatgccctttacatcatccacatcaacaacaactctcttgatgagtctcgcaatgctctctgggcaaaatccggttctcctcttatacctttgacagagtttagagttccggagattatgaagaagtatgatgttgaaactgatattgaagttcttgacatgctcgacactgcttctagacaaaaagagataaacgttgtttcaaaaatctactggggaggagatgccagagaaaaaattcttgatgccattgaagatctaaagcttgattctttggttatgggaagccgtgggcttggaactgttcgaaggattatattggggagtgtgagcaactatgttgtgacgcatgctacttgccctgttaccatcgtcaaggaacaatcaagctccagcaagcactgagtagtttacataatattttctagtttgatttcccaaacaataatttgatggacgagtgtatgttgcttgatcatgttttaccaagtagcttacgcagttttacgtttgtttactgaatcttaaagatatatggtactttgtgagttaatgcactgttatggggacgattataataatgataataatgttgctttgtcgtactaatttttccttatactaaatttatttcttttttttttctctttttttt

SEQ ID NO: 13779 - DNA, 652 bp, Gossypium hirsutum
  Clone ID: GOSHI-09MAY01-C28306_1
gacccacccgtcctctgaacgactagtatttcctactgagcgaaatcttgttgataaaccaaatatattttgtgctgaagttggtctcaatataattggacaagctgctaatgtatgagaattagattctgatgtggcacaaagcaactcatttcttgaggttgatccaatacttattcctggtccgccaggatcgtttttgccaagtcctagagatatgggctctgatgattttcaaggaaatgcattaacacccaaccagattcgatcctctcgagatcagcttgatatttggtagatggggactcatcagattcacccctatccgtattgtcaacaatctctaattctatggaagccaggttcgatttgaagtatgaagaaccattagcatttcttggtgctcctgcagctatggaaacggatagatctggctactctactgccaagtctgacaccttagttgagaatggtgttgctgtggaacatacaagcccgggacaggaaagaacttttgaaggagagaaatttcaggtccctcgaatatctattgaaaagaagcctttcttttccaaaaatgatgatcaaccatgcttgtgccaaacaaaagagagatcctttcaaggttttgctctaaattatcatgagtcac

SEQ ID NO: 13780 - DNA, 425 bp, Gossypium hirsutum
  Clone ID: GOSHI-09MAY01-C28206_1
gtcctttcaactttctggtaaaggaaaggacgattggcccctggaagaatgctcccagattcattccttcatcttcctccgaaatgctttccagatacaactcggctaagaacgttcccggttatttacgtctccgcgccaaagccaaggtcgttggtacctgggatgatcatgattatggactcaatgatgctggcaaagaactttctgccaaaactactaatcagagacttcttctcgatttcttagatgaaccccaagacagtcccaggcgcaagcaggatggtgtttacacatcttatacatttggccctccaggtaaacaagtcaagattgtcctattagatactaggtatcacagagatcctctatccagtgacgggagcgtcttgggggattcacagtggtcatggttagggaaagag

SEQ ID NO: 13781 - DNA, 677 bp, Gossypium hirsutum
  Clone ID: GOSHI-09MAY01-C29296_1
catcttcatcccctcctttttcgcaggcttcaatgacttgcgtgacctctcaagttaccttccctgcaaagcttcgtttctgtttctttaacctcaaaatggcggtggatctgatgagttttccgaagatggatgatcagatggcggtacaagaggttgcatcgcaaggcttgaagggcatggaacacctgatccgtctcctttctcaccagtccaaaaacgtcgactgcaccgacctcgccgatctcaccgtctctaaattcaaaaaggtcatttcacttctcaacagaaccggtcacgctcggttcagacgcgggccgattcaacccctgtcttcctcatcttccccctcgacatcatcctctgcttctctgtctgttccgaattctcaaaacaatctaactctaacttctgctgcgatctcaacgccggcgaacataaatacggcgctggtcggtacttcggttatcagtccttctagcttcgttcaatcgcagccgcagagtttgactctggactttacaaaacctaatttgtttggctccaacggtaaaagtaccgagttggagttcacaaaagaaagccttagcgtttcctctaactcttcgtttatgtcttctgccatcaccagagatggcagcgtctcgaacgggaagcagggatcatctctattcttg

SEQ ID NO: 13782 - DNA, 524 bp, Gossypium hirsutum
  Clone ID: GOSHI-09MAY01-C24996_1
ggaattgacaccgctcttagcctcgttttcttcacgcagccctactactgctccgatggcatccaccaccaccaccaccactggcgcctattcgtcggcagaagaaaaccctaagaagaccctggacgctgcctcaccttctatggataagtcagatcctcctagcgcttcaacactttccgatgctgaggtttctgtaaaggagggcgagggtttgaagaccactgggactgctgtgggcttggccgctggggaaagcagcggtcccgccgacgatatccagaagaagattcgacgagctgagcgaatcggcctgcccattcagttatctgagcaagaaaagcgtaattctagggccgaaaggtttggcactgcacccagctcaaagggatcggaagaatctaagcaatcggaggagctgaagaggaaggctagagagcagagaggtttgggattgctgcacccactacagctactgatgaggatgcaaagaagaaagctcgtcttgctagatttgcaccata

SEQ ID NO: 13783 - DNA, 702 bp, Gossypium hirsutum
  Clone ID: GOSHI-09MAY01-C24936_1
cccacgcgtccggtttatctgtgggtttgtgatcaaacgccgcatcgaaaaagatgggcttattcgcccttcgtatcctctgtctaggccttgtactggttgccaaaattccccatagcccgcaccaaaatcccatgcactgttcatttgtccctttgctgaatacccagatttggaagacgtggatgctatcttcttcgtcctggctacatctcaaacaacgaacctcttctcgattttagattagagaaagtggatatgtaattccacggtattctccatactgtaattttaattcttgagggcaactgtagattccataatttcttgtagaaattttttgtatcagtctgtaaataagcattaggctcccctctctaatagtttataagcgcttctaactgaaaagactccagtagcctcccctctccatacttggatgtcttcttgggcagactttgaaagtggaatccgcagaatcttctttgcgatatctgtattaaaggtattgacaatgaagactcttttccatgttctactcatatgagagaatattcaattgaacccaacaacaaaaaaagctatagttaagtttccaagttattggaatttcaaagccttggaaaaaggtcttaagttatagggtggggcttttgactttttcctttttgtaaaataggattctgaataatgtaccccttc

SEQ ID NO: 13784 - DNA, 470 bp, Gossypium hirsutum
  unsure (1)..(470): unsure at all n locations
  Clone ID: LIB3146-011-Q1-K1-B10
taccgagcgaatcccggtgcgacgcacgcgtacgcttggaatccttatgagtaggcctcgtactgtttgccaaaattccccatagcccgcagcaaaatcccatgcactgttcatttgtccctttgctgaatacccagatttggaagacgtggatgctatcttcttcgtcctggctacatctcaaacaacgaacctcttctcgattttagattagagaaagtggatatgtaattccacgttattctccatactgtaattttaatttttaagggcaactgtagtttccataatttcttgtaaagattttttgtatcagtctgtaaataagcattaggctctaatgttgactcctgtgnaaaatatttttattttttttcttttaaaaaaaataatattttatttttattattaatggtttttttaaatataaaaataaaaaatttttttttttttttaattttaatattttt

SEQ ID NO: 13785 - DNA, 922 bp, Gossypium hirsutum
  Clone ID: GOSHI-09MAY01-C24926_2
tcgcttacgcgtccggttgataagcatgttgatttgcagaattcgtctgcaaagaggatgattggcaaagtcgcagttgtaactggtggtgcaagagggattggagctgccacagctaaattatttgctgaaaacggggcttatgttgtcattgctgacatattagatgaaacagggaccatgcttgctgactccatcggagctcgctacattcattgtgatgtagccaaggaaagtgatgtcgaatcagctatccaacttgccatcacatggaaaggcaaactagacatactgtttagcaatgctggcattggaggcactgcaagcagcataaccagccttcccatgcgtccggtcaaacatctggtctcaatcaatctgcttggcaatgtacatgcgatcaagcatgccgcacgagccatgctgagatgcaatacaaaaggttccatcatatgtacatcaagttctgcaggcatcatgggagggctagcgtctcacccttactctttgtcgaaagctggtatcgtcggactgatgagaaccgcagcatgcgagttaggtgtgcacgggattcgtgtgaactgcatttctcctcatggtgtacctacagatatgctcattagtggttatagaatgttccgggggaacgaaacaacacccgaagaagtgaagaaactggtcggtgatcaagggagtctattacgtgggaaagctgcaactgttgaagatgtggcccaagctgcagtgtttcttgcctcagatgacaccggattcataacagcacataacctcattatcgatggtggatatacttctgctattagttcactgagtttcatctacaaatagtaaagaattgggagaagaaaaaaataaaacaagacaactttaccaatgtgatttgagctttattgtaaaacac

SEQ ID NO: 13786 - DNA, 617 bp, Gossypium hirsutum
  Clone ID: AI055665.1
aaacagtctcgcctatgaagctaggttcacctatttgtcaaactggatgtcgactatagaaccgcgcatcagttagtggcaggatttgtgtaactgcttttccccaggggtactacagatatgtcattagtggtataaaatgtccggggaacgaacaacaccgaaagagtgaagaaactggtcggtgatcaaggagtctattacgtggaaaactgccactgttgaaaatgtggccaagtccaagtgtcccttgcctcagatgacaccggattcataacagcacataacctcattatcgatggtggatatacttctgctattagttcactgagtttcatctacaaatagtaaagaattgggagaagaaaaaaataaaacaaagacaaactttacccaatgtgaattttgtagcttttattgttaaaaacaccttcaatcaaaccaaaatagttgtgctaaatctataatagtatcaaatattgagaatcaatacagaaagcaaagattgttactttaaacgaagcaagtcttttaatccaacaagatgcagacaatttaatccgacattgaaggatggcatataattgaaaaccatgcagtattaatgtacaatatgc

SEQ ID NO: 13787 - DNA, 607 bp, Gossypium hirsutum
  Clone ID: GOSHI-09MAY01-C24846_1
agcgtatttccaagctaaagaagaacggctgctcgtatatgattatttcccaaatggcagcctcttctctcttattcatggaacaagaaccaatggtggtggaaagcctcttcattggacttcttgtcttaaaattgcagaggatttagcttctggattactttacattcaccaaaatccaggcttaactcatgggaatttaaaatcctcgaacgttttattaggccccgacttcgaatcatgccttacggattacggtctcacgttattccgagaccccgagtcaccagaagagccaggtgccgccacttttttctatagggcacccgaatgtcgggacatccgaaaatcatcgactcagccggccgatgtttatagcttcggcgttctcctacttgaactcctaacgggcaaaacacccttccaagaccttgttcaagaacacggctcggatatccctcaatgggtaagatcggttcgagaggaagagaccgaatccggggacgaacctacgtcaggtaacgaaacgtccgaggggaagcttcaatcccttttgaacatagcaatggcttgcattgcccgcgcccgagaaccgtccatgatgcgg

SEQ ID NO: 13788 - DNA, 1239 bp, Gossypium hirsutum
  Clone ID: GOSHI-09MAY01-C24866_1
cgcaatagggctgttgcttgtgaagctaactgttgaactttgttgcaggactctgtctgtccgatcctccaagtggtttcctcaatcccatcatgtaaacttatcaaggaaacttgtgaaaggaattttgcaatgcactttgactaccgcactactgcaagccttgatttcatctctttagacgagacaacttttaggaatattattcagcatccggatctaacggtaatatctgaagaaagggttctcgatgcaattttgatgtggtacatgaaatcagagaaattgtgtggatgggaagtggtgaatgagctaattacaaattcaaccttagaatgtgtgttcaaggacaggcttaaactggtgaatgacttgcttgcatcagtgcggttctctttattgccataccccctgctaaagaagttagaaaaaaccagtctaagcacgcagatttctgcttttggtgatcttgttaaggaagccattaattatatagaatgcggagcagcaacacatggaaatgaccagaatgaaagatttcaacatagacgttccagttataaggagctacagtatatatgtgatggggatagcaatggagttctgtacttctccgggacatcatatggggaacatccttgggttaaccctgttctgtctaagagaattactattacagctagcagccctgcttcaaggcacacagatcccaaggttttggtatcaagaacttaccagggaacatgttttgctgggccccgtatggaaaacggaaatatctgtgcttggtggatggttgacattggcaaagatcatcagcttatgtgcaactactacacattgagacaggacggctccagggcatacataaggaattggaaatttcagggttgtatggatggaaagacttggatagatttgagagtgcacgagaatgaccaaacaatgtgcaagccaggtcagtttgcatcatggcctgtaactggaccgaatgctctgcttccatttagattcttcagggttctactcactggtccaaccacggatgcctcaaacccctggaacttatgcatttgcttcctggagctctatggttacttccgttgaatgtgaaattaatatgtgcatctattctgggttttccaatagcagttccttttcaagtttttttttttttttgtgaccaaccaccacgtacagttttaccaaataaaatttatgtagttgacgttgagaact

SEQ ID NO: 13789 - DNA, 1082 bp, Gossypium hirsutum
  Clone ID: GOSHI-09MAY01-C24816_1
tttgcttcgggccgggatgttccgcacctcccctccccccgcgtccggaatgacttgggtgaagaagatgaggaagatctcgatgacgatggagataagtcacaacatgctttagcaccggaatataaacgtttaattgctattcatgccggaaagccaaagggaggattagaagagtgtctaagggtggatcccgataaagtaagacgtcttagcatgagtgagcaacaacttgaaaatgctgcgattactcacggaaaagaaattgtcaggtttacacagcggaatattcttagggtatatccgaggggtacacgtgtcgactcttccaattacaacccattaatcggatggatgcatggagctcaaatggtcgcatttaatatgcagggttatggaagatctttatggttgatgcatggaatgttcaaagccaacgggggatgcggatacttgaaaaaacccgatttcctattgaatcctaacaaagtctttgatccaaatgtcaagttaccggttaaaaaaattttgaaggtaactatgtatatgggcgaagggtggtattatgattttcatcacactcattttgatgcgtattctcctccggacttttatgcaagggtggggattgctggagttccgttcgattcagtgatgaagaaaacaaagacattagaagacaattgggtgccttgttggaacgaggaatccgaattccatctaactgtcccagaactggctctacttcgggtagaagtgcatgaatacgacatgtctgaaaaggatgactttggaggccaaacatgcctaccaatttcggagctaagaagtggtatccgagcagttcccctcaacagccgcaagggcgagaagtacagctctgtaaagctcctcatgcgcttcgaattcatcgatccataggcacccaaagttgagttctggtccatacttccaaaccaaccttcaatctgtttgacgggatgtgagcttgtgtgcagttttaccttatacattacatgtttgctgcttgtttttattactcggacttgggtgcgaagtttttaaatttttccttctttttc

SEQ ID NO: 13790 - DNA, 421 bp, Gossypium hirsutum
  Clone ID: LIB3146-005-Q1-K1-E7
cccacgcgtccggacccacgcgtccgcccacgcgtccgggggattgctggagttccgttcgattcagtgatgaagaaaacaaagacattagaagacaattgggtgccttgttggaacgaggaattcgaattccatctaactgtcccagaactggctctacttcgggtagaagtgcatgaatacgacatgtctgaaaaggatgactttggaggccaaacatgcctaccaatttcggagctaagaagtggtatccgagcagttcccctcaacagccgcaagggcgagaagtacagctctgtaaagctcctcatgcgcttcgaattcatcgatccataggcacccaaagttgagttctgggccatactttcaaaccaaccttcaatctgtttgacgggatgtgagcttgtgtgcaagtttacct

SEQ ID NO: 13791 - DNA, 586 bp, Gossypium hirsutum
  Clone ID: GOSHI-09MAY01-C24806_1
cccacgcgtccgcggacgcgtgggataatttttgtagcagggatatgtgtacttctgttcccagtagagaccatgggtcgggatttgagcgatagcatttccagttcaaaacaaacgagtgggtcgatttaaaatagtgagggctttccccctttctgtatagcaggtgttttattacccaaaaaaaaaaaaaaagaaaataaagaagtccttggacttccatatcaaaatagcttttcccaatattttctccctgcaaacatatttttcgttacattttcgagaattcagcagcttttatggtttaatatcgggggtgggggaacctttatgacgtcttccacttttgatggcatccatgtcgggaaaagaaagcagtttacaatggcagcattaggatttcattttggtggaagctagaagataaagtcagaccgtgccgcagagcaacttgcagtgcagaccagccagtttcagagcagacatgaatagttgcacgggcaggtgcttcatcactttcagaggtcgtcgaaattgtcactttaagacagaacatgaatattcatcattgctgccataggatttt

SEQ ID NO: 13792 - DNA, 1501 bp, Gossypium hirsutum
  Clone ID: GOSHI-09MAY01-C24506_1
ctcttcttaactttccacactagggttttttcttcaccttctctttctgcctcttactttctctctctaaatctacacccttgatctttggttatggccactcctgatcgtatccttgctaactttactcctctggaagttgcagattcacttgcccacctgtctttggattctcaatccaagaccacaaaagctcctgagcctgtcaagaaggatttttacggtgacaatggctcttacatgtacccgcaaacttatggttacatgtcatatgcgccgtattctattcccagtccacctcttcctgctatgggacatgatggtcagctacatgccttgcaagagtactactatccaagcccttattaccaaccacctctgcaaactagtcaagccaatgctcctcaagttgatgtttcgagtttcggtgcaactgatcaatcttccttatctgttgatacaaataaaggaaattcaaatggtataacaagtggtggatcagggtcattaaaaccaaccttgaagagttcctctctaaatcctaatgctttttataaaggaggaggcttgccaactggtaatctatctcaaggttaccaggatccaaggtttagctatgatgggaatcagtcgccaataccttggttagatatttccatgtctcctaatgggcaatctgaacaaactgcaaatggtgggttctcttcatatacaaacaacctctcatctgggcggaatcagaaccttcatcccttccctcatgtcatgaatatgcacaacgcaagaccatcatcaggtgtaggccaatcatatggatacatgaaccacatgtaccctaacaatgtgacctatggtcattatgggaatgccattagaggcggttctgggtttggatcatatggatatgatgcccggaagaaaggtctagggtggtataatgttggtaacaacaaatctaggttccgtggttatggaaaagagaatattgatggtttcaatgagctaaacaaaggacccagagtaaaagggtataagaataaggatggttctggaaatgcaactctagctgtcaaagatcagaaccttccattgatcaagagcaatgatgaggacattgtttctcttgttccagatacagagcagtacaatagagaagattttcccgagagttattcagatggtatgtttttcgtcattaaatcctatagtgaggatgatgtccacaaaagcatcaaatacaacgtatgggccagtacatctaatggcaacaagaaactcgatgctgcattccgggaggccaaggagaagtctgatggctgtcctgtatttctactgttttcggttaatacccccgcgcgtccggttggattagcagaaaatggtgggtccggttgattttaataggactgtagagtattggcagcaagacaagtggactggttgcttccctgtgaagtggcacatcgtaaggatgtccaaatgcttattaggcacataacgc

SEQ ID NO: 13793 - DNA, 988 bp, Gossypium hirsutum
  Clone ID: GOSHI-09MAY01-C24436_1
acggtcgcaatcacatcaactggcattattatttgtgaattgcttttggctgatgtaagcggggagctgaataacaataacatcacaaccaatgtcaaagttgacactaagtctactctttttgccactgttaccgttgatgaacctgcacctggattgaagacaatctttagttttattgtccctgatcaaaggtctggcaaggtggaactgcaataccagcatgaatatgccggcataagcactagcattggtttcaatgctaatccccttgttaacttctctggggtggttggaaacaattgtgtctcactggggactgatctctcatttgacaccgccagtggaaactttaccaaattgaatgctgggctgaatttcacccattctgacctcattgcttccctaacattaaatgataaaggtgacactcttaatgcttcctactaccacattgttagcccattgacgaacacagcggttggtgcggagctgacccatagcttttcaagtaatgagaacactctcacgattggtacacagcatgctcttgacccgttgaccacagtgaaggctcgactgaacaactacggcagagcaagtggtcttatccagcatgagtggcgcccaaaatccctcttcactatctctggagacgtggacaccagagcaattgaaaagagtgctaaagtcgggctggccttggcactcaagccgtagggaaaggtaatatcattgtttgaatgaagggagggctttacttttgattggtgaaaccggaagtctggaagactggggagagtaataatgtgctttgacggatttttcatgatcttggattaaaaaaataattgtgattggcgaactgaaattggcaatttgttatgttaaattcgctagggcgtacgttgttttttttttttttagaaaaacaaggcttcatctagcctagtcatctgtgaaatgcaaatgttgcttacatgctatt

SEQ ID NO: 13794 - DNA, 364 bp, Gossypium hirsutum
  Clone ID: LIB3083-120-Q1-L1-C3
aaaaggcctggtctctacttcgatatcggcaaaaaagctagagatcttctttacaaggattaccaagcttaccacaaggtcactggcactacttacactttccatggagtcgcaatcacatcaaccgggactaagaaaggggaattgcttttggctgatgtaaatactcagctcaagaacaagaacatcacaactgatgtgaaattcgactcccgatcgaatcttttcaccactgtcactattgatgaacctgcaccaagattgaagaccatctttagtttcgttgttcctgatcaaaagtctggcaaggtggaactgcaataccggcatgaatatgctggcataagcactggcattggattga

SEQ ID NO: 13795 - DNA, 362 bp, Gossypium hirsutum
  Clone ID: LIB3083-049-Q1-L1-F8
ggaataaaggagcactcaatttcacaggtcaattgacatttgacaacatgaagcttgttcaacaaaactgcatgcccttggaaattcaacaaaaacaaatcgctaaagtttgccactcacaattatttttacaatccatgagggccatgaccatcaatgtcaaatccgtaaaaagtacattatttctctccaagtctccaccaatcaaatttatggccttcccttcaactgcacaacaatgataataaatttacctatggcttgagtgccaaggccaacccaaccttagcactcttttcaattgctctggtgtccacctctcctgatatagtgaagagggattttgggcgccactcatgctg

SEQ ID NO: 13796 - DNA, 562 bp, Gossypium hirsutum
  Clone ID: GOSHI-09MAY01-C24796_1
ccacgcgttcgccagaaaccgagtttcgacctcccatgtctgaggttgtgcaagctttagtgaggttagtgcaaagagcaagcgtggtcaaaaggagatcgagtgatgaatgcggattttcatatagaactccagatcatgagattatcgacttgtcattttgagtgagttgaaaccagaagagaatcaaactcaagaaatggaaaaaaggaaaaagggaaaggaaaaagaggttctgtaattatatctcacattgtcagaaagttcatagtttacactgcaaatatatagctgtattattggaacattatgatgcacattcacgttttgcatcttcttaataataattaaaaaaaggttttactttatttcattgaaataaaagtacatagacattcctttgcaaaaaaaaaaaacaaaaaaaaaaaaaaaagcactcaaaaatagaaaataaatagggaagacaacaacaaaaaaaccattcaaaaaatttgctcacttaaatttcctaaaatgggacaccaccctttaacccaattttaaacccaaccggggggggggg

SEQ ID NO: 13797 - DNA, 736 bp, Gossypium hirsutum
  Clone ID: GOSHI-09MAY01-C24756_1
agaaagaagagtttgatcagtacatcaaaattcaggaagagcatctgacaaagggaataagagacatgaagcagagacacatggcttcttttcttgctgctattgagaaaggcatcagcaagaagcttagggagaaagatatggaactagagactatgaataacaagaatagggaactggttgagagaataaagcaggtgactgcagaagcacataattggcattatagagcaaaatacaacgagtcggttgttaatgtgttgaagagccaccttcagcaagtaatctcacaaggtgctcaacacgggaaagaaggttttggagatagtgaagttgatgatgcagcctcctatattgatccgaacaactttctcagtattcctcttggggctgcaaaatgtgtttccaagggcatgaaggaacacattatttgcagagcatgcaacgcaaaggaggtgtccattttgttgatgccatgtaggcacctctgcttatgtaaagactgtgatttatcaatcaatgtttgccctgtatgccaggtaacgaaaactgctggtgtccaagtgtacttatcctaaacctgtgaagcaaattcttgaaaaaagatgaaaaatttatacccttacgtgtgtgtgagagacatccagcattcccccccccctttctcctaatagagacaatgtatgaaaagtaaacctttctcatgaaatggagtatgcaaaagcatcctttgttc

SEQ ID NO: 13798 - DNA, 592 bp, Gossypium hirsutum
  Clone ID: GOSHI-09MAY01-C24766_1
cgcgtccgatttcataaaaaccccaaatttctaagaactctcttgattcttctttggtttaatagatggaatggagaccaagtctcgcactctagagatcacggttttatcagcagaagacctgagaagcgacaacaaaccggtgaaaaagaacgcctacgtcgtcgtttcggtcgaccctttcaacaacaaggcgaccaaggtcgacggagaaggaggcagctacccttcgtggaacgacaagctggtgatggaaatgccgttacagacgcggtttgtaaccctcctagtcaaatgcaaggggtccagaggggaaaaaacggtggggttagcgaggataccggtgatggatttcgtcggagggtattcgccggctacttgtttgcaattcttgagttacaggttaagggatcccaaggggttgaagaatgggattattaatgtttcattgagagtaaaagagcctttgcaggattgttcttcacaggctgcggctgctggtgtgtggtaatgcggcgacgatagggatggggaattcccattgatggacgaagagattatggaatggttactgggattacaatatggactg

SEQ ID NO: 13799 - DNA, 448 bp, Gossypium hirsutum
  Clone ID: GOSHI-09MAY01-C24656_1
ggttcagtcaccccattttcaagctttccattcaccccatctcatcacacctccggggttcgtctccttagaaactatcggagagaagtcgacagtctccatacttctcctaggagatccaactttgatatcgagctttcagacacggattctttgtccccatccccccctaattacaccgaaggttcctccacttctcaccaccatgttaatatggaggatcaagttcaagtagactacatcgataatgacataaatgaactaaactttaatgaacgacgtgaactcacacaacatgaaattaacatcgagttgaaagattcttcattcgatagaaggacaactagtatatgaatatatatatatatttgagttttaaatttacagtgattagatgggttatgacaacaattgtaattggccaaaggcaaaaataagccatttgatt

SEQ ID NO: 13800 - DNA, 481 bp, Gossypium hirsutum
  Clone ID: GOSHI-09MAY01-C24636_2
ctctcttcgatcaaagtttcataatccgaaggcgaagaggcaaaagattaatggctcctcccgcaaagccaataacgagtccagtctcagatgcatggtacccaaccctagccctcttaatgctctccattggtcttgtcgtcaccgcttccttcttcatctatgaagcaacttcttcgaagagaaatcgaagtcttgccaaggagctcatcactggcggagtggcatcggtcttcctgggcttcgggtcactgtttttgctactttcagccggtgtttatgtctgatttttgatatcggtcaaccggcttacagaggtttgcaaagaaaaggattggtgtctgcttttcttgcatttttgtagtttatcagatcaggaaagcttctttgataaacattttgatgtcacttgagtggttttattggtacatgcttgaatttgtatattcatgtcataagcatgtttcattcatgttacatg

SEQ ID NO: 13801 - DNA, 460 bp, Gossypium hirsutum
  Clone ID: LIB3146-002-P1-K2-H2
gtgagagtgtctcatagtgactgaaagacaaattaatggcatactaaagagtttgcacatggctgagcttgagctcctgacctgtagcttataggtcattaatgggggagcatggtacaacttgggctagctttgttgttgagaggttacggaccctctacagtactgattctacctatgaatgtccttgaacttctctgtaattttgcttacactgctgatcgcataagcagctgctgattgcttcaccattttacattgtccgaaacaagatcccatttgatacaatactttttagacctgatattacatttggaaaattttattttaaaaaaaaatgtttctttccaacaaatatgcagctacgaagcaacttcttcgaagagaaatcgatgtcttgccaaggagcttatcactggcggaatggcatcaatcttcctgggcttcgggtcaattgttt

SEQ ID NO: 13802 - DNA, 608 bp, Gossypium hirsutum
  Clone ID: GOSHI-09MAY01-C24146_1
ccggaaaggaatgtattaagtatttgaaagagcaaaggcttcctcctcagactttcattcctcttcaatcagtgcgtgttaagccaatcattgaaaggttgcgcaccttaggtggcacagcgaagcttatctttgatgtgatccaatttgaccctgctttggagaaggcagttctttttgctgttgggaatactctagtttgtgatgatcttgaagaagccaaggttcttagctggactggagagaggtttaaagttgtaactgttgatgggattctactctcaaagtccggcacaatgactggtggtacaagtggtggaatggaagctaggtcgaataaatgggatgataagaaaattgaaggtttgaaaaaaaagaaggaacaatttgaatcaaagctggaagagcttggatcaattagagagatgcagctaaaggagtctgaaacatctgggagaattagtggacttgaaaagaaaatccaatatgctgacattgagaagaaaagcatagaagacaagcttaaaaacttgaagcaggagaagaagaatattaaggataggattggacatataactcctgagattcaaagttaaaagatgtgagtg

SEQ ID NO: 13803 - DNA, 804 bp, Gossypium hirsutum
  Clone ID: GOSHI-09MAY01-C24166_1
ggcaggcaatgaagactgggatgatagtgtgctaccaaaagaagaaatcgaggcaagaatgcagaggaagggggacccagcctccgcccgagagagagccatggcctatgcatattcccaccagctatggaaaactactccaaaaacagttcacgcagacattcgcactcgtggatttccttggtggtggaactggttagaacgtcagctatcttctagcaacactcctgaaagccaaggcattaagaatttcccgcttacaccaccaaggccaaattccgaattgaagcctagtccagaaccgccattgagcagcaagcaacatcaatttatgtttgacaatatggacactccgacaccgaaatctacaagatcaactacgcgacctatgcaaactccacctagtagaatcctacaaggaagcagttcaggattgtccaaatattcaagaccgagagctagtggagcggattcgccattcgacttgcccttgaaggatgatgacagccttactagctgcccaccattttcagttccaaattacatgacaccaacagtttcagcgaaggccaaagcaagagccaacagcaacctgaaggagatgttcatggggactccaggaagcgagtcatcaaagaggcggctttcattccctttgacacaagggataggatcattcaagtggagcaaagggtctttgtttgcaggcaaggattcaagctctcaaaagggtttagataagaaccaatcgcttcaatctataggtaatttgagtgtggattcaaccgtttcaatgcctgctac

SEQ ID NO: 13804 - DNA, 635 bp, Gossypium hirsutum
  Clone ID: LIB3543-054-Q1-K6-E6
aaaaaggagtgctacgcaaccgttccatccgccggtaaaactggctcggcggtgcgacgcatgttgttggttctccaagcatcattgattgccgccaccaccgcccgtcatgcatccgacaaccggggttactagagacgagcgagctggttcgatggtaaagcgatgcttatgttcgccgacgaagcacccggggtcgtttcggtgtaggcatcacattgccgagtatgcgtggggggctcgatttgtcggcaagaaatgactgcaccgcctacgctgagtacgtgtgaataataaatgttaatataatgtaaaaataattcataaatataattgataatcaacaaaaattgtatattggtttttaatattgatcatataccggttactacttaccattgcggctcagttaatatcaaataatttaaatttcaaaataaataaataaacaccattttaagttaacaaaattacatgacaccaaacaagtttcaacgaaaagccaaagcaagagccaacagcaacctgaaggagatgttcatggggactccaggaagcgagtcatcaaagaggcggctttcattccctttgacacagggataggatcattcaagtggagcaaagggtctttgttt

SEQ ID NO: 13805 - DNA, 647 bp, Gossypium hirsutum
  Clone ID: GOSHI-09MAY01-C24036_1
gtgtgagggaaaaaaaaagtccatttgcatttagtgtacttaagttgttgaatgttacaattacatatgggactcaagaaattgtagcactgctaaaccggctgcccaaacatcgtcttccaatacatgctcctccggggagtgacttatgccgccccgacaccggacaaacagcattccaaccttggttagatgagatatggccatcgcatcatgccctgctccgctcattagcactggaacctcttcatgaatctgccctaccattttgttgacagcactgtaagctgcagattttagccgtgaactcagttcttgatcacaaattactgcatttgcatcatgcttccgttcaatgatgcaagatacagaacgtctatcacatattttatacatctgattagataattcgtaaacaacagcctcacgtccaacatcatcaattgcacgtaaatccacagtgaaagttacctgcattagagttcatattttactgcttatcagcattttctgtttacgctgacactgagattcgttcacggaagaatttcttgcctgccctggaatgacattacttgcacttggccaggttgagatctctccaactgtacagacaagagaagtggacaacgattctaatgtttgct

SEQ ID NO: 13806 - DNA, 761 bp, Gossypium hirsutum
  Clone ID: GOSHI-09MAY01-C24216_1
cggaagacccacgcgtccgacccgcgtcgctgataaatcagaagttggaaccatagagttcgaacatggagccaaagtttctgagctagaaaattgcagttctaacagtattaatgatttggatgttaaagaaaaccatgccagtgcaatcacaatgcctgattcttctctatctattgctgagcagcccaagaaactcgatgatgctaaaggtgaatctgtgagtttaattgttgcagactcccctcaaatagggcaggagccactggaaggcacatctgatctgcagagagaacttgattctgagactggtaatcaagcatacaggttatccccagaagcatcgcctgggagccaaatgattgtaccagcatctcaaggaacaccttctagtgaggtatcagtgaaagctaaaaagaaaagaacggacaagagcagtcaaaagcgcaagtccttgtctgctgataagagttctccatcaactccagctcatgatagtggagcaagaagtagcactgaacaattgcccaaagctcagaaaaatggaaaaatacgcaattctcttgcttcaacacgacctgagaacatagatgacgagccaagagatagtgacaacagtacttctcttccccatttcatgcaagccacagaatctgcaagagctaaggtaatgcaaataactcaccaagatcaagttccaatgtgcaagacaagagacatttacatcaagaagagacattccttacctgcttgtaatggga

SEQ ID NO: 13807 - DNA, 438 bp, Gossypium hirsutum
  Clone ID: GOSHI-09MAY01-C25976_1
cagccgtccaccactcccaccgtaatcaagaaacctcggccacgaggaagagcacctcaggtcgattatgatcatctgaactgggtgcttattaaatggcttattttagctactctacctccttcaactttagagggaaagtgggtagccaactcctttaaatttttgaatccctcaattccactattggccaggtgagaaggacaagggcagtattccccggaagttttcaggaccttgagagaagatgttagagcatcttttggaacaggtttcttccaaagtctcgattgctcttgatttctggacttcatatgagcaaatattttacatgagcatcacatgtcagtggattgacgaaaactggtccttccgaaaggtgcttctcgatatatgtcaggtaccttacccttgttccgactccgaaatatataactc

SEQ ID NO: 13808 - DNA, 408 bp, Gossypium hirsutum
  Clone ID: GOSHI-09MAY01-C25856_1
ggattagtggggaacaaaaaaagctatcattttgtagtctgcaattatgcttttagttccattgaaattgggctcattccaccactcagtaacaaagcggaaactctttctctatatgcaaagggaactttggctgcatgctgtgggaggagtaatcttgccgctgcccaaagctgcattgccttttggttgctcctgcattttggaactagggagactgcagtctgagtaaactattgtagaatctccctgctttggtttcaaccagttggtttcttgccggagaaaatctgttgacggctccagtacagttggcttataggagcttgttctggagttcaaatgattatagaaatctgttgaagtacaataagattctgaagtttgctctttcagtttccatataaa

SEQ ID NO: 13809 - DNA, 359 bp, Gossypium hirsutum
  Clone ID: GOSHI-09MAY01-C25846_1
cttcgcttcatgggcgggcgcatccactgcttcctcgaccagagcaggtttggcctcagcctttttcttcttctttgggaccgtgtcttgctcctcgagagcagtggagtttgttatttgcccaataagtgaatctgctgcagggttgtaggtcttagcaggagttatcaacccagcccccttcttccggtccttgtcatagacttctatcttcggcttgcctttagctgaacccgcagaacggcccaattctttgccttcaagtgcccttaatcttgcttcaagcttggctcggttctcaagtcccatggaattatcttggtcatctccaagagcatcacatcgaattgccagtgcag

SEQ ID NO: 13810 - DNA, 551 bp, Gossypium hirsutum
  Clone ID: GOSHI-09MAY01-C25556_1
caaccttctcggaactcccaaacggcaggctcaagtgcgttgaaacaggccacgagatggtcgtcaaagacaaggattcctatgctcacagcaaacgttgtcgtttaggccttatcgactttgctttgtctcactctaagccccctctcaacatgttcaaacaagaccctctggcccgttcgaagttgatttgtaaactaactggcgataccgtcaacaagtctgaggaacatatttggaagcatatcaatgggaaacggtttctcaataaattagagcaaaaggaaatggagaaggagttgaatgatgaaaccatgtgcgaggaaggtgagaagaagccaaagaaagtaaaaaataagaagaagatgaagaaggaaaaggaaaaggcagttgaagaaattatctccgaagttagagattcagctgaaaatgaaagtgagtctgaagaacttgagttctggattcccccggttggagaccgttgggactttgatgacggaggggatcgatggggttctggttcagagtcagatgaaagtgatgatgaaaac

SEQ ID NO: 13811 - DNA, 848 bp, Gossypium hirsutum
  Clone ID: GOSHI-09MAY01-C25536_1
caaaatcagattattacacaacaggggagttgtgcaatctaaagtttgtctgaagatggaacatcaattcaagcaaaccagaaaacagaactggttccagaagcagttttcaagtcgaaacggtgaagataatcgtccgaaaccaggcgcacatgaagccgccattgcggcggctgcatttgctattcaatcagtcgaagaggctaaagcagcgaagctcaagagagggagcttcaagaaagataatagcaggaatggtgtgcttcattctaatagaataaccactcaattctccctcaagaaaactaaaagtgcagtggaaaattccaaggataagccaatgaaacataaatgtaaggaagtagaaagagtacattcatattccaaaccaagctctcaatctgctacaattccaatagcaccaggagatgaatggtatgacaagctgaaatcagttgtttgcggaggtgacaagttgcccaaaacctacggttaaaacttattaaaacactggagctgcgaagggcaagaaatgtacaagatttacaaagaaaacaggacagtaatttagattcatcactatgtgtgaaaatatattaagagattgttagaaaatataaacatcacatatattatatacttagttatatgttattattatttaatatcataataggttaacttaaattaaaagtgatctaacagaaatgggataatgaaataagcttttaaattaatatatatatatagaatcaacttgtttatacctacaacatgcaataattattgatgtattttgaaaataaaaacagttgtattcagtatgatacaatgagcactttttttag

SEQ ID NO: 13812 - DNA, 605 bp, Gossypium hirsutum
  Clone ID: GOSHI-09MAY01-C25486_3
tagtaattgaaccaaagaaaagacatgggagtttcaggcactttggagtatttgtctgatgtagtgagcagtagtggtcataatcacaagaagagaaaacaattgcagacagtagagctgaaggtgaggatggactgtgatggttgtgaactcaaggtcaagaaagccctctcttcattgaatggtatatacatatatttcttccttttgatctcctttctttttggggggtgggggtggaggactgaaatgtaatgtttttttttttgcaggagtgaaatcggtgaacataaacaggaaacagcagaaggtgactgtaacgggatatgttgaagctaacaaagtgttgaagaaagctaagtcaacagggaaaaaggctgagatttggccttatgttccttacaatctggtggctcaaccttacgctgttactgcttatgacaagaaggcacctcctggttatgttaggaaagtagacaacaatgtaagcagcactgctaccgtcactagatatgaagatccttacatcaccatgttcagtgatgaaaacccaaatgcatgttctgtcatgtgaagctgcaattttatattactatttctttttg

SEQ ID NO: 13813 - DNA, 758 bp, Gossypium hirsutum
  Clone ID: GOSHI-09MAY01-C25486_2
ccctcgcgtccgattgaaccaaagaaaagacactgggagtttcaggcactttggagtatttgtctgatttgatgagcagtagtggtcataagcacaagaagagaaaacaattgcagacagtagagctgaaggtgaggatggactgtgatggttgtgaactcaaggtcaagaaggccctctcttcattgaatggagtgaaatcggtgaacataaacaggaaacagcagaaggtgactgtaacgggatatgttgaagctaacaaagtgttgaagaaagctaagtcaacagggaaaaaggctgagatttggccttatgttccttacaatctggtggctcaaccttacgctgttactgcttatgacaagaaggcacctcctggttatgttaggaaagtagacaacaatgtaagcagcactgctaccgtcactagatatgaagatccttacatcaccatgttcagtgatgaaaacccaaatgcatgttctgtcatgtgaagctgcaatttcatattactatttctttttggttttctctgttggatttcctggtagatattatgacaagattggcgagttattactaatcaaagggagttcatctttttctttttaattttcaaaatggtcctggtttgtttgtagtcttgtaaggagcagttttgggtgggtggggtgatgatgataacaatttgtcaatgtgggttagggaagtgaggtacagccattgtatttgcagccttactttattttcttgttctt

SEQ ID NO: 13814 - DNA, 657 bp, Gossypium hirsutum
  Clone ID: GOSHI-09MAY01-C25486_1
ctttcattagtaattgaaccaaagaaaagacatgggagtttcaggcactttggagtatttgtctgatttaatgagcagtagtggtcataagcacaagaagagaaaacaattgcagacagtagagctgaaggtgaggatggactgtgatggttgtgaactcaaggtcaagaaagccctctcttcattgaatggagtgaaatcggtgaacataaacaggaaacagcagaaggtgactgtaacgggatatgttgaagctaacaaagtgttgaagaaagctaagtcaacagggaaaaaggctgagatttggccttatgttccttacaatctggtggctcaaccttacgctgttactgcttatgacaagaaggcacctcctggttatgttaggaaagtagacaacaatgtaagcagcactgctaccgtcactagatattctgtcatgtgaagctgcaattttatattactatttctttttggttttctctgttggatttcctggtagatattatgacaagattgtcgagttattactaatcaaagggaagttcatctttttctttttaattttcaaaatggtcctggtttgtttgtaagtcttgtaaggagcaagttttggatgggtggggtgatgatgataacaatttgtcaatgtgggtt

SEQ ID NO: 13815 - DNA, 768 bp, Gossypium hirsutum
  Clone ID: GOSHI-09MAY01-C25456_1
cagccaagttgcttatttcggaatatggattagatgcatcgtcattgaaggcatcaggtcctcatggtactttgcttaaaggggatgttttggctgcaattaagtccggaaaaggatctcccaaaatttctccatctgaggagtcaaaaccatcacctcaaaccagctctcagaaatctccttctgcgaggcctgagtcaaaggctccccagcaatcagattcttttgaagacttgcccaatactcaaatacgcaaggttattgcgaggaggttattggaatctaaacagactacgccacatttgtatttatcttcagatgttgtactggatcctcttctttcttttaggaaggagcttaaagagaagcatgatactaaagtttcagtcaatgacattgtcataaaagcggttgcagttgctctaaaagatgtacctgaagctaatgcttattgggatgttgagaaaggggaaataattttgtgtgattctgttgacatatcaattgcagttgctactgagaaggggttaatgaccccaattgtaaggaatgccgaccagaaatccatttcatcaatctcctcagaggtcaagcaactagcggaaaaggcacgggctgggaagcttttaccaaatgaatttcaaggaggaacattcagcatttcaaatctgggaatgtttcccgtcgaccagttttgtgcgattataaatcccccacaggctggtattctcgctgttggtaaaggaaacaaatttgtcgaaccggtgt

SEQ ID NO: 13816 - DNA, 564 bp, Gossypium hirsutum
  Clone ID: GOSHI-09MAY01-C25406_1
tgacatttcttttatttcctaaatctgtcagaaattacacactagaactgtagcaatgcaagggctcgtcttactatcggtgctcctttgcgccagctgccatatctccctttccttgaccaatagtactgccagcaacggtacagtggcgggcggactactggaaaatggcaacttcgaaaacgccccaaatgcaacaaacatgaaaggcaccgtggttgtgggacgctacacaataccaggatgggtgaatgaggggtttgtggaatacattaagtcggggcaaaagcaaggggacatgctgctggtggtgcccgaaggggcctatgctggtaggctaggaaacgaggcatccatctagcagaagttaaaggtgatcaaagggatgtattactccatcacattcagtgcagctcggacttgtgctcaagaggagcgtttgaatgtaacggtggcgcctgattccggcgttctgtccatccagactgtgtacagttgcagtggttgggacaactttgcatgggcgttcaaagcaatttttgatggtgcagagttgattatcat

SEQ ID NO: 13817 - DNA, 908 bp, Gossypium hirsutum
  Clone ID: GOSHI-09MAY01-C25436_1
cccacgcgtccgatcacccctaaatgaccatcaagctgatggcaactcacacaatactcacaatgtttgctcttctaatggcagcacacttcaaatcaatatcttcaacgaaccttccaccaaaggacgaccaagatctccgtctcgccatggaagagatgcaaaaagccaattacttcacctttgtaatgttgctcaacatgttgcccctcgacccaaagttccttgctaacgtaacttttttaatgcccaatgatcggatgttgtcaaaaacggtaataccagagaacgcggtttccaacttcttgcatcgtcattcaatcccttcaccgttaattttcgagcatcttttatatatcccgacgggttcggttcttcccagtttaatgccagagtacttgatgaatgtctcgaatggcggtggtcgaagaagtttcgtcctcaataatgttaaaatcattagcccgaatatatgtactatcggatcgtccatccggtgccatggtatcgatggggtgttaaaccctgaaagtaatatatctctacatacttgctctaacaccatggttcctgtaccaccaccaccttctctggtggccccaccacctttattgccaccaccacctccatcaccagtcccatttttttcttcccctgaagatgattttccggtgcctgccccattaccggctgatagtagccaacatatttctgggtcttcaaagttatcattaggtagaaaagtgttgaaatcaatggctaccattttggtacctctaatgattggtgtttccatttgaaaagttgataagtatttggtgaaattgttggcaatagttttaagattaagtgtttgaaaattaatgcatatgtatgtgagcaatattctagtaaaccttatttcaatt

SEQ ID NO: 13818 - DNA, 446 bp, Gossypium hirsutum
  Clone ID: GOSHI-09MAY01-C25796_1
gtagaaggggagcagggagctgctatccatattgttctagttgactccaacactgcgcgtgttgtaacaaccggacctgaagcctctatgaagctagatgttgtggtgcttgaaggtgattttagcaatgaggatgatgaagattggacacaggaggaatttgatagccatttggtaaaagagcgtccaggaaaaagaccactgctgacgggtgacttgcaagtgaccctgaaagagggggttggaacactaggagacctcacttttactgacaattcaagttggataagaagcaggaaattcaggcttggcttgaaggttgcttctggatactgtgagggtatacgtgttcgggaagctaagacagaggcttttactgtcaaggatcacagaggggaattgtataagaagcactacccacctgcactgaatgatgaagtatggag

SEQ ID NO: 13819 - DNA, 541 bp, Gossypium hirsutum
  Clone ID: GOSHI-09MAY01-C25786_1
gcgggcgaggtactctataaaacaactggctgcatgtgcattaaccaaactcaaaggtgctagcgctactctcaccataatcttcttcgctccattcactgcaacacaatcgtttctcgagatccaaatccatgccgatctcggacctcgctttatttcttgaaaagagatggcggctgccgtttgattcgacggaaacctcgttcgaccgccgtgaaggcggtgcttgattcggcaactatagaggagctaggtcttaaagaatctgatatgagaaatccggcgatttcttctacttatcggaggtctatgttgccgaagccgaatcaaacggtgttggaagctcaagcgaggatttgtactggacctacgcagactagaccgctctcggaagaacaggcgtttaaggttctggatacaattttgatatcagttaggggggaattaaaagatgaagaacaagtctcaaaagcacagattggagcattctttgctggaatgactatccgtgcaaattcctttccagaagagactcaatgga

SEQ ID NO: 13820 - DNA, 404 bp, Gossypium hirsutum
  Clone ID: GOSHI-09MAY01-C25756_1
cgcagattttacttttatataaacatttatgcatgagcgtgtgttataacttaatcagttgctcattctgatatatgtatctttttcctttgtaagttatcattttatagcgtttgttgtctttggtatgcctatgcaccactatggtacataagccttaaagaatcaacatgagctggagctagaatggttagaaccttgcttggtttcagttcatccttttcggtccatgatttcccctgaattttcttttgctcaaattatgacatgttaaaaagtcaacaattgtgtatctatctacttggaaaaatatcatttggtctagaacatccatattcttaagctcagttcccttacatggtcacatcacaaaaaatttgtgtggtcataacagagtacgagtt

SEQ ID NO: 13821 - DNA, 386 bp, Gossypium hirsutum
  Clone ID: GOSHI-09MAY01-C25776_1
gaattacctcattgatgaagcaagaaaaccataatgagatgagattcgacatcatctagtaagcttgaaagtgttatttggcctggaggaactatgaacattccgagaggttggtctctacatggcaagaggctgaggattggtgttccagcaaataatggattcagagaaataattagcgtgactcgtgatccccgaacaaatgaaactactgtaactggatattgtgttgatgtgtttaaggaagccgttcaaagtttaggttatgaagtacattatgattttatcccggttgaagatgccagcggaaaaattgcaggaacttacgatgatcttatccttcaggtttattataagaattacgatgcttgtgtgggggatacgac

SEQ ID NO: 13822 - DNA, 1446 bp, Gossypium hirsutum
  Clone ID: GOSHI-09MAY01-C25716_1
ctgggaagtgttggaggtgggcttaagaataagattgaaaacagtggtcggatattatgggtctgaaggcaaattgtcctgataatggacccgggacttttgaatgttgtgcttggctagacagccccttttctttccgggaagactaatccgcagcctagaaaacacaccttatggcagacaacttcagattttactgatggtcaagctagcatacataggcaacattttctgcagtgtccccaagggttgttaaacaaacattttgaaaaactggtccaatgtgatatgcgtttgaactgtttaagcagacagccagagataattttggattcaccgtactttgaatcacgaagttctgtttttgaggatcccagtgaacctaaagggcatgactatggccaaggggagactggtaaaggatctactagctctggcttccagaatatagcatcacctgttgcagctcactcctcgtctttggagattgagaaaggggattctgctgtcataacctcggaaaatatgtctagggaagctccgtctcccagttcaggaagcggagtttgtgaagcagtggattcaaaggggcctagaaattgggaccagataaaagtgccgggacttcacccttctatgtccatgagtgatcttatgaaccacattggacaccgtctttcagaacacatgacctccgaaaatccatcctctgaaaatagaccagactgccaggaaatgctggaggatattgcacaataccttctgagtgacactcaatttacaacagcctctgatgagaaatccctcatgtcaagggtgaattctctgtgttgtcttttgcaaaaggacaatacaacaggcacaagctcacaggcaaatggagaaaattacgatggaggtgatgatggaaaagatgttcagctaaacagaagtcatgggtttgagtttaatattacgggcaaggatgatgtgaaggcttttgaaggggaaacaaaggaagtgtctagtagcaggcaggcgccaggcatgtcaagaaaagactcgtttagtgagttgctgcttcatcttccccgaatcgcatcgctccccaagttcttgtttaacatttcagaagaagatggagagagacaagctagataagatagttttcttgtttatagactgtgtaaaacaaatgataagaaaaaatattaagcgaatttcccaatctccctcttgttagttggaaatgtgatatgcttgtatattatatcaaatgtctgttgaggggtgcttggacaatgggatttttcaggattcggagaattcttttgatgaagaattccggtaaatcccatatgaaaaccttaggtgtctttttagcaaatgcattatttgatgtaatatctcaagcaggttgtttgttggttctatcttaatttgtaagtaaactgtaattgagttctc

SEQ ID NO: 13823 - DNA, 444 bp, Gossypium hirsutum
  Clone ID: GOSHI-09MAY01-C25726_1
attttcagaagccaaaggtcaaagacgaaagatgcagaggcttctttctctgaaacaagcttcatcatcagccctctccagttcctgttcttcacttctccattcgcttccgtacaaaaccttctcttccgtcgccagcttaaccccccaaaaccactttataagctctgcattctcgaaccaatggcgatcgaagccttgttttactggggaaactcagggttttctctcatacccaaattttccaaagcgtttttggttttatttctcaaatacccatcagaagttttcaagcaaaagtcttttgggttgcagagttcggtttttcagacctcagattcccaaaagcagatttggttttggtccgaatcgtggtcttctgaagagccgttggagattatggctccaaaggttttcagcaagtgatatggttttgggccctgt

SEQ ID NO: 13824 - DNA, 442 bp, Gossypium hirsutum
  unsure (1)..(442): unsure at all n locations
  Clone ID: LIB3048-006-Q1-L1-G4
cgagggattttctagaagccccaaaggggtcaaagtaccgtaaagatgcgagaggggcttcnntttctactggaaaccaagctnnntcatcatcagctcnnctctccaaagttcctgggttcttcacttttctccatgtcgcttttccgtaccaaannaccttctcttctcgtcgcccagctttatacccctccaataacccactttatannagctctgcattctcgaaccaattggcggatcgaagcccttgttttactgggggaaactcagggttttctctcatacgccaaattttccaaaagcgtttnttggttttatnttctcaaatacccatcnagaagtttttcaagccaaaagtctttttgggttgcaagaagttcggnttttcagaccctcagattcccaaaagcagatttggttttggtccgaatcgtggtct

SEQ ID NO: 13825 - DNA, 496 bp, Gossypium hirsutum
  Clone ID: GOSHI-09MAY01-C25626_1
cgggaattgactgctcttaaggctgtgattaagtgcattgaagaacatgagctagaggagcaataccctgtcgatccacttcagaaacgagttctcctgttagagaaagcaaaagcagacaagaaaagggcaaccgaagttgcaaagcctcaacccaagaggcctcgtgctaatggtgccggatatggtcctcgagtcactaatatagctgctgacaaaacattttatcccagagtcactgacaggtacatgcagtacgtgtatgacagaccctatgtttacgccggacctgctgacaaccacagccactctcttcttgcttctgctacctacaacttctctcctagtcatgggaactacttcggaaacgggtaccagtatcagactccgtatcttcactaattcccaaaaatggcataaaggtaactatgatcctctcacttttgcgggtagctttaacctttcaggtgcagtgcatgaatggatttagtatctt

SEQ ID NO: 13826 - DNA, 487 bp, Gossypium hirsutum
  Clone ID: GOSHI-09MAY01-C25176_1
gatatatatgatctcaaatgagatgtctctttcttccattctcgccgcgtactctctagaagatacccaatcctgagactgctaaaggaaacgaatttcgaaccctgttcaccatgagagctaagtggaagaagaagcgtatgaggcgcttgaagaggaagagaagaaagatgaggcaaagatctatgtagcctaatgttgcttgatgggtacttttttttttgttaaaggatttgagatttatctttataatttgtatgggttacctctgtatttctgttgaacccttttttcatctacatgaacaatgtcatggaattttctttttagaactaaatgcttatctgtttcgatgttagcttatagataagcataatattttataaaaaatcatattcatgcttctatatctgaacaacattcgtgtttagatttaaaaaaatcttaataaaggggggggcctgtttatagggtccaagtttacttt

SEQ ID NO: 13827 - DNA, 389 bp, Gossypium hirsutum
  Clone ID: LIB3582-006-P1-K1-D9
cccacgcgtccggagctctctagaagatacccgatcctgagactgcaaaaggaaacgaatttcgaaccctgttcaccatgagagctaagtggaagaagaagcgtatgaggcgtttgaagaggaagagaagaaagatgagacaaagatctaagtagcctaatgttgcttgatgggtactttcttttttgttaaaggatttgagatttatctttataatttttatggtttagttttgtatttttgttgaacccttttttcatctacatgaacaatgttttctttttagaactaaatgcttatctttttttatgttcaatgaataatgatgagcacagacagacacaagaaatgcaaatcgatgagaaatctagatcctgtgaaataggaag

SEQ ID NO: 13828 - DNA, 359 bp, Gossypium hirsutum
  Clone ID: LIB3146-027-Q1-K1-E4
cccacgcgtccgagaaagatgagacaaagatctaagtagcctaatgttgcttgatgggtactttcttttttgttaaaggatttgagatttatctttataatttttatggtttagttttgtatttttgttgaacccttttttcatctacatgaacaatgttttctttttagaactaaatgcttatctttttttatgttagctttgagatgggtgtctttgttaagtgctgcccactaaaaaaataattgttaaaagccttttataatttctttttaataccctagaatggtaattttaatattattaatacctattctccttccataaactctattaattttttttgggggggccctttt

SEQ ID NO: 13829 - DNA, 537 bp, Gossypium hirsutum
  Clone ID: GOSHI-09MAY01-C25166_2
gctaatatgtgggggattgtgaagtccattgtggatttgtgtatgaagttgaatgaggggaaatatgtgcttgtgaaggatccatcaaagcctcaagttaggatttatgaggtcccagctgatgcttttgagaacgattatgtggaagaaccattgccagaagaggagcaggttcagccccctgcggaggatactgaagctggggagccgaatggcactacaaatgatgttgaggcaaaagagactgagacacaaacttaatggtaatggttccttgggatttttcttaatatattcctctgcattttgtgttgtgccactagactattatctcaaagacttccatgcaagttaatttcccttgttcttatgttagtacttggcatgttgtatggatccaaatattattgagttaaccacagtaccacatactagtatttataacttgattttctttctttttttaatgtacaaaatcgtttgtaatcatatgaaacttggtttttcatgttatcttatcctcccttaatgatgttc

SEQ ID NO: 13830 - DNA, 848 bp, Gossypium hirsutum
  Clone ID: GOSHI-09MAY01-C25166_1
tccggtcgcaattagatttattgtccgtccacgagacctctcagagccattacctgaagctaaagatgatattaactctgcttattcgtttattgtttaatcggcttctttaatccgaattttgcgcggcgggttttggtttgggatgggaataaggtgagttttgatgagccgaacccgttcgccaatgaaggtgatcaggtggcttctgtggcatataggtataggaggtggaagcttgatggtgatatgtatttggtcgcacggtgtgaggttcagagtgttgttgaggttaacaacaaaaattccttcgttactttgaatgcgcttaacgagtttgatcccaagtattccggtgttgattggaggcagaagttggagacccaaaggggtgcagtctttggctactgagttgaaaaataatgcaaataagttggctaaatggactgctcaagcgattttagccagtgctgatttgatgaaattgggatatgtgacaagagtgcatcctagggatcattttaaccatgtgatattaggtgttgttgggtataaaccaagagattttgcttcccaaattaatctgaatacttcgaatatgtgggggatcgtcaagtctattgtagacttgtgtatgaagttgaatgaagggaaatatgtgcttgtgaaggatccatctaagcctcaagttaggatttatgaggttccagctgatgcttttgagaatgattatgttgaagaaccattgccagaagaagaacaggttcagccacctgcggtggatgctgaaggtgtggaggctaatgggactacaactgacgataaagagattgaggcacaaacttagt

SEQ ID NO: 13831 - DNA, 789 bp, Gossypium hirsutum
  Clone ID: GOSHI-09MAY01-C25046_1
caacgcctcctgtatacccaagtcctcccgttgtgaagccacctccagtggagaccccttgtccaccaccaccacctgtgctatatccaccacccccggcacagcaaacatgccccattgacactctcaagctaggcgcatgtgttgatgtgttaggtggcttagtgcacattggtatcggcagcagcgccaaggacacatgttgcccagtgcttcaagggttgctagacttggatgctgctatctgtctttgtaccacaatcaaggccaagcttttaaacatcaatatcataataccaattggccttcaggtcctcatcgactgtggcaagactccacctccaggattccagtgtccagcataaggatagtacccctttttggacaataacatcatgttcatctcatgacaagaagttataattgtcgaaaatttcgagtttccccgtaaagatatattgaggcatgacaagatgtgctgatgtatttcttagtaggtagtgttccgagttcctagggaggagttgtgcttccaagttttctattatgtttttaatttgatttaatcgccacttacatttgtggtgctgctttttctttcaatgttattttgatgatacaataaagtgtccaaaaataggcattctataaaaaaaaaaatataaaaataaatgacaaaaaaaaaaaacataaaggctcattactgtaagtgcccgaaaggcttctttcaattacacacgtcccaacttatgatggtaaaatttcaatttttatctttttactatgttc

SEQ ID NO: 13832 - DNA, 601 bp, Gossypium hirsutum
  Clone ID: GOSHI-09MAY01-C25076_1
ggcaactaagttgttcttgttgcttgctatctgtgtcctccctgtgcttgttaatgcaaacaataaagctttccaaatccgttggctgggtttactgtgatgcctgccgtgctggttttgaaacatctaaaagcacttacatccaaggtgcaagggtcgaaatcaagtgctttgataggtctacattgaagctgaaatacagcatcggggcagagacggacgaaactggaacatataacattgtggttgaagatgaccacgaagaccaaatttgctacgcaacacttgttagcagccccattcccagctgcagcattgtggaccctagacgtaataaggccacagctattctgacccgtagcaatggtgccatatccaaccttcactatacaaatgcaatgggattcctccaggatacggtagcggatggttgccaagaactgctcctcaagttgctgcaggatgatgaataaataatttacatgatcttcacgatttagcttcttttaatttttccttgactttaggacgcaattcataatgatgatgttgttgatcgatctatgttcacctgccatttttttgatgatcggttttatat

SEQ ID NO: 13833 - DNA, 599 bp, Gossypium hirsutum
  Clone ID: GOSHI-09MAY01-C25356_1
cccacgcgtccgcggacgcgtgggtgaatttgacaagagtggcaattacgttgctgttggagatcgaggcggtcggatcgtgatattcgagacgaaggatggaaaaaatacagccgaccagcactattcccgaaatcaactggagcagttggattatgtctctttaaaccaccctgaatatcgatataaaactgaattccagagtcatgaacctgagttcgattatttgaagagcctggagattgaagagaagatcaacaaactcaaatggtgtacaagtctaagtgggtcactctttatcctttccacgaatgataagacaattaaactgtggaaggtaaaggatagaaaggtgaagaaagccagggaaattgattctcctcatcaattgctctcttcagaaaatactcttctgtctgaaaggagttctatgaatgagcaaggcataccgtcttttgctaatggcaatcacgtagaaagtggagctgacagtattttcccatcttaagaaccgcgttctaagattgccaactttgaagacactgcttatgcaagatgtagaagggtgatgctcatgctcatgattttaatatcaactc

SEQ ID NO: 13834 - DNA, 848 bp, Gossypium hirsutum
  Clone ID: GOSHI-09MAY01-C25376_1
ggcggcgggagcggcggcggaaagtgaaccacctcaaaagcaatctccttcgtccaccggaacatcggtttccttccactcccgcccttcctctctccgaatacctttttttttctctttcaaaaaaatttcaaattaacagtgaaatatccaggtttaaattgccaatggcgaaagttagcaaagtgcggaagtctgattctcagcataaaagagtgccttatccattgccctctcatcctaagagggctggaaaaggttccagaaagaagagatgttccaaagctttggagaagaaagattgggaagctgcaaaatgttccgtttgtctggagttcccacacaatgccgttctcctcctttgttcctcttacgataagggttgccgcccttacatgtgtgcgactagcaagcggttttccaattgtcttgagcaatacaagaaagcctacactaaagtaacatcagttgactcaatggatgtggagcaacccactgaaaagatggaagtgccagagcttctatgcccgctctgccgaggaaaagttaagggctggacagtggtaaaacctgtacggaaatatctaaatcggaaaaaaaggtcatgtatgcaagaaaagtgctcgtttgttggaacttacaaagagcttaagaaacatgttaggaacaaagcacccactggcacgacctcgagcaggagatcctgtacgtgaagaaaaatggaaaaagcttgaaaacgagagagagcgaaatgatgtgatcagtacaattatgcatcaacaccaggagcaatgggttggtgattatggatgatcggcttatgatttatgcgtgattggtaatgattt

SEQ ID NO: 13835 - DNA, 607 bp, Gossypium hirsutum
  Clone ID: LIB3829-018-Q6-K6-F10
gcggcggcgggaacggcggcggaagtgaacccctcaaagcagtctccttcgtctaccggaacatcgttttccttcctctctctcccttccgctctccgaataccagttttttctgtttcaaaaaaatttcagatcaacagtgaaatatccaggtttaaattgccaatggcaaaagttagcaaagtgcataagtccgattctcagcataaaagagtgccttatccattgccctctcatcctaagagggctggaaaaggttccagaaagaagagatgttccaaagcttcggagaagaaagattgggaagctgcaaaatgttccgtttgtctggagttcccacacaatgccgttctccttctttgttcctcttacgataagggttgccgcccttacatgtgtgcgactagcaagcggttttccaattgtcttgagcaatacaagaaagcctacactaaagtaacatcagctgactcaatggataattcaagtcttacttcaggtgtggagcagcccactgaaaagatggaagtgccagagcttctatgcccgctctgccgaggacaagttaagggctggacagtggtagaacctgtacggaaatatctaa

SEQ ID NO: 13836 - DNA, 350 bp, Gossypium hirsutum
  Clone ID: LIB3272-029-P1-K1-D12
gacagaggtagcggctccagaaagttctccacctcaaaagctatctggggcggccacctcaacaggggggagcttccactccctcccttcctctctccgaatacctgttctttctctttcaaaaaaatttcaaattaacagcgaaatatccaggtttaaattgccaatggcgaaagttagcaaagtgcgtaagtcttattctcagcataaaagagtgccttatccattggcctattatcctaataggtctggaaaagattccagaaagaacagatgttccaaagctatggaaaataaagactgggtagctgcaaaacgttcagtttgtctggagtatctcacacaatgcc

SEQ ID NO: 13837 - DNA, 1065 bp, Gossypium hirsutum
  Clone ID: GOSHI-09MAY01-C25366_1
atgatatcttgcagaacaatagctatgagatgcctgatgtcatatttgacagtttaaaggccaatcaaaatgtgcttccttatgttcctgagcttcctgttttatccgctagcagcatgctgatgaaaggtctaggttcttcccagtattgtggttttcatgccaccagcgatccatcgccagaagcgtcttcgggagtcacctgccttttcccctggttacactgctgctgttaaaaacgactgcccctgcgtccggcagtttcaagaagatatctcaggacaaggctgctcaatcctttgggctgtcttttccaattgaaccagatcctgcaaccaagaactccctgccatttggtgtattcccaggtagccatgccctttcaaatggcaatttctctgcttcagagccccctttggaggctgtgaagttggagctcccttcactccaatatccagaaactgaattaggtaactggggcacattttcttgcccaccacctttacttgagtctgttgatgcttttatccagtcaccaccaccaaccagcatagcagagtcggatagcctttcaccccgtaatagtggcctgctggatgctttacttcatgaggcaaaaactctaagcagtgcaaagaaccatgcatctgagaagagttcatattcagctactcccggtgatatagctgaaagttccaccttcaacatctgtgagacagaatgggaaaactgtggtgagcctctttctccaatgggtcattcagcaacttctcttttaagtgagtgtatcagtgcaagtggcagtacgttggatgaacagccacctgctgaaacctttactgagtctcatgtgaaatcagagccagctgactatgttttcaccccagagatacaaaatgaggctcctattcggttggacagttgtcaccctgatacattacttgcttctaatgggcttggagcaagattctggttacgataaggaccaaaccatcttgaccgattccatagctgcccctcttggtgatgattgagtagtgaatacaagatatggcagctggaaca

SEQ ID NO: 13838 - DNA, 324 bp, Gossypium hirsutum
  Clone ID: LIB3196-056-P1-M1-C5
caaagaaccatgcatcggacaggacatcaaattcatcaactccctgtgatatagctgaaaggtccaatttcaacatttgcgagacagaatgggaaaattgtggtgagactctttctcctatgtgtcattcggcaacttctttcttcagtgaaagtatcagtgcaagtggcagtggcagttcatttggatgaacaaccacctgctgaaacctttactgagccttcatacaaaatcagaatcatcggattcatgttttgaccccctgggtggaaaaagaggctcctcatttgttcagacggtagatgccctgatattttgcttgct

SEQ ID NO: 13839 - DNA, 432 bp, Gossypium hirsutum
  Clone ID: GOSHI-09MAY01-C25306_1
ggacaatgaagggcattcaagctttggataatgcttattccaatcaaataatagcacaacatgggaaggtcctctacggactgggaaaagacattaatctccagaaatcagtatcagctggcaaattcaagggatattccatctcaatcagctcctacttgaatagcatggaatctggaaacagcctagactgtggtggcagaatgagacccacagtctccattatcgatactgaaaacatcagttgtacagatttgggagagtatggtgttgtaataattccagactttgttctatcaattgatgattatcttcaaattctcacgaggatggcacggcacacagtcaatggtgtattgcatagctttttaaacttaagatgattcgcagcatgccggcccgttgatcgaaatccttgaacaatgtgggcag

SEQ ID NO: 13840 - DNA, 478 bp, Gossypium hirsutum
  Clone ID: GOSHI-09MAY01-C25276_1
ggaccggtactgactggccgggccgacgcacgcggggttttcggtgttcttgcaatgtcaaggtccatcggtgatagatatttgaaaccatggattatcccggaaccggaagttatgtttattcctcgagctagagaagatgaatgtttgattttagccagtgatgggttgtgggatgcgatatccaatgaggaagctggcgaggtggctcgacggcgaatcctgctctggcacaaaaagaatggggttccatctctggtggaaagaggcataggaattgacccagcggcgcaagcggcagctgaatacctttcgatgctggccatccaaaatggtagcagagacaacatctctgtaattgttgtagacttgaaagctcaaaggaagttcaagagctaaacattatctgagtctcaaccccccccaaatccaatcattttaaaatcatagtcgatatagtacctcgcatattagagac

SEQ ID NO: 13841 - DNA, 1224 bp, Gossypium hirsutum
  Clone ID: GOSHI-09MAY01-C25236_1
atcctaattgccaacgtgctgaattatttcttcgctaagatcaaaggagggtggggatggcgcctgagtttgggtggcgcaatggtccctgcccttattatcaccgttggatccctagttctacctgacacaccaaactccatgatcgaacgtggtcaaaccgaggaagccagagccaaactcaagaaaatccgaggggttgatgatgttgatgaggagtttaaggacctagtcgctgccagtgatgcctcgaagcttgttcatcacccttggaccaacttgttgcagaggaaatacaggccccatctaaccatggccatcttaattcctttcttccaacaactaaccggcattaatgtcattatgttttatgcacctgtattgttcaacacaattggtttcggggacgatgcttccctcatgtccgcagtgatcaccggtattgttaacgtaggtgcaacattggtttcaatctatggtgttgataagtggggaaggaggttccttttcctaaagggtggagttcaaatgttgatttgccaggctgttgtggcggcatgcatcggtgcaaagtttggggttagcgggaacccaggtgaccttcccaaatggtacgccattgctgtggtgcttttcatctgcatttacgtggccgggttcgcctggtcttggggacccctcggatggttggtgcctagtgaaattttcccattggaaatccgatcagccgcacaaagtgtgaacgtgtcggtgaacatgatcttcacattcgctgtggcacaagtgttcttatccatgctttgccacttgaaattcgggctattcctgttcttcgccttctttgtggtggtgatgtcgatctttgtgtactacttcttgcctgagaccaagggtattccaatcgaagagatgaaccaagtctggagatctcactggtattggtcccgattcgtcgaagaagctgattactctaatggaggtatggaaatgagcaagggaaaccatgttccaaagaatgtgtagacttcactccaccaaactatggattagttatttacttttctcctcgttttcatttttaggttttgacattagtatatactattggtttttaatgttattggatcaaatatatatatatataaatttcaatcaaaaaaaaaaaaaatgcattgatttcaacctgtaattgaaaaacaggaatctccacaaatgatttgagat

SEQ ID NO: 13842 - DNA, 378 bp, Gossypium hirsutum
  Clone ID: GOSHI-09MAY01-C26956_1
ccaccatcttctttcaaagagcataaatttttccacgtgcgccactgaatgcctttttgatctcgatttttctgccaccaatatcttgccataatgccttctaattcaacacatagagacttaggaattagggaacatgccatcgtataggttggaatagcttgaagaatagcttttataaacacctctttccccccttgagatagatgccttacactctagttatcaatccgttgtttcattctgtcctttagggtctgaaaagacattttcttctttcttcccatcatattaggcagacctggatacctttccaggttattagaactacgcactccaagaacccttgatattactactttatccccttcttgcgta

SEQ ID NO: 13843 - DNA, 399 bp, Gossypium hirsutum
  Clone ID: GOSHI-09MAY01-C26976_2
gtgttttgctatagaagaacatatctgggtttattttaattctctttgagttcaatgcaaggagaatttttttttacttttgagtaatttatcttcttggtgtggtttacagcacaatcaaatctcttgaagtcttcaatattggttgttggagctggaggtttgggttcgccggctttattatatcttgcagcttgtggtgttggtcgcttgggtatcgctgatcatgatgttgttgagcttaataatatgcataggcaggttattcacactgaagcatatattggtcagccaaaagtgaagtctgctgctgctgcttgccgctcgatcaactccaccatacagattgttgaacacaaacaagctttgcgcacgtgtaatgctttggaaattttgagc

SEQ ID NO: 13844 - DNA, 507 bp, Gossypium hirsutum
  Clone ID: GOSHI-09MAY01-C26976_1
ttttctctttttacttttaatttctctctttagtcaccggagctgttaaaggatggagtccaacggcggcggcgcgtcacctatccgtcgagaaatcgaagctttgaaggaggaaagagcccggattgagcaaaggatttcggtcctcgaagctcagctccaagaagaagcttcattagcacctcagcagcagcaaaacgacggcgtctgcaatggtttttgtccttcggaaacatcctccgtcgatgccaatctggctcacgggttatcggcggatagtatttaccgttacagccgtcatcttttgcttccttcttttggagtccaagcacaatcaaatctcttgaagtcttcaatattggttgttggagctggaggtttgggttcgccggctttattatatcttgcagcttgtggtgttggtcgcttgggtatcgttgatcatgatgttggtgagcttaataatatgcataggcaggttattcacactgaagcatacattggtca

SEQ ID NO: 13845 - DNA, 411 bp, Gossypium hirsutum
  Clone ID: GOSHI-09MAY01-C26866_1
aacaataacagaagcaaaaaagaaaagggttctttgctcactaagttttattcttttatcatttcatttgatcgccaaaaaaggaaaagcttaatccaaattgaagaggaaaaaaaaagggtgcaccatggatcatgcagctgatgcccatagaactgatttgatgaccatcactcgccatgtccttaatgaacaaaccaagtaccctgaatctcgtggtgatttcaccatcttgctcaatcatattgttcttggctgtaaattcgtttgctcttctgttagcaaggcgggtcttgccaaactatttggacttgctggagaaaccaatatccagggtgaagaacaaaagaaattggatgtgctttctaatgaagtttttgctaaagctttgattagcagtggaagaacatg

SEQ ID NO: 13846 - DNA, 447 bp, Gossypium hirsutum
  Clone ID: GOSHI-09MAY01-C26586_1
gagatcttaagtgtgacaacatctttgtcaatggccaccttgggcaggtcaagatcggcgatcttggactagctgccatccttcgtggctcacaacaagcccatagtgtcatagggacccctgaatttatggcaccagaactatatgaagaggattacaatgagctagtggatatatactcctttggaatgtgtgtattagagatgcttacctctgaatacccgtatagcgagtgttccaatcctgctcaaatctacaagaaagtgacttccggaaagttgccagaggcattctataggattcaagatgaggaagcccggaggtttatcggaaagtgcctggagaacggttccaagaggttgcctgctcacgaactcttgcttgatccatttttggcccctaatgaaggcaatctgctgtctgtcccaagagtcctgagccaaaagc

SEQ ID NO: 13847 - DNA, 648 bp, Gossypium hirsutum
  Clone ID: GOSHI-09MAY01-C26566_1
gtttttacatggcttttggtttggaattacgggtcgatcataggatggttgactgaatcagtttcgaaattgggtttttgttttgtattgtaagcaattgagtgaattgggattataaatccataaatgggttttggatttctctgtctttgttgtttcagaaagtgtttttgtttgtaatttatgcttttggctggtttaaaatagtttaactattttggagtagcatagggatattgcgttgccaggtatcaaattctacactgtgcttgtcacaggttttcagtgagaactcttcattagtatctaagctatgacttaaaatttgtcataggatggatgatctctttatagtcaatcatccaggatagatgtttaaagtctttggtctctagaacattacttggactaataaactagctttatggttaaaagggtgtgttccttacatctgtaagtgttttcattttcttaatttctgttcgaagctgttgggagaatctcatgtcttccggataacatcctatctgaaaaagtgcttcgatttatggtatcatatttatgcactttttgagatgtgctttcttttgcgtaatgatttaggtactagattctatttataagatagctgcagactgatgagaataa

SEQ ID NO: 13848 - DNA, 723 bp, Gossypium hirsutum
  Clone ID: GOSHI-09MAY01-C26506_1
aaaggagataccagaagaggcaggaaatgttcagaaacaaggcggaaggcaaaaaacacgacaaacatcagcaggtcgggaaagaaagagacagataaaacgctcaagacaaagtttgatagcaaacattataggactattaagaaacagaagactattaggaacagagaaaaatctatcactataaaacccagcattgttaaccctcctccccactctccagctccaaacatcaccagggtttggccaatccataggagcataaggtaatccttcgccggaagtacacggcggaaccggtggagtagggaaatcgttctctttaattacaggaggaaaaccattatctccattcggaaaatcgttcctcgaaggctcttctttcggaatagacggaatggaagccggtccaccatagtaatctgggaagagatcttggtgaagatcaatatgaagaggactatccatatcagaacgagtttcatggattgaggatgcagtaggcatatgaggaggggtacccatacgaggaggtgaaggaattgacatcattagaaccgaaattcctcgttgacaattttattaatttttattaattaaaagaaaaaaggaaagctgatctgggaattcgagaactgatgtcctaaaggaaagtggttttgtgtgagatgagtttatagattaatttaaaaaaggaatttattaaaaaaaattagaaaaccc

SEQ ID NO: 13849 - DNA, 623 bp, Gossypium hirsutum
  unsure (1)..(623): unsure at all n locations
  Clone ID: AI731485.1
gcaccaaccgccaanggggacacccggcagggaggcncccaaggcgcagggatcccccaaacaaacgaagcaaaaaaagcaaaaacatcngcagccgggaaacgcgacagganaaaacgcccaagcgngggcnngcncgaaacaannncgganngnnnggaaacngaagacnnnnnggaacannganaaattnatcaananaaaaccnagnanngnnaaccntcntccccattttccagctccaaacatcaccagggtttggccaatctataggagcataaggtaatccttcgccggaagtacacggtggaaccggtggagtagggaaatcgttctctttaattacaggaggaaaaccattatctccattcggaaaatcgttcctcgaaggctcttctttcggaatagacggaatggaagccggtccaccatagtaatctgggaatagatcttggtgaagatcaatatgaagaggactatccatatcagaacgagtttcatggattgaggatgcagtaggcatatgaggaggggtacccatacgaggaggtgaaggaattgacatcattagaaccgaaattcctcgttgacaattttattaattaaaagaaaaaagaaaagct

SEQ ID NO: 13850 - DNA, 345 bp, Gossypium hirsutum
  Clone ID: GOSHI-09MAY01-C26746_1
ctcacctacacaatggatttctcaacattctcaatctttcgcattttcatccttcctctcctttgtccttctcttggttcttcttcggcagttcgagaccctgaatctgtcgtagctgaagttcataagagcataaatgcttcgaggaggcacttgggttacttgtcatgtggaacggggaaccctattgatgactgctggaggtgtgaccccaattgggagagtaatcgtcaaaagctagctgattgcggaatcgggttcggaaaggacgcgattggcggaaagaccggtcgaatctatgtcgttaccgatgccggtgacgatgaccctgtaaaccttaaaccg

SEQ ID NO: 13851 - DNA, 336 bp, Gossypium hirsutum
  Clone ID: GOSHI-09MAY01-C26726_1
gctgttttaatctattaccttctagaaaatatgagagagtaactgtgtatgttaattgaagaatgaaaatgactgacaactactgccaagagttgggtgcgtgggtgttataggaaggtatagtgcactctagggagggaactcaagttcaaaccctggagataaaattgttgttgggaggagcaaccatgaatctcgaaagtattagtcttcatggactgtaaaacagacaagaatgatacattggtcataccaaaagaaaatgaccgactactatattgcctcaaccatttttgtaggtctgcattcaagctgatgagtggttattaatcaatg

SEQ ID NO: 13852 - DNA, 655 bp, Gossypium hirsutum
  Clone ID: GOSHI-09MAY01-C26186_1
cggactcgtgggtttggccgcataaaaaagaagcagctttttccattaatttcggagggaaaaaaacgggggaaaaatctgaaaatgtctctgatgaacaatctatcaacttcaatgatttcttcatcttcatctactttcttggctccaaccagtttcaattcaagaacccagagtgtttcagttccattgaaaaacatcaatatagttaaatgtgttgccactcctcaggaacaacaaaatgcttacaaaactaaagtttctcgcaatgcgaacatagctaagcttcaagctggttacctgtttccagaggttgccaggagaagggctgcacacttgctcaagtacccgaatgctcaagtgataagccttggaatcggtgatactactgaacctattccagatgttattacgtctgcaatggctaagaggtctcatgcattgtctacgctggagggttacagtggctatggagctgaacaaggtgaaaaggcattgagagctgcacttgcttcaacattctatcgcaaccttggcattgagatgatgatatttttgtctcagatggtgctaaatgtgacatatctcgccttcaagttgttttcggatctaatgtcacaatggcagtgcaagacccgtcatacccggcttacgt

SEQ ID NO: 13853 - DNA, 838 bp, Gossypium hirsutum
  Clone ID: GOSHI-09MAY01-C26126_1
gaaaccatgggtgttgagccagcatgtcctgtattacttttgtttctcgctgggattatcatttgggtagttgaagctgaagttcactattatgattttgttctggctgagaagaatttcacgaggctgtgcaagaccaagagtatgctggttgttaatggccaattcccaggacccaccatttatgttcataaaggtgatacggtgtttgttaatgtccataatcatggggattatggtctcaccgttcactggcatggggtaaagcaaccaaggaatccatggtcagatgggtcagcatacatcacgcaatgccctattgaacctggccacaatttcacatatgaagttgtgttttctgaggaagaacgaaccctctggtggcatgctaacagtgattggactagaaacactgttcatggtgccattgtcatttaccctcctcatggattttcctacccttttcccactcctgctggagaacaaatcctcatactcgggacctggtttacctatgatgtaaacaaggtaatcaaagagatcctgagaactgggaaagatgtccctgtatctgatgcttatatcataaatggccagccaggagatttctgtgcttgttctaaagagatggcataccgatggcaagtcgattacgggaagacgtacttgattcgcttagtcaatgcattgatgaatgaagagttcttctttgcaatagcaggacatgatctcatagttgttggaatcgatggaagctacctgaaaccttttactacaagttatgtcatgttatcaaatggtcagacaatggatgttttagtcaaaacaaatcgatctc

SEQ ID NO: 13854 - DNA, 360 bp, Gossypium hirsutum
  Clone ID: GOSHI-09MAY01-C26096_1
gatttggtttacagcaacctttgctgtcatgcaaagtgcaggggcacagatccagcaagaatatgcatctactatgggtctacttcttagttatgctctaaacattacaagtttattgactgctgtactcaggcttgccagtttggctgaaaatagtttgaatgcggtggagcgtgttggtacatatatagagctgccttcagaagcaccacttattattgacaacagccgtccccctactgcttggccttcattcggatctatcaagtttgaggatgttgtacttcgttacaggcctgaactttcgcctgtcctgcatgggttgtctattacaatttctcctactgacaaggtatgcat

SEQ ID NO: 13855 - DNA, 1281 bp, Gossypium hirsutum
  Clone ID: GOSHI-09MAY01-C26086_1
cccacgcgtccgaaagatctacaaaatttgcgcatatcactttcccctctctgcagtatttctctgaccggtgcgcgatggtgtttttgaagggagtatcagcgctatccaggctaaggtcacgtgttaaacagcattccagtctcagcaactctgttagatggcttcaaatgcagtcctcttccgatcttgatcttcattcgcagttgaaggaattgattcctgaacaacaggagcgcctgaagaaactgagggcagaacatggaaaagtgcaacttgggaatattactgttgatatggtcattggtggaatgagaggaatgacagggttgctttgggaaacctcattacttgacccagatgagggaattcgctttaggggcttgtcaattcccgaatgtcaaaaactattaccagctgcaaagcctgatggagagcctttacctgagggtcttttatggcttcttttgactggaaagatgccaagcaaagctcaggttgatgctttatctcaggaattgcgtgaccgtgctgttgttccagattacgttttcaaggccattgatgctctacctgtttcagctcatccaatgactcaatttgcaactggtgttatggcactccaggttcaaagtgaatttcagaaagcatatgagaaagggatttcaaagttaaagtattgggagccgacatatgaagatgctcttagtttgatagctcgtgtgccattggtagcttcgtatgtttatagaaggatgtacaaggatggaaaatttattcccatggatgactcattggactatggggggaatttttcgcacatgttgggatttagcagtcaccaaatgcacgagcttatgaggctttatgtcaccatacatagtgatcatgaaggtggaaatgttagtgcccacaccggtcacttggtgggtagtgcgctttcagatccttatctttcctttgcagctgcattgaatgggttagctgggccgcttcatggtctggctaatcaggaagtgctactttggataaaatctgtggtagatgaatgtggagagaacatatccaaagaacagctgaaagactatgtctggaaaacactgaacggtggaaaggtcgtcccacgatttggtcattggagtgtggcgtaaaactgatccaagatacatgtgtcaaagggagcgtgctttaaagcacttgcctgacgatcccctgttccagctggtttcacggctttatgaagtggtgcctcccattcctactgaattaggggagggtaac

SEQ ID NO: 13856 - DNA, 585 bp, Gossypium hirsutum
  unsure (1)..(585): unsure at all n locations
  Clone ID: AI054878.1
atttgtgcatatcactttcccctctccgcagtatttctctgaccggtgcgcgatggtgtttttgaagggagtatcagcgctatccagtctaaggtcacgtgttaaacagcattccagtctcagcaattctgttagatggcttcaaatgcagtcctcttccgatcttgatcttcattcgcagttgaaggaattgattcctgaacaacaggagcgcctgaagaaactgagggcagaactggnaaaagtgcaacttgggaatattactgttgatatggtcattggtggaatgagagggatgacagnggttgctttgggaaacctcattacttgcccagatgggggaattcgctttggggccttgtcattccgnagtgtcaaaaactattaccagctgcaaacctgatggagaaccttcgtnagggtctttatggcttctttgctgaaaaggtgccaagcagntcagntgatgcttatctaaattgcgngacggctggttgtccagatacctttcaagccatgatgcttacctgttaactaatcatgactcattgcactgtgtattgcactcaggtcaaatgatttana

SEQ ID NO: 13857 - DNA, 534 bp, Gossypium hirsutum
  Clone ID: uC-gsronu33B090h06b1
ctttcttttgggttcaaatgcagtcctcttccggtgttgattttaattcgcaggtggaggaattgattcctgaacaacaggtttgtcttatttgtctcaatggggttccatttgtccttaagggatagctgcacatgtaattactattttagccagtgctgcttaattcataaccactttttatgtatgccactccactgataagttgttgaagaggcttattgttaacttttaatcctcacaagtttatccagctagtgtataatctatcacctgtgtgattctgccaatgatcatatgcaagatcatagcttggctcaaaattgccttcactaaatggcttcttaggattttcccaggagcgcctgaagaaactgagggcataacatggaaaaagtgaacttgggaatattactgctgatatggtcattggtggaatgagaggaatgactgggttgctttgggaaaccttattacttgacccagatgagggaattccctttagggcttgtcaatccccagtgtaaaaactat

SEQ ID NO: 13858 - DNA, 436 bp, Gossypium hirsutum
  Clone ID: GOSHI-09MAY01-C26066_1
gaagattaaggttcttctcaaaattcatgttgtttgcttagagaattggccacgagctgctccccacgaatgccaaaatttcctccattaaacagaatgctagacgggactgctagtgaagaaattgttattcatgcactcaaaagactgcctgaaagcccgtgccattcttgccttcggtggttcgatggtaggctccttgacatagagcattgtcgatgtattgattggcttgaagatgctatgggatttttagacaaaaaagcctttgaagatttaatcacgactctttggaatggttagaacaatcgcaataattctatctttcgagggaaagaggaagaggcttggattgtttgggatagagcgaagatacttagtgatgacttccgtattcacaacacggttaacaagccgctccttcccttggacccta

SEQ ID NO: 13859 - DNA, 1089 bp, Gossypium hirsutum
  Clone ID: GOSHI-09MAY01-C26006_1
ttgttgaagcatcctgcgtaagtatttgtgctattttctagagggcggttgggagtattgatatatcacttggtgatcagaagtttggtggtccagtattagtctttggggaggttctgtgttgaacttaggcacctaaaaagcacctttataagtattttgatggtatttgacaatggtgggggatcgttggttgctttcgctatgacagaactacatcatggctcaaatgttcaaggtcttcaaaccgttgcaacatttgatccaattacagatgaatttataattgacacaccaaacgatggggctattaaatggtggattggcaatgctgcggttcatggcaagtttgcaacagtttttgctaggttggttttaccaactcatgactctaaaggagtttctgatatgggagtccatgccttcattgtgccaataagggatcttaaaactcaccagccacttcccgggattgaaataaatgattgtggccccaaaattggcctgaatggggtggatattggtgcactgggattccgttcagttagaattccccgagataatcttcttaatcgatttggggatgtcacccgagatggaaaatacacaagtagtctccctacaataaacaaacgttttgctgctactcttggtgaacttgtaggtgggagggttggccttgcacattcttcagttggtatcctcaagattgctgtcactattgcagtacgatactccttactacgtcagcagtttggtcctccaaaacagcctgaagtcagcattcttgattatcaatctcagcagcacaagctcatgccaatgttggcttcaacttatgcatttcattttgccactcagtatttggtagagaaatattcagagatgaagaagacacatgatgaacaactggttggagatgtgcatgctctttctgcaggcctgaagtcctatgtgacatcatttacagcaaagtcattgagtacctgcagggaagcctgtggaggtcatgggtatgctgctgtcaaccggtttggtaccttgaggaatgatcatgacattttccagacatttgaaggagacaataca

SEQ ID NO: 13860 - DNA, 392 bp, Gossypium hirsutum
  Clone ID: GOSHI-09MAY01-C26356_2
cctcaactcgtcgattgtgttagcactatcagctcggggattcaaaatacaagcggtcttcgggttatcctaatctaagatcgcgttaataccgggtgttcacattatagaagaaggtgtaagatcagagcaccttgttgcaatgaggtttcttattgcagacattgccataatgaatctaagaattccccggaatctagtcctcttaagcaacatgacattccacgccatgaagttgaaaaggtcatttgctccctatgtgacacagaacatgatgtacaacagtcttgcatcaattgtggagtctgtatggggcagtacttctgtggtaactgtcaattcttcgatgatgacggtcctttaaacccatatcactgtgttgaatgtggcat

SEQ ID NO: 13861 - DNA, 548 bp, Gossypium hirsutum
  Clone ID: LIB3584-056-P1-K2-E1
gaacccaactcactcttaactcgtcgaatgagttagcactatcagcttgttgattcagaatagaagctttctttgggttatcctaatataagatcgcgttaataccggagtatggaaggtgtatgtgagacaaagtcatgtacaactgagttgaaatctgttgaatttgggaatcatgaaaatggttctttgatggagactggattagggaattatgggtgttcacattatagaagaagatgtaagatcagagcaccttgttgcaatgaggttttttattgcagacattgccataatgaatctaagaattccccggaatctagtcctcttaagcagcatgacattccacgccatgaagttgaaaaggtcatctgctccctatgtgacacagaacaagatgtacaacagtattgcatcaattgtggagtctgtatggggaagtacttctgtggtaaatgtaaattctttgatgatgatgtttctaaaaaccaatatcactgtgttgaatgtggcatatgcagaaccggaggcaaggagaacttctttca

SEQ ID NO: 13862 - DNA, 580 bp, Gossypium hirsutum
  Clone ID: LIB3582-013-P1-K1-C4
acccaactcactctcaactcgtcgattgtgttagcactatcagctcgttgattcaaaatagaagctgtctttgggttatcctaatataagatcgcgttaataccggagtatggaaggtgtatgtgagacaaagtcatgtacaactgagttgaaatctgttgaatttgggaatcatcaaaatggttctttgatggagactggattagggaattatgggtgttcacattatagaagaaggtgtaagatcagagcaccttgttgcaatgaggttttttattgcagacattgccataatgaatctaagaattccccggaatctagtcctcttaagcaacatgacattccacgccatgaagttgaaaaggtcatttgctccctatgtgacacagaacaagatgtacaacagtattgcatcaattgtggagtctgtatggggaagtacttctgtggtaaatgtaaattctttgatgatgatgtaagtcttttctttcatttctttgctgtgaatcttggcttgaaaatctttaaatgatcgcttatgtcataaacttgtgcattgatcaggtttctaaaaaccaat

SEQ ID NO: 13863 - DNA, 444 bp, Gossypium hirsutum
  Clone ID: GOSHI-09MAY01-C26366_1
ctggaatctgtttttagaataatatatgctgttatttgacggtatatgtatcaagatgtatatttcacagccttaccttaagcagcaatcttcatgtgattagacattatgtcattggcttaacaatgtctatgtaaatccttactctagttttttctgatatttctcttgaagatggttgttgtatgtgggggatcatatagacgtggaaaagcttcctgtggagatttagacattgtaattacacatcctgatggaaaaaggtttaaattctaattccttctttggcttctgtccttacttgtcctagctaactgactttgttcaaaagctaattattttacttatctgcttctaaactgcattctactaatcattttaaaaagaaaaaggacaagtattacatgtttttgttaactctattaattagctacgaaagtaaac

SEQ ID NO: 13864 - DNA, 444 bp, Gossypium hirsutum
  Clone ID: GOSHI-09MAY01-C26336_1
ggttaaggaaagtatgcgttatcaagatgcttagcagtgctactttggataaagtatatagtcttcgccgtcaagaagtacgagaaaccataggttatttatatagtaaggccggttcgcctgtaaacgtgggagagcagatgtttttaactatcttgaatgtggtgaccaatatgatatggggcgggtccatggaaggggaggccagggcgagccttggtgcagagttcaggcaagtcatctcagaagtaacagaacttttgggtctacctaatgtttcggatttcttcccggcgttggccccgcttgatttgcaaggtgcagtgaaacgtgtccgaaaatcaacggagaagttggacgcaattattgataagataatcaatcaaaggttggaggagaagcaaagtgggcacacagtagaggaattcaaggactttctacaat

SEQ ID NO: 13865 - DNA, 185 bp, Gossypium hirsutum
  Clone ID: LIB3048-046-Q1-L1-E11
gctaaggaaagtatgcgtcatcaagatgcttagcaaggctggtttggataaagtatatggtcttcgccgtcaagaagtaccagaaaccataggttttctatatcggacggcccggtcggctgttaacgtgggaaaacagatgcttcccactaccgcgaacagggggacccacattatacggggcg

SEQ ID NO: 13866 - DNA, 379 bp, Gossypium hirsutum
  Clone ID: GOSHI-09MAY01-C26236_1
gtttgaactgatgtctcctgttgagtctgtgaaaagggttttaaacatattgcgaggcatttttcatccaaaagggattgttgttcctgatcctgtccaggctgtttgtacccggtggggaaaggatcgcttcacgtatggatcctactctcatgttgctattggttcatccggggatgattatgatattctagctgagagtgttggagatgggagagtcttctttgctggtgaggcaactaataagcagtatcctgccacaatgcatggagcctttttaagtggcatgagagaggccgctaacatgcttagagtggccaggaggaggtcattggttctatctgacaaagtttataacgacttggagaaatgtgatact

SEQ ID NO: 13867 - DNA, 432 bp, Gossypium hirsutum
  Clone ID: GOSHI-09MAY01-C27996_1
gcaaagccgcctcttcttttccactggactttgttttgatccgtagcttctcctcttacataaattaataaagcagtagtggcttttatggagaattatcaaatgttcttccctatctcggccccatcaacagcagctcaatcattaccgttaaacatggcacctaattcccaagcttttaacagttttcatgggaattcggttgatgggttcttaggtttgaagagtaccgaagacttgattcagaaaccagaagctaaggacttcatgaaatcaagtcaaaaaatggaaaagaagattaggaagcctagatatgcttttcaaacaaggagtcaggttgatatacttgacgatggatatcgttggaggaaatatgggcaaaaagctgttaagaacaacaaattcccaagaagctattaccgatgcacacat

SEQ ID NO: 13868 - DNA, 589 bp, Gossypium hirsutum
  unsure (1)..(589): unsure at all n locations
  Clone ID: AI054919.1
ctcagtttccattgatttttcttttttatcattttcttttgctcttttctatcccaaagagaaatagttcttcagatcaataaaccatggaagcagcagcagcatctttatctggatccaatatcttccatcgtaattatagattttcaagggtcgattaatcggcgcagatatattgcttctgggtcacgctatttctcaaattctgatttgaatactcaaaacttaggcgttttcaaaggacccatnctagtnnatgtaccaaattcaaaagagaaatttgaggcttacaatgaatgcttcttgggtgnttttgtactttcctgannnatgttatgggantctcatactccattatggnggaagaaaatttgggggcntgcttttgacttnggaggtcccagacctaatggatgtcaccctttttgataacttgtggctgatcctggatgttaggctctttggtcttttataaacatcggggtttaattttagttcattggtgataacgttgttatgtagatatatcgtggcctgctatgagtcttcacgaccatgcaagtatatgtctaagtctaaaccagaggtn

SEQ ID NO: 13869 - DNA, 426 bp, Gossypium hirsutum
  unsure (1)..(426): unsure at all n locations
  Clone ID: LIB3048-029-Q1-L1-B5
agaaatagttcttcagatcaataaaccatggaagcagcagcagcatctttatctggatccaatatcttccatcgtatttcaaggtcgattattcggagcagatatattgcttctgggtcacgctatttctcaaattctgatttgaatactcaaaatcatagcgttttcaaaggacccaatctcagtaatgtacaaattcaaaagagaaatttgaggttacaaacgaattgcgctctgggtgtttgtactttccctgaaaatgttatggaatcttatcactcacatgttgtggaagagaaacttggggtcttgcttttgaaccttggaggtcccgagacacttaatgatgttcaaccctttttgtataactngtttgctgatcctgatattataaaggtgccctcgctatttgaggttcttcaacga

SEQ ID NO: 13870 - DNA, 657 bp, Gossypium hirsutum
  Clone ID: GOSHI-09MAY01-C27856_1
gccctcatcgtcaccattacagagagcgtgagtgagtgagagacactgcaagcctttactttaccaaacaccatggatgctgctgagagctggtcgagaaccaaatgggtcttccattttatgcttatattcgcacatttctctcttctatcactagctgaagatggtctggtggccaatggggatttcgagacgccaccgtccggcggcttcccaagcgaggcaatatccgatggagcccccgagatccccagctggagcacgaacggtacggtgaagcttgtgtccgccggtgaaaaagtgagcggcgggatgctactcatcgtaccccgaggcaggcacgccgtcagattgggcaacgacgcggagatcagtcaggaagtgacggttgagaaaggatcggcgtacgcggttacgttcagtgcggcacgcacttgcgcgcagatggagtcactgaacgtgtccgtaccacctgcatcgcaaacggtggacctgcagacattgtacaacgtgcaagggtgggacccttacacgatttcttttgaggcgcaggaggataaagcccggttgatttttaggaatccgggaatggaagatgacccggaatgtggacccatcatcgatgatatagccatcaagaaactcatcacccctgat

SEQ ID NO: 13871 - DNA, 513 bp, Gossypium hirsutum
  Clone ID: LIB3582-059-P1-K1-H6
attcggctcaaaccattacagtatcactagcaaaacaatggcatggctgccaaaggtgccccggcagactactcggccttatgatgcctatgggaggcaaagtaatataaaccaactgaatatctaaagcaggggccctatagatacaacataatatgtgtactaaacactaaaagtgagcggctgtatgctactcatgaacccaaaggtaagcaccatggagaagaccaaccaccctgagatcagtcaggaagtgacggttgagaaaggatcggcgtacgcggttactttcagtgcggcacgcacttgcgcgcagatggagtcactgaacgtgtccgtaccacctgcatcgcaaacggtggacctgcagacattgtacaacgtgcaagggtgggacccttacacgatttcttttgaggcgcaggaggataaagcccggttgatttttaggaatccgggaatggaagatgacccgggaatgtggacccatcattcgatgatatagccatcaag

SEQ ID NO: 13872 - DNA, 534 bp, Gossypium hirsutum
  Clone ID: GOSHI-09MAY01-C27846_1
tgggtggacgaacgcgtccttctcgcgtccgcccacgcgtacggccacgcggtcggacatatacaaacagggtcgaattacaatggagaaaaacgcagtggctcaaaagatgatgatgatggcggtccttgtgatattagggacgatgatggcagcgttcacggttgcgcaagagacttgtgcgcagagcctggtgccttgtgctccttaccttaacaacgccactgcacaaccgcaggatgattgctgtaatcctatcagacaagccgtggatactcaacttacttgcctttgcaacctctttaacgaccctactttgctttcatcttttaacgtctccgtctctgaagctcttaggatcgctcgtgagtgtggtgtcactacaggtctcaacgcctgcaacaatgctaacttctcccccgtctgctccacccccgccaggtgaaagtggaggtgctgataggatagtattgaccggaatcaccactttgttcttattgttagcatctatagcgttgtactaagatgacattt

SEQ ID NO: 13873 - DNA, 410 bp, Gossypium hirsutum
  Clone ID: GOSHI-09MAY01-C27826_1
gctgatgagagcgtcagctgagttgcttgggaggggaaccgtagggacgacgtacaaggcagtgcttgataatcgtacggtggtgacggtcaagaggctggatgccgggaaattagcagccacgacgaaggaaatgttcgagcaacacatggaatcagttggcggtttaaggcatcccaatttggtccccctcagggcttatttccaagccaaagaagagaggcttcttatctatgattttcagtccaatggcagtcttttctccctcattcacggatcgaaatcaacaagggcaaagccactccactggacgtcctgcttgaagatagccgaggacgtagcgcaaggtctctcctatattcaccaagcatggaggcttgtccacggcaatctcaagtccactaacgttc

SEQ ID NO: 13874 - DNA, 540 bp, Gossypium hirsutum
  Clone ID: GOSHI-09MAY01-C27456_4
cccacgcgtccggggtatttgggatttatgatgtttgaagggcgttcaggaaaatggaagggaaaatgatgaatcttccgagaaaccaggccagacagaatgcaagtactacctaagaactggtggatgtaagtttggttaggcctgtagatacaaccactcaagggcaaaatcttcaacggatccgattttagaacttaactttctggggctgcccatccgacagggagagaaagagtgcccctattacatgcgtaatgggtcctgcaagtatggagccaactgcaggtttaatcatcctgatcctacaactactggagcttgtgccccacctgctgcatatggtaatggtggatctgtttcatcacaagctgcatcacaagtgagtatggcttcctggtcatcgccaagggcgtttaatgagactgctactgctacctttatgccaattatgttttcaccaactccgggtgttccaacctcaaattctgaatggaatgggtattaagccactatttattccccaccaaaaaggatttt

SEQ ID NO: 13875 - DNA, 1357 bp, Gossypium hirsutum
  Clone ID: GOSHI-09MAY01-C27456_2
cgagaggagaagcaacacgatgccgacggaacgctgctgaagacgaggacggcgagaatgaggaagaaagaaacgataacgagattgatggtgaaaacgtgaagaaaagtgaaggaaagaggtcgcattatccggtgagaccggatgcagagagttgcgcttattatatgaagactggactttgcaagtttggatataattgcaagtttaatcaccctattcgaaggacgacccaggctgttaaggaaaaggtcaaggaagaagttgaatcaacagagaaacctagccagacagaatgtaagtactacctaagaactggtggatgtaagtttgggaatgcttgtaggttcaaccactcaacagctaaatcttcaacgagtccaattttagagcttaactttcttgggttgcctatccgacagggggagaaagaatgcccctattacatgcgtaatgggtcctgcaagtatggcccccgcggccggtttaatcatcctgatcctacagctgctggggcttgtgacccaacttccggatatggtaatggtggatctgtttcacctcaagctgcatcacaagtgaatatggtgccctggtcatcacctagggcattgaatgagactgctgcctatataccgattatgttttcacctccgcaagttgttccgccaccaaacccagaatggaatgggtatcaggcaactgtataccccccaccagaaaggagtttgcatccagccccagcatatgtcatgagcagtccctgcaactgaaaccgctgtctatactcaaaatcagccacagatggtagttgatgaattcccagtacggcctggccaacccgagtgcagttacttcctgaaaactggggactgtaagtttaaatcaaattgcaaatatcatcatccaaaaaatcgacttgcaaagccggccccatgtgctctcagcgacaagggcttgccactgagacctgatcaaagcatctgctcacactacagtcgctacggcatttgcaagttcgggccagcctgtaaatttgaccattcaatgcaggcagctccttcgacagctgtatctgaactagagcagcctccaccattcagccattctgcaccattagagcaaaccggaattgccgggagtaatggtaccgatactgcagttcagcagcccgtgtaaaattatttttcaggaaaaaaggccaccctactcttaaatctctcacatcagtaaggattctaaaatttccttctttaaacttgaagactagtcaacttttcttcacttgttccattgccacaagaggttttaggggatggtattatatataaatatcacatatatgatatgggttgtc

SEQ ID NO: 13876 - DNA, 647 bp, Gossypium hirsutum
  Clone ID: GOSHI-09MAY01-C27456_1
ccccgcgtccgtttccttctctctctttcttccctccctattttcttcttctgcaaagtgtagggtttttgaaatgtggatttacaatgtcacaatctgaagaaactcctgtccctgacgctatgcctaccgattcaacctctcacttagggcttcaatctcccgatccgggttctacttcgagtcccgacctctcaccgtatgatcttaatcactccgctgtagaaaccgagcacgaagaaagcagtctccaacagcagctccagaatctcgatttgaaggaggaagaagtgaagactgataggaaagatgacggagagagagaaagcaacaacgatgccgacggaaacgctgctgaagacgaggacggcgagaatgaggaagaaagaaacgataacgagattgatggtgaaaacgtgaagaaaagtgaaggaaagaggtcgcattatccggtgagaccggatgcagagagttgcgcttattatatgaagactggactttgcaagtttggatataattgcaagtttaatcaccctattcgaaggacgacccaggtctttttttctaaccttcttattagtcatcgtctttatatgtgctgaagtgctttcctttagctgattgagagctgcttttatgcccccccc

SEQ ID NO: 13877 - DNA, 556 bp, Gossypium hirsutum
  unsure (1)..(556): unsure at all n locations
  Clone ID: LIB3584-008-P1-K1-B11
caatcaccctgttcaaagggggaccagtaaggggagaggaaaatgatgaatcaacagagaaaccaggccagacagaatgcaagtactacctaagaactggtggatgtaagtttggtaagggcctgtagatacatannncactcaagggcaataattncttcaacagatnnccgattttagaaaacttagggggtggggggctttccgtcnccttacagggagagaaagagtgcccctattacatgcgtaatgggtcctgcaagtatggagccaactgcaggtttaatcatcctgatcctacaactactggagcttgtgccccacctgctgcatatggtaatggtggatctgtttcatcacaagctgcatcacaagtgaatatggcttcctggtcatcgccaagggcgttaaatgagactgctactgctacttttatgccaattatgttttcaccaactccaggtgttccacctccaaatcctgaatggaatgggtatcaggccactatttatcccccaccagaaagggatttgcatccaaccccagcatatgtcat

SEQ ID NO: 13878 - DNA, 447 bp, Gossypium hirsutum
  Clone ID: GOSHI-09MAY01-C27466_1
atccatagctcatcaaagcattaattgataactggaaacgtggtgttgagtgctcgactgctagttgccaatggtgaagactgatctgcagaagattcaagttcaaccacaaccatcaaagctaatgaaggcattaacatcacccacaccaccaccaccatcctcatcagcatgcaaaaagaatgaaatataagggtgtaagaatgaggagctggggttcttgggtgtcagagattagggctccaaatcaaaaaacaagaatctggttagggtcttattctacaccagaagctgctgcaagagcctatgatgctgcacttctttgcctcaaaggttcctcagctaatctcaacttcccaatcacatcctcacattacatccctgaccctgacacccctttgtctcccaagtcaatacatagagtggctgctgcagctgctaatagtt

SEQ ID NO: 13879 - DNA, 550 bp, Gossypium hirsutum
  Clone ID: GOSHI-09MAY01-C27696_1
atttactgttttataccattgtctccatatcatgccggagcaaaaagcaggtcctgatgccagtgtgaagaaaactgatttatgggtcccaggaagtaccaagaaccctgaagcttatatcttgaaggatcaggaaactcgctatcttcaacggtatctcgatttgatgttaaacctgcaggttcgtcatatattcaagacccggtctaagatcatttcttatgtcaggagctttcttgacaatcttgatttcttggaggttgaaactcccatgatgaacatgattgctggaggtgcagctgcccgtccatttctaacccatcacagtgaattaaacatgaagctctacatgcgtattgcaccccagctatatcttaaggtgccagtatttggtggactgtatcgtctctatgattttggaatacacattctaattgaggacacttattctacacacattttcttatttactatcactaaattctatatctcttttacttactctcattacatattttcactttatctctcttatttttcattaatattc

SEQ ID NO: 13880 - DNA, 618 bp, Gossypium hirsutum
  Clone ID: GOSHI-09MAY01-C27626_1
ggcttgcaatcatgacggcttggatctctatcttgtcggactatttggtggataccattgagggggcatctgatgcgtgggatgtgccgattgcttttattagtgttatattgctccctataattgggaatgctgctgagcatgcaagcgccatcatgtttgccatgaaagataagctcgacatatccttgggagtggccatagggtcatcaactcagatttctatgtttgggatacctttttgtgtggttattgggtggatgatggggcaagaaatggacttaaacttccaacttttcgagacagcaactctgttcattaccgttatagtcgtagccttttttctgcaggaagggacgtctaactacttcaaaggactaatgcttatactttgctatctgatagttgctgcgagtttcttcgtacatgaagatcctcccacagatgatcaaagtaagcaaccgggaacctgatgaatgacacagttgaatcgagatatggaaattcggagcccttgaaagatgcaagaggcaagaagcaagaacccatggagatttgaaacatgtttgtcccacatggtgtaaatagtactgttgacaggcagatattccatttttt

SEQ ID NO: 13881 - DNA, 402 bp, Gossypium hirsutum
  Clone ID: GOSHI-09MAY01-C27036_1
gctggatttggtgatgatggtgtgtttgggggtgtgggtgggtctggtggggttgcatttggtggaatgggtctcgcagatggtctaatggaaggcttatttggtggagttatgcaaccaaacaacggtttcatcaatgttggtggtgaattaagccagatgtttgccggtgaagctgagtgtagcaatgtggctggtaatggtattcacgggtttcttgatgaaacccttgttgctggtctgggaaatgaacgcaagcaggctatgggtaagcgtggtatgccaaagggtccaaagacaaacatcagctacacgatgaaaactattggtcctgaacatactatcgaagggttaagggataacatggctgcaatgcaagatccccttaagcctaaacgtggt

SEQ ID NO: 13882 - DNA, 449 bp, Gossypium hirsutum
  Clone ID: GOSHI-09MAY01-C27316_1
tttctgttgggaggtaaaaatgagtaatcaatccaggtttttttgtgatatgtggcaattatatagaagttgcactctggctttgttttccctccatccagtttgacactgcttaggttgcaaaactgttggtgtgaaccacgattgcatgaggtttatgtaaaaagaaagtgacttttcctatggttctcagctcaggactgatattcttcgaccaccccacgagttcgaactaatgcttagttgttaggaaacttgtacttgttggcttaaacgcttagcatagggcctcatatatgtaaacgaacaatttattctctgttaatgttgatgttggaggggaagtctggggttaacatgagatccatggttctggtagtcttatttgttaattatcacattcttatattcctgcaggacatcacatggttgaaatctattacaaactt

SEQ ID NO: 13883 - DNA, 485 bp, Gossypium hirsutum
  Clone ID: GOSHI-09MAY01-C27306_1
ccgctctagaacagtggatccccagtggctgcggcattacgaatcgggggcgagggttcacgcaaacatatgggatagacttcacagaaacttgggcacctgtggcaaagcttaacactattcgagtactcctaagtttggctgtaaattgcgattggaaattacaccaacttgatgtaaaaaacgcatttcttaatggcaagcttgaggaagaagtctatatgcaattgccacctggctcaaagtctattgaaggtagcaacaaggtttgcaagctcaacaagtctctatacgggttaaaacaatcacccagagcttggttcgagaggttcactaaagtcattcttcaaaatggctacaagcagtcccttgccgatcatacgcttttcatcaaggtaacttctacaaataagaaagctatcctaattgtgtatgtggatgacatcattcttactggagatgatgaggaagagattagcaatttg

SEQ ID NO: 13884 - DNA, 642 bp, Gossypium hirsutum
  Clone ID: GOSHI-09MAY01-C27336_3
cgccaacattggggttttattctctccttttttttaaaaaaaatttcagtatggaagaatctgttaagctcaggagggatagcgccatggatgatccatctttcaagctttcatgcatgtattttatttgatcctcatatagcgctatccatcctgagtttcatcggttcttcttgcttgctgtcgctccgttagctgaaaaaggaacacacaaaaatcttgtgggttccacgaatccactagaaagggggagaaagtgttgaagaaaattcccctttgttgtataaattggagaaacaaacaaattaggggccttatatttgtggacataattagtttggtcctctaatgcacatgcggaaatgatgcttctgcttgtatttggtgttacggagaggcactgtcgctgctataaattaagtaataaacactcaagctaaaaataaagaaacaagaaatgaacacaaatacaagaacaaaaaaaataaagggtgaaagaaacatgcaagatattacagagctttattcaaactaaaatgaatcaaccgtgttgagggataacccggaccgaacaaagctagaaggaaaggctgttgcggggcgctcttaacttacttacttttgaaggtagggaccgcgttg

SEQ ID NO: 13885 - DNA, 507 bp, Gossypium hirsutum
  Clone ID: GOSHI-09MAY01-C27336_1
tctctttcccaattctgggatttttaaagaaaatacagttgcaggtgttgggtaagttttgcaggcttcacgattccactagaaagggggagaaacagttgaagaaaattcccctttgtcgtataaattggagaaacaaacaaataaggggccttatatttgtggacataattagtttggtcctctaatgcatatgcgggagtgatgcttctgcttggatttggtgtcatggagaggcactgtcgctgttataaattaagttataaacactattatgtgcatgaaattattgaaaggatgtaatttgtcttattgtagcagtggacattgaatgagagtgaagagtatggcatgtgcttaggtgcagcctgcacgtctccttttgcttttactagcctttaccatgctccaactaatgggggttgacatgatattccgattcataataataataatattattgaataacctccaaaaaaaaaaaaaaaaaaaaaaaaaaaaaaaaaa

SEQ ID NO: 13886 - DNA, 401 bp, Gossypium hirsutum
  Clone ID: LIB3148-048-Q1-K1-E7
ggatttttaaagaaaatacaattacaggtgttgggtaagttttgcaggctgcacgattccgactagaaagggggagaaacagttgaagaaaattcccctttgtcgtataaattggagaaacaaacaaataaggggccttatatttgtggacataattagtttggtcctctaatgcatatgcggaagtgatgcttctgcttgtatttggtgttatggagaggcactgtcgctgttataaattaagttataaacactattatgtgcatgaaattattgaaaaaaaaaaaataaaaaaaattttttaatttaaattttatttttattttttattatttattttttttttatttttttattattttttatttattttttatatttatttttttattttttttttt

SEQ ID NO: 13887 - DNA, 454 bp, Gossypium hirsutum
  Clone ID: GOSHI-09MAY01-C20946_1
gttgctcaaaattttaatttttaacaaaaaggaaatcatcgcctttctctgtatatgattttctgttagcttagtgcaatccaagatttgggtacctacgcgaaaatggaggatgattaagaaggattttccaggctatccttgagttgaatccctacatgactctttttcggcgcaggaaccattgagggagcttcgagatatacagggtgtacaaggattataaagatgagaagtccgttatgaaaatgggggacatgctaccaacgaagcttgatgaggagcaaatggctcaactacgagaaatattttcttctttcgatcggaacaacgatggtagcttaacacagctggaactggggtcgctcgtgcggtccttgcggctaaaaccgagccttgaccaggaggtagcccttatacaaaaagctgattccaataacaatgggctgatcca

SEQ ID NO: 13888 - DNA, 615 bp, Gossypium hirsutum
  Clone ID: GOSHI-09MAY01-C20816_1
gtctaaactagaactacggatccctgcatctatacgaatccagcacgtgttgtaaagtaatacagaatggaattttcgataaaagaatcacatgagaagtttctttcaacatacataggaaaacagaggtattccccaaatcaacgctaaaaaagaaaaaaataataaaaaataaaagctcagccccaaaatgagcattaaaagtttatatctgaaagcatgattagatcttaaccttgaactgtaacctaagacaacaatagcgattatctcatctgaaaacatgatcgaatctaagaatcatgattatatatgataaaagcatctccggttttacacgttaatcgatcttgacagatgagtagataagccttgtgaaccaaaaacatgcataaaacccaatggtgcccgttagcacgaaaaatgcatatgaagcgactagcatgtatccaaaatacagcatcccagaaaccagcttagtgatctcaagcttcgtgaagaagtagaatgtagcgtagaggaagagatataacgccgaggaacctgatgtgagatatgacctccaccaccacaggtaatcttcactgcacaactggaagtagcaaagcacaatgg

SEQ ID NO: 13889 - DNA, 405 bp, Gossypium hirsutum
  Clone ID: GOSHI-09MAY01-C20466_1
caaacgactctgtccccacctttttgtcttttcttctaggggtttgaaacccatcatcgccgccatcgtcatgcccccttgaagccaccgtggtttccactgtagacggtgatcgggaccacgtgaaatcgggtttttaaccccttttgaagcgagctcgacggcgagggtttcccagaccgaagaagatccaaaagaagaggaacccccacgacctctttgggccgaatccgacactggagaagtggtcttcgatgacggcgttgcgtggattcgggtgtcaatggtgcatgatggctggtggttcgcacgtcggtggcggcagtcagacatgcgtggagggaagcagccgctgcagctctttaggaggttttgggtttttttttttgctttctgaaaaatgat

SEQ ID NO: 13890 - DNA, 946 bp, Gossypium hirsutum
  Clone ID: GOSHI-09MAY01-C20086_1
ccccccggccccggccgctctgtgtctttatcacctgcaagaaaaggcctattcttccatagcaggccgaataggaaatatttcattattagtaacggatagcattttatacaaaggcatttatccttccaatttggtgtacatttcgtctttatgtggagtagtctatacaactttacaaataattcaaagccaatatttgaaaccaaccagataaaaagtcttaaaggaacccccccctctccccattgcacattattcatcactcactccattaccaacttgcacacatgggctctgtgacgaacatacacataaatactccgagacaacgtttacgttcctaaacatggttcaccgtcatgtatgatttttccaacaccgcatgtcgtccttcacaaaatagaacatgagcagacagtctttctgggtgaatcatcaatcttcttttctgttttagcttttgcaagggatggctgtaccacaacatgcattattatagccccccccggaacttcaccaaagggtactttacacaggccaacagtcttgttgttctccaaaattttaccagaacttatcagcttgacttcattcactgattttggaacaattgtcttacctttgggccaatcagagacaattctttgcttaagcatatccaccgtcgatgtggcggagtatcgaaacggtccgatatccgagccatcataaatcctgaactttatatccaccaaatcctcctccggcatttctgcacctgctttcgtttgttcaattcgtcctaaaatcgactcaccggtcaccaccggcagcggttcatcaaatcgaatcccgccgcctaaattagcacaaactgaaaggcagactgaattctagagtagtaattgattgacttgaagggtttttcttttaaaagaaaaaaaaatattttcccacgcggccg

SEQ ID NO: 13891 - DNA, 277 bp, Gossypium hirsutum
  Clone ID: LIB3149-023-Q1-K1-A3
tgaataatgtgcaattttagtttctttggttcctttaagactttttatctggttggtttcaaatattggctttgaattatttgtaaagttgtatagactactccacataaagacgaaatgtacaccaaattggaaggataaatgcctttgtataaaatgctatccgttactaataaaaaaaaaaaacaaaaaaaccacaaactgtatatatatataaaaaaaaactgcgggtaagcgagaatagctaagccactaatgtcttgacgaaagttttacc

SEQ ID NO: 13892 - DNA, 474 bp, Gossypium hirsutum
  Clone ID: GOSHI-09MAY01-C20066_2
gttcaatgagactatgtttagctcccattccaagaaagcgtcctggttttcgacatcatccacttctttagattccaaggcttcttcatcatcaaaaaagtttcctgttttaacctttgatttttgggggaaaccacttgttgtcccagatcagaatggttcaagaaactgcaccaccaaacctgaaaacaaattctcggttcaagctgaaacaaactgtgtgagccgatgtattagatggtgggaaaaaaatcttaaacccaacatggtcaagatccactctgctcaagaacttgtatgttccttacaaaatgctggtgatcgattggtcattatcgacttctattcacccggttgtggtggttgcaaagccctccatcctaaggtctgtctgcgggctgtactgtttccaaatgcgaaagtcttggtttattttccgtgtgtgtaacgtattgtggtggttgggttatgttt

SEQ ID NO: 13893 - DNA, 431 bp, Gossypium hirsutum
  Clone ID: GOSHI-09MAY01-C20066_1
ccatcccaaggggcaaaaaacagagcacattattttgttcggaatcttcacttttggttcattttgacaactgcgaatggcttctttttcattgaagtgtggttcatatttttctgtgttcaatgagactatgttgagctcccattccaagaaagcttcctggttttcgacatcatgcacttctttagattccaaggcttcttcatcatcaaaaaagtttcctgctttaacctttgatttttgggggaaaccacttgtcgtcccagatcagaatggttcaagaaactgcaccaccaaacctgaaaacaaattctctgttcaagtatgtcaaaaaaccttgctttacttttggattttaaagggttttcttttctgggttcaattttgtttaatagattgggctggaagctgatgtttaaagcaattgattt

SEQ ID NO: 13894 - DNA, 1162 bp, Gossypium hirsutum
  Clone ID: GOSHI-09MAY01-C20016_1
acctagacgtacgcataaaaaagaggaaaggccccatccatctctgatctctctctagatatgcagactgggaattcaagaaaaaagaaggaacgccaaaagatatcataaacaaattgactaatctccatcaaaccccatgtaataaaactaccgtctcactcctttattttactactttcctctcggttagcctcaaatatctcttccctttccttgtttcctcctctgtctctagattttgtcttccattgaagaagaaagatcaaagatgccgataccaggccctagaccttacgagtgtgtaagaagagcttggcggttgcgaaagacaccaagccggtgagaggttccatcattcagcagattttaaggctagctattgaaactcatagcacagctactaaaaagaataaggaatggcaagttaaaattattactgtcatcgtcaaagccgaggagattatgtattccatcgccgtctctgaggctgaatacaccaacccggaaaccttatgggaccgtgctaatgatgccatcaacacgattatccgtcgagatgagagcactgaaacaggagagcttttgccaccttgtgttgaagcggcccttaacctggggtgctatccagtgagagcttcaaggagccaacgacacagtaatcctaggacttaccttacgccaagagcacccgaaactgttcctgcaactcctaggattttggataacggcagtgaggataggtatcctcagttatcccaggttcagtctggtagtcagcttgcaagaatagcaaccaatgtgaattcgaacacttcggtttcacaagctaaccgtcataattatccatttctacctcaaaattgcccatctggccatgaccaattgatgaggatggaaactaacactccatcgaactctggtcaagtttaccccctttattatggaattcactatcaaaatgcagagtcccaaacaggttctccagtgcaggaaaatctagtgtctgatacgataatagttgggagacctattggttcatcccggttagagccagctgaaatgggttccttgcagaatttcttttcctcttccaagttgatattggtggcaagcgaattgggcagcaagatatcagacacactgatgagaagttacttgg

SEQ ID NO: 13895 - DNA, 509 bp, Gossypium hirsutum
  Clone ID: LIB3585-043-P1-K1-E9
gaatacaccaacccggaaaccttatgggaccgtgctaatgatgccatcaacgacgattatgcgtcgagatgagagcactgaaacaggagagcttttgccaccttgtgttgaaggtactgtagatttcttttcatgttcttctgtggtaaattcttggtttcgagtttattgttatgtttgtggttttttctcgtttttctttaatctacattagctacaacttaatgaagctttcaatttgaaagttatttcaagaacaatttggactgatagattgtagcacatgtgttgttttagcggcccttaacctggggtgctatccagtgagagcttcaaggagccaacgacacagtaatcctaggacttaccttacgccaagagcacccgaaactgttcctgcaactcctaggattttggataacggcagtgaggataggtatcctcagttatcccaggttcagtctggtagtcagcttgcaagaatagcaaccaatgtgaattcgaacact

SEQ ID NO: 13896 - DNA, 486 bp, Gossypium hirsutum
  Clone ID: GOSHI-09MAY01-C20356_4
ggttgtggcaacagcaaccgaatgtagaccatatcacagggaataaaatccggaatagttttatgttttcgagggggaagcttcctggtcctcttaggcaacttcaaatggatttgagaaaattgatgcttccttataccgctctcaaactcaaggagaagaaaaggaacaatttgaaagactttttgaatgttgcagggccaatgggtgtaacccatttcctcgttttatctaaaatcaaaacttcgcctgtccttagggttgcaaagacccctcaaggcccgactctcaattgccccctcgttgcccgcaggatcttttcaagaatcctcctttgattgttctgtttggttttgcagcagcagatgaacaattaacggctcacgactatggtgttcaaggacatctttccggatattgatatcaacactgttaaactctcttcttgccagaggattgtgttgattaactacaataaaaacgttt

SEQ ID NO: 13897 - DNA, 981 bp, Gossypium hirsutum
  Clone ID: GOSHI-09MAY01-C20356_2
gcgttcgggagaataatgtaattacgaagaaaagccgaggttgctgatgtgtttgatagtgacttcaatgaagatgttcgtacctgtgccagatgaggaagtagaaaagatgcataagaaaggtttcgcacaaagaagcgtctgtatatttcctggaaagccttccccgcgcgtccggaaagttctttcaaatttagatggtgattccaaggatgaaaatcttactcaaaagacttcctctacacagcatcatgatgcccctgatgatgcacaaggtgaaagaattataaggaaatctacaagaacttcagtcattgctaggcaagctgagcgagatgcgatacctgccgctctgcaggctacaatgaagattgttctgtctggttttgcggcagcagatgaacacttaaggctcacgactatggtgttcaagaacatctttccggatattgatatcaacactgttaaactttcttcttgccacaggattgtgttgcttaactacattaaagacacgaagcttattgattgtcgacattattctatcagactacaccctgttggtgtctcgcgtagaaggcgtgaagtcgtgcagaaccatcaagtgcctggtcttcggattcttcaagatagcgggttatggatcagaaagcgaagctgatgaggaagctgcaacagttactctgactagtgatcttagtcgagttaatcgtgcctctacaaaaagcgcagttaagcttcaagaaattggacctagaatgactctccaactcaccaaaattgagggtggactatgttctggtgaagttatgttcagtgaatatggcaatggtggcaataagaaagagccaggcaatgagggtaatgaaaaggaagacggtgacaatgatggccaaatggaggatagcgatgaagatgatgaagcggataacgaggaagatatggaagaaagtgaagaagattagtgctttagcaaagtgg

SEQ ID NO: 13898 - DNA, 714 bp, Gossypium hirsutum
  Clone ID: GOSHI-09MAY01-C20356_1
gttttgtgttttcgagggggaagcttcctggtcctcttaggcaacttcaaatggatttgagaaaattgatgcttccttatactgctctcaaactcaaggagaagaaaaggaacaatctgaaacgcgtccggaacgttgcagggccaatgggtgtaacccatttcctcattttatctaaaaccgaaacttcgcctgtccttagggttgcaaagacccctcaaggccctactcttacatttaaaatacatgaatattcattggctgttgatatatcccaatctcaattgcgccctcgttgccctcaggatcttttcaagaatcctcctttgattgttctgtctggttttgcggcagcagatgaacaattaaggctcacgactacgatgttcaagaacatctttccggatattgatatcaatactgttaaactttcttcttgccagaggattctgttgcttaactacaataaagacacgaagcttattgattttcgacattattctatcagactacagcctgttggtgtctcgcgtagaattcgaaaattcgtgcagaaccatcaagtgcctgatcttcggaatcttcaagatgtgagcgacttcgtcactaaagcgggttatggatcagaaagcgaagttgatgaggaaactgcaacagttactctgactagcgatcttagtcgagttaatcgtgcctctacaaaaagcgcggttt

SEQ ID NO: 13899 - DNA, 496 bp, Gossypium hirsutum
  Clone ID: LIB3829-001-Q1-N6-E7
gaaaatatggactccaatggggctttttctttcttatagcaaaatctatggatcttctacaacaaatttaaggcaaaattcaggaggaaacagacaaagctgggaaataaaaaggcaaaaataagaggctaactggcacaaaagcttatcaaatcgtcactccaaataagcattttccccatgtaaaaaacatggctaatgttaagtgccatgtcatttaatcaaaaaatggaagttgtattgcaccttccactttgctaaagcactaatcttcttcactttcttccatatcttcggcgttatccgcttcatcatcgtcatcactatcctcaccatcttccttttcattaccctcctcattgcctggctttttcttattgccaccattgcctcatattcactgaacataacttcaccagaacatagtccaccctcgattttggtgagttggagagtcattctaggtccaatttcttgaagcttaaccgcgcttttt

SEQ ID NO: 13900 - DNA, 834 bp, Gossypium hirsutum
  Clone ID: GOSHI-09MAY01-C20346_1
ggaagaaagtctccgcaaattgggagttgaaaaacttggcaaagatgatgtccagaagatgcaatgggaggttttggaggcaaagatcggaaattggattcactttatgcgtattgctgtcaaactactatttgccggagaacgaaaagttagtgatgaaatgtttgaaggctttgattctcttagtgatcaatgttttgctgaagttactgcaagtagtgtttctgttctacttagttttggtgaggcgattgcaagaagcaagagatcaccagaaaagttatttgtacttttagacatgtacgagataatgagagagcttcactctgagatcgaaacaattttcaaaggtaaagcatgcaatgagattagagaatctgcattgggcttaacaaagcgtcttgcccagacagctcaggagacctttggtgattttgaagaagcagttgaaaaagatgcgacaaaaactgctgtcctggatggaactgtccatcctttaaccagctatgtgatcaattatgtgaagtttttattcgactaccaatcaacactgacacaacttttccaggaatttgaaactggtgatggtacagtatctcagttggcttctgtaacaatgagaattatgcaggctcttcaaacaaatttggatggaaaatccaaacagtatagagatcctgctttgactcacttatttctgatgaataacattcactatatggtgagatctgtgcgcaggtctgaagccaaagacctgttaggggatgattgggtccaaagacacaggaggattgtgcaacagcatgcaaatcaatataaaaggaatgcttggca

SEQ ID NO: 13901 - DNA, 550 bp, Gossypium hirsutum
  Clone ID: GOSHI-09MAY01-C20336_1
aaagcagagcagagatttataataattatgaaatgatgaaatattctgtacatatagaactaaagagagaactataggctagaaaatcagtttaaattcccccttgaataaatacattcattacccttacactttttcacatgtaagaaaaataacagcttgtatcatgatcactcagcatctgcttcgtaaactcaccaaaaatattgccaactgcaaaccaatttagcacccaacaccgacaaatgcagcagatggacactttacacaagcaaagtaaaaggcctatgaatctcaattcaacatttagttacaaacttcgaagtgtgtccactcgatcgatgacatccaatgccttgatccggttgatatcaaagtccaatgaaaggaactgaggacagccgcctccgaataaggaaaagggattccttttcttagatctcactctcgttggagagtggctagggtggcttttactacaacaaatatgggtgcttgaattaacttagggtttcttgccggacgggcgtggggtcgagcccgggtttcc

SEQ ID NO: 13902 - DNA, 693 bp, Gossypium hirsutum
  Clone ID: GOSHI-09MAY01-C20266_1
aaaaacataagcatgatttgattctcgaatgaaaattacaagacaagtaacagttgttcataatctgcaaactctgaataaataaataaaaacccatataattcaaaacaccacaaatgggtaacacttaatgactggccgatggattagtcagcaattcaagtgatttctttaagtgctcaactgccgtcgacacttcatcaaatgctaaggccccaaccgcaaaccgagcagccttgtgcgcctcggcgattttctccggcggcggttggtaattgctgtcgtattggtatttctcagaagtaggtggtgaaggttccgcgattttcccgtttctgctacttgaagagtattgagcggttgttgatgaatagcttgttgtcggaggagctgactggggaggattgtaaggagtctcggaaccttgataggatgatggatagtgagacggggccgactgtggaggattgtaaggagtctcggaaccttgataggatgatggatagtgagacggggctgcaggtaaactactctccgtgaaactcggatatgactggaaattagcaaatgaataagaggcagaagattcgtggggtgggtaattaactggcatatgcggtggcaaatcttgtcgatagggttgatagaatggttgatgaaagtctcgttggggttcgtgctggtgtgaggagg

SEQ ID NO: 13903 - DNA, 336 bp, Gossypium hirsutum
  Clone ID: uC-gsflnu33B114e04b1
acctcctctttctgagaaataccaatacgacagcaattaccaacctccgcctgagaaaatcgccgaggcacacaaggctgctcggtttgcggttggggccttagcatttgatgaagtgtcgacggcagtcgagcacttaaagaaatcacttgaattgctgactaatccatcggccagtcattaagtgttacccatttctggtgttttgaattatatgggttgatttgtgaagggtttttatttatttaaatagagtttggagattatgaacaactgttacttgtcttgtaattttcattcgagaatcagatcatgtttcatcatgtttttttattt

SEQ ID NO: 13904 - DNA, 674 bp, Gossypium hirsutum
  Clone ID: GOSHI-09MAY01-C21966_1
ccgcagatgaggcattagccgacccttactggaggggcttgtctaaaatcgagagggaaccttcttgtcaaccaatatcaaaattagagttcgagtttgagagacgacgggtgacaaaggaggacgtaagggaattaatttacagggaggcactagaatatcatcctcagctgctcaaagactacctgaacggacatgaaggatccaatttcctttatcctagtcctgtcggtcaattcaaaaagcagtttgcatatctcgaggaaaatggtggcagaagtgcaccagttttccctctggagaggaagcatgtgtccctcccaaggtctaccgtccattcaaatggtattactccaaatacacagtcaacttcagtttcgtacgagaaccgacaagatagagaagcagatgccaggaaagcaatggatgtaatttctagtaaaccaaagccaacacggcctccgcctagggtgccttcagcaaagcccgggagagttgtcggatccgttgtaccatatgaggacgtaaaaaacattaaagatggttacgacactaagaacttctacagaaatgcagtccctccacagaatgcccccccccattgtttcctcctaaatcaagagaaatccgaacacaggccgacaggaatcttgcaaccaaaccgcaacaacagt

SEQ ID NO: 13905 - DNA, 643 bp, Gossypium hirsutum
  Clone ID: GOSHI-09MAY01-C21936_2
cccacgcgtccgcccacgcgtccgcaatttgtgaagcaaggtttcagaaaaattcaaattcacaaaagagaacgatcgaaaataccactagtattttgaaataagctccaatccatggctacacggttgatctattccagactctcactctctagactctttgcaatgggtggacccaagaatggaagatttctttcaacagagtctaacaagattgatgagccttttaaagttgaagaagcagagaccgtgaatgtacctcctcctccttctgagaagctgcttgtgttgggtggaaatggatttgttggctcccatatctgtagggaagctttgaaccgtggtctggctgttgcaagcctcagcaggtctggcggatcatctttacatgacccttgggctaagaatgtgacatggcataaagggaaccttctttcttctgattcgtggaaggaagctctggatggagttacatctgttatctcttgcattggcggttttggatctaattcatatatgtataagattaatgggactgcaaacatcaatgctatcagagctgctggagataaaggtgtgaaaagatgtgtgtatatctccgctgctgattttggcttggcaaactatttacttagaggacatc

SEQ ID NO: 13906 - DNA, 908 bp, Gossypium hirsutum
  Clone ID: GOSHI-09MAY01-C21936_1
caatttgtgaagcaaggtttcagaaaaattcaaattcacaaaagagaacgatcgaaaataccactagtattttgaaataagctccaatccatggctaaacggttgatctattccagactctcactctctagactctctgcaatgggtggacccaagaatggaagatttctttcaacagagtctaacaagattgatgagccttttaaagttgaagaagctgtgaccgtgaatgtacctcctcctccttctgagaagctgctcgtgttgggtggaaatggatttgttggctcccatatctgtagggaagctttgaaccgtggtctggctgttgcaagcctcagcaggtctggcggatcatctttacatgactcttgggctaagaatgtgacatggcataaagggaaccttctttcttctgattcgtatctcttgcattggcggttttggatctaattcatatatgtataagattaatgggactgcaaacatcaatgctatcagagctgctgcagataaaggtgtgaaaagatttgtttatatctccgctgctgattttggcttcgcaaactatttacttaaaggatattacgaggggaagagagctgctgagacagagttactcacgaaatttccgtatggaggagtgattttgaggcccggcttcattcatggaactcgcactgttggaagcatgaagttgcctctaggcattattggttcaccactggaaatggttcttcaacatgcaaaaccattaaaccagctaccactagttggacccttgttcactcctcccgttaatgttacggcggttgccaaggttgcagtgagagcagcaactgatccagtttttcccccaggcatcgtagatgtctatggaatacaacgatttagccagcaaatgtcaa

SEQ ID NO: 13907 - DNA, 934 bp, Gossypium hirsutum
  Clone ID: GOSHI-09MAY01-C21856_1
gggactgctggcctcgctgtggtgggcagattgtgccctcagcttcagcatgtagatctgagtgggttgtgtgggatcacggacgcaggtcttctgcctcttctggagagttgtgaggccggactcgtgaaggtgaatttgagcggatgcttaaatttaaccgacgaagtagttttggccttaaccaggctgcacggtggaacccttgagttgctcaatcttgatggttgcaggaggattacggatgcaagtttgatggcaatagcagaaagttgtgttttcctcagtgatctggatgtctcaaggtcagcagttaccgattctggtgttgctgccttgtctcgtgccgagcaactcaacttacaagtcctttctttttcgggttgttcccgagtatcaaacaaagcttgccttccttgaaaaaactaggcaagtcactgttggggttaaatctccagcactgcaattcaatcagcagtcgaacctttgagctgctcgtcgagaccctatggaaatgtgacatccttttctaatcacggatacaactccgttgagatctgaacattaaactcatatagtcagctcacaagacagggtagtagcaaacattccctgctttttttttttttttggtccgacaggggggtcatgccggttgctctacacttgatgtttcccaggaactttggcacagttttaagagatggcctataaaaccatccctttattttttttacaggctctcccgacacccgacacaagagctagcctgtttctcgatagccatggttcccggttttaggtttccactcatgatcatcatcacaccaccaccatagctttttccgtcctgctgctacccggtgttttagctcttgttttcagtcataaaagtctggtggttttagatcaaatctcatctttggtttttttt

SEQ ID NO: 13908 - DNA, 604 bp, Gossypium hirsutum
  Clone ID: GOSHI-09MAY01-C21846_1
gatataataaagcaaaaggataatagtatgtattaaccactgtgctcaagattttacatttggccatatcttctgtatcaaccaactggggatagagtgatagtgtatgcaaggcaaaagctgaaatctatatagtctctcatcttgaagccaaagggattataataaaatggaaaaaggccaatgaaaatctcacctcctcttgtgtacctccaaaaaaatgaattagtatggtataagttgggtgataaaaaattacaatatcattgaggtatcgagggttttctccccaagagctatttcagctttgtaggaatagcaatgatgacttataacttcgattaaggtattctcgatgtatcctgccgtttaagagggacaccttcatcaaagccatcctcttcttcatgctttaacgatcgcattgatatagaagttgtcaaacttggacctgattgaacataatcatcgaccatgtccttggttttgtgaagaagaaaagttcccgaaaggattgttatgaatccacacatctccgttataatctgagttggagtctgcctatcccaatccttaaacatgatgacactagccaaaatggtat

SEQ ID NO: 13909 - DNA, 670 bp, Gossypium hirsutum
  Clone ID: GOSHI-09MAY01-C21546_1
aaaaagggctgctcttggactttaatggtggaggagctgcggaatctcaagcatgggagtgagtatatagacttattctcttttaataatgtgccgtctttaatctacttattgtgtttgaggccatgagttcaaagaaatcaattcagaatctgggggaaaccattcattcactgctgggatttaagtcacatctaacttcaacttgggtgaagtcagtttgtgagatagtaaagaaattaccaagtgggaacgaaaaggatgatgaatcagctgcaaaagaaatttccaagataaaagaagaaatggctgccttaacccactgcataaaccaatcgaacatacagaggaggcagttgttgcatgatttgttggacttgaaagggaacatccgtgtattttgccgagtgcgaccattcacgttggaggaaagtataggaggaggtataggagctgtagtagctttggatacaagtaacctccttttaaaacttggtgataacaaaactaaaagatacacatttgacaatgtgttccagggttcatcccaagatggagttttctctgaagttgagccagtcatcaagtcagtccttgacgggtacaatgcctgcatttttgcttacggtcaaacaggaaccgggaaaaccttcacaatggaaggtacctt

SEQ ID NO: 13910 - DNA, 556 bp, Gossypium hirsutum
  Clone ID: GOSHI-09MAY01-C21496_1
ggaaaatgccgatgtttttggtggataggaacgatcccaacaaattgattttcttttaccaaggatcggggatgcagcttggggcggaaggattcgcggtgggttttctttatacaatagtgggattattgctagctttcgttacccatttgcttgtttatgttaagaacgcgaaagccaagcgtgtggccatggtttttgcgatttgcgtttctttttgggcggtgcagaaagtgattttcttggacaattggaagactggatatgggattcatggattctggccttccagttggaactgaaggcatcatcttttgtgcttgtttttttaggctgctataattcgaactatggtttcgattcagttgggaatttgatatcaattttagatgttttaatgtactttgggcaaaatactgagcttatagaacgttaatctgctataagttgacatccatgaaagatccatttcctaaagactaactgaccgactaaactgcttatgaggcaatccaagcattccatgaataaatctgcggggggggcccgggaccga

SEQ ID NO: 13911 - DNA, 349 bp, Gossypium hirsutum
  Clone ID: LIB3148-029-Q1-K1-G6
acgaaatgcttcaaattccttggagcaatatgctcctccacattaagtgcgaagagcttgaatggttttaccgatttcattctcaacaaatgccttgaagctagtaaatgcactaaatgcttctaatttctgctgtaagaactaaactaatgtttttcggcaataatcatgaatgaaaggaatgaaatattttgttacctcctttaagctgatataattcgaactatggtttcgattcaaatgggaatttgatatcaattttagatgttttaatgtactttgggcaaaatactgagcttatagaacgttaatctgttataagttgacatacatgaaaaatccatttcct

SEQ ID NO: 13912 - DNA, 468 bp, Gossypium hirsutum
  Clone ID: GOSHI-09MAY01-C21476_2
ctttttctggtgggggagatcggtggaaatgattataattacgccttttttcttggtggaagcattaaacagcttcaatccatggtcccttcagttgttggagcaattgctaatgcaaccagtgcattgatagaggaaggcgcagtagagttgatggttccagggaattttcccatcggttgctcagctgtttacttgacattgtttgaaagccctaaaaaggatgattatgaccgtcatggttgcttgaaggcatttaatggttttgcgaagtatcataataatcagcttaaacaatgccctggataccttgagacaaaagtatccccatgtcaggattttttacgctgattactacggtgccgccatgcgttacgttcatgccccactacatcacgggttttatggtgggactctaaaagcatgctgtggagggggtggtccatataatttcaacatctcaccaag

SEQ ID NO: 13913 - DNA, 674 bp, Gossypium hirsutum
  Clone ID: GOSHI-09MAY01-C21476_1
aggtgaaggagaggaagcaaggaataaggcaccgaatcaagggtaggaggagggcgcagaagggatagtaggtacaaggatgttgcaagtgggtagatcaagggagaatagaggtggattgaagccaaagagaggaaggatgagacaatcggaggagatgagaggcaatagaagctgtgaggaggtatcgtaatgatgagattagacaagcggtggatacgggaagacagaagtatccccatgacaggattgtgtacggtgattaatgagaagccgccatgcgttacgttcatgccccagtacatcacgggttgtatggtgggactcgaaaagcatgctgtggagggggtgggccatgtaatttcaatatctcagcaaggtgtggtcatcctggatctgaagcatgtaaagatccttccgtttattcaaattgggatggaattcatctaactgaagcagcctatcgccatatagccttggctttgatcaatggctcctcttcccttccacccctcatatcctctcctctttcagattgaataacccccctaacatgaacagtcaatcaagggtctcatttagatgttcattagagatccaggaccaatgatacatgtatgcattgactgtacttgaagattttattggcgtcgcggccgagcctcatgattttg

SEQ ID NO: 13914 - DNA, 583 bp, Gossypium hirsutum
  Clone ID: GOSHI-09MAY01-C21776_1
agccacgtgatgatacaagttcgtggtaggcgtagaagctggtcaagccggtaaccaagctcaggtggtgatgcaaatgctcggtgagcgtagtagccccctcgggcatgctccttgtagaaccaagcgaagagctagtgagggccggaatggaatatcgtatgtagtgtagaatcggatctgaagctctttactaggattggaacaagcgaggaacgagtgaccacaagctccgcttaagcgctcgacatgcagttagctcaaaacatgttcatcatgtggccgagcgaagcgcacctgtgtgaagcagcctagcatcactttagatagaagcagaatggataacttacaactgaaagtaagttcttcggatcgatatctcgtacgacgtaatggagatcttggtctagatccggtggttcgcagaattcgggacctaacgatgttcggttcgtcccatgaacgggagcggacaattcccttttcggggaatggctgcaatcacaagcaagtgattgaatgagtggggggctccgaaagcacatgcgggataagcaggtatttcaggagacggtctaaaaat

SEQ ID NO: 13915 - DNA, 1734 bp, Gossypium hirsutum
  Clone ID: GOSHI-09MAY01-C21736_1
gggtattaggatttcaaaggacaggtggttgtggtttaaaagaacaattagcaaaaaccactcttaacaatgtaagatcacaagggcatacttatgtagaacttcgtgaggatggaaagcggttcatattcttctgcactttgtgccttgcaccatgttatagtgattcagtgttgcttgaccatttgaaggggagccttcacactgaaaggttagctgctgctaaggttacattgttaggatcaaatccatggcctttcaatgatggtgtcctgttctttggtgccacgaatggagaagagaaacagttggaagttgtaaatgataaccaaaataggttgttggagtttttaaacagtgataacaatcttgctatagttgaatatgttggtagtcaagctagttcctgtaacaaggaagtgaatggtagagcaggggaatctgatctggtgataccaggtgtgctaatcaaggataaaatttctgatttgaaagtgagttttactggttttgggagaattgcagcgagattctgtgagaatgatggaatctcaaatggtattagcagaatatggagtgaatggctagggaaagaagctcctataaatgatgataggttcaaggttccaaagcatgaatttgctgttgttacttttccttataattgtgatctaggcagaaagggattgcttgatgatgtcaaatcactattaacatctggttcaacaacagaattgggtaatggtgaagctgccattaggaaaaggaagaagtcattttctgacccagaggatataagtggatctttaagtaatcagtatgattcatctggggaagattcttcagcttcaaatggtgattcttcaagactggcattagatcgatatgatgaccagcttctgctcacaagattcatttcaagtaggactataaggagagagttgaggcggcaacagcgtatagctgctgaaagaatgtgtgatatctgtcggcaaaaaatgcttcctgataaagatgtagcgaccctcatgaacttgaataccggaaaacttgtttgcagtagtagaaatgttaatggggctttccacgtatttcatacttcatgccttatacattggattctcctttgtgagcttgagaggattgagaaccattcagttaatcctaaatcaagacgaagatctaggaggaaaaatcgaaccaaatgcaagaagatggggaaggaaggagagactaaacctacagggaccctgattaattctgtactctgcccagagtgccaaggtaccggtattgaggttgagggagatgagctggagaagcccgatgtctctctttctcagatgtttagatataagattaaagtaagtgatgctcgtagagcatggatgaaaaaccctgaaattttggagaactgttcaacaggctttcattttccttctcagtctgcagagatgattcaggagaaagtaatgcctctaaaattgctgcatttctacagtgccgacaagcttgaatcagggacaagttaccttgggtgaattctgcaattgatcttatgttcgatgttgggtggaataggatgttctgttccattggaatgtaagtaccttttgtacattgtaatgactcaatgctatttttgacttttttatgaagcatagttttagctcatcttgttctctcctttactgtactagtttctgtgatttaaatgaaatgcatttttagttc

SEQ ID NO: 13916 - DNA, 771 bp, Gossypium hirsutum
  Clone ID: GOSHI-09MAY01-C21696_1
ccgagatacagctgaagaatgcaatggcttccaatgaaacaagtcaagaacatcttaatgaaatggaaaccgttattgattcactaaaagtaagcatttatgaagctgaaagtagagctgaaagtgcagaagccaaggtctcagagttaacagatgcgaacttggaacttaccgaagagttgaattttcttaaaggtaataacgagaaaagcacaaagaaggtgacctcactagagaagcagttgagggaatcggagattcaactacagcatgcaaaagcgtcttccgaagcaagtcaggagcagcaaaacatgctctactctgcaatttgggatatggaaactttaattgaagatctaaaatcaaagggtttcaaaagctgaaagtagaaccgaaggtgtggaggagcaatgcattgaattatctgaatctaacttcgaacttaataacgagctaggcatcctaaggcatgaaattgaatgcttggagacatctttgaatcaagctaactttgaaaaagaggcaaatgcaaaagaaatcagtcataggaccaagttaatcacagatatggttgcccaactagctacagaaagagaacgcatttaaaagcagctatcttcaatagtaaagagaaggagatattggtgaaaaaagtacaaatattgtaaaagccgactctcagcagtctgtactctggagtgatgatggcatgagatactgtctgatagtgatcacttgagctcttgtcaaaacattctaaagcggcacctt

SEQ ID NO: 13917 - DNA, 551 bp, Gossypium hirsutum
  Clone ID: GOSHI-09MAY01-C21116_1
tgccattgatgcctcaattgtgcgcatcatgaagagcaggaaagttctgggtcaccagcagttagttatggagtgtgtcgagcagttaggtcgcatgttcaagcctgatttcaaggcaattaaaaagcgggtagaggacctgattactcgagattatcttgagagagacaaggagaaccccaacgtattcaggtacttggcatgattttgcctagtcattatgctgacgaagtggtgaatattgcttggagcaaatagagctcaaaaggatgggatgcgattggtcagtggtgaaagtggcgtaagcacaatgagatgccacctgatgagtgcttgagcaggagctaagatacttgtacagtaggagccaggtatggcaaatttcaataacttatgaaatcaacccggacaaatcatgattgatctcataatatggtccggtgtggcatgagaaaccatagggtatctggtttcttattactgcaaagatgactttgacccttgtttgttttgccccatcaaaagaaagaaaaatgtgtaattttagttat

SEQ ID NO: 13918 - DNA, 558 bp, Gossypium hirsutum
  Clone ID: GOSHI-09MAY01-C21126_1
cccacgcgtccgaaaaagtggaagaattctccgccgttgaaggggtagactgtattcaaatgggtccgttggatttaagtgctagcctgggttacctctgggacccgggtcacaagaaggtaagggagatgttgaggacggcggagagagaagtgcttaagtccgaccggaaagacggcggagccttcttggccggtttcgcaatgccacatgatccgccggaggcgctcgggaagcgcgggtatcatatggtttccggtgccgttgatgttgggttgttcagaaatgcggtggtggaggatgttaggaagtttaagattagtctcaatgctgattctgattattccgatgatgataaagattccgatgagaagtattggagtgaataaaaaatatagattgaaaatttcattttggtttgctgtttgcgtttatcgtttggttgcaatcctttttgtaaatgtagttgaacggcttggtttcttagagggcaatgaaatcgagttccaattcagttcttcaatttatctatgagacttcaaccatgttttgagttcc

SEQ ID NO: 13919 - DNA, 399 bp, Gossypium hirsutum
  Clone ID: GOSHI-09MAY01-C21366_1
cttatggcttatgaaattctctttcccggtcttgttcgacaaggcatcggcctgtccagtttctaagacgggggagtgggggcttttgccttttgccttttgccttttcattaaaggcttcatctttttattcttcttcgttcgtctggtgttttctccgttcgccccaatacaggatcacgaagcctttttcccttcaatgccaactgagcttctgttctggagtggtggcttgctttacgtttcacgctgaatggccttcttctgtccacctgtttgtataggcattgatcaaggtctgttcttatcatttaagacaaaatggaatttgtatccaagaagaaatggaaatcagtgctgccacgtcttttcaaaaacaaatcatcttcttcgtgtttt

SEQ ID NO: 13920 - DNA, 1339 bp, Gossypium hirsutum
  Clone ID: GOSHI-09MAY01-C21336_1
cttttttttccttctttttcttagcaaattcaacatcgaaaaataaactaccacttttgttcacctctttataccaaagttttgtttccttgattttcaacaccgttttcgatttgggtttttctttaagcttcaaattgagttggatttgtagctaaaaaaaagataagaaaatggcagaagagagtaagcaaagaaggaatgttaagcccgtaaaggttcaaacagcttcatcatcagaagaaagaagatcaaacaacaatctcccaaactttcttctttcagtaaggctaaaatatgtgaagcttggctactattacgttatctctaacgctatgtatttgatgttggtgcctctcctaggcattgcttcagttcatctttccacacttactatccaagattttgttcgactatgggaccaactcaagttcaatctcgtttcagtaaccctatgttccggtcttttagttttcttggccacactttacttcatgagccggccaaggaaagtttacttagtgaatttcgcttgttacaagcctgaagctgatcgtatttgcaccagggaaatcttcatggagagatctggtctcactggtagcttcaccggagtgaacttagcctttcagaagaaaatcctggagaggtctgggttgggacaaaagacatacttgcctgaggcagtgatgcgtgtcccacccaacccttgcatggcggaagccaggaaggaggccgagacagtgatgtttggagctattgatgaactcttggacaaaactggtgttaaggcaaaggatatagggatccttgtggtgaattgtagcttgttcaatcctacaccatctctttctgccatggttgtcaacagatacaagcttagaggcaacattttgagttataatcttggtggaatggggtgcagtgctgggctcatttctatagaccatgctaaacagctgctgcaggtgcaccccagctcttatgccttagtggtaagcatggagaacattacgctcaactggtacttcggcaacgaccgatctatgctcgtctcaaattgcctcttccgcatggggggtgccgcaatccttctctccaaccgctcatccgatcgccaccgctccaaataccaactcattcacaccgtacgcacgcacaaaggtgccgatgacaaatgctacaactgcgtcttccaacgtgaggacgacaccaaaagaatcggcatttccctctcgaaagaactcatggctgtcgccggagaaacccttaaaaccaacatcaccactctggggccactatttcttcccatgtcggagcaactcctgtttttcgtcaa

SEQ ID NO: 13921 - DNA, 378 bp, Gossypium hirsutum
  Clone ID: LIB3083-089-Q1-L1-F2
caaaagtggtagtttatttttcacttctttatacacaaaaggttgtgtcctcgagtttcaacaccccgttcgatttgggggtttctttaaactccaaattgagtggggtttgtggctctaaaagaaaagaaaatggggcaaaagagtgtgcgcaaaaagggcgcgttgcccccataggggctcacacagcccccttctgaagaaagatgaaacaacactctccccaacttctttctttcagtaaggctgaaatatgtggagcttggctaccattacgttatctctaacgctatgtatttgatgttggtgcctctcctacgcatagctgcagttcatctttccacacctactctcttatattatgttcgactatggaac

SEQ ID NO: 13922 - DNA, 965 bp, Gossypium hirsutum
  Clone ID: GOSHI-09MAY01-C21276_1
cccacgcgtccgcatatttctatctcaagccgttttatccttgacgggcccccggcccgaggccgccagtcgccggtcaccatcagctgatcgcctcctcttccagcaatggcggaagctcaaacagaaactccgccttccctatctgagcaatattcactgaaggagaaagcggagaaatcagatgtggctacaaaagtagctgacgcagaagaggtcgaaaattcagcgagtacttcttccaaggaagtggtgaccgaggaagttgagactcctgctcctcttgtggaaagtactgaggttcctcctgctgttgctgaagaaaacaccgaagccaatcctgttgctgagaacagtgttgaagatgctcaagttgctgcggaagaaagtaatgaacgtaccaaagagagctcaggtgatgctgaagaaacaccggagataaagcttgagactgctcctgcagattttcgcttcccaactacaaaccaaacaaggcattgcttcacccgatatatcgagtaccatcgttgtgtagctgcaaaaggagaagatgcttcagagtgtgacaagtttgccaagtactatcgtgccctatgtccgggagaatggatagatcgatggaacgagcaaagggagaacggtacttttccaggtcctctgtaagatggtacatttcgggaaatccagtgaagttgtcaactgagaaacggcattttcaggaaataagaaattttggcatgtacccgttttgactggatcatgattgataaaatggagttatatatagcctatgttacatgggttcaagtgttggatattgatatctgtccgacaccaataaatttaatttctttttgagagctatgccctatgtttttgttcatgttcagatgtgtctaacatgaatatacaagttcttccagcaattttaagaaattaagaaaatcaggaatctttacaatatt

SEQ ID NO: 13923 - DNA, 356 bp, Gossypium hirsutum
  Clone ID: LIB3149-020-Q1-K1-G10
aaccgggccggacccacgcgtccgccgccttttttagttggccagccgccgtttaccatcagcgagaggcctctcttccagggggggcggaagctcaaacagaaactccgccttccctatctgagcaatattcactgaaggagaaagcggagaaatcagatgtggctacaaaagtagctgacgcacaagaggtcgaaaattcagcgagtacttcttccaaggaagtggtgaccgaggaagttgagactcctgctcctcttgtggaaagtactgaggttcctcctgctgttgctgaagaaaacaccgaagccaatcctgttgctgagaacaaaggtgaagatgctcaagttgctgcg

SEQ ID NO: 13924 - DNA, 723 bp, Gossypium hirsutum
  Clone ID: GOSHI-09MAY01-C22946_1
gacctatgcatgagatggcacacattgccaaaggccaattcatggcaattgcgtttccctcctgcgtgccagtgccatgaacgcaaatcagagcagcatgctgatattgcaggaaacatgcatagacgcagcagggtcgcttgtagtgtacgcgccagttgatattccagccatgcacgttgtcatgaacggtggtgattccgcttacgtcgcacttttaccttcgggattcgccattgtcccggacggtcctgggtctcatggacctatctctaacggacatgttagcggaaacaccggcggagggtcgtcgagtgtcggtggatcgcttctcacggtagcttttcaaatattggcaaacagtttaccaacggctaaactgaccgtcgaatcggttgaaacggttaataatctgatttcgtgtactgtccaaaagatcaaagctgcccttcaatgcgaaagttgatgactcagtgagttgggtaattttagttattaatataggttgtggttgtggttaaagagtgtgcgactcagttagttgggacgagtggggggtattgagtcaagaacgaaccgcgcgtggagaatcatggtatgggggcgatcgaagggacaagggtggtggctcgggtattgactcaggtcgaccctttgagttggctcgccggggaccaaaaaagaaagtcaaaactcaaacagcgtcgtatttggtgtactaat

SEQ ID NO: 13925 - DNA, 670 bp, Gossypium hirsutum
  Clone ID: GOSHI-09MAY01-C22976_1
acagaaccaccgagaagcatcatcccccaacaatagaaagagacagactgtgttccaaattctaaaaaccaaagcgaaaatttagaaagaaaatcactcctcccatgttttaacttcaacgctttaacaacaccaattacataaacaaagcaaaacccaattatttttctccttttcttcccatttctggtcatccatttttcttttaagccactcttcttttgagttcatataaacttcaactcaatacccccaagaaaacccagaaaaaaagatcacaacttcggttattaaagagtcttcgtttattaaagagtccaaaagggagggactttttgggttttgaaggagaaatggcaagtggggatcttgaaagaggaggaggaagttatgtgaagaaccgggggatttcctttccccaatcatttttttttgactactgtggggaaaatgtggaaaaatggggtttttgggggtttcccacaatttagtgggggatattaatgctgttttgtgggggagatgttgtaaaaacgggccaacaaacatggggtttagaaggtggtgggtgaaaggttctggaggctttttaaacctttgaaagaactcttttgggccttttaaaccggggaaaatgggcccttcgcgaaaaggtctctgggaacagggg

SEQ ID NO: 13926 - DNA, 1590 bp, Gossypium hirsutum
  Clone ID: GOSHI-09MAY01-C22906_1
ttggacgcgtgggtttccctttccgaatctcagatctttcgatggctctgaaccagagctacgatctgttcttcatcttcaacctctcactccttttcgctctcttacccttctctttctctcaaaccgtcgccgatgccccatcacccgccgccgatacttgcaatgggatcttcttatcttacgcttacacctccggaaccaagttaaaaccaacggatcccaagcaccagccgtacagattcgagtcagtcttaacggtgctgaataacggcgacgagaagcttaaatcgtggagggttttcgtggggtttaaaaacgacgagtatttagtttcagcgtcgaatgcggttttggctgatgggacgagcttgcctgccaatgttgggaacggtaccgtttttgctgggtaccccatgactgatctgaaaacagcgattgagactgccggagatttgaatcagattcaagttcaagttaagcttcttgggactcagtttggagtggcggctcctagtgttcccttgcctgaaactattcatcttgctaatgatggcttcctttgtcctaagccttctttgcaaggcccacgcgtccggcaagtttgttgcaccaatgacccgaaattcaagacgaatgttgcggtggaggatgagttcctacctcggcaaagtggtgatcttacaattatgtatgatgtgacgagaacgtacgactcgaactattgggcacaggttactatctcaaaccataacccccttgggcggcttgataattggaaattgagttttgattggatgagggatgaatttatatatacgatgaaaggggcttatccgtatgtcgttgattcatcagactgcatatttggtccgcaaggacaacactatagggatctagactttggcaatgtgttgaactgtgagaggaggccgacgattattgacctgcctctgacaaaggcaaacgatacaaccatggggatgatcccaaaatgttgccggaatggtactattttgccaccaacaatggaccctagcaagtcaagttcagtattccaaatgcaggtctttaaaatgccaccggatctcaaccgctctgagctctctcctcctcagaattggaagatcaatggcacgttgaaccctaattacaaatgtggtcccccagtccgtgtaagccctagtcagttcccagacccaagtggcttgccgtcgaatacaaccgttgttgctagctggcaggtggtttgcaatattacacggcccaagaacgcaagcccaaagtgctgcgtatccttttctgcatacttcaatgaatcagttgtcccatgcccgacttgtgcctgtgggtgccctcgcaactcagccaacacttgtagagcaaatgctacagctgttcttgttccacctgaggcacttcttgttccatttgagaaccgaactgctataaccagagcttgggctgatcttaaacactttacggtgccaaatccaatgccgtgtggtgacaattgtggggtcagcataaactggcatctttattcagacttctctcgaggatggtgtgcttggatcacaatattcaact

SEQ ID NO: 13927 - DNA, 1031 bp, Gossypium hirsutum
  Clone ID: GOSHI-09MAY01-C22846_1
gcgttcgcccagcgtccgggaattttagacccgagagtttctcggtgagggtgggtttggttgtgtcttcaaggttggattgaggagaacggaactgctcctgtgaaacccggtactggacttactgttgctgtcaaaacactaaacattgagggacttcagggtcacaaagagtggctggccgaagtggattttcttgggaacctccttcatcccaatttggttaaattggttggttactgcatcgaggatgatcacaggttactggtatacgagttcatgccacgaggaagtttggagaaccaccttttccgaaggtccttgccacttccttggtctattagaatgaaaatcgcacttggggctgcaaagggtctcgcctttcttcatgaagaagccgaaagaccagtgatatatagagattttaaaacatctaatatcctgttagatgcggattacaatgccaagctctctgattttggactcgccaaagatggtccggaaggagataaaactcatgtgtctactcgagttatgggaacatatggatatgctgcaccagaatatgtaatgactggacatttgacatcgaagagtgacgtgtatagctttggggtagttttacttgagatgttgactggccggaggtccatggacaaaaaccgaccaaatggggaacacaatcttgtggaatgggcgagaccgcatctaggagacaagagaaggttcttccggattttagatcctcgtcttgaagggcatttttctgtcaaaggtgcattgaaagcggcccagctggctgcccaatgtcttagccgagatcccaaagccagacctcggatgagtgaagttgttgaaactctaaagccccttccaaaccttaatgatatggccagctcctcctattacttccaatctatgcaatccgatcggtctaggtcctccaacataccttgccaaaatggcatagagtgcaggcaggattcgtaacgaggaacgggacacctatgaggagtttatccagtttgaat

SEQ ID NO: 13928 - DNA, 663 bp, Gossypium hirsutum
  Clone ID: AI054963.1
cttatgcatttgcaagtacatggttgaccgatgtttaattttctctggtaataaccactttttgcacagaagggtccctgccacttccttggtctattagaatgaaaattgcacttggtgctgcgaagggtctagcctttcttcatgaagaagcagaaagacctgtgatatatcgtgattttaaaacgtctaatatcttgttagatgcggtatgtagctgagacagaaaaatactatgttccctacctaattttatttttcttcttataaaatggttaccaatatcaggattacaatgccaaactctctgattttggattggcaaaagatggtccagaaggagataaaactcatgtgtctactcgagttatgggaacatatggctacgctgcaccagaatatgtaatgactggacatttgacatcaaagagtgacgtgtatagctttggagtatgtttactggagatgttgactggcgggatgtccatggacaaaaaccgaccaaatggggaacacaatcttgtggatgggcgagaaccgatctagaaacaagagatggtcttccgattttagaaccttcgcttgaaggcaattttttgtcatagtgcattgaagcagccaattgctgccatggtttatcgtatccaaaccgactttgtgatt

SEQ ID NO: 13929 - DNA, 606 bp, Gossypium hirsutum
  Clone ID: GOSHI-09MAY01-C22816_1
gttggttgttcgtgaagtatatcgggccataacgggttacatgaaaatgatgaagagtgcctctgggaaaaagcaaacagtgtttgatgctgacaactcgatgaataatatgaaacttccactcatctacctgatggattgcacattgaacgactgcagtttaatcctaaaatcagtaaaccagagggaagtttatcctgctctgatgttattccctgctgaaactgaagcagttatctcttacaatggagatgtgtcagtagctaatataatcaagtttatagctcatcatggaagtaattcccatcatctctatggtgagaaaggaattttattgacgaccactgaagctgtgaagaatcaggctatactcaaggattcttctggagtttcagctaatgaagaaggtcaatttgcaaaggacaaatttcatgaagttatattgaaaaaccagaacccaaaacgagttgcctattcgaaatacaacgggggcaagtcgaggtcgcccatgtcagttggctcgcataaagccacatccaaggtggttgttggttcaatccttactgccaccgataaacttctcgaggtcatcccgttcgataactc

SEQ ID NO: 13930 - DNA, 1145 bp, Gossypium hirsutum
  Clone ID: GOSHI-09MAY01-C22416_1
cccacgcgtccgcccacgcgtccgagagacaaattaagaatgagggaaccaacgatggtggttggcgcagacagcaatgctgctggtgctgctgttggcggtgctgatggatcacctctccctccaccgacgtcttcaccgccgcaatcattagtcgagaggctcaaggactacggccaggaacacgttttcgccctttgggacgagctttctcctgatgaacgcctccacctcgtcaaggatatccagagtttggatctttcgagaatagatcggatcattcgctgctctcttcgatctcaaggactgccggtggcagcaatagagccagttcccgagagttgcgtgtcctctgtagaggagagaacgatggaggaaagggaaaggtggtggaagatgggattgaaggctatatcggaaggcaaattggctgttttgcttctatccggtggccaggggactcggcttggaagttcagatcccaagggatgtttcaacattggacttccttctgggaagtcactttttcaactgcaagctgagcggattttgtgtgttcaaagattagccgcacaagctataaatgagggctcagtgaccattcactggtatgtaatgactagcccatttactgatgatgcaacgcgtaaattctttgagagtcataaatactttggtcttgaagcagatcaagttacctttttccagcaaggcaccctaccttgcatctcaaaggatggtagatatgtcatggagactccattcaaggttgctaagtctccagatgggaatggaggagtatatacagccctgaaatcttcaagattgttagaggatatggccgcgagagggattaaatatgtggattgctacggtgttgacaatgcattggttcgtgtagctgatccaacattcctgggatatttcattgataaaggtgtactgcagctgctaaagttgtccggaaagcctatccccaaaaaggttggtgtttttgtaaggcgaagtaaaggtggaccacttactgtggttgaatacactgaattaaatcaatcactggcttctgcagtaaaccacaaactgggcgtcttcgttttgttggagtaatgtgtgcttacacatgtttactttggattttctaaacc

SEQ ID NO: 13931 - DNA, 842 bp, Gossypium hirsutum
  Clone ID: GOSHI-09MAY01-C22426_1
cttcaattttgggcccaaaccggccaaacccaaaattaagggggtgaagcccgcaccgctagaagtactagaccgggtgaagatgaacaacactctcgaaactcctcgggccaccattaaaggtcttctgcaggttccaaaacaggcggagatgagtttcagtagggaaaatctaagaaaagttgaagatcaactcaagcgggctttcgttgaatttttccctttgcttcgcctgcttaaaagttacagctttttgaataccttggcattctccaaaatcatgaagaagtatgataagatcacatcgagaagtgcatcgagatcttacatgaaaatggtggataactccaaccttggtagctctgatgatgttacaaagctgctggagagagttgaagctacattcatcaagcatttttccaatgccaatcgtactaaagggatgaatatcttaagacccaaagccaaaagagacaggcatagggtgactttttcaactggttttctggctggttgcatggcctctcttcttctagcccttataatgatcgttcggctccgtacaatcatggatagtagagggaggactatatatatggaaaccatgtttcccctttatagtttgttcggattcattgttctacacatgctgatgtatgcaattgacattttctactggagaaagtaccgagtgaattacgccttcatattcggtttcaagccgggaaccgaattaggctaccgagaagttcttcttctgagcttcggccttggaatattagcattagctgctgtgctctgcaaccttgacatggagatggatcccaaaacaaaagactata

SEQ ID NO: 13932 - DNA, 534 bp, Gossypium hirsutum
  Clone ID: GOSHI-09MAY01-C22736_1
gatcgaaccctattttaatggttgccctcacttggttcacgttgaaggcgatgaaatgtcgaggagtaactccggaaggggctgattggttaagagcaaatagaggttcactctcggttaatttggatatgggggaacatttagatgtgactgccaatgatggtgtagtacaagataatggagatggaattcctcctgttgtggctggtcaaattggagctcaggcattgcttcaagcagcacagctcgttcaacatcctttaagctttcagggattttgggtgggaggagtttcatggcttgcactttgaggaggttggcaagtagtaacggcagttcccggagttaacttggatggacgacgtgaagttgcaatgaaaatagtgggaaaaacactctgggtcttgagctggttacattatagtgtattggagtatctgaatctggttctggggattttttaaaaatacgttgggctggtgatggcctttagaattgaatcttcatctaagtgatagggtcttttttattttc

SEQ ID NO: 13933 - DNA, 367 bp, Gossypium hirsutum
  Clone ID: GOSHI-09MAY01-C22196_1
tcgagtttttttttttttttttttcttttacaactgagtcatttacgtaatttatgacttggaatgttacagaaccaaaaaaaaaaaaaaacaatatttcactggctgcagccttgagcagacaccgtctgtgggtgaagctggataggcaagcagatggatcatcaaacagaagaattttagattgttttaagaaaatgaaaatcttgagaaaagagaaagggttggtcctcctgatgcttcatttgctgggcttgatggaacgtcggtataggtacggtaggcttgttgacacttctgcatctctttaggactaaattgaagaagcattcctacaacaggtagtagagcttccacttcacctgtt

SEQ ID NO: 13934 - DNA, 593 bp, Gossypium hirsutum
  Clone ID: GOSHI-09MAY01-C22076_1
cccacgcgtccgggagcatttgccaggggttcctaagaagaagctggaagatgagaagcaaaaagggtccataaagttgctgccattaacttcccccggccactcaccaacttcaaaaggaacaattttggaaaagattttagcccggaaaaaagcatcaatgccagccggaaggatacatttttcgcggcgatggtggaatgttgcaaagatgataatgatgaagaatcacgaagcaatttatggagtggagttaaagtaacaaggagtatcagtgacaggttgggatttattaatctctactcttcttgtaaaagaacctgtgctgtctcggaatcagtagtgtatctgccaaggtctagcagagcagctaattacggcatacttactactcgtcgctcaacttaaacagatccagtgatcacattctgctgctcttaatttctctttctttaattttcctctgttttatgttgcatatgaggacaaggatggatgatgtctgtaatatataatatgaatagaaagctgaaatgttgcctctgccttttgtcttttttaatgaatgaatgaaggaattgggctgtttgatc

SEQ ID NO: 13935 - DNA, 337 bp, Gossypium hirsutum
  Clone ID: GOSHI-09MAY01-C22016_2
ggaaagcgaactcgaaactcgttggcatagctaactgagacagagatgaactcaccgcagcttccacagacgcgtgggcgcgtgttatcctcatccgagataaacaaatccccagccgggtcaggaggagatcttgaatcttctttaatccaaatctaccaccatcaccaccacaactccctcaagctccgggatcaggccgagaaagcgaagaaagatgcgattaagaaagcggggagagtgtcggatttgttggtggaggcggtgaacggaggtgtgcaagagtcgtttataaacgagaagcgaatcgaggcggagattcgtgctttggcttcta

SEQ ID NO: 13936 - DNA, 863 bp, Gossypium hirsutum
  Clone ID: GOSHI-09MAY01-C22016_1
cccacgcgtccgctcgaaactcgttggcatagctaactgagaacagatatgaactcaccgcagcttccacagacgcgtgggcgcgtgttatcctcatccgagataaacaaatccccagccgggtcaggaggagatcttgaatcttctttaatccaaatctatcaccatcaccaccacaactccctcaagctccgggatcaggccggtcagttctgttttttttttgtgtgtgtgttaagtaattaattaattagtttaaaggaattgatcggaacagagaaagcgaagaaagatgcgattaagaaagcggggagagtgtcggatttgttggtggaggcggtgaacggaggtgtgcaagagtcgtttataaacgagaagcgaatcgaggcggagattcgtgctttggcttctacaattgctcgtttcatgaagcagaccgatcaatggctcgccgcttctcacgccattaacacctctgtcaaggaaattggagactttgagaactggatgaagagcatggattttgattgtaagagtatcaacgctgcaatccgcaacatctaccaacaatgacatacgaattcaggcaggcaccaattgaagtccctgcttcttctgacaagtctctgcaatttcatttccttgttcttttgataagaagaagccattattaggctgttgatctctttcctttgagaagctagcaaagttgtgcctctgcaatttcatttccttgttcatttgttctatactattaagcagtcgatctctttcttttgagaagctagcaaagttatggaggcatatatgtacaaaacacatagaagaaaaaaattaatagatgtaataattgatttatctca

SEQ ID NO: 13937 - DNA, 609 bp, Gossypium hirsutum
  Clone ID: GOSHI-09MAY01-C22036_1
attggagtttcacttgcacggaaaagggagacctacaatggattggccaacaaggatgataattgctttaggatctgcaaaaggacttgcatatcttcacgaggattgtaatcctaagatcattcatcgcgatattaaggcggctaatattcttttagatttcaagttcgaggctaaggttgccgatttcggacttgcaaagttcttttctgatgtcaacactcatgtatccacaagagtgatgggtacttttgggtatttggctcccgagtatgcttcgagcggaaaattgacggaaaaatcggatgttttctctttcggggtcatgctgttggagttgattagcggacacagaccggttggctcgtcttatgccgaggatagtttggtcgaatgggctaggccattactctcaagagcattagaagacggaactttcaacaatctcatcgatccgaggttacaaaaggaatatgaccacaacgagatggctcgtatggtcgcttgtgctgctgcttgtgttcgacattcaacacgaacgtcgaccacgaatgagccagatcgtacgagctttagaaggagaatcgtcgttatcggatctcaacgaag

SEQ ID NO: 13938 - DNA, 645 bp, Gossypium hirsutum
  unsure (1)..(645): unsure at all n locations
  Clone ID: AI725951.1
gagatgatggataaaaatgttgttttcaggttgctgattttggactggcaaagttctcttctgatgccaacactcatgtctctactagggtgatgggtacttttgggtatttggctccggagtatgcttcaagtggaaaactcacagacaagtcagatgttttctctttcggagtcatgcttttggaattgattactggacacagacctgttggctcttcttacagggaagacagtctggtggactgggttagttattaactttggtctatgattgtctatgcaattacacacaaacacgcataatatcatctgcatattcttctctgactctctgaaccagttccggaaaggaattctggatttacatttcataaattctttattaagtaaatctgatttggcattgcaggctaggccattgctcacacaagctatggaggatggaaactatgatagtctggctgatcctaaattacagaaggaatataaccacaatgaaatgactcgtatggttgcttgtgctgctgcttgtgtgcgacattcagcaagacgtcgtcnccggatgagccaggtaactggtgtagtaaattttctnttaaatgtcatttttagtattgaaggtctgctaagtctggttgatggt

SEQ ID NO: 13939 - DNA, 719 bp, Gossypium hirsutum
  Clone ID: GOSHI-09MAY01-C22306_1
cccacgcgtccgcaagcttcttcagatttcagcgctttgggtttgccaagaatgaggacgcctcatcatcttttcactctagctctcttcttcaccttcatctctgtttctgttgaagcccttaatgttggaatccaggccgctgataccgccatctctgtgagcaaagaatgcagtaggacatgtgagtcagagttctgttcagtgcctccatttttgaggtatggcaagtattgcggcctattgtacagtggatgccctggagagaaaccttgcgatggacttgatgcttgctgtatgaagcacgatgcctgcgttcaagctatgaacaatgactatctgagtcaaaagtgcagccaaagcttcataaagtgcatgaaggatttccagaaaggaggaggaaggagtttcaagggtaacaaatgccaagtcgatcaagtcgttgatgtcatctctgttgtcatgaaggctgccctgattgctggaggagtgcttcataaaccttagtctatttacccaacccaacactgtcagacaagacattcttctgcttctgcaatcctaagattgatgatggcatggcatccctcaattaaatcattcatcttcaaccatcctttaaccgctgtttctttttcctcaacatggcatttggagttgtaactatttgtttttctataacaaccagaaatttaagatagagtgcattccgtttcaat

SEQ ID NO: 13940 - DNA, 651 bp, Gossypium hirsutum
  Clone ID: GOSHI-09MAY01-C22296_1
aaagaacaccataattgtggtaaaatgtaccttaattacaagcaaaccatatttgaatattagccaactttatatattacacaaaagatcaacaccaaattacaaaatgtcaataataagaaaactgaatttctaacacaaagtattcccatcttgtttgctaacagaaaatgcactggtgaaagaaatgacacttaaacaccaccgggtttgctaacaccaccgggtttgctgctgctcccacctaaacacgaccgggtttgctgctgctcccaccaaaacacaaccaaccaccctgcttcatagatatatatttttaaatccctatcaagtcctatgtaagctgaaactaaatctgcaattcggctcacatttttttccaactatttgatatccatccgatcaacaagcgtaggcagtgcttgcgggtaacaaatctgactgcattctatagtgctgccattaggaccctttactcctaattaaagaatgaatgtaataatttaaatttttttaccattgctattaagactggctacctaatatgctttacatcaaccgacctcttacaaccaatacacatgagcaccaagcaaaaagcaggaataactgaaataaactgatgagcttgatggcaattgaaatagcaag

SEQ ID NO: 13941 - DNA, 607 bp, Gossypium hirsutum
  Clone ID: GOSHI-09MAY01-C22286_1
ccatcatcatcttcttcctcgacgctttctcttcccttggaagccctgcaacttctttaagtgtctcttcttcttctcccaactcgccggctatgttgttgatgctcggattcgattccttcaatccccatttctcaacctttcaactgttacaaatcggatacgcaatttcatgagagcaaatcacaagattatgatcaaagaaaagattagatcaagcaaaaagaagttttcaaagaattctgcaaagatttattcgggtcatacttgcttttctacaaagtacgcaatacctatttgaatacttgtgttttcgactttttaagatgagatgaagagagtgcttattttgtttaggtaggaagttatttctggtcaaatttgttataagttagatttgttattcagcttgcaattaagctttgagtgagattgtatcttagtgaatgagttatacttaaataatgttttactttttgagtaagactccgtttacataaagagtttccaaattgtgtatataaacttttgatgtccatttttatttaaaaaaaaaaaaaaataaaaaaaaatataaataataaaataaattatataaaaaaatatg

SEQ ID NO: 13942 - DNA, 581 bp, Gossypium hirsutum
  Clone ID: LIB3585-034-P1-K1-E7
aaagatgtgatgatgcctattcatagagctagttttaatgatgtttatttggtgtatgagttgatggatactgatttgcatcagattattaagtctcctcaacctctttctaatgatcattgcaagtacttcattttccagttactacgagggctgaagtacctgcactcggcgaacatccttcatcgagacttgaaacctgggaacctccttgttaatgctaattgtgacttgaagatatgcgatttcgggctggcacgaaccagtagaggcaacgagcaattcatgaccgagtatgttgtcactcgttggtaccgtgcaccggagctcctactctgttgtgataattacgggacttccattgatgtttggtcggtcggatgcattttcgctgagattcttggtcggaaacctatcttccccgggacggaatgcctcaaccagcttaagctaatcattaatgtcctcggaagccaacaagaggctgatcttgcatttattgataacccgaaagccagaaggtatatcaagtcacttccgtattcgaggggcatccaattttctcacttataccctcatgc

SEQ ID NO: 13943 - DNA, 365 bp, Gossypium hirsutum
  Clone ID: LIB3083-080-Q1-L1-B11
gttaaacatggccaccgtcttgattttctcatgttggtggttaataatattgtgtttcagcacttatatctgtgtctaaccttcggtgcgtgttttagttactacgagggctgaagtacctgcactcggcgaacatccttcatcgagacttgaaacctgggaacctccttgttaatgctaattgtgacttgaagatatgcgatttcgggctggcacgaaccattagaggcaacgagcaattcatgaccgagtatgttgtcactcgttggtaccgtgcaccggagctcctactctgttgtgataattacgggacttccattgatgtttggtcggtcggatgcattttcgctgagattcttggtcgg

SEQ ID NO: 13944 - DNA, 466 bp, Gossypium hirsutum
  Clone ID: GOSHI-09MAY01-C22216_1
gttttttttttttttttttttcttgctgggctgctcgaatagaatataaatattttattgaacgaacaaaagataggggggagcttcatttagttcatgcaaatctttatgtacattgtcaaatcttaaatccacacaaattttgaagtagacgattcaataatacaacatggcctctcttcatgttttgcaacatgacctgcggtactcccatcaacaaaatcacttctctactacatgccttaaagtgccatctcagcctgcaatgcagcaagttcatcttcctcagcagtgcgcttttgaggaataggacgagctggttgcctaccagcaggcacctgcactggagctgcaggagcagttgttgcaggctggagaagttgttcttccaactcagcaccttcaagttcttcaagtcctgcctccaattcatcctcgtcaatctccgctcctgcgccaataggag

SEQ ID NO: 13945 - DNA, 511 bp, Gossypium hirsutum
  Clone ID: GOSHI-09MAY01-C22206_1
cattgataaagaatcagattttctttattctttttaaaaattcccatggcagatattgcagcaatcggtatccaaaagctggggtttatgaagtttgtaattggtgtttgaatcaagaggagcattcaaaggaaaagtctcagaattcattgaattcttcagcttcatctaaaggcaaaaacgaagatgataataataacaagataaagggtgataatcaccatggagctggctttaaaggcaaccgaagaaataccaacagtttaaagcaacaacaattgatgaaaattcccatcaagaaacccaagttagaagagaaaatgaagcgaaaaaggatcataaagaatgcttatttagaagaaaagcttagaagaacaaagttagaagagatatcgaagaatggggtcattacaagacattttttcagaaacaaggtaagaagatataagcttttggatgaggtttcaagttaaaaacattaacacaattatgaagttgggttaaatgagtg

SEQ ID NO: 13946 - DNA, 1005 bp, Gossypium hirsutum
  Clone ID: GOSHI-09MAY01-C22226_1
cttgagactgctgcaatgaaggagtattacttcaaggcagataatccaaccaagtctgcatcttcaaacttgaagtatcgaaacccaaagtatctatcaatgctgaaccacttgcggttctatctgccacaagtataccccaagttagataagatcctctttcttgacgatgacattgttgtccagaatgacttgaccagattatggtctgtggatctacatgggaaggtaaatggtgcggtagaaacttgtggtgaaagctttcaccgctttgataagtatctaaacttctcaaatcctcatatttcacgaaactttgatcctaatgcttgcgggtgggcatatggaatgaatatgtttgatctcaaggagtggaaaaagagggatatcactggcatataccacaagtggcaaaatatgaatgaagatagagcattgtggaagcttgggacactccctcctgggttgattacattttacggtctcacacatccgcttgagaaatcatggcatgtacttggtcttggctacaatccaagtgtagacaaaaaagaaattgaacatgccgcagttatccactacaatggcaacatgaaaccctggctcgagctggcgatgaccaaatatcgatcatactggaccaaatacatcaagtatgatcatccctaccttcgcagctgcaatcttagtgagtaaacctgattaattaaagcatttcattttttttcctttttggctttactcccccccccccccccacattgattattcttctttgtaattcattaaattcatccccttgaggactcgcccattggaacgagttaactgtgtacgaatgttaacctgtgaaagacacactatgatcctttttttccccttttttggatgtaagttcaattttagacagaatatggaaaccgaatatggaaagtagtccactgattttttttcttcaataagggctcgtttttgcaagatttaatatgtatgagcatttatatt

SEQ ID NO: 13947 - DNA, 745 bp, Gossypium hirsutum
  Clone ID: GOSHI-09MAY01-C23556_1
gttattctcacacagcaaacctcaccactcccttgcacttaagctttaaataatccataaaaaataaataaaacccaccgaaaattttgaagctttagacctgttgctttcgaacaaaccccagaaaaaagatgcaagcttggttctcagggagcagtagtgtaggtgatgggcagggaaaagaaggatcatcgcttttagctgattggaactcttatgccgctgcaagagaatcggaagatggctctgcgtttgggttcgatcttgagtctgctatgaggtctgccaatgatactgtctctggtaccttcaacgtcgtttcgaaaggtgtgagagatattcccggaaacttccaatccgccacgagtagtgtcccttcaggaaaagcacttctctattttggtttatttctggcaagcggggtcttttttgttttcattgcttttaccatgtttctgccggtcatggtgatcatgccccaaaaatttgcaatatgctttactcttggatgtggctttatcatcgggtcattctttgctctaagaggcccacagaatcagttagctcacatgtcatcaaaagagaggcttccttttacactgggatttattggaagtatggtgggtaccatatatgtttccatggtgcgtcaccgctacattctttccgttctcttttctgtgttacacgtgcttgcacttgcttactacgctatctcttacttccctggtggatctgccgggct

SEQ ID NO: 13948 - DNA, 510 bp, Gossypium hirsutum
  Clone ID: GOSHI-09MAY01-C23576_1
ggaatgggtagtatcgagacattgtacgacagtttatcaagggtacagatgggctttctggggcttttgctgaatgcctttgtggaagcccaaacttatatcaggaaggaggagggaaaccatggaacagtgtcaactttatatgtgcacatgatggttttactttggctgatctagttacctataacaacaaacacaacttagcaaatggggaagacaacaatgatggagaaagtcataactatagctggaactgtggacacgtatatgaaattggcacggaggatagaatttgtccagcttgatggcttgaattggaaacactaccattgtcagtatccattagatacatgttatgatttacaaaccactccccccccccccccccccccagggctgcggaaatggaacaaaaaaaaagaaatataatgcaaatgtctgtttcagtaccttttcatttcaagttttagctgaccaaattcagaatttaaagaagtgcccatttgcttt

SEQ ID NO: 13949 - DNA, 1460 bp, Gossypium hirsutum
  Clone ID: GOSHI-09MAY01-C23516_1
aagagtgccaaggtcaggcagcaagcagctgatcttatttcaagaattgcagtggttatgaaacaatgtcaagaggaacaattgatgggccatctaggggttgttctatatgagtatctgggtgaggagtaccctgaagttttgggatctattttaggtgccctcaaggcaattgtcaatgtcattggtatgactaaaatgacccctccaatcaaggatttgcttccaaggttgacaccgattctgaaaaatagacatgtgaaggtccaggagaactgtattgatcttgttggccgtatcgctgatcgaggtgcagagtttgtaccagctagggagtggatgaggatttgttttgagcttcttgagatgcttaaagctcacaagaagggtattcgaagagctactgtcaatacctttggatatattgctaaagccattggcccacaagatgtcctggcaactctattgaacaatctcaaagtgcaggaacgccagaaccgtgtttgcacaactgtggctatcgcaattgttgctgaaacatgttcaccttttacagttttgccagcattgatgaatgagtaccgcgtgccagaacttaatcccccgcgtccggtcttgaagtctctttccttcctttttgagtatattggtgaaatgggaaaggattacatctatgctgtgactccattacttgaggatgctcttatggatagagatttggttcacaggcaaactgcagcttcagctgtcaagcacatggctttgggtgttgctgggttaggttgtgaggatgctttagtccacttgatgaactatgtctggcccaacatatttgagacttcacctcacgtaatcaatgctgtaatggaagccatcgaagggatgagggtagccttaggtgctgcaattgtgctgaactactgtctccagggactcttccatcctgctcgtaaggttaggggaagtgtattggaagatttataattcactttatattggatcccaagatgctctagttgcagcgtatcctattctagaggacgagcagagtagcgagcagaacaacatatacagtaggcccgagttaatgatgttcgtataaattgctgcggtggggggcagatatcacttttggcctgattttattggactttgaatgttctcctttactactgctgtaggtagttaaaaaattagaactcttaggcctataatgggattgtgacattgtttattagtattaattttggactgtgtgatgtaattgcatgctatgaaatgaaatgattatatggcaaaccaacaaaaaaaaacccaaaaaccgaccgtaaaatttttattcctcctatcagaagaggaattttttcttccacccctccaaaaataaattcaaagaggggggcggcccgtttaaagaatccaaactaacttccgcttccttgcgacatgatatctttttt

SEQ ID NO: 13950 - DNA, 510 bp, Gossypium hirsutum
  Clone ID: GOSHI-09MAY01-C23536_1
actcgtccgcccacgcgtccgcccacgcgcaacccaaaaaagaaaagaacgctcaaaggatttgcaacaatgggtctctcaaaggcttctctaatccttgttctcgtcgctgtttgtgctcttatgggttcagccgtagctgctgaagccccagcaccgagtcccacctcaggaaccgcctccatctccccctcattcgtctctgttttctttgccgctgtcacggctctgcttttcggctctactctcaggatctgaagggtgttggctattgatggtgtagagagggtgtttgatttctcatttatatagatttaatttttgggaggggtgaattttatatggagttttagtatatctaggagtccctatatatataaatatgcgagagtcgagagaggtagttttgttatctaccgcacagattattcatggtggatgatgtttggacttatttgtttcagtattattatggattgatatcatttgcattagtacgcaatctttggg

SEQ ID NO: 13951 - DNA, 414 bp, Gossypium hirsutum
  unsure (1)..(414): unsure at all n locations
  Clone ID: LIB3584-019-P1-K1-B2
cccacgcgtccgcccacgcgtccgcccacgcgtccgtgatgtttggacttatttgtttcagtatgattatggattgatatcatttgcattagtacgcaaaactacctctctcgactctcgcatatttatatatatagggactcctagatatactaaaactccatataaaattcacccctcccaaaaattaaatctatataaatgagaaatcaaacaccctctctacaccttangaaccgcctacatctcccactcattcagctgtgttttctttgccggtgtcaccgctctgcttttcggctctactctcaggatctgaaaggggttggctatcgatggtgtagagagggtgttttattctcatttatatagatttaatttttggggggggggactcttatatggagttttagt

SEQ ID NO: 13952 - DNA, 722 bp, Gossypium hirsutum
  Clone ID: GOSHI-09MAY01-C23496_1
ccaaaaagcggccccccgataaggatttgagttttttggagattgattttttttttatatttttttttttttttttagtttttttttgttttttaataaaaatagttatatccataaacatgtactatctctctgtttatttagatagtcacaatgtttagcatgaaagaaatgcaagttgtatgacattattattttgaaaatgttgaacacaacaagtgggcaatctcatgcgaccaggaggaaactagagcacatagtgaacagaaattaaaatcacaaccaaaaggctgttttatatattaatccaagattccagccttcttatagctctcaatggaatccacaagagtttcttccaatggccgataactccaccccagcctttgtaatttctctgaactaaccgtatcttcctcccctcccgcagtaaagcttttaggataattgtattgaggaaacatacttctcaacttatcaacaagatcacgtgccttgatcgtgtgagctgtgcatatgtaccttccttcagccgctggcttctcatacaccagaagcagtgcctgagctacatggcgcacatcaactatctttcgaattttgttttccagagagtcatattccccttttaaaagattaatgagaaccttgctactagcattgatggtggactgcagaagtggccccaatatcagtgtaggacaaacagtaacaacatcaag

SEQ ID NO: 13953 - DNA, 855 bp, Gossypium hirsutum
  Clone ID: GOSHI-09MAY01-C23406_2
ctttcgtataaattttgggaaaaatagagaaaaaattaaaaaggaaatagtagagtttcctacgaaaatcaagggcttgttttttgcaggattttctttttgtcgaccagagatttttggacggatcgccctggcagttgcttcggacgaaaccacccgcatatgcaatcactgtgacagggccataccttcttcaaatattgatttgcactatgctcattgctcccggaatcttgaaaaatgtaatgtttgtggtgatatggttccaataaggcatgctgaggagcatttcttaaacacccatgctccggtggcctgctccttgtgcagtgcgacaatggaacgtgaaattctacctatccataaaggtgaaaattgcccccagaggattgttacttgtgagttttgcgagtttcctttgcctgctattgatctggccgagcatcaggaggtatgtgggaaccggacagaactctgtcatctctgtaacagatacgttagactgagagaaagatataaccatgaaagtcgatgtaatggtattccagaagaccatgtcggatcttccaggaatgttaggccagttgaaagggagcaaggagctccgagaaggcagccgccagaatactcacggaaacgacttctattcaccgttgcaataagccgggattgctgttttattaggatcactttttttccataagacggcgggggccggtccggtgctttatccgagtagaggatgctcattggcttgtgtttatcaacctggagagcttacatatttcatatttgtatctcaagatattctatagcgtataccattgatactgtattaacacttaatttaaattt

SEQ ID NO: 13954 - DNA, 743 bp, Gossypium hirsutum
  Clone ID: GOSHI-09MAY01-C23406_1
ccttgttgggcaaatatcttcgagatttatctgaatttgagtaacatgaccatcaatcacaagaatgagccctagtaatttaggaaatagtgcatatttaacttgtgttcatctcactggatatgaaccgaacctatttctattttgtaaaacgcttcttgataaatcctgagatcgattgtgatgatgttttactgttttaacattgggcacatacgtctttattatctgaaaaccatatcggaatgtagctctttttttctgcattgtctgaagagagttgtaccatgtatgtgggtttaatttaatggattgggacctatgtttaggaatgttaggccagttgaaagggagcaaggagctcggagaaggcagccgcccgaatactcacggaaacgacttctattcaccattgcaatagccgggattgctgttttattaggatcactttttttccagaagacgatggagaccggtccagtagtttagccgagtagaggatgctcattggcttgtgtagatcagctggagagcttacatatttcatttctgtatctcagattatcctagagcgtataccatttttactgtattaacactcaattcagattctgataatctatggacaatcccatcgccatatttgctcctttccttctgaatttatgtacatgaaagatgacactgttgcctttcttttgtaattccaaattattttctcaataataatgctaaatgtaccg

SEQ ID NO: 13955 - DNA, 546 bp, Gossypium hirsutum
  Clone ID: LIB3825-007-Q1-N6-A9
agttagtcgcaaacttcttctctgttttttaaattttgaaatgaaaaaaattacattttgtgtcccaaactaagaaacagatatggcattggactgttagcatattatcccaatctgaatgaatttgatacagcaccaatagtactaatatatgctcttaggataatatgatagatacagataagtgacaaaacgttaaaaacgtagctctctagctgatttacataacgccccagtttgtatagtgtattctgctaatgcacctgactggcctccgccttcttttggaaaaaaagtgatccgaataaaacagcaatgccggttaccgcaatggtgaatataagtcgtttccgtgaatattcaggtggctgccttctcggagcaccttgttccctttcaggggccctcacattcctggaagattccacattgttttctgcaataccagtgcacctacttgcatggttatatctttctctcagtctaatgtatctgttacattgataacacatctctgtccggttcccacagacttcctgatgctca

SEQ ID NO: 13956 - DNA, 588 bp, Gossypium hirsutum
  Clone ID: GOSHI-09MAY01-C23776_1
tcgacctttcatctgcttcttcttctagggaaagggggagaaagacgcctcttcttagctcgaatccctccaaatctaaatctaaatccaagttcctctcctcaatctaattgcataccatactgaagttagagtaaccatgtacgttgaacatgccttctcgatatccgacgaggatatcatgatggacactccccacgccattaacaatcggcctccgtacaaggagatcggcctcgctgtcgctcttctcgtctttggcacccttgggatcatcctgggtattttcatggccgtcaacaaagtcggcggtgaccgcgcccatgggcttttctttgcaatactcggatccattttgttcattccaggcttctattatacaaggattgcatattatgcatttaagggatacaaaggcttctccttctccaacattccccctgtctagagcccttctccttcaacttctctgccctatgtacagatcctctttcatttatttactttcttttgaatgttttgttcctgcggactccacttcttttcttgacttcacttttgtatgttatttgtttcatagcgcaattc

SEQ ID NO: 13957 - DNA, 603 bp, Gossypium hirsutum
  Clone ID: GOSHI-09MAY01-C23766_1
cccgtccgaattgccagggccgacccgcgcgtccggttgatttcaataacttcttttgattccactgagcttcaacaaatcttcagaatttcgaattgaatccttttttttcttttataattcaccgaatcgtacggtgaaaaggagagaatatctgcgaaatggaatccactgtaacgaatccattgccgaactcgaattccgaccctgtcagaaggaagaagaaaaagaaaacatcagcagcggcggcgacggcgacgttgaagacgaatcagcagcggcagaaccaaaaccagagctacaatcacaccagatggaaatccgaggcgcagcaacaaatctattcttcgaagctgattcaagctttgagtcaagtcaatctcaacggtaaccattcttctccttcggctccgcgtcgtggacgagccgttcgtgaagctgctgatagagctttggctgtagcggctaaagggaggacgaggtggagccgtgctattttgacgagccgtgttaagctgaagtttaggaaggagaagggacagagaagtggatctgtttctgctgcgacggtgactggcgttatcggtagaaaccggtcgagga

SEQ ID NO: 13958 - DNA, 1319 bp, Gossypium hirsutum
  Clone ID: GOSHI-09MAY01-C23686_1
gcagggttccctggcacgttgaaggtgcaatttcattttcgtatttttcagtgtttagttatgtactgttatattccttttctgacatggagacacttctgaggcatatttcaggtggcaaacttctgttagagctcaaccgagtcctccgacctggtgggtacttcatttggtctgctactccagtttaccagaagcttcctgaagatgttggcatttggcaagagatgtctcgactaacaaaatcgatgtgctgggatctggtgactgtcaaaaaggacagattgaatgctgttggagctgcaatatatcaaaagccagcttccaacgactgctactacaaaaggtctaaaaatgcacctccactttgtgaagaatctgatgatcctaatgcagcctggaatgtatcccttcaggcatgcatgcataaagtgcctgaagattcaacagagcggggatccctttggcctgtgcaatggccagaacggttggaacaacctccatactggttgaattctcagatcggcgtttatggtaaggctgctcaggaggatttcactgcagactacaatcactggaaaactgttatctctgagtcgtatttgaaagggatgggaatcgactggtcttctgtgagaaatgtcatggatatgaaagctgtttatggagggtttgctgcagccctgaaagacttgaaagtctgggttatgaatgtagttccaatcgacggtgccgatacacttccagtaatctatgaacgtggattgtttggaatacatcacgattggtgtgaatcatttaatacatacccgagaacgtatgatgttcttcatgcagatcatctcttctccagtattcagaacaggtgcaagttggttgcggtaattgcagaagttgatcgaatcctgaggccagaagggaagctgattgtacgagacaaagccgaaacgataagcgcagtggagagcatggctaaatctctacaatgggagatccgaatgatttattcgaaagacggtgaaggattgctttgtgttcgcaagaaattctggcgtcccaccgtggaagaacctataaagcctgccattgtttgaacacgatgctaaacattactcgtgtgttttccacaattaggcataatattttacagattctttttcgattcacaagcatgttatagtctgtaatccattttcgcaagtgtaaaattatgtagtcgactacgttagactgaatcacaattttggtttcaatggtccttgatggaattaaagtagctactttcattaccaaaaaaaaaaaaaaaaagaaaaaaccac

SEQ ID NO: 13959 - DNA, 479 bp, Gossypium hirsutum
  unsure (1)..(479): unsure at all n locations
  Clone ID: LIB3145-034-Q1-K1-C2
cggaatnncccgggntcgagcccgacgccgtccgnngttccaatcgacgccctgctgatacanncttccagtattctaacgaaccgtggattggttcggaatacatggacgatttggtgtgaatcantttaataccataccccgagaggcatantgatgtgtcttcatgcacgatcactctcttctccacgtattcagaacacggtgcacagttggttaccgggtaattgcaagaagtttgatcgaatctctgagggccagaaagggaaagcttgatttgtacgaagaacaaaacnccgaaacgataaagtgcgggtggaagagcattggctataatctctacaatgtggagatccgaatgatttattcgaaagacggtgaaggattgctttgtgttcgcaagaaattctggcgtcccaccgtggaagaacctataaaggctgccattgtttgaacacgatgctaaacagtactcgtgt

SEQ ID NO: 13960 - DNA, 1021 bp, Gossypium hirsutum
  Clone ID: GOSHI-09MAY01-C23636_1
cggccgcgtgcccggaaattgtgaaagactagcaagaacgaacagaacttttcgcttgaaacccggcaatggtttctttgtcgacttggtgtcgatacttggttcacaagatcgagtactccttcactctcggctggaagagttataagagagggcaaatcagtgaccgggaattacaagatgcagtttggaaaaatgtgtttcagggaaaattgacttacttacactggagtaaaggagaggcaatggccccaactattggagaacaagggggtactcttctcgtacggaagattccatctgcagacccaggtcgagtttttgttggggatgtcattgtcatgaaggaccctgacgattctgataactatctggtcagaagattggctgccactgaaggatatgaaatggtgtctaaggatgaaaaagatgagccatttgttcttgaaaaggaccagtgctgggtattggctgacaatgaaaaattgaagcccaaggtattaaatgaagccaaggatagtcggttatttggtccagttcccatgactggcatagttggccgagttatatattgtctgcgaacagctgttgatcatggtcctgttcagaacagtcattaccgtatgcgaaaggattctccagtgttggaagtagagctggatgttgatgacatggtgaaaaatcacaaatcctaaactgtttacactttgaaagtgtgcctatttgtctttattacacctttttccctctgtgggcatcttttcagtttaacattgaaattaaggagagaataaagaaaaacaaagagggcatttaggttcatgtgttattcatgaggatggtagtttgccctttcaagatgtaaagcaattgggggaatttcatcatattatctttccatttgaaaaccacgaagggctgcctgacttatgttggattttgagtttggatcatattgaacaattgcttttatagtttctaaaaaaaaaaaaaaaaaaaaaaaaaaaaaaaaaaaaaaaaa

SEQ ID NO: 13961 - DNA, 542 bp, Gossypium hirsutum
  Clone ID: LIB3582-032-P1-K1-C12
ggaagagctataagagaggtctaatcagtgaccgggaattatatgatacagtttggaaaaatgtatttcaaggaaaattgacttacttacactggaataagggagaggcaatggccccaacaattggagaacaagcaagtactcttcttgttcgaaagattccaattgctgacccaaccattttgagagttgttattctcggcacagttccctaaagattcactacacttcttactgcacctgagaattatcttatggtttcataaccctggttgagttggcccattgcaaattgtgatgattccacttcaatcatcccaaggatctatgcgtgtagatgtttctgacctaacctctgtgaagggttttaaattttatttttatgcagtgttgtaaatatgcatgcacattaatcatatgaaggtatgcctatatgcaaatatgtgtgatgattaccataggtaaacagcacttggacatggcatcttcactcatgagtcacgagttgatgttgtccaagcagattttcttaggataacttt

SEQ ID NO: 13962 - DNA, 408 bp, Gossypium hirsutum
  unsure (1)..(408): unsure at all n locations
  Clone ID: LIB3147-033-Q1-K1-H11
gaaaaaagggccgancacgcgtacggaaggattcttcggtgttggatttttattttatgacganggcatggagaaagggtgacggtcctatacagaagacactttgaaagtccacctatttgtctttattacacctttttccctctgtgggcatcttttcagtttaacattgaaattaaggagagaataaagaaaaacatatagtgcatttaggttcatgtgttattcatgatgatggtagttagtccttacaagatgtaaagcaattgggggaatcgcaccattttttctttccatttgataaccacaaatggctgcctttcttattttggattttgagtttggatcatattagaacaattttttgttattgtttctagaccgaaagctttgcttatcttttgtgcg

SEQ ID NO: 13963 - DNA, 485 bp, Gossypium hirsutum
  Clone ID: GOSHI-09MAY01-C23186_1
caaattgttcaatggaactgaagggagatgctgctgagttgtgttgtgttctttttgctaatacaagaatcaggtccactatggctgcagctcgttgtgttgagcctctagtgtctctccttgtaactgaattcagtcctgctcatcactcagttgtccgtgcattagataaacttgtggatgatgaacaactggcagaactagttgctgcatatggtgctgtaatacctgttgtaggtcttcttgatggtaagaattacatgcttcatgaggctgtttcaagagctcttgtgaagttagggaaagacaggcctgcttgtaagatggaaatggtgaaagctggggtaattgaaagcgtacttgatatccttcatgaagcgccagatttcttatgtgctgcttttgtggaattgcttcggatactgacaaataatgctactatagctaaaggaccgtctgctgcaaaagtggttgagccccttttt

SEQ ID NO: 13964 - DNA, 823 bp, Gossypium hirsutum
  Clone ID: GOSHI-09MAY01-C23106_2
tttcttcttcctctgcttgtaaatatttgataaaattgcaactttgtttgccttattctttgggtaatcatggaggaaaccaattgggaaagcctgttgtttgagtttgactgtcccaatcttggaaatatcttacaaaatgaatcagaatcggtaactccaccaatctccacccactctcccgatgaaaaaccgatttggacatcctccattggtgagatcgagaagcttttaatggaggacgatcgttttgatgacaaggttgagactcaacctatccccaatgagtttttggcggatttattggttgattcatctcctagtggctgcggcgatgaggtcatcgatgatactgcttttgacaaacaaaaccagacccttttcaacgttgataatgatgatcccattgataagaaacagagaaggaaattgagaaatagagatgcagctgtgagatcaagggagaggaagaagatgtatgttaaggatctggagatgaagagtacgtatttagaaggggaatgtacgagactgaactgtttgcttcaatggtccattgcggagaatcaagctcttcgttttactttgaaccagcgttgtgcatttgatgcttcctcggccaagcaggagtctgctgtgctcttgttggaatccctgctgttgggttccctgctttggttcctgggcatcatgtgcctgttcaccctgccaaggttgcccaagtctcttctggaaaacgaggaaaaaagaggtcccgaaagagtggctcatagtaacttggtgggacagtcttttgcgaagactaggagatgcaaggcatcaa

SEQ ID NO: 13965 - DNA, 906 bp, Gossypium hirsutum
  Clone ID: GOSHI-09MAY01-C23106_1
ccccccccgcccccctcgcgtccggtttgtttgtatattctgatcggttcaatttcatgtgtcactcactttcctttcccatcttaaacatgctccctcctctgtaaatcctattagacgtcaatttcccctttcataaatctttgggttttcatggaggaaatcaattgggatacccttctgctcgaggttgacttacccgatttcgggaatatcttagataatgaaccggtaacggaacctcctcctcaaccttgttcaacccagaatcccgatgaagaaccggcggtgtcttcgtggatcggggcgatcgagaaggttttgatggaggatgataattttgatcctagggttgagactcaacctgtctccgatgatgatttcttggccgatttactggttgattcacctcctagtagcggcggcgatgtggctggcgtcgacggtgctgatttgcacaaacagagccagacccacaccgacgtcgataaagacgatcccattattaagaaacagagaaggcagttgagaaacagagatgcagctgtgagatcaagggagaggaagaagatgtatgtcaaggatcttgagatgaagagtaggtatttagaaggggaatgtagacgactgagccgtgtgcttcagtgcttcattgctgagaatcaagctcttcgtcttactttgcataagggttgtgcatttgatacatcctcgaccaagcaggagtctgccgtgctcttgttggaatccctgctgttgggttccctgctttggttcctgggcatcatgtgcctcttcaccctgccaatactgcccaggtctgttctggaggcagctccaatggcaaacgaggaaacacaaggtcccgaaagagtggctccaagaggggcagggagtaaccgggtc

SEQ ID NO: 13966 - DNA, 537 bp, Gossypium hirsutum
  Clone ID: LIB3829-035-Q1-K6-B1
cggacgcgtgggcggacgcgtgggttcaaataggtgtcatgtttgtagtattctagagtgcggcacaattatgactgtgtcagtcactgtgctttaccatcttaaacatgctccctcctctgccaatcctatgaacgcaattccccgttgacactaaatctttgggtttgcatggaggaaatgaattgggatacccttcatgctcgaggttgacttacccgattgcgggaatatcttagataatgaaccggtaacggaacctcctgctaaaccttgttcaacccacaatcccgatgaagaaccggtgtgtcttcgaggatcggggcgatcgagaaggttttgatggaggatgataatcttgatcctaggggtgagactcaacctgtctacgatgatgatttcttggccgatttactggttgattcacctcctaggagcggccgcgatgtcggctggcgtctacggcgctgatttgcacaaacagagccagacccacaccgacgtcgataaagacgatcccattattaagaaacagag

SEQ ID NO: 13967 - DNA, 492 bp, Gossypium hirsutum
  Clone ID: LIB3582-030-P1-K1-F5
cccacgcgtccgctctctttccttcccatcttaaacatgctccctcctttgtaaatcctattagactgcaatttcccctttcataatctttgggttttcatggaggaaatcaattgggatacccttctgctcgaggttgacttacccgatttcggggatatcttagataatgaaccggaaccggtaacggaacctcctcctcaaccttgttcgacccagaattccgatgaagaaccggcggtgtcttcgtggatcggggagatcgagaaggttttgatggaggatgataattttgatcatagggttgagactcaacctgtctccgatgatgatttcttggccgatttactggttgattcacctcctagtagcggcggcgatgtggctggcgtcgacggtgctgatttgcacaaacagagccagacccacaccgacgtcgataaagacgatcccattgctaagaaacagagaaggcagttgagaaacagagat

SEQ ID NO: 13968 - DNA, 373 bp, Gossypium hirsutum
  Clone ID: LIB3272-038-P1-K1-D6
gtcactctctttccttcccatcttaaacatgctccctcctttgtaaatcctattagacgtcaatttcccctttcataatctttgggttttcatggaggaaatcaattgggatacccttctgctcgaggttgacttacccgatttcggggatatcttagataatgaaccggaaccggtaacggaacctcctcctcaaccttgttcgacccagaatttcgatgaagaaccggcggtgtcttcgtggatcggggagatcgataagggagtgatctattgtggtttaaaaaccatagaggttgtcactcaacattgtggagctctatgctgagaaagttaacaacagggggttttgctccattgcacaggccgagtt

SEQ ID NO: 13969 - DNA, 682 bp, Gossypium hirsutum
  Clone ID: GOSHI-09MAY01-C23126_1
cccacgcgtccgcccacgcgtccgcccacgcgtccgcccacgcgtccgaagttatgccgatggggtttttgattcaaggtttaatcgttatatcaccgtaatggaagatcgccgtgtaagtaggacaaattcaaccacaacaattgtagcagtgccgcttgacgggaatatccaagaaccaaatgtattagtgagtggcaatgatttctatgctttccctcgattggactcgaaaggtgaaaggatggcatggattgaatggagtcatcctaacatgccatgggataaatcggagctctgggttggctatatttccgagaatggagacatacacaatcgtgtttgtgtagctggttatgatcctaaaatcgtggagtctcctactgagccgaagtggtcccctacaggagaactatttttcattacagatagaaaaaatggattttggaatctctataaatgggttgaatctaagaacgaggtgcttccactttatcctttgaatgctgagtttgcaagaccattatggatttttgggatgaattcttacgagttcgtcaagaacgaggctggaaaaaccttaattgcttgcacttataggcagaatgggaagtcgtatcttggaattttggatgatgttcagggttcattttcactgctcgatattcctttcacggatata

SEQ ID NO: 13970 - DNA, 480 bp, Gossypium hirsutum
  Clone ID: GOSHI-09MAY01-C23096_1
cccacgcgtccgcccacgcgtccgcccacgcgtccgcctgaagataattggtactgtgatggttgcaggcctgttgctactgggtccgctagttcccaagttcaagattctttgcctgatcatagaataataaacaatttgtacaatagattttcacccatggtaaattttggagaaggtttagactccatcgtaggtccttcaccgcttatgccatcaattcccaattttgtgggttactcatctcctagatttcctgctgtagatattcccgttgtttctccggcatctggagcaggggctcctactctgactggaaggcgatggttgcatcgccagattcaaaatcttcgttcaatcaataggatgaattttatggctggtaggactgatgggatattaagcgccaatatgggcactgatttcgtgaactctcacactgatcagagtacggaaacaacagttcaacaagctaggact

SEQ ID NO: 13971 - DNA, 1021 bp, Gossypium hirsutum
  Clone ID: GOSHI-09MAY01-C23046_1
ggaaatttggtgattctccacatgaagcaatcttgtcctaccggcgagctcttctccatcagtggaatcttgatgcagaaactactgcaaggattcaaaaacagtttgccatttttcttctgtattgtggaggtgaagcaagccccccaaacctccgctgccaaatcgacagttcgtttgtccctaggaataacataaaggaagctatactcctgttaatgatactcctctggaaagtatctttgaaaagaattgaatgggatccgtcaattttggatcatttgtcatttgctctctccatgtctggggatttgagagctttggctaaccaaatagaagaactgcttccaggggttattagccgcaaagagagatacaattttctagctctctgttattacggagcaggtgaggatttggttgctttgaatctattgcggaaattgttacagagtaatgaggatccacactgtgttccagcattgttaatggcatcaagaatttgtgggggaaaacctaatcttgcggaagaagggattaaatttgctcatagagctcttgaaagcctggatgaagaatgcagtgagttggaaggtactggtaaccttctattgggtctggctcgatcgacacattcaaaatcagccttatctgattctgagagggtgtccagacagtctgaggcccttcaggccttggaacgggcttggaaaattacaagtatgaaagaccctaacattctttactacctctgcctggaaaatgctgagcagagaaagttggaagctgcgctatattatgcaaaatatttgctaaaactagaaggtggttctaacattaaagggtggttgttgttggctcgcatattgtcagctcaaaaacgttttgtggatggtgaaatcgttctcaatgcagccttggaccaaactggcaaatgggatcagggagaattattgcgcaccaaggctaagcttcaaatgcacagggacagctcaagagtgcaatcgagacatatagtcag

SEQ ID NO: 13972 - DNA, 801 bp, Gossypium hirsutum
  Clone ID: GOSHI-09MAY01-C23066_1
ttctgatgcactgcgtctcgcctgctgcatagcattgcactgcgagggtggcattacgttgctttctcttatctcattctttgcgtctacatcatatctttcagtgcctgagccaagcgccgatcacctcttttccctgccatcaatccattccattgccttccatcctaaaacaaaacaaaaataaatggagtcttgtccttctataaaaaatatcctcctcctggattccgaggggaaccgtgttgctgtcaaatattattccgatgagtggcccaataacagtgttaaggaagcctttgagaagtctttattttcaaagactcaaaagaccaatgctcgaactgaagcggagatagcaatgttcgagagtcatatcattgtgtacaagtttgttcaagaccttcacttttttgttactggggctgaaaatgaaaatgagctcattctggtaactgttcttcaagggttttttgatgcagttggccttcttctaagagggactgtggacaagaaagaggcactggagaacttagatctcattttgttatgccttgatgagattgtcgacggcggcatcatcctagaaaccgatgcgaatgtcattgcggggaaggttgctagtcatagcatagatgcggctgctcctttatctgagcagacaataagtcaagcattggcaactgctcgggaacatttagcaagatctctcctcaagtgatgattacaaggggaaggagcaaagcaaaaagtttcgaattgttattatttctagctttttattattcttgtatttgtata

SEQ ID NO: 13973 - DNA, 666 bp, Gossypium hirsutum
  Clone ID: GOSHI-09MAY01-C23036_1
ctttctctcaaatgataaatctctttcggttcccgagtccaaatccaaagaaaatattccccacctttcctcaccatcacattcttccctcacagattcccccaaatcaaccaaattcactcgttccatatctccaatctatctctctgttctcttttgttttgttttcttcacttcctgcatcaaacatcttccgctgtctggcataactgaatccttgccgggaaaaatgatatcccggcggcaaccgggtgcagaggacctggtctcctctgacaatcccaatgcttggatttttgatgattatggtttgttagaagacattcctgtccctggtggtgatcttccctcacttgacccttcagccccaatctggtcatctccttcccttacttgctctactcctctcagtgttgaattcactgaatcgtttgggaattcagacaatcttaatgaaacaggctcccgaaaacggatgaggtctggatcatccagtgcatctggggccaaagcttgcagagaaaagatgcgaagggattactaaatgacaggttctaaaatgggttctatcctaaaacctgaaagtcttccaatggacaaggttgtaatatattgaagctgctcggatggttactcaattacgggatgaaggccaaaaactgaggg

SEQ ID NO: 13974 - DNA, 257 bp, Gossypium hirsutum
  Clone ID: LIB3083-095-Q1-L1-A3
tgcttatctccaatctatctctctgttgtggtttgttttgtttgctgcagtttctgcatcaaacatcttccgctgtctggcataactgaatcctcgccgggaaaaatgatatcccggcggcatcctgcttcggaggaccctgcttactctagacaatcctacagccatggcagcctacacagcctagtactgatacatacggccagactaatctagcccatcctaatccatatccccaacccacacagtctgtgtat

SEQ ID NO: 13975 - DNA, 904 bp, Gossypium hirsutum
  Clone ID: GOSHI-09MAY01-C23256_1
agagaacagaaacacgagagaaaagaatggggacggaaaaaggaacagcttatttattatcctcttttttcttctccattatcttaactattgtctgtgaacggaccgtcaaagctcagtctttgccgccggcgaagcacgatgggttcttgtacaccaaccaccgagttgactcggacacgattatgatcgaggctttcttcgatccggtctgtccccgatagcagagacgcatggcctcctctcaagcaagctattcatcactatggttctcgcgtttcgcttatagttcacctcctcccgctgccttaccacgactatgcattctctacttcccgggccttgcacattgtaaacctgctcaacccttctgccactttccgattgttggagtctttcttcgaatatcaggggaggttttacaatgcccaaacaagcaacaagtctagagatactgttgtggatgaaatcataaagcttgcagcagaaacagtcgggaactcctattattctgcaattgaatcaggttttaatgaccggaagacagatcttaaaacaagaatttctttcaagtatagtgcttcaagaggggtgtttggaacaccaactttctacatcaatggatttgcggtgcctgattccggctccgctattgattataagcaatggagaagcttcattgatccattgcttctggcacagagcagaaagagagacgatttgccgcacttatcgttatgaggattttagcttttccattcaagtcctatttgcttgatgcatctcagtgaaccctgtaatcataataataataatgcatcgtttatgcttgatgttctgtaatggctgccaaaggcttggatagtaaagtaaataaagaattaggtttgtgccagtttaattt

SEQ ID NO: 13976 - DNA, 636 bp, Gossypium hirsutum
  Clone ID: GOSHI-09MAY01-C98736_1
ccccgcgtccgctggtttcagggtttgatatttaacaagcaaatcagatgggacgctctagatgaacttgaagaagggttagagttcctaaaagagctcctgtgtcttttggaggcccggttttaagacgtgggatgccctttgttactttaagtaggagagttagtgaagtccagtacgttgaagtacttccaggtatctacttccttgcccaatttgccacggttgctaatatcgaaaagctaaaggccggaaatcagccgatgagtgactactggtttttctttggttacacgggttggggctggcaccaactgaatcaggagattagggaaggtgcttggactgtaagcgatgataatgagagcttagattggccgttgaattgagagtatttcgaatgtcaaaggtagttggacttgtacggacacaagggaaatggaaaaaaaggggaaacatttcttggctaagcttgtaaatatgagattttggtagttcactttctcttgtaacaaaatttgggattgtgtttttgaaattttagatttcatttttctacaaaggttttctaaatgatgctcccccatagtaatacccattatgcacgcccaataaatttaatgaaaatatctcatt

SEQ ID NO: 13977 - DNA, 567 bp, Gossypium hirsutum
  Clone ID: GOSHI-09MAY01-C98646_1
taggtgttggttgcccgagtaggaaatttggaatatatttagcaccagcaatgatccaagtacatagcatctgcattcttacaagtttcacgtgttctactaatacaatccccggctccagaccgagctggcatgttgcagcggattagcttacagagatcagtaacaaagaataaagaaatctgttattccagctaccctctgctgcccccaagtgaaatttacccattccataagagttaacgattgaactaaaacaggaaactgagaagtgcgaaataaacatcgaggaagccatcatcaaactgttttcataatctctgatgagcccgtagcaatgcgtccacgtgtcagcttggtattgtatgagctgcatatcgggcacttgtgtgccacaaaatggaaattaacctcggaattttccccacagtcattgcagagaatccaaaccctcctattctggtaaatttgaggcatccctgttgaagcaacatctcggtcaagtcgttcccacactcgggtcatatcacagaacgattttgagcaaacaggacatgaatactggga

SEQ ID NO: 13978 - DNA, 327 bp, Gossypium hirsutum
  Clone ID: LIB3828-023-Q6-N6-G11
gatccaaaacatagcatctgcattcttacaagtttcacgtgttctactaatacaatccccggctccagagcgagctggcatgttgcagcggattagcttacagagggtagctggaataataggtttctttattgcgaggtaccctctgctgccccaaagtgaaatttacccattccataagagttaacgattgaactaaaacaggaaactgagaagtgcgaaataaacatcgaggaagccatcatcaaactgttttcataatctctgatgagcccgtagcaatgcgtccacgtgtcagcttggtattgtatgagctgcatatcgggc

SEQ ID NO: 13979 - DNA, 593 bp, Gossypium hirsutum
  Clone ID: GOSHI-09MAY01-C98666_1
aaacaacactcaaaccatatattatataaaattacatccttccatcattgccaacccatcaaagcactacaaagaactatggttaacccccttgatgacagcatacatgaaaaaaaaggaccatacgtacatacatgcataaccacactaccccatataaaaggccattgaaaggggctttcaaagcaaatttgtttgcatgctcttttgcttatgcaatatattcaacatcaaagaaaagacgatacgcacaaacaaaagggcagaagaagaaagtgaagattgggacccaataaccacctaagcggcgtgcacttagccaccttttatgagggtcccttataataaccagtcttctcattcacactgctaaaaaaccccatcattcccaagcgtgagtgttactttctaaacccccaaggtgaagactaatgattcactcccctttattgggacataaatatactgctttctatagattttcaacccaaatcttactggtttttcctactcaaatcattgaagaaagactcacttggctcttcatttttgggtcctttgttggaagacgccaaaaatatggctacacatgc

SEQ ID NO: 13980 - DNA, 366 bp, Gossypium hirsutum
  unsure (1)..(366): unsure at all n locations
  Clone ID: uC-gsflnu33B036c04b1
gtnactagtagtgcgaatgagacgactggttattatggggtaccttcataaaagatggctaagtgcacgccgcttaggtggttattgggtcccaatcttcactttcttcttcttcccttttgtttgtgtgtatcgtctttcctttgatgttgaatatattgcataagcaaaagagcatgcaaacaaatttgctttgaaagcccctttcaatggccttttatatggggtagtgttgttatgcatgtatgtacgtatggtcctttttttcatgtatgctgtcatcaaggggtttaaccatagtttttttagtgctttgatgtgatgggaatgatgttatatcagtcatggatggatgtaattttatat

SEQ ID NO: 13981 - DNA, 845 bp, Gossypium hirsutum
  Clone ID: GOSHI-09MAY01-C98196_1
gtttctctccggccttctcttgcagctagtgccggtgttatttccaagttcttccatagctgtcccgataatgcttttcaggttgctctacacgggacttcatattcacttctgcagagattaggtgctgtaatgcgtaacggggcaaaactgtttgcagtaggcaccacttcttccttggttggcacagctgccacaaatgccttgattaatgcaaaaaaggccgtcgataagtcttctgttgatgaaatcgaaaacgttcccatattatccaccagtgttgcatacggtgtatatatggccatttctagcaacctcaggtaccaagtgctagccggtgtaatcgaacaacggatgttagaacctctgctacaccagcacaagtttttgttgagcacgatatgctttgccattcgaacaggcaacacatacttgggttcccttttgtgggtcgattatgctcgtttggttggtattcaaaaaccgcaggaagaggagaaccctgtattggtctcgtaattcaggaatcggaagctttgctcgtgcagcatgtactaaaggattcatcgtagacaaatccatgtccgaatcatcccggaacttacagttctatagtttgacattatatgcatatccaggttttttttttttcattttgccgttgttttcgtgccggtccgggattccgaatacccctaaccaatgggttaaattgaattttcttccctaagtttcagtagtatttagattttcatttttgctacattccatttttgtgtgaattgagaccaaaagggtctgtttcatttaagacaaaatagtaatacctttctcgtttggtccct

SEQ ID NO: 13982 - DNA, 1110 bp, Gossypium hirsutum
  Clone ID: GOSHI-09MAY01-C98176_1
cccactcgtccgcccacgcgtccggacgaaatggaaggaggaaaagagcaaggaatgttggtggtaacagggtggcgggctccccagagcccacgggagcaatggcaagccaagttcaaggaagtggagaagcgggctcagggctgggctagacaaacagtccatgccagtcgaggcggccgtggtaaccgccacaggcgccgttcagggtgcggctatgggtgctttaaggggcaccctcaccaaagatgtttcctcttcttttccgactcctcctcaggcttccctcaatcatcaggcaatggcttctctcaagcaagcccaggctctatcaggagctccctgggtacaagctcgtaattttgctgtgatgactggtgtcaatgctggcctagcttgtgttatgaaaagattgagagggaaggaggatgttcaatctagcatggtggcggcttttggttctggggccatgttttctctagtgagtggcatgggcggcccgaatcaggctgcaaatgcagtcacttctggactttttttcgcactcattcaaggcgtgcttttccagttcggacaaaagttatcacaaccagctgtcgaggacatgtactattcccgaacaagatccatgttaaatagtctcgggctccagaactacgagaagaatttcaagaaaggcttgttaactgataacacattgcctttgctcacggatagtgcacttagagatgtgaaaatcccacccggaccgaggctccttattctcgatcatgttcaaagttttagctcccccttctaagaagggtaattatgcctgtcgaacttgatctcactttcatcaggtttgtcgtctctagagccccaaaattgagagagaagtgaggaacccgtgggtgaagtttgatcatcaaagtcagttcatcataaggggcgttttcatatatctcggaaactacagagaaggtgtggttttttgttttgttttcattgaaatgaaattgtttttgtcattgttttgatattcttccatgctaaacataggatgatatattcaagagcttgaatgcaacaattttgatatttgcatatagggataaatacttatatccc

SEQ ID NO: 13983 - DNA, 871 bp, Gossypium hirsutum
  Clone ID: GOSHI-09MAY01-C98216_1
cagtagctgcctacggaaaagtttcgttagggcatcacaagatacttgggcactttttgagagggaagaaatggaacccatcgtagattctgacatgatgagcgcgatttgcttccttacaggcgtttgcagtggctcgatttgtgttattgtggtggccgcttggactgctaaagtccaccaaccattcactgccaccatctccctccttgcattcttcattggatacctcatgacgaggatcgcaatggcattgccccatgcatgtgtgagctgttactacgtctgctatgctgaaaatcccgagaaccgattgtttgataaaacaataaaagaacgtctggagttgattaaggctggtcgggatgtggtggtgccgacacctcgtgttccccgtcgatttacgagatagccactgccggtgagaggtaaaaagagacaaaagtctacgattttcctacacatgtatatacagaaattatgtaggaaaatgggggccatacttccaaaatttagcaggcaatggtcagtttcaatgggggtggcatggagactcaaataaggcctactctctgaggtaaaaatcaatccagggtggccctggtggctggctggtgacgaaaggcgaattttgaatgtaaaaagcttaaccatcattggagtgtggagagcccactgagattccaacctgcaacgctacaatgacaatgcaacttttttattttcgtcattttcttggttgtatttataatgataataataataattttttttctgcacatacgtttaggataccacgttaaaaatgctccaattaatttattactttcccacccaccattatttaattgaattttactactattctatc

SEQ ID NO: 13984 - DNA, 644 bp, Gossypium hirsutum
  Clone ID: GOSHI-09MAY01-C99926_1
cggcgcgtgggctccatttcattttttattttatcttttttctttgttggaactcaatagtattgatttctttcatggcgaaaggccggcgactgtccaccagcagaagcgaacggtacctcgggagtttcggttacggtcacaaccaaggggaaaccgtcacggacgaaacggaactcggcgaggatgatgtctggtccatggttgataccgtctcagaccgacccgaccagggtgacggcaatccgcggagcgagtggactacacgcgtcgagcatgagagtaatgggaatgggcacctgggccgccgccgaatccctcgagatgagcgccacgtgggcgggttgtctttggctttcgaggattcttcttcgaccaagcctaggatcgtgcaccagtttcgcggccacgacaaggtggcagccgctgcttcgccacgtggacacaagatggccacttcagcgcccgtgaacgtgcctgactggagtaagatttacagagtggactcggtggagtctatacatgactcggatgatggtgagtcggaggagatgatgccgccgcatgagtacttagcacgtgagtacgctcggagtaagaaatctggtggggcgtcggtgtttgaaggcgttggtcgcacgctc

SEQ ID NO: 13985 - DNA, 718 bp, Gossypium hirsutum
  Clone ID: GOSHI-09MAY01-C99856_1
acagcaaagggtacttgctttgggagaatcagatgtttctgggatgggggaggctgttcttgaaaaatagtgttggcaagcatgaataccttggtgagtacactggggaactgatttcacatagggaagcggataaacgaggtaaggggggggggggcgtgaaaattcttcatttctcttcaacctgaatgatcagtttgttcttgatgcttatcgaaagggtgacaagttgaagtttgcgaatcattctcctgatcctaattgctatgcaaaggtcattatggttgctggggatccccgggtgggaatatttgcgaaagaacgaattaatgctggagaggaacttttctatgactatcgttatgagcctgacagagctcctgcatgggcaagaaagcccgaggcatctggttccaaaaaagaggaagttgctccttcaagcggacgtgccaagaagcttgcttaacccaacctttcatttaaatcctaaattcaaaattcttttgccattctttcccaggtagaaggatcattctcattctccttgatagatgataggagaggttaatattccccccttttgttgggcattccattgtcatctccccctaaaacttatttgttttttttttaaaaaaaatgctttatttcaatctagactctgttcccttgaactcgggaaaaaacaaagaacccgccccttaccatctttcaatgg

SEQ ID NO: 13986 - DNA, 620 bp, Gossypium hirsutum
  Clone ID: GOSHI-09MAY01-C99866_1
taaggtgggggatgttaattttgataatgagaaatcaaaaagtgcggtttgaatttcggtgccatttcaagcgccgcaggaagtgcacttttttaatgaggaagccgagacgaacatgttgctaatgagtcctaaaaccgttgtggaagcctcatacaacagggcttcatcagcggggtgtcgagactgggaagattgttactgaatggaagttcgggaaagaggggggcggaaattacaatgagggatattgctaatgatagcaaaggagcacaattggatccatcgggggcaacatttttaggactcgacgataatcggctttgcaggtgggatatgcgagatcgaaacgggatagttcagaatcttgctactagtaccccagttttaaattggacacaagggcatcagttttcaagagggactaactttcaatgctttgcaacaacaggggatggttctattgttgtagggtcacttgatgggaagattaggctatattcaatcacttctatgagacaggcaaagacaggtttcccgggtcttggttcgcctatcactcatgtcgatgttaccttcgatgggaaatggatattgggcacaactgatacatatctgat

SEQ ID NO: 13987 - DNA, 720 bp, Gossypium hirsutum
  Clone ID: GOSHI-09MAY01-C99816_1
ttttcgcgtccggccatttgagccgacacttcactaaaataaccatccttcattaacagcatctctttttcttcatacatatgagagaaggagcaacagcatcagaaaagaagtagcggttcatcgtcgaggaagagtagtagtagtgtatgtgatggagaatcaggttgtttcgccaccccatgtggatgcatttcgaccgtccctcggcttccctcttggcactgccctcctcttaatcatcattttcagcttgagtggtatcttctcctgctgctaccactgggacaagctcagatcactccgccgatctcccgccgaccgcaccgatccccatcccgatatcgaagcttctccctccaaacccatgcctgatttcttggatttaaagaaaaaccaaagccaaagcctacctgtattaatgccaggagatgagatcccaaaattcatagcattaccatgtccgtgtcagcctccacggcaagacaaggttgaagtgaaaattgaaaagccacccaagccagcgcgttgcccagtaccttttggattggctatttgaccacttgttgtacataatttggagaaattagattaattttcccttttccccatgagtgtttaccagtaaaagaaaaaggaagacgtgagtttgtgtgtacaatttcatgccatcattcccccaaggaagaagattccaattgtgtttgtcagttggaaaat

SEQ ID NO: 13988 - DNA, 338 bp, Gossypium hirsutum
  Clone ID: GOSHI-09MAY01-C99516_1
cccggtcgacccagcttttgcaccactaacaggtggcttccccatgtttaaattgtcatcttcttgtaatcctccccaaatcctcccctgcttgtcctaattgcaagtatgtccactctttccctgcattgcaacctaccaagtatcccaataccttaagtctcttaaactaacacactcgtgtcaaactcgggtttagctcagttggttcatataactatgacccgttttcgttttcctcgagttatgacttcttaagaaaatcatttggaagaacttgtaatgttttgttcaatgtactcaataacagtaaatataatctttctttttcatgtgat

SEQ ID NO: 13989 - DNA, 729 bp, Gossypium hirsutum
  Clone ID: GOSHI-09MAY01-C99626_1
gcgttcttacagaactaagtgtctgcaccagtgtaatcttgggagggactgatgacttatctgaggaagtgtcaagtggcgataccttgagctctagcaggattcatggtgaggactcgcttcctagtaaggagttaaggagaagacagatcaagctctcagaccctatcaaccaattgtcattggaaaactcggtgagggaaaatcttcaaacatgttctgcccttcatggggagtcatttaattctgctatggctagaatgcatcctgccgctttcacacaattgaaacaggcactgaagatgccgtaggctgcccctgatatagttttgtatcaaccgaggtcccttttttttctgggctattttgtttcaacttttccaaagattgagaaaactattttggtgtttttcttgaggtgggtttggtggtttttggattcttttataaatttctgctatggctgcctgcatggtgagttgttgatttcttcgtgttgttaaaatttgcctcatttatcacgtggagcaacaattaaactctgtaaatagaactggaaatgaaaagagaaggggcgggggaaattaaatttctgatactgagggcctcaatgagtttgaatttcattaagcattttttaatatatattacagttgtaaaaataggaaaacgcatatttgtattatgaagtatgtaaggtatttatagtgggttttattggagaccttt

SEQ ID NO: 13990 - DNA, 646 bp, Gossypium hirsutum
  Clone ID: GOSHI-09MAY01-C99056_1
cgtcggacatttcattcgttacttcacaataaatgtcgaaaaacacaagtccagatgaaaaagaagctgcttttgcacttgctgctctcatggagatccctttccaatacaaggcagtgatggaacttggtattcttggacaccgaactgggaaagcaaagaaagtggttccacgtcctccaccagctccgtaccgtgctgctgctcggtcggagcctgcaccgaccaccgtctcatcatcgcccgcattagatgatcgaacccaggcatgcccaatttgccttacgagtgctaaggacttggcctttggttgtggacatatgacttgtagagaatgtgggtcaagggtgtcaaactgtccgatatgccgtcaaaggattaccaatcgtctgaggttgtttgcttgatttccttatttacgactttttgtacatattctgtgaagggaaatttttttatgtgtttaacataactctcaatatcatgattccgattcgagtttcactagtaatcttagtaagtgatctgtgagaaagactttcatgtattccctcgctctatgtaccaaatgtaacttagtgctaaggtaatttaaacctattaaattgtacaaattaaaatgtgaagaaaaagactaggtttgaat

SEQ ID NO: 13991 - DNA, 566 bp, Gossypium hirsutum
  Clone ID: GOSHI-09MAY01-C99376_1
tgtcgtcccaagttcagttcatggacagtcaacaaaactaagtttttgaaaaagctttggctgtttatgccaaggttcacacctgaccgttgggacaatgttgccaaggctgtcggagggaaaacggcggaggaagtcaagaggcactatgaactgcttgtgaaacatgtgaagcaaattgtgtctggtaaagtgcctttccctaactataggaccgctggtggcagcaacgcccgaggatggaaaatcagaagctgaattaatgaagatgaccaatggactcatgacctgtcatcatgccccaccatttaccaccaatgatccccattattatgctgcttccctcctaattatagaataatcccagaagtagtgaaatctaagttttgttatgctcttatatacatatgcatgtatgtcagccctcccgcattaagaagaggcacaaaagctgtgatccccacttcctctatgttctctttttgttgttgttgtcgtgaaagaacaaaaatatcttatttggaagatatattaattttatatatttaaaagcgaaattaatgtag

SEQ ID NO: 13992 - DNA, 1061 bp, Gossypium hirsutum
  Clone ID: GOSHI-09MAY01-C94976_1
gaacctataaagctgatcttcagaaactaaagaaggagaaggaagaggaggagattaggcgactcgaagcattgaagatggagagacaaaagagaattgctgcaagaggcagttccgttccagctcagtcatccgtggcttcacaaagcaagaaacaattgccatcaaaactttctccaagtactcataagggatcaaagtttactgatggtgagcctggaccatcatcgccgctacaaagatccatcaagcctgcttctgtgggatcgccctcctctctctatgccccccaaccgagtaaattgaatggtggaactccgtcccgtggaaatagattaagccactcagtttcatcattgctggaaccaaagaaagacattggcggtgtaactcctgattcaaaggcatctatggcaaggattaggaggttatcagagccaaaaacaagtagcagtccacttgtttcttcagtgaaggcacggcactctgaaccaaatcgcgaaccaaagttctggagttcctgaaagcaaaaaaatatcagcaattatgaaccatgtttcgcgtccgattgcttctctgcccgagctcaaaattaaaacaactaaagatcccaatgttacggacaacaaatcgggaggaaatggaatgactcagaaggtcagtggaagtacttcttcgaccattgatgttgctgaaccaagtaggaacacggacaaaggttcacttaatattgatggggacgacggtacagtaattgagaaaaccgttgtgatgcttgaatccattcccacggtaaattcatcagaagcaacgacactagaacagaaggagaacaatggcatctttaaaatcgggagggaaactgagatggtgtcagattatgctgccattcgtgcacctgtttcttcatcgaatcttgatgcagttgataaagaacatcagatacaaccaaaaccgcaggcttatgagattcaaaagggaaatgtaagtaacaccgacaaggaattgtcaaaatttacgagcacatgtgttactgaacaacagtatcaagcccctttagc

SEQ ID NO: 13993 - DNA, 625 bp, Gossypium hirsutum
  Clone ID: GOSHI-09MAY01-C94506_1
attttgtttagttttatgaattttttatgatatgggtttctttaattttagggtaaatttaaggtttttatctacgggtaccttaaatttgtgaagataataaagagggttcatttgtgatttaaaaaaaaaattaagggtttcttggagccatttgtgatggatgcggaaacatctgatacaatgaaccttgatttgaatctgggtccggcgcctgagaccgggtccgggtcgttgttgaatgaaggtgtgaatttgaatgccttagtcgagaacccgttcgataggatccgggctgcggttaggcgtaggagatggagatggcatcaggttcaacttcctgctgcaactcagagcttgtcggttgaatttgatcaatttacgggcaattctgacggtccgaatacattacaagcaggtgagggtagcgttacggctgaggaaagaacgagtgatgtgccgaaagtgtgtgaaaccaccaatgggtttttggaagatgaggttctagaagataaaaaggatgttattgagaagggtgttagcaatgatgggagttttttcgattgtaatatatgcttagatttggctcgggaacctgttgtaacttgttgcggtcacttgtttt

SEQ ID NO: 13994 - DNA, 954 bp, Gossypium hirsutum
  Clone ID: GOSHI-09MAY01-C94406_1
cgagcctccctcttctcctctttgactttctttttattctcttttctagcagctttcttgtcaacttgtgccgaactgtcagataacggacccttaccttctgagccactcaagttctcttcatccccatctgtttcagaaccagatggggactcagattcagactcgctctcctgagaattagaatggccagatagatttcccatagacccttctacaggtcttgtgttagtatccccttgctgcttctccattggtgaagattgatctttagggagagcctcctttagtcctgtaattgtcttataatataagtctccggtgtccttgccactggttatccgtattacatcctcctcgacattcttgacatgatccaatgtcttgggaatatatgtctgaagaaaaggaacaaaataaccatgaagttaatattcaccaaaagaatttagacaaccggatcttctatcttttattgaaagtatgatgcattccctttcagaatacacatttaacccctcaaaaccgaaattttcaatctgtaatatagcccagtttgagaaatataataacttgatttttgatacatccaaaaagcaaattagaacatttatcactccttggagatgaacaaaatcttgatattgtaatgatttaactgcaaaaagcagatcataaattctcaaaatatcctgtatgcaaacagaggagagcttctagagcaagcattaatagctgaagacactacagaaagtcttttgtggacttcaatgtcgaatgacattaaaagaatcttagcagaagatctaaaaaaagctggtaataaactgaagcaggagggctgacataaagccctttgttatgaacaggaggaacttagatacgctccatggaacagtaggctttattagattatctttcaacaaacctgaacgaacacagaatctgcatttc

SEQ ID NO: 13995 - DNA, 883 bp, Gossypium hirsutum
  Clone ID: GOSHI-09MAY01-C94756_1
cgaatatgtcgagctcggctgactctgagaggaagaagcggatcgctataatcgtggtctcctctttcctcttggtggccgtagtggtggcggtgacagtcggggttaccatccaagaagaggacagcgactacgacgacggaaccacagatgggaataaacacgctcaggttacttcctccaagaaggctatcaaaatgatttgtcaaccaaccactttcaagaaaacatgtgaagagcagctccaacatgaagctgggaacaagaccgatgttaaagacctgattcaagcggcgtttaaggcggccatgaagtacgtggagcaagctcaggcgaattccacccttttgagggatctggagataagtatgaagggactagaagtgctttagatgcctgcaagattttgttgagttctaccatgagcgaatttaacaagtctacttgaacttgttgacaagatagaagttaatacggtgaataaattgttgggtgatatgaagatttggttgagtgctaccattagtaaccaacaagcttgtatagatgggttcgaaaaaaccaaatcaaactcggaagctggggagaaaatgaagaagttcttgaacatcacgatgcaactcagtaggaatggtcttgccatctcctgtgagttatcggagcaacttaaacaggtggagcttgccggactgtttgaacgtcgccgtgttctccaagacgaagatcaacttccggttgtcggccattctgattggacttcttttttagaacgaaacaaggaatggaatcgtagccgtcttctccaagacgaagatggacttccggttattggccattccgactggacatcctttatagaacgaaacaaggaatggaatcgttg

SEQ ID NO: 13996 - DNA, 840 bp, Gossypium hirsutum
  Clone ID: GOSHI-09MAY01-C94716_1
cgatacgagagccatagccaagcccaagtttcaaatggaggctcggagattggccattctctattctcatctttgccccttccgttcggcttccgttccatccctctcctccatcgtttctccttcctcttgcgctcctcagagcaaggaaacctttccacacgactgcgttttctgtcaaattattcgcggtgattccccggctttcaagctgtatgaagatgatatgtgcttgtgtatattggataccagacctttgagtcctgggcactctcttattatcccaaagtctcattttccttccctggacacaactccgccatctgagcgttcaggtggtagctgcgatgtgttcaaaagtgccttttattagcaatgcaatcatcaaagttactggtgctgattcattcaacttgttggttaacaatggtgtagctgctggtcaagttatatttcatacacatattcacataatcccccgtaaagcaggtgattgcttgtggacttctgagagtttgcatcggcggaccctaaaggtagaccaggaaacgtcgggtcttgcgaatcgagttcgagaattgctgctaaacatttctgaagagaacaaggatcaagtgtctactctgtcttgaaacttttgggggatcatttacatatatacagctttagctttagcttatgtaccatagaagtagatagttcattctttcaagaatctcgtcggtccttcgcaatggtgtgattttgcttgttcaagctggtatggaagattgtttcactatttaaaatgtattaaaattttaaagaacattttggtaataaattttaaatttaaccagt

SEQ ID NO: 13997 - DNA, 438 bp, Gossypium hirsutum
  Clone ID: GOSHI-09MAY01-C94736_2
gtttgctgtgctattatcaccttgccttcttccattcaagcccagtcctcttccccaacaagcgacggagggaattcgatagaccaagggattgcatgcatgttgatggtggtagcattgttgctcacttacctcattcatgctgctgatttctgctttagcttttgagcttccaattggaaaaatagggttttggacatgtgatgggatgatgaagctggcttctttattttattttattttagttaaagctaagggttttttttttgagggttgatgtttctttcttcaatctgatttgaggtctaaatgatttgtaaataagagcattatgtgattttagtcgaaaattattttgttcgagcttgataatctcattagcttgtcgatttttttttcagtgttatcaatattcaatctacgttcatttttctatat

SEQ ID NO: 13998 - DNA, 608 bp, Gossypium hirsutum
  Clone ID: GOSHI-09MAY01-C94736_1
cgggtcgacctcgcgtccgccttcaccccccaaaaaaaaaaatactctctagtttattacctctctctctgcgaggctcttttgagccattgcatgagattgattatctttaaacacaaaaaaaaactctaaagcttttcttcacaccggcagagagagagagaaagagagatcaagcattttatatacaaatagtttttaaaagcaaaaggaagaataatggcagtagttcccatgggttgtttagtcgttatattcgttgctattgtttgctgtgctattatcaccttgcctgcttccattcaagcccagtcctcttccccaacaagcgacggagggaattcgatagaccaagggattgcatgcatgttgatggtggtggcattgttgctcacttacctcattcatgctattggaaaaatagggttttgtgctggcttctattttttaatttaattattttattttagttaaagctaagggtatttttttttgagggttgatgtgtttctttcttcaatctgatttgaggactaaatgatttgtaaataagagcctcatctgccctcagtcgaaaattattttgttcgagcttgataatctcaaaa

SEQ ID NO: 13999 - DNA, 587 bp, Gossypium hirsutum
  Clone ID: GOSHI-09MAY01-C94166_1
ctttatgttaatcttagcatctaataaaacggtgatcactgtcttgttgtaactcccatcactcatttattttaataatgtatgtggattctcttttgtaggcttaggagctcattgtggcttcaatttaagccccaccatattgctgccggagctgcttatctcgcagccaagtttctaaatttcgatcttgcttcttaccatgatatctggctagaatttcaaacaactccagctattctccaagatgtttcacagcagttgatggagctgttctaaaaggataacgagggtagatctacgattcagatcagattcatcgttggcttagggttcttagttatatatatgaatgaaagattggttgtttaatgatggtgaaggtggtatgtgcagaggctgaagaaaattgttatattaggatgggcggagaatcaagagcgctaatatactactagtatgagaagtgattaaatgggattttataggtttataaattcatggcctcttgactctagctgtatctatgtgaatgtcatgatccatcccaactactttttatgcaatggaatatcattatttacttg

SEQ ID NO: 14000 - DNA, 378 bp, Gossypium hirsutum
  Clone ID: uC-gsflnu33B050a10b1
cttacgcatccagggaaatgcggaacttgatgagcagcgttcatatgcttcacttacatcctttgtcacacaaacaaggcctttcacaatcagccttgtggaacctggcgttaaacttgcacagcgaacaggctgaagagctcatggacgcttggatttaagccccgccatatcgctttcggagctggttatctcgcagccaagagacttaatttagagcttggttcttaccatgatacctggctagagttctaaacaactccggctgttttccaagatgtttcacagcagttgatggagctgttctaagcggataacgagggcggatctacgattcagatcagattcatcgttggcttagggttcttagctttatat

SEQ ID NO: 14001 - DNA, 681 bp, Gossypium hirsutum
  Clone ID: GOSHI-09MAY01-C94016_1
ttccctctctggagtctgacgaatggcggatcgggagtggttgtgacccaaagagtaccccatggtcgtatcacaatggtggatcgtggccaacactattgtggcagttcacattggcctgtataaaaatggggaagccagaattggcacaaaaagcagttgctttggtagaggaaaggctagcagtggatcagtggcctgaatactatgacacaagaagtggaaggttcataggcaaacaatcccggctctaccagacatggacagttgccagtttccttacctcaaagatgctattgcagaatccggagaaggcatcccttttattctgggaccggcactacgagcttctggagacgtgtgtttgcgggcttagcaaaaatggtcgaaggaagtgttcacgccttggtcctagatcgtaatgacggttcattaattactttgggtgggtaggatgggatgggaaataataataagttcggatggaagggtagtcaagtgctggatgagacatggaggtgactgactaataatttttaagtaccaacagccatcattcatgtaatatacttgtttgttgcatcattcattgactgactttaactcaatggctcaattttgggggagccataaggttctaagcctgaataattgaacatatgattccatttttcttcagat

SEQ ID NO: 14002 - DNA, 1090 bp, Gossypium hirsutum
  Clone ID: GOSHI-09MAY01-C94356_1
aacagaaaaaagatcatatagttttattgccaaaaacaaaatgatgaatgaactagttcttacacactgctctctacacacttttttaatcctttgttttttacaacctaaattatcagcatttgcaagcacctaaatgttgctctaattttaaccatttttcttttaaaaaaaattgattaaaaaaatctggatatatatggccatcaatgcaaaaacaaagctccctggaaagagaagcagctaaataataatgtagtgatgctatccctttcacttcccaagattttgcaagaagtcttcttcaacccgcaaccttgtttgcttggatctgaaaaaaagcaaatgcaccaaggaaagcgggagttaaaacagttgaagacccattttgagcttgttttgtttccatttaggcaacttgtaaaattcaacttttttcatcccgaacttctccttgaactcggtggctgataggtaagtctctcgtttggtcacgtctatatcggtgacgggatctgttgatgatgttgtaagacgttcgtaagggtgtatcggaaggccttcctcgtcttcggtctcaccttctttcatatcttcttgtatagtgagggattctagtctgctgctcatggaattctcctttgtgttaggctctggtgatgttgtcttggttgctgctgggctcgccgccttcttcacaattctaggcatgagagtctctcgagctgatgggcgatcaaaactttcagtaagagctgctatagctgcagccttcgtccctgaatctggagtcccggatttcgggtagacttttctaaccataggaggtggagtagaaaggttcctactactaggattctcgaatctagatgcaagtgcattgaaagcaggcgacctgcccctcacacgaggtcggtcaggactgaaggacacacttctcgaacgttgaggtttttctggtgcaccactagaccttcctccaatcgatgcaatccctctccgcttcggtttatcggttattggtggtacccccgttttcattatagtaagcttcctttgaaatgagttccacttgcatattggactatgc

SEQ ID NO: 14003 - DNA, 684 bp, Gossypium hirsutum
  Clone ID: GOSHI-09MAY01-C94346_1
gtaaaggtcgacgcgttaatcaacagtaatgagagaatatggaagagagataagcaatatcttttcaacagatgatgctaggaaaatcctccgtattcctttagcacgcacacctcacgatgatctcttggtctggggaggagagtattcaggtgagttttcggtccgcagcgcctataaactattacaaactttggaggaaattcctagagcttacgctttacaaatcggctatacgaatttctacaaaaaaactctggctcctaaatctaccaaacaaaattaaggttacaatatggagaatctcatggaattatctgccgacgagggctaatatgcagcaccatcagattgtcagtaatacaaattaccctcggtgtggtgaaagagctgacatagtcgaccatgtttttcgtgaatgtcctggatttttgagcagttctccccgtaccagaggcgcatcttcagttgtggactgtgggctatcataaatctacctcaggggttgtggtcagaaatgaagaagggcttgtcctattttcctgctcagagatccatcacggggtattttctgcttttgcaactgacgccgtagcgtgtaggaaagcggtccaagtaggggtagaacaacaatggcagaagatgataatcgaaggcgactcctcacgataatcggacgctggg

SEQ ID NO: 14004 - DNA, 884 bp, Gossypium hirsutum
  Clone ID: GOSHI-09MAY01-C94366_1
gaacaaaaataaactcttcaatatttgaactcaaaatggaaaagggaaaaattcatacactgcaagtgggagttttcccattgaaccaaacttcaaactaggcagcaggagaagaaacgggatagagacaacatgggggtcactcccagaccgccaatccatccgggcagttaaaacttgtattacacccttccatataaaataacatcaagtatccaagtctactgaaaaatttgtccgatgtaggattcaatgcgagttcttgctccttttcttccccttatttttctctcttttacttggtggcttaggtctgtgtttagcaactctcttgaagggtttacttttgctcacaggtaaggcgagttttttatcaactttatctccgactgatctgagcatcgtagtttgagtctttgcactagtgaaatcttcttcctcatgagaaatctcactagtaatcacagtgactgtcatgtttccaccatcatacatagttgtcccagaaactgatgcacttggctctctttgttcatcatcttcgttgttctcatcaattccatcaggtcccgagcttgtcttgggaagtgctcccccatatagggcaaattctttttctaactttctctttttgcgctgttcaatacgcttgcgtcgttcagcctgctcttgcttcttatgggcttcctttcttcgcttcttcttcctcttgtgaaacccagtaacgtaatccctgagatccttctcgttgaaagagacggagagtgctttgtttttgagagctcttttcgttatgtggcggcctcggggcttcgattggtagcaccggtgcttcctcttcgtattcttctcctcctcccatggcagcaaaccggacgcgtggg

SEQ ID NO: 14005 - DNA, 697 bp, Gossypium hirsutum
  Clone ID: GOSHI-09MAY01-C94206_1
gcttgctgaattcacatgaaatcagaaagctgtcgtaggccttccctatgcattagcaagcctttcgtattgtcagacatttaacttggatcttcttagagcgtcagcaactcttacactggctgaattatggctttcacttggatccaatcatgcaaagactgctttaactcttttacatggtgcttttccaatgattcttggccatggaggtttggaactctgtgctcgggcctatattacagaagcaaaatgttatctctcagatccaagcttctcagtttccaaaaatccagaacttgtgctggatcccttaaggcaagctgcagatgagttgcaagctttggagcatcatgaattaatggccgaagctttctacttgatggccattgtatttgacaagctggggcaaccagaacagagggaagaagctgcatgttctttcaagaatcacgttatgtctcttgaccatcctcatgacgtggaagatcccatccaatccgataccctcttaaacgcctgagccccgaggagcataattaaagtagggtaagcgggtgttttgcccattcctttttgatgaattaattataaggctgattatatgattgctgaaaattggatggtcttttatttaacacaactgattgaaaaaatatgttgattatatatggtgattaggttattgtgtttggtg

SEQ ID NO: 14006 - DNA, 792 bp, Gossypium hirsutum
  Clone ID: GOSHI-09MAY01-C95726_1
gaatcaattgaatttgttgataaacatagcactaggcattgtattcacaaacattgatttttttttctctctttacaatgaaaactgggttcgggtttcggattctgaagctgagtctgctgtcagagattaatttagcaagatgtagacctgcaaatagggttttgttcttggttttggcattgaacatggcacgagctgactttgtctctcagctcctggaaagccctcattgtttcgacatcgaatcctccagcaaactgatgtacgcggaatgcaaatctaactccttgaacaatcagctccttttcctcaggcccgcccccaactgcttcgagctcggcagatactcgtctcatgtacttcatcgctaatttgaccgacgctagcttgatctggcacacaattccagtttcaagcatccaatccataggaatttggaaacctttgtatcggcttgtagcagattctctcattcgcgagagattgtaaacgccatgctctaacttttcaagtaaagtctgcatcttcttgagagccggagcacaaggttggcggggatcatcacgaaacaatgaagcctcggattctagtttcttgagatcacaatacccaaacgccgcctcccgcaatgcatccgccttctgttctggccattcaaaatgctttagcaccgctctttcatccaccaagtaagagagctcgtcgtccagccatttaacaaaaggcacgacatcctcaatatctgtaaacgcggcattctcaactcttgatcaaaaaccgtataagtcc

SEQ ID NO: 14007 - DNA, 806 bp, Gossypium hirsutum
  Clone ID: GOSHI-09MAY01-C95116_1
ttttccacgcgtccggtcttcagatgagattatcttacagtccagttgcacatttcttccttttccttgttcagtggactgattgtcatcttgctggtgccttggggtttctcaggattcttatatacaaggcttatgctgatggtaaaaccaccatgtctattcatgaaaggaaagctagcataagagaattctatggggtgatctttccctcgttattgcaactatctcgaggaattacggatgtggatgacaggaaacagaaggaaatttgtgcttcaaagttctcgaaaagagatgaactgaataaaggaaaggtctccgaaatcgacttagagagggaagaagaatgtgggatttgcatggaggtgcgcagcaagattgtgttgcccacatgcaaccattcaatgtgtatgaaatgctaccgaaccgggcgaataaggtcacagtcatgccccttctgtagggacagcttggacagagtgcattcaggtgatctttggatatatacaagcaaaaatgaaattgttgatttagcttcaatctcgagggataatatgaagcgtcttttcatgtatattgagaagctgccgcagattgttccagatccaaagattgtttcttatgatccacagcatcaacgttgatcaccttattatttagaagtgtaaataacatatggttcattgtagatagaactcatttatgttcttctttcttcattagtttcattgtagtaagtgtagaagcactttgggggggggggggattacattctttgctatgaagttatatgctttttttag

SEQ ID NO: 14008 - DNA, 653 bp, Gossypium hirsutum
  Clone ID: GOSHI-09MAY01-C95006_1
cacattcactctttctctctgaactcctccctttatctctctataagtcgcattgccgccatgactgatggccatctcttcaacaacatctccctcggcggccgaggtggcacgaatcctggacagcttaaaatttcttcaggggggattttatggaagaaacaaggaggtggaaaagctgtagaagttgataagtctgatatcttaggggttacatggatgaaggtccctaggacaaatcaacttggtgttagaatcaaagatgggttgtattacaaattcactggattccgtgaccaggatgttgccagtttgaccagtttttttcagaataattgtggaatagccccagaagaaaagcagctttctgtcagtggtcgtaattggcgagaagttgatttaagtgggaatatgctcgcctttatgactggtacgaaacaagctttcgaagtgtccttagcagatgtgtcacacacacagcttcaaggaaaaaatgatgtcatcttggagttccatgtggatgatacaactggagctaatgagaaagattcactgatggagataagtttccacatacctaattctaatacccaatttgttggtgatgaaaaccgcccacctgctcagtttttcgtgaaaaaacatgtcagtgg

SEQ ID NO: 14009 - DNA, 791 bp, Gossypium hirsutum
  Clone ID: GOSHI-09MAY01-C96976_1
aatttaggggaccctaaaaaaaaacttttacgttgcaagcccggggaaggaaacttgggtcccctaaaaaggccccccccttttttttttttttttttttaatttttattttttttttatttttttttattttttttttttttttttttaattttttatttttttttatttttattttttttttttaccatgaaaaaaaaattctgattgatgctataatttaaagcaactggctgaatcacaaaattacaattaaatttattgagcatgtacaaagaaagaaataaggaattgatgagctatctttctatcgtttgtgagaaccagcactgattgtaaagtcaatggcagcctcttctgaaacaatttccatatcaacagcaccattctgatcattagtcaccgattcatgaatttccttactatcacatcttccatcttcaacactttcagaattagttgtagaaggttccttgttgctaagaagttccttgtcaccacaatcatctgtttcacgagctgcaacttcagtagacggttgaccatcaccattaggtggtgttgttaaatgattttgggatgtttccaagagttcagccatactgctatcgactacctttgcttcatgaccaagatcagcaacaatttccaaattaacatgatcctctgatgcgaaaccagtatcagtagaacaattcttgcttgtgttctcattctcactttctaacaccaccgatatatccagattcagaacacctgagggttcagcagtatcaagcacttgtgaagaa

SEQ ID NO: 14010 - DNA, 562 bp, Gossypium hirsutum
  Clone ID: GOSHI-09MAY01-C96856_1
atggcaacatggcatcaaagcctattaaaaaaaagctgccattaaagagatgaaacaaaatttatgttttttgggtttacaattgaactttttgccagtagaaaagagagggatctaactagtttaaatcttcaacttgtcctaactacatgataacatttttctaaccactattttattgcacatcttgaacaaatatgaaccgcgttcttcccgagtattattacatcgactgtattttctgttacgaggtgtatgtcaggatgctagccgtgcatgaattttctgaatccgtttttgggggatgaatctacttggaaattaccttgaagttgaaattacttgatgctttggttataaaatggtttggtgcgcgtatctgcccttgccatttgtcatttgacttaaccgggtgctgcgagaaagaagcagcagcggcagctggttcactcttagatagtccctcagctcccgatgcctgactggtagaagaaattggctcacaatctgttttaaaaatctggtatgccacttgatcttgaggaatactcggttaccaact

SEQ ID NO: 14011 - DNA, 562 bp, Gossypium hirsutum
  Clone ID: GOSHI-09MAY01-C96756_1
ggaaaatcatccacttgtttccctctttttgtttgtatccgtgtctctcgggaaggcttaattttctctccacaataatggcggaatccaagagcaagtttgaatccataagggaatgggttgtcgatcacaagcttagaactgttggttgtttgtggcttagcgggattgggggttccattgcttacaactggtctcaacctcacatgaaacccagcgttaagatcattcacgctaggttgcatgcacaagcccttacattggctgcattagctggtgctgcagtagtcgaatactatgatcacaggagcaagccgaaaggcgatccatatgcgaagtaccttccacactcacacaaagagtaggtttgtcttgatagattaagcaacattctcatcacattcttttcaactgtttaccttatttacataaacataaatgcggggcttgcaagtggattgatattaagcttttatcctgagaatctaaacaaaacacgtgtttgttttcatcatccattgatggatggctaattcctatttgtattcaatattgattatgg

SEQ ID NO: 14012 - DNA, 138 bp, Gossypium hirsutum
  Clone ID: GOSHI-09MAY01-C96726_1
gggtcctttgccatttttccttgatggggaaataaagtatgtagccttgattgatttgatgaataggtgtgtggcatgtactaatctgcatatttatttgtttacttatgtagattttgttcatattttggtactatt

SEQ ID NO: 14013 - DNA, 591 bp, Gossypium hirsutum
  Clone ID: GOSHI-09MAY01-C97956_1
ccgggtcgacctcgcgtccgggctattgtagcagttgcagattaagcattaagaagtgtgatgctacacaaatcaaaagactacaaggttaccgtgatgctatgcttaaggcactaagcatgtttcaaagaaacgaggaagggggtatgtttataaattctggcttttctcattgccagacatcatattcggcatggcattcacccaattctccaagaatcaccaataagcccatggccgagtcagtgggtgattggtactccaatcggaaagaatcgaagcttatagactgcccttatccatgcaatcccccttgcaataacgatgactacacgtcgcccgttttatctgctgctgtatgaatggattccatatgtttgatcgacttttcaatacccctggcaagttggatatacccgcccggtattctttattttaaataacattgatggaccctttgtatatcaccctctaattggtaatttcaaaaagctttaaaatctttcattcaaattgcatttaatttgaatcaagcagccctgagattaattttaaccgatcatttcaatcaaaagagcagtaagttgtttt

SEQ ID NO: 14014 - DNA, 616 bp, Gossypium hirsutum
  Clone ID: GOSHI-09MAY01-C97506_1
cggccgcgtggggtttccaagatttgacatagggattgatcaacctagcgagggatatccctagttactgggatgaattggttttgtagacgtgaagagagttatcaacggtacgagttgccatcccatcgttgaaccgtatatcgatggcattccctgtatcagtagagggtgaagaattgttatagatcccccccgcggaggaaataacagccatgctggaattgtggtgtttaaaaccatatgactatagatatggctttatagcccttcattagataagtgagattaaagtcgataaggcctttatcttctcttacatttgcttgaggtaggttgttatttgcactttcatccttggtttgcgaggatacttcgactgtaccatattggtcttgggtagttatcagggacatattacccctactagcgttgtacttagactgcagttaacttcaatcggggccttctgctaccaacttcagtggttagttcccccttaactttaagggttctcttggagtggacgaattaagttcttggagcgatgaaatgtccaaagtgtatccctttcttatcaatgccatgtatttccccccaaaattaatgttttaat

SEQ ID NO: 14015 - DNA, 591 bp, Gossypium hirsutum
  Clone ID: GOSHI-09MAY01-C90476_1
cctttcttctccattggaaccctaatcctccccctttattcgaatctcaaaggccctagccgccatttgaccaccccgaacggcgatcgacgaagggagattcgttcactcactaacccggcttgggtcctagccctaaagacctccgatttcaggcttcaatccctgtctcaacttcgattaaagcgaaggagatgaattccggcggttcgtttgtataggtaaacccctttgcttcccttcaccctttttatgctcgaaataacagtatgtggcatcgaaaaataagaaaagaaaaggaaaacagacaggaaaggagagccaatgccgaataatcacctttctttgctttttctttgtattcaatatgtgaatcgtatatctgtgttgtctattgcgcataaaaaattacaatgaataaagactctggctttatagccgaaacagaatcagaaagatcccaaatttattatgaggaacgaatacaaattcttcttttcctatttgctgttgtgtggttttgttttcatttgccggtacggagtgcgtggcacgtgatgggggtcgtgtgctggcgcgggcgtggctgct

SEQ ID NO: 14016 - DNA, 738 bp, Gossypium hirsutum
  Clone ID: GOSHI-09MAY01-C90466_1
ccccgcgtccgccccgcgtccgggcggcgtgcgcccacgcgtccgcccacgcgtccgcccacgcgtccgcccacgcgtccgcccacgcgtccgctctatctggtaaagagcatctggagctgtttgctagtgtcaaaggcctacttccatctacaatcaactcagtagttcaaaaatcattggaggaggtcagactcacagacgctgcaaaagtgagagctgggagttacagtggaggaatgaagcgccgactcagtgttgcagtcgcccttctaggggatccaaagttagtcattttggatgaaccgactaccggtatggatccgataaccagaaggcatgtatgggacataatagaaagtgcaaagagaggtcgtgccattgtctttacaacacactctatggaagaagctgatgttttaagtgaccgtataggaatcatggtaaaaggtagactcagctgccttggaacctcgatcaggttgaagtcacgattcggtactggtttcattgctaatgttagcttcactggaaacaacaatggacttagccctcccaacggagatgcagctgacacaacacaccaacgggagtctgtaaaacatttctttaaaaaacatctagacctggtgccataggtggtgtcccaatatttcttgactttcgccattccccatgatcgagaaaagcttctgactggattttttaaggagcttgaagagagagcaggagcatttg

SEQ ID NO: 14017 - DNA, 164 bp, Gossypium hirsutum
  Clone ID: uC-gsronu33B027c09b1
ccggaattcccggcccgacgccacgctgtcttgcaccacaccgtatacgcgaagctgttgttttaagtgaccgtataggaatcatggttaaaggcagactcagctgccttggaacctcgatcaggttgaagtcacgattcggtactggaatcatcgctaatgtc

SEQ ID NO: 14018 - DNA, 633 bp, Gossypium hirsutum
  Clone ID: GOSHI-09MAY01-C90706_1
ccccgcgtccggaagttgtaaagtgggtggttttaagccaaatgtgatgttgtgaaccatagctggacatattttcttggtgcaaatgtcatagccctaagtaacgggaaagagtttagattgttgttgttttatttctacatatctgtagtattttgggtgtgtattgttggtatcaggtttggctcagcattggcttgatgtttgcatttcacctcctttttattgttctgatgttagtttcttacaattatgttttcctttttcaggctataacccctacgatactgaagatattgaagggctctttctcaacagctaatgattttatgcatgtttcattgacacttgtgcaatgtcggggttacttaattcttctattaatggatcagcttcaaatcttccagacagtagcggacgttcttttggaacatctttctcaagtcagtctggtgcggcttcccctgttttccatcacgctggtactattcaaggcctgcacaatattcatggtagctttaatattcccaacatgcctggtaccctcacatctagaaactcaacattaagtaatgttccaactggtggggttcaacaacctactgggagcctttctggtggcagatttgcata

SEQ ID NO: 14019 - DNA, 731 bp, Gossypium hirsutum
  Clone ID: GOSHI-09MAY01-C90356_1
aagaattattattgaaccgtgaccggtactattaatatcttttccttctcttcttttcatttatttcatggctaaacaccacagctttcccgagaacaaacatggggtacctgggaggagcttttactcgcctgcgccgttcatcgtcacggtagcaacagttgggactccgttgctatggaactacagaagcgtacttctacgttccaacacctcttctttactcccctctcttgtcaacagaagtttcaagaccttaaacgccgtttcgctgaaaacggcgacgacggcgaaactactaataacaacatctccaccagcgccgttccttggcttgatgagctccggagactccgcgtcgccgaactacgccgcgaagtccaacaatatgatctctccatcgtgtccttacaattgaaggtgcagaaattaaaagaagagagagaacagagcttgacagagaacggaaaggaaactgaaaaatcggatctggagcgagaaaagggaagtgaaaaaaaggaagacaacgaaacggagaacattacccgacggcccgttaatagcagggaagagtccgagcgggagaaccgttcggtaaacgagtcgaactctacagatccgaaggaggaagatccgggaaccggacctgacgaagcgaaagagaactggaacctgtcgaaccggatggaggtgaaacggggaaagggtgcagagcgtgaagcctgagggag

SEQ ID NO: 14020 - DNA, 1146 bp, Gossypium hirsutum
  Clone ID: GOSHI-09MAY01-C90376_1
gttgacccatcatttgtgttacctgcattagttcatcttgtttgcttatcagaggaaaaagcacgaccagcagctagtgaagctttatttagagtgctcaaacaccataaccagaaacctgaagttatatgcatgatgcttgacagtcttagaaacctcagtcaggaccaagctgatgcagaagctggagtatgtatagggaaaggatcaaacttcgactgcaatcgagtgctaaggctgatcccagagtggtcaaaaactgttcaggactggaatacattgattggacccctgattgacaagatgtttgcagagccatcaaatgctactattgtcaggtttttgagctacataaatgaacagttagctgaagctgcagatgtagtcctttctcgtgttgtttttcaaatgaaaggtcagaaagggattgatgaagatttcttctctagatgggagactaaaacttgtccaagtgatgactccatgagaatgcagcaatctttgtttgagcgactttgccctttactcatagttaggctacttccattgagagtatttaatgatctcaattcctctgtcgtgtatggtcagcttcgtaatgcgccttttatgcatgaatatggagatgtcagcgtcactgttgatgatagtgttgttgctttccttgtaaatagagcatttagtaagttcgagtttgaagatgcaagaaaacttgctgctgagctttgtgggcgcatccatcctcaagttctgcttccacttgggggctcacaattagaacatgccaccgaatcccgggatatattgaagattatagcttgcctattttcagtctgtacatcccttgtggtgcgaggaaaggagtcccttgtgcatccctttattcttcaaatctggagaactattaaagtgattctgttatggccatcatcagatggagatcaagtttccaaagcacaacatggttgcattgattgtctggcgctgatgacatgtgccgagttacaagctcctgaatcgtttgaagattgcacctcatggaggagaaacattgctgggaagaaaggcaatcgtgggaatgctatcacagaattctgtgccctcagaaatgtgatcagccagttaataaatgatgaaagtgatatc

SEQ ID NO: 14021 - DNA, 372 bp, Gossypium hirsutum
  Clone ID: GOSHI-09MAY01-C91966_1
tttaagtgaacacttgattttattactaagctttatgcttattgcactgttgcttttgctcatagattgctagctgagttcatgaagccaacttgctcccttagtttacatcacccctggaaatatttttaattaagcagtgtaccttctgcaacgtgttgcgtaagtgcaaccacgagtgtaagggttgaccggtttcccagtggaacattcgtagtaagatcgtccttggtgggagcacgggacattgtttctcttaagtgcttcatatgaaatgtatcttcttgcagcaagtagtcgaatatttgtctcggaatccatgaatatttcatctttattgttacagtgctcccagtggaacccacgcgtccg

SEQ ID NO: 14022 - DNA, 574 bp, Gossypium hirsutum
  Clone ID: GOSHI-09MAY01-C91936_1
aaaaccagcgcccgtttaggcgttggattcaagtgaaaccaaagtcaaatttgcgggccaaactaaaaggattaaaggaaatcaaattgaaactttttgaaccaaagagggacctgttgaataaatagaccaatcgatccataatgcggggatcctgcccggatcgggtcaccatgcggatcgggtcctcaaaacgatgccgtttcaaagccattgcattgactccaaacaacagcgttttattcccgtgcttaaaggccaaaataacctaaaaaatccttttcattttcttaaaaaaacctaaatagaatcagatgaactctgcgccgttttgtactgagggcatacaaacggttttcgaacctagcccataatccgatgaccacggagatggccaggatctcgtcacaagggacgtttctcctttcttttactgcctttttccctaacaaacgatcgacagatgcaaaacgaaaaaaagaaaagctaaataacaaccagggaatgaaaagtaagaagaaactcaaaaatcacctcttcaatttccttaagatttgattttttttgttttcac

SEQ ID NO: 14023 - DNA, 575 bp, Gossypium hirsutum
  Clone ID: GOSHI-09MAY01-C91866_1
aaaagggaaaaaacatatgaacaattatcatttcgtttgtatacaagaaactagaaagtcggatcttacataacttgacaacagaatatacataaactaaaccaaactactcgaagaagagagcagtttcaacgcgaggaatccctatttgtctatgcacatgataattcctcccaacaagtagcaaaaattggtgagatatacaaatacaatgtctctctccctgtccatggactgccagaaacatttatgttcgttgccataaatgttaactaaccgtacccgagaactgatacaggtaattttggcaacaattctccaatcaacggagatgatcatttcaaactgggattcaatcaggatcttgaacctagcttctcccaccattttcttcgagttttgtctgactcatatccacgcttatgtagtcttgccttggtttccttcaatcgcaacttgtactctttcttccatgtctcgaacctgcgttttaatctccgaaattcatcatcagtattcccgttaggagttggaagaacccgactgatttccggacgagtggcagccccggaatt

SEQ ID NO: 14024 - DNA, 512 bp, Gossypium hirsutum
  Clone ID: GOSHI-09MAY01-C91476_1
gggataatctccttcagaataagactgctttcacaacaaagaaggattatggaagggaagagagggaggcacaatgggccacggcacaacgaacccttcatggattgcaggctcccggagctgaagaaatcttgaatgagaagagcagctaccgagagttgtcggagattgccgaacaagccaagaagcgtgctgaagttgcaaggttgagggagcttcatacgctgaaagggcatgttgactcagttgtgaaactcaaaggacttgacattgagaccatcaaccaaaactacactgtatgagaaatgcagggctgaacattgcaaattaacgatatccaattttttttctttattagttgtttctgtaataacagagtggcaatataaaagacaggcttcattcagctggttcgtgttgtccgtatcaatgtaataaagaaaaaaatttcttccatttaatgattgaaggaatatttcattaactccgtatagatttccttgtttcttttc

SEQ ID NO: 14025 - DNA, 307 bp, Gossypium hirsutum
  Clone ID: GOSHI-09MAY01-C91186_1
ggagcaagttaatgccggcgatcttatccgcagtttaccctgtttgcatcagttccatgctaattgcatcgacccgtggctacgacaacaaggtacgtgccctgtttgtaaattccgagcaggatctgtatggcaggaacccggtggaatagacgcttcttacatggtttaattacctgttcatcgatgtatctcacgtacgtgcatatataaattatattaatttattggttgaagggctgtaattacttgatgaccaatgatcatcgccaactaacaagtagtgcaatgatctatttttgatgtt

SEQ ID NO: 14026 - DNA, 721 bp, Gossypium hirsutum
  Clone ID: GOSHI-09MAY01-C91166_1
gtttgtgacaaaagagggctgagctgagtgaagctaatatctcaaggactgctcaatctttgctgtcagctgcagggcatgttactgagaagcaattacgtttagaagttcttggagctatatcctctctatctgagaacacaaatgaaaaattgttttcaatgaagtgttgactgctgctgcaagggatattgtcacgaaagatatatctaggctacgtggtggctggtcaatgcaagatgcattccatgcattttcacaacatatagtgctgtcagttctgttcctggagcatctgatctctgtacttaatcagactcgtgtcactaaaagtgatccaggaaaaggagaaaactctattcttctttctgaaactcagttagcagatgaaattctgcaagctgctatttttgctctcaccgccttcttcaggggtggcggtaaagttggaaagagagctgttgaacagaggtactcttcagttcttgctgcacttatactgcaatttggaaagtgtcatggtctagctaattctggtcaacatgagccactacggcctcttgtgactgcgttgcaggccttgtgtgggggaagattttggctagagatagtgagcaaaatgaaaaggaaaagtggattaatcttattggagatttagctggctgcatttctatgaagagaccaaaagaggttgagaatctatgtaagattttcacgaaat

SEQ ID NO: 14027 - DNA, 654 bp, Gossypium hirsutum
  Clone ID: GOSHI-09MAY01-C91026_1
cccagcgtccgttcaaaatacaaaaaatccccttcaaaaaactttatctttcaaaaggaaaagaaatccaaacaaatctgcaaatcatgagctccgcggcagcaacaaccaccaaagaggccggggcaagtcaaaggctaaagccgtttcccgatccagcaaagccggactccaattccccgtcggtcgagttgcacgttttctcaagaaaggacgatacgccgagcgcgtcggatctggatcccctgtctatctctctgccgttctcgagtatctagctgctgaggttttggaattggctggaaatgcagcaagggacaacaagaagaacagaatcattccaaggcacattcagttggctgtgaggaacgacgaagaactgagcaagctgttgggaggtgtgacgattgcaaatggtggagttttgccaaacattcatcagaatctgctgccaaagaaggcttcgaaagggaagggcgagattggatctgtttctcaagaattttagaggatcttgtagtgcattggggtgattttttttttttttgggatagcatgtaatgaaacagttcgttttttacatgtataaacgtgttagtaaagaaagcgtagaattgaatcttttttcctaaaaaaaaaaaaaaaaaaaaagga

SEQ ID NO: 14028 - DNA, 320 bp, Gossypium hirsutum
  Clone ID: GOSHI-09MAY01-C91266_1
gacaacctcaagagttcatggaagaaagtggcggttgtcaacattgtattcctcatcttcctcattgttgtctactctgttggctgttgtgctttcagaaacagtaggagagacaatgattatcatcaaggctggaagccttgagagcttgttttttctgattaagaagggtttagtttgttcggatctgctattatttagtttctatgtttgcgttttagacctttatttttattgtatagatttttatttccttgtctagttagtagaacaattaagatatcatctaatgctcatgtataaaagatattttctatgtt

SEQ ID NO: 14029 - DNA, 547 bp, Gossypium hirsutum
  Clone ID: GOSHI-09MAY01-C92936_1
ccctttgctctttacagtttcagtttgttcaattagaaattgaagttattaaatttaatataattctagtggcaatattttgaagctctacagatgagaaaaaagataaacgttgagaaatccatcaagtttaagttggagagaactgaaagaagttcggggtcttaatcatccgccaatcataataataacacctcaataagaaacactgcctttttcttttctttttttttgccaaaagcgcgcacacatacatgcgcaccatcatgtcatatgatccctcttcagggacttagaaagtttgagatcttcaaaaaatgcaatgctaacatctccaaaaggaatatggcactccaccgtagcatcttcaaaaccttcaacaaaagccattttctcatgatgttccgtgcttgtcctcagaatcttgaggtgcccacttatagaagtatatgaactgttttactatgaaagtatcaagcagaacacatcctcctgcatccaccaaccatgggaaatttggtctgattctaaaccaatcacatgccga

SEQ ID NO: 14030 - DNA, 515 bp, Gossypium hirsutum
  Clone ID: GOSHI-09MAY01-C92806_1
aacaccaagggtccgcccacgggtccggccagtttgtttgtcatctcatgtgtggattgatctcctggtggatcagatatagatggtgtggagacaagatggacagcactaaccttggtttcttctgaacctgaaatcaaccatcataactcgggctcctctctctggtgttttgccgctttgtctaaagccctcaccaagtgttctctagaagggttagaagctattgctaaccatttgcttttttcaattatacattgttctaatgatggtcagtgtgaaacgtgtaatatcccgtactttgtacatttatgtatgggtcatatatgtttgaatagatgattggcttcaaaaaaaaaaaaaaagggcggcccgccctttttttttttttttttttttttttttttttttttttttttttttttttttttctacgctacctttctacacaactcaatttgttgtccacttatttatctcatttcattatattcgtaattcaatattttctttcc

SEQ ID NO: 14031 - DNA, 1061 bp, Gossypium hirsutum
  Clone ID: GOSHI-09MAY01-C92596_1
ggccaaaggaactcaacgatggatatggaatctgaatctaaatactctaaattttcttttgatacaaaggcagagctactagatgcacaaaacaaaaaagtctgatcaagtttcaagcatcctcaagttcagtacgatgactcaactcactcggcttcaagttctgcaccaaattgttccagtcgagcagcatcctcatccagatcccgaaccaaagcatgattaaccactccatcatcttcacttgcatggatctgtctcccgccgaaccatcgtccattcatcaactctatgcacttctgagcgtccttcctgtccttatatttgaccaaaacaacaccttggggattgttcgaacaaaccttgactgagtccagaagaccaagctttaagcattcctctttaacatcctcctccagctctgaacacaaattttcatccgccctcatttcagcaggcgtgaacatgttacgaaggacaacagtggctggaattgtcacctttgcatcatcacggccaccccagctgagcatcctctcctcaactttcttcagtttctttttcttcctgctgtccacttgcttggctataaatttatcccctttctgctcaaatttagcttggcttacagacatagggatttttccatcaggatgtaaaggtgttccatccaaaatttgaacagctaaagcaacagagggctcctttagatatgtaacaagcgcatcccccttttttcttcctgtctccttgtcaacatagatcttcacacgaggtctttttgtttcagggtcctctttgattattccacacttggaaaaaacctcaaccaattcttctgcagtgaccgcatcaggtagtccagtcacatagacatgcgtatttactttcagttgaaaccaagaatcgggaggtttattagcttccttcttatcaactggtttttccaacagttttctcttggcattacagtttacttctgtttgctcaccacctccgttaacattttctctaacagaagcatcagcaacagcagcagaagcatcagtagcacttaaaaa

SEQ ID NO: 14032 - DNA, 417 bp, Gossypium hirsutum
  Clone ID: GOSHI-09MAY01-C92056_1
aagagaattaatttagaagttcattcatatgcaacaaaagaaaattatagatatattcaataataataaatttcctcgtaggaaatatgttgttgatattctattctctcaactctcacccacacacataacaagaggaacaagggtaatcttttaagtataatgaaatattaatagattgctcatttaacaaggcttagtgcagacgcatttgcgaaggaaacctttgcaatctccattaggaaaaccctctgtcttgcaaacaatatcacaattgtcatcacgtaagcacaaccccttgaatgcattgcttggggactcgcatatcttatcaccatccgctaccacaggtcccatctctgttgttagaagaactaacataagaagaaccacgattgaaattgaacgagagaatcg

SEQ ID NO: 14033 - DNA, 948 bp, Gossypium hirsutum
  Clone ID: GOSHI-09MAY01-C92246_1
gtcctggtcagaatattctaattaaatcaaaccaacaatacaaaaaaaggaaattcacagcaggatccacagctgaataaaagagaactgtggggttttatgtggtgcttgcatctacaaggtggttgttgttgttgttgtaataagaatctacggtcataaaattgttgatcatgtgtgaatgttggtggtggggtcaacgagcgatgtcagatttagaagtgaaacccaattgttgctccatttcccagctgagcttggaggccacccctgaatgtttaggttcatgctcctcgagcttgcacatgagttcttgggcagtttgggcagagacaattatgtcacgggcagctggggctatgaaaccttcatccaccgcattgtctatgaatgataaaagcgagttgtaattcccatcaacattcaacagtcccacaggtttggcatggattcctagctgagcccaagtgatcccttccaggagttcttccccggttccctttccccctggcaagggcaattaaggccgtcagcttggcgagccctttccgctttccgttggggcattcctgacacagctcttacttctcctactgtctcgcctgtgatctctcttggcatgagagtcttgggaattacccccaacacgtggcgaccaccatcaaagacagcttgagagaccaaccccatcaagccaatgcttcctcctccataaaccaagtcaatgttcctttcaaccagttgttggccaagctgaacagcagcatgctggtagctaggattcttgcctggactgctaccacaaaagacacagacacgtctgaatcttgactttatggaattgggttgacgttgttgttgctggtactcaaggtgatgatgatgcaggtggagttgttgattttccatgataggaaagccttcaaaccactatgttttgccgaacgc

SEQ ID NO: 14034 - DNA, 635 bp, Gossypium hirsutum
  Clone ID: GOSHI-09MAY01-C92276_1
tcccccaaagttttaacttttggtggaaagaatttttttgtgcaaaaaagggaaaaaaacagtttttttatttttaaatatttatttgataaatgtggggagctccagcagaacctgcagattcttattatgaggtccgacctgaatgtactgatgttccgaacaccaaatttaagatcaggcctggaaaaactctaagcgtgaggagatggaaagctgcattttctccagatggccgtttggatattgccaaaactctagaccgtatacatcgtggggggatccatccgacaattagaggagaagtatgggagtttctacttggttgctttgatgccgatagcacatacgaggaaagggatcagatacgtcagcaacgaagggagcaatatgcaaaaatgaagagtgattgtcgtgaaatatttcctgtcgttggaagtggcaagtacataacagcacctgtaataaccgaagacggtcagccaattagtgaccctttagtacttgcggagacaagtcaagatgataatacggatagtatgtgtgaaggaactgactgagtcgcgatcctttggacaataaagtaatccagtggctgcttacattgcatcaaatatgcctggttgtgaggcgta

SEQ ID NO: 14035 - DNA, 1039 bp, Gossypium hirsutum
  Clone ID: GOSHI-09MAY01-C92236_1
gaattaaagggagaaatgttattctattgaaatttcaaacacaggacatggaagcatacacttattttacaagatgatgatgatgggactaagggacgtagagatttcaaacataaagactgccgaaaactaaagactctacttaggacgaagaaggaaggaaaaaggagcatgatgaaaatgaggtaaatttgacagatttattattattgttattgttatcattagctcacatactcattggactttgtggatcgttcagtgctgcaatggctgtttcaatctgcacctttaactcatccttctacctttcatcagcctcaacaaacacggttttcaacagtttaccggagaccgccgtgatgttggccgtaataattttaagcttcaatgattcaaatacctcgcatagtctaaccatcgtgtccgtctttttgctgcaggttatactcaccaccattgtcctttctcccatgtgcgtcactttcagttcaagcacttcaatagggcaagctcttgatccaccataatcaaaaatgttatcgagtttagtcttcttagatctcagccctggtaactcttgatcatattcgaaacctggatttttcttcagttttcccgattctaactcgctgatctcggcctggattctaccctcttgattgtgcaattcttggatgtaatcaatggcgtccttaattatcccagccttgtccattttgcccatgtttggaacaacagctctaagagcaaagaggcgttcattaagctttttccgtcggtttctctcagagacgatgttcttagcagcaacggaagaagctgctccgtcaggagaactcgaatcatagtaaccggagaactcatcaattggccaactatattcttcattttacaaggacaatatttctgtctacccacataattttatgtatacatcaccaatattctcaatattctccatggcaagcatattgagagaaaaaataaaaggactgaaaggaaaatggaaggaaagattttggtttttttcatgtac

SEQ ID NO: 14036 - DNA, 944 bp, Gossypium hirsutum
  Clone ID: GOSHI-09MAY01-C93966_1
aaaaaatctgtaggagagtttgctgctggaattgaaaagatgattgtaaaatcatcactgagcaatcaatatttgaccatatacgagaaaaagccaagaactttcctctcttgactccaaacaatgcctattctccatcatctgaccaagagaaaagcaaaattcgtcaacatatattgcttggtcctttaccagaatccaaagggcttgaacagattgctgatgatcacaataactatctaactggaaagcatcatattactgctgggagctcagttacaattaatctcacggatgaatcaggttatcttccatctgaacctgaagcgttctcgttcaaaagtctgactgaagaagcaatatttgatcacatacgaaaaaagtccaagcattttccggtaatcaacatgccaaagcccattgataccgactgttgcatttgtaccgaggaacacaactctgttaatcagccaggatctggcaatgctacgttaggaacatcaaaagatgcaatggtcatttcagaacctgaacctggcgaagtcaacagagacgcctgtggcaccaaggccggcacaaagacgaaaaacaatgtactccaaggaagttccagtggagcaaatggagaatcggctgtttctcccaaagtttcaagcaccaaaactgccacattatccgttcaaatgctatcatttgatatttcaatggcgaagaacagcaagcatctagcagatcttggaagctctatccaggatggtcggaaagacaagccatctccaagtgactcaaaaaggcagagccgctcactggcctctacagaccaagccagggaagtaggttcatttcttggctttcagagtgttttttcatttctctgatttcttttcacctttcagcactacaaaattggcagtcacgtatttctaatttgtcaatttcatcgg

SEQ ID NO: 14037 - DNA, 619 bp, Gossypium hirsutum
  Clone ID: GOSHI-09MAY01-C93936_1
cggccgcgtggggttccgccattttcccaaaaccctagttcttccctaagaagccaatctttcgaatcttcgttctctccatggccaagaagcgaaagcaacgatcttctgcggtcgaacccactaaggaaaccgcggatcctcaaccaatcaaagaggaagagcagcaacaacatcaggaatacatacccgaagatccgaaaccgaaagtagaagaggaacagaaactacaggaagtggaagaggaagtagaagaggaggttgaagaagaagaggaagtggaactggaagaggaagaggaagaggaagaggaggaagaggagaacgaagaagacgacgacgatgaagaagccgaaaaccaaaccctagtcggttcttccaacgccgccgttcaaaatggagctccaaaaggaacgagtcaagacgaggaattggacgacgagccgttcgagaagcttctagaaccttttgggcaagatcaattgattacccttattaagaaagcggtcgagaagcacccggaattcatctcgtcggttcgggagcttgcggatgtggacccggctcaacggaagatcttcgtacacggtcttagctgggatacgactgctgaaaccct

SEQ ID NO: 14038 - DNA, 413 bp, Gossypium hirsutum
  Clone ID: GOSHI-09MAY01-C93836_1
gcttaagatacaagccggtcaactgtcagctatgaatggaaaccatttcaatggcgggctacctcagattttctccccccaaccgtccccacatcactttggtggtcagcaaaccccgcaacagcagcagccccagcagatgcccgagtcatcccccaatatcggacatccgcaacctcagtttatggattttaaccagggagcctagttttgaggctggaaaaggatccttagaaaacataagaaaatgccttccacataatatcttgtacatagtaaatatatgtatacataaatggatatgtattacaggttagggttgtgaaagagtgttggtgggatcagaagtttcccatatggctttattatctccataattaggctaagatgaatggaaatgtgttgctttggag

SEQ ID NO: 14039 - DNA, 540 bp, Gossypium hirsutum
  Clone ID: GOSHI-09MAY01-C93506_1
agcgactacctatcttatatagagagctacctacaatcaactgaccggccgtcgacaacacaacggactgacagagaacaataccctggacccacccaactcaattggcttgacatacatccttcttcagccggctggctaactaacaagaccagccccgaccgaccgtcctaacaaacacgcacccagactggatagtgaaacgcaccctccctgggcccattcatcacgcgcggtggggggggtactcacacccagaccgacccactcactagccacctacctaccgccccttcctttcgctttctttcctttctttctacccacgtccgctggccctgccaagctatctataaatggctggctccatggatgcgaccgattgattgactgaccctacccccaccaaaactaacttaaggagagggatcacgtacggagccatccatctgcctgacagacggtcgccctccctcggacgagggcacccacttaataaagaactctcgctccaaacagacacaaacatcactcatacct

SEQ ID NO: 14040 - DNA, 1000 bp, Gossypium hirsutum
  Clone ID: GOSHI-09MAY01-C93406_1
ggcatgagaaatgacgtactcttgtgcagtatttaaggacagaagagaggattagaaagatgcacatcacagaaaagatctctcttttgaattgaaaaagctagaattgatagcaagcatagaaattcttagaaattggatgtggttggggaagcttatctattgaggttgtcaaacgaactggatgcaaatataccggcattactttatccgaagagcaactcaaacttgcataaaacaagagtgaaggaaagctggcacttcaggtaaaatataagattacaactctgtgactatcgacaactacctaacacctacaagtatgacagaattatatcgcgtgagatgatagaagctgttggccatgaatacatggaggacttcttcagttgctgagaataattgttagcagatgatggacttcttgttttacagttcatatcaataccagaggaacggtacaatgaatacaggcgaagctcggatttcatcaaggaatacatcttccctggtggatgcttaccttctctggctaggataacaacagccatgaatgctgcgtccaaactctgtgtggagcatgtggaaaacatcggacttcattactaccaaacgcttagatattggagaaattatttcttggagaaacagagcaaaatccatgccttgggattcaatgacaagttcatccggacatgggaatactattttgattattgtgctgctggtttcaagtccaatactcttggtaattaccaggttgtttttctcggcctggaaatgtagttgcacttggcaacccatacaaagacttcccctcagctttttaattatttattttccccttatttcaatcgtgccatacccataatttgagcttgtttaaaactgatgctacacgtttggtttcattcaaatatggtatttgagtgcatatctatacattgatgaatgtaattctggcttgcctcgtaggaacttgccagcaggattttttttt

SEQ ID NO: 14041 - DNA, 589 bp, Gossypium hirsutum
  Clone ID: GOSHI-09MAY01-C93676_1
aaaatggatattattctataagaaagttaacaaacttatagtaattggatacagttttatcaataatgaatttctattttacaagaatataagtatacaaaaaaattaaatataaaaacaataatcgactctcaagcatcaagactagaaagaataattaatcttccgcttcttttcgattttccaatctgtgcattttatctttagtttctaatcaaaatgagtggcaccgagtcatcagttcttccatcgagtcaacccagatccaccgagttcacgattccaaaactcgcccaaaaaagtcttagccgcatccaaactaggaaaataagcaggctctaagaatacctggctcaacgaatcgaccgagccggagccggccacgactcggttccctttcgcttctaaactccccataaccaccaccaacacctgcttatatccgtaaaagaaccgttttaaagctccttcgatggcttgcaaagcttgtacgaggaagaccttattgccctcctgcttctctgagtacaatctcatcgcagcttcttggatcctgggtccgccctttggatccacctccacacccaat

SEQ ID NO: 14042 - DNA, 549 bp, Gossypium hirsutum
  Clone ID: LIB3825-018-Q1-N6-E3
atatagtaattggatagagttttataaataatgaatttgtattttacaagaataagtatacaaaaaagaataaatataaaaacaataatcgactagaaagattttccaatctgtgtatttatctttagtttctaatcaaaatgagtcatcacttcttccatcgagtcaacccagatccaccgagttcatgattccaaaactcgcccaaataagtcttagccgcatccaaactagggaaataagtaggctctaagaatacctggctcaacgaatcgaccgagccggagccggccacgactcggttccctttcgcttctaaactccccataaccaccaccaacacctgcttataaccgtaaaagaaccgttttaaagctccttcgatggcttgcaaagcttgtacgaggaagaccttattgccctcctgcttctctgagtacaatctcatcgcagcttcttggatcctgggtccgcctttaggatccacctccacacccaatataaacggaaccttgtgtttcaactccttggacattttcgtaatttcaa

SEQ ID NO: 14043 - DNA, 543 bp, Gossypium hirsutum
  Clone ID: GOSHI-09MAY01-C93626_1
attgaaaatgcctatacaagcaagcaatctcaatgtcatcccattttcaaacacattcagacttcgtcacatatatttacacacctttgtctgctacttattcacaaccttatttatatgtgctttgtttcatcttagattaacacttcttccttaatttacttggtggtggaactagcatctctaaatatcctcctccatcccgacttccggtcaccactgtcttggctattcggccggtttttcttcagtcgtgcgcttatcccgcgccccatcaatatagtgagcttcatggctgtaaataaaccaaaggcaattgctagtggtctcactgcccaatggaaatcctcaacatgatggtatttctcgactataccaggacaagtatagaaggacaccgattccacttcgttggggtcggctaggaatctgttgggttcgtttccgagaacaaatctacctggaaactctacaacgaggcacccgtttggaagtatttctgaaattcttccactgcaccatgttcctccactcttccgtggc

SEQ ID NO: 14044 - DNA, 671 bp, Gossypium hirsutum
  Clone ID: GOSHI-09MAY01-C93186_1
cggccgcgtgggcgggaaatgaaagccatccgatcggttcgagctcagccaccagcagttttcactccatctctgcgagcttctttaagtcatcataaaagttcagtgatcagcttcaggccaatcatcacaagttgttccaagcaaccagaaagcatggagcagaaagacgaaaagcctgaacaaaaacctggggatgtcatgtctgagtcattcggagagggatatgctacgagatcagatgaagaaggatttggaggaatttatggagagaacgagagtatatctgacataaaaaaaaacaaggagattcatggaagtcacccagcttatgacaagacgcaggggagtgaagtgaaggagaaggagaaagccaggaatcaaactcacgcttcctcttaacccatggatggaaaacccaactatgttcacaagtaccctcctccattttgtttcatgtgcgccttaccttgcattagtttattatcttcagttttttactgcagttctatatatgtaagggttattacacggcttaagctgttaccaaactttctcctaaacaaacatctttagctgtatctgtgaaagccctaaagccttcctccatcacccgtctattgttttttttgctctttttacgttataaattaatggttaaatttcagctc

SEQ ID NO: 14045 - DNA, 674 bp, Gossypium hirsutum
  Clone ID: GOSHI-09MAY01-C93046_1
gtaaaataaaaggataaaattcataattagaattttttttcctttacattgataatcccccattgattgtcaagcaaattcaaatggagatgactcaacaattaatagatgatatatttgatatatatatatgcgaagttaacaacaaattacaattgcctactaaattattattattgattagtccttttaaaaattctttgtccaggtgcaaggatggacataggatcaaaattggccttcctcttctcaagtctcgtccattgattcccaaaatgtcgtttccaatcctctttggcacggtagtgagggaggtatagcttgaaatccaatccctctttgatgcaccatttcactatctcacggttctccgctaccttcttctccaccgacggccccttcggagcaaaccggagcaacgccacgatgtaaaagatctccccttctggcaacgccaccgatgtccgactatcccatttgcttcgtaaaagagggtagattaacatgggcccaccgattccatttttcaccatctttttaaacaccgtccgatcgaattcaacgatgtctgatttggacacgaagaggttgagccaagggtgaggattgtcccaaacgccgttggctttcgcgtcttgctccgctcgtttcacacgcaataagaatcccatgaa

SEQ ID NO: 14046 - DNA, 871 bp, Gossypium hirsutum
  Clone ID: GOSHI-09MAY01-C93076_1
gaaggtaaaaggtgttcgttgaagataaatataaatatgagattataacaagacatgtttcagttctaacaggcaaaactggaatagcttttgtacttaatacataggaaaattgggatcaacatcattggcccatgaatccaagcccccgacaatatccttagctaaatcgaatcccttgtttcggaggtaatcaacggccctttgagaatcattacctcttctgcatattacatataggttagctcccgatccagtgctttccttctgttgttctttaagtgcggaagatatttcgggcagtcgagcctccaagctcgcgagcggaatgttcaatgagttgggcatagaaactatcttgtagtgaagttccggtcgaacatccaccaaaacatgtggctccccacttatgatcctctctttgtactccttactggttattctagaatccggggcgagtagtttcagctttggcggagaggttgacaatggcgattgagtgaacttctcataatcaagttctttgaattgctgttggttaaatgtcgtattttctccacaaacttcgcattgcaaagacctgcctcttattttgacaattcgaatcctagctgataatgcatcaaaaagaagcatccgtcctgaaagtggttcaccaatatcgctggctattttaatggcttccagagcttgaagacagccgataattccaggaacaactccaagaaccccactatctgagcatctttgacaagcagttgtaggaggtggagtcggaaataagcatcgataacacggacctcctttgtaattgtatactgtcagctgcccttccaatcctagcgcagcacccgatactagaggctttccc

SEQ ID NO: 14047 - DNA, 786 bp, Gossypium hirsutum
  Clone ID: GOSHI-09MAY01-C93396_1
gaaacacacacaaatttcaatttacaattatgatccgaaccaacgatgatgcttcctcggcctggtcttggcaccaagacaagctgttcgagcgagctttggttatgttctccaacgacgaatcgtccgaccggtgggaaaaaatcgctgcccaagttccggggaagtcggcggcggatgttaggagacattacgaggatttggagcatgatgttttggagattgagtcaggaagagtcgagttgccgagttatgagggtgagttggaatcagcgagttgggttaacgagtcaggtaggagccaagtttgggttggatccaaaggaaaggaaagggaaagcgaaagaaggaaaggcgtcccttggaccgaagaagaacacagattatttttgattggacttcaaaagtatgggaaaggagattggaggagcatatcaagaaatgccgtcgtttcaagaacgccaactcaagtagcgagccatgcacagaagtactttcttcgtctcaactccgtcaatgaaaaaaacaagaaaaggtccagcattcatgatttgaaaatgggagatgataattccatggacccccaatccaagtttttcaatgaacaaggaagctcctttgtgaataatcatgggtatgaattccctttgttgtaacttgtatagttagattacttacacaaaacacgaacttaagaacttgcgtgaatacccgttcttgtaacttgtacagttttataaaacagcttgcaacttatctcaacaagtttatacaacatatatttgt

SEQ ID NO: 14048 - DNA, 560 bp, Gossypium hirsutum
  Clone ID: GOSHI-09MAY01-C93326_1
caaatccctaatttttcccttctttaaccgattctcaaattcaaaccctagccacttcaaaaatgaaggaaattcccactttcactattcagccgattaacactctaaaatccccatctcaggcttcaatttctatgaaggagataaggactccgatggctcgttttcgaaggtgtggagaaacggcagtacagaagaagccgctcgtggaagccatgcgtggaaactactcgtgggatcaatctgttgttgctctagcacattccagagacccctagagtttctagtgttttcacattattgggctcctttgggccgcttattaatggggtgggatgggtttcgtggcgccagggattaagttggggtttgggttgtttgggttaggtttaatttaggtttatttggacttgtttaatagagcataaatttggactttgggctttattattattaaaaaaaaaaaaaaaaaaaaaaaaaaaaaaaaaaaaaaaaaaaaaaaaaaaaaaaaaaaaaaaaaaaaaaaaaaaaaaaaaaaaaaaaaaaaaaaaaaaaaaaaa

SEQ ID NO: 14049 - DNA, 1005 bp, Gossypium hirsutum
  Clone ID: GOSHI-09MAY01-C93246_1
caaatttcacttttcaagaaaacaaactgttcacgaaaggaaaaaaattccttaaattcatcaaaaacccagtttagaactaagctttgttcattgtttttcgtccttttttgttctctctctttttgagcttcgtttgttttggttagcccctgttcttgtttctggagatttctggggttttctcgtttgaaatttttgggaatgtttggtatgggttttaaggataatcacaacccagagatggattcgtctttgtttccggtttcttcacgtaaaaggaagagacgggacgggttatcagtggcggatactttgaagttatggagtgagaactcggaggccaaacaatcacgtaaagcgccggctaagggttccaagaaagggtgcatgaagggtaaaggcgggccgcagaaccagaactgtaactacagaggcgtacggcagcgtacatggggtaagtgggtagcggaaatccgcgctccgaataaagggaaacgtctctggctcggcacttttccctactgccgtcgaagccgcttctgcttacgacgaagccgccaaagccatgtacggtgacaaagcgatccttaacttgcctcagggttccgattcggactcagtcgccactccttcacatgggttttctcaggctacaactacaacaacaacaacggccacttgcggtggctctgagtccgctatggatggtcctgttgattctgaagcgccgtcgacaagtggtgcaatggatatgaaaggtgaaggtggtgaggttgatagaagaggggatgatacagattatagctggcttgaaggattggaatcgttgcagttcttcgatgacattccaatggattatgtagggaataatagtgtgtgggataattgtgagttttttgatattgatgagttccttgcttgacttgtacgttacaacattttacatgtaacagattttgtacccttgtttttaagtgaaattatagtcagaaaatagtgttt

SEQ ID NO: 14050 - DNA, 618 bp, Gossypium hirsutum
  Clone ID: LIB3828-011-Q1-K6-E12
aaatattagccaaactttcttccatcttgcgaaactcaaatctgagaggagtaaaggaagaaacttgaaagctctaaacataatcatggagattcgcaagaaccttctccaaaatcagagcataccccaaaaactcacttattctggaaccaaatcgttcgatccataatagccatcttcttcatcaattcgagaacgccatcaatccggatgcacgagacttgccgtcttttttcttccaaaacaagagtaggaaccgccctgttaatctcccgagggaaaaaagataagaaacactttcaaaactcttctcagtagaacgaatattatgaaaaatcgagctgagaatggatttatctttcgcagatgtcttaagcttttttattacaatcagagagtccccctccaagataattcgacgaaaacccatgtcgactgcaaaaaagataagccttccacaagctcgtgcttcagccacaaaagacgacattttcaacaacgtaagtacttgcccctacaacttcacacttgtagtctctagccaaaactgcagcaatagaagttctagagtccctttgaaaagcgcatcaaagtttattttgataaacccattattag

SEQ ID NO: 14051 - DNA, 603 bp, Gossypium hirsutum
  Clone ID: LIB3825-006-Q1-K6-D5
cggccgcgtggggaaaatttagccaaactttcttccatcttgcgaaactcaaatctgagaggagtaaaggaagaaacttgaaagctctaaacataatcatggagattcgcaagaaccttctccaaaatcagagcataccccaaaaactcacttattctggaaccaaatcgttcgatccataatagccatcttcttcatcaattcgagaacgccatcaatccggatgcacgagacttgccgtcttttttcttccaaaacaagagtaggaaccgccctgttaatctcccgaggaaaaaagatgtcttaagtttttttattacaatcagagagtccccctccaagataattcgacgaaaacccatgtcgactgcaaaaaagataagccttccacaagctcgtgcttcagccacaaaagacgacattttcaacaacgtaagtacttgcccctacaacttcacacttgtagtctctagccaaaactgcagcaatagaagttctagagtccctttgaaaaggcgcatcaaagtttattttgataaacccattattaggtggtttccgtaacttttctgtcattgaactggaaaaactctttatattctc

SEQ ID NO: 14052 - DNA, 415 bp, Gossypium hirsutum
  Clone ID: GOSHI-09MAY01-C88446_1
gaagaagtaaatatatagaatagtactaaaagcttctcatagcatatctatacacaaaagacactgacaaaaaactactacactatatgctatatatatttgtgacatttgtacttgcatatagtactaactggttaaggttacattttgcagtaaatgagtggggaaaaaactttgtacatttttcgaaattcacacattgaacctcaactaagatgttttccctatggtgggtatatggaacctccatgtgaagagatagtcttttgactggcaagataatctcactacatcacaaaaagctgtgatcgaccctttgttgttgttattgttcccttcatttccccattcaatcctcacccaacaagagaacccttttgatttaacaggcacccttgaattagatagattaaaa

SEQ ID NO: 14053 - DNA, 711 bp, Gossypium hirsutum
  Clone ID: GOSHI-09MAY01-C88466_1
gaaaagaaaagcataccctttttttatatatatttatataaattatatttggtacaaattttctcgagaaaattatgaaaatgttcttaaggggtggtgggtttagggttattagattgcttgaaagcgacagtgggagcaatcctacaactccgcctctgatgttcaagcacgagttgagcggcgaaaccatcgagtttctcgaagttggtttggtcggccagccttttgcctccgaacaacacggactctacgttcttctgcttcagcatttcctcggctatggcgatcagcatctttacgttgctggggctggggtctgtgtctacgtttgggccacaccgtctaaaactggtcccatttgcctgaattcttacgtagttgctgcttctggattgtccgaaagccatggcaacggcttggtccaccgagtcggctgagccgtcaccggatattcgagccagcgggtgagcccaatccttgaccttccaattcttgactttttcatattcgtagcttttctcgagtagcgcccccgtccccagtgacaacactaatatatcctcgacccctctaacaaaagggaactcctgtttattatgcaacacgtgcgtcattgcggcggcggtcgggttgctcattgccaacccaccatcaaccgccacgcaactagtttgaccatctacagaccgcatcttgaccggttcgaat

SEQ ID NO: 14054 - DNA, 294 bp, Gossypium hirsutum
  Clone ID: uC-gsflnu33B051e05b1
cgtacgcgtgggcggacgcgtgggattcgagccatcggtttagcccaattcttgaccttccaattcttgactttttcatattcgtagctaattttgagtagcgaaccggtccccagtgacaacactaatatatcctcgacccctctaacaaaagggaactcctgtttattatgcaacacgtgcgtcattgctgctgtggtcgggttgcttccattgtcgtttttcaagtcatctaataaccctaaacccaccaccccttaagatcatttttatcattttctcgagaaaatttgt

SEQ ID NO: 14055 - DNA, 686 bp, Gossypium hirsutum
  Clone ID: GOSHI-09MAY01-C88616_1
ggaaacgatcagtatgtttatcgtcatgccaatggattgtgtgttgttggcctggcttcaactcacttggcatttaaggataagggtgggatcacggccgttgatttcaatgttggcaaatccgatcgcagtggtatgaaagtcaccggaaagagaaaaaagaatgctcaacacttcgagtccaatacagctttgtgcaaggtttgcaccaatggtgattcatatattgtaaggtgttgtgttaaaggctctcttttggaagtgaatgaaagattaatcaaacagccagagctgcttcattcatcagcagatagagaaggatacatagcaattataatgccaaagccagcagactggctgaaggtcaaggcttccttgttgagccttgaagaattcaagaaattgagagcactttgctgaacttaaactgcagaaatacaggaaccaagagaagcctgctctatacttgatcgcagaattcaagcagaaggaatcccttcatcaacggtgtgtttctgattgcgaaaagctcaatacttctactttcctagatttgggtcgggtgacccatgcaacccaaggcttcatttttgtttgttttttcttcagctaaataatttaatagtagaactgttttattttccaatcccatgaatgatagaagcaaaaaaagtaaagccattttc

SEQ ID NO: 14056 - DNA, 519 bp, Gossypium hirsutum
  Clone ID: GOSHI-09MAY01-C88626_1
gttatatttgacgcctatgttcaacatgtaattgagcatacccgtcggaatcacgccctagtactctaaaccaagttacatgcaaacaaattttcctcagataaagagtgtcagaaactgaagttgcggatcagtgatggtggttggcaatggcatcatgcacattaatcatataggtcatatgattgtttcgttttgttttgtttttttccttctgctggtctatgccttacaagttatatgtgtaattgatgattgtccatccattttgttcactttgttctattttcacataaattgtactctgctgctatcaagcaacttaatcgcggggggcatgtccaaatacatctcgtaggatgcgttttcacggaatttttatgtttcggaatcatctttcctttgtatagtacattaccatttctttttgatagtgtaactttactcggaactcgaatttgtgtctttgttcatagttttaccaagaataaatgttgtgagtttgagagttgttgcctt

SEQ ID NO: 14057 - DNA, 822 bp, Gossypium hirsutum
  Clone ID: GOSHI-09MAY01-C88086_1
gacaacaaatagcaaaaatatctttcaacaagatcctacagcagattacaagagtctatagcatatgtacaacatatctacaaatctaaggccaaatctgttactacctaaactaaaactaaatggaaacgtacactcgatgctgtggcaagttaagttttccaaggaaaattatgcagaaaattatagacaaccccccacctcatcggaatggttataacctatttccccatatcctaaccatatttaaaaagggtattaaaaaaatagagttcatattctaatgcatatagctggatgactaaagaatgtatgaaaagtgagctccaaaaggaccaattgagatagaacaacttacatggagtacgatatcaaaaaatcatacaagaaaaatataacaaagttagtcagcttttacttgctcttcccagtggcaccttctctctgattccggaagtgactgagaagctgctgtgccttttcttttgctcttggcgtgccagactgggacaatgcgacaaggggtggcacagccccttcttgcaaaaccagggtacagaacttgggactattaaggcatagttgcagcaatacagatgcagcattctccttacccctctgtgatcctgattcaagaatttcaactagtaatgggacaccaccttctcgtacaattgccacacgcccttccgcaactgtcgacaggtttgagagaagggcaactgccttgtcaaccatcccactatcagggtccattaactggacgaggtattttacagcacctgcttgagccatacgcccacgcgtccgcggacgcgtggg

SEQ ID NO: 14058 - DNA, 482 bp, Gossypium hirsutum
  Clone ID: GOSHI-09MAY01-C88386_1
tttttttttttttttttttttttttttttttttttttttttttttttttttaatttgaatcattaaatggacattacttcaaaagtgattatacacccatggcagaagtaaccttacaacagttatttacaaattctttttcaccaacccctatcaacaggtaggtttattttaagtaatatatgtaaacctatagctgttccttgttaaccctgcggcgatccatgcttaggctgccttaaagagtgagggactcaagcgcaagggttttcttaaaccagtactgctgaaacctctgccttgcatactccagatagtcaaactctatcttgtttacatgacccgagattattccccataagccccaaaacagatgattagcaagagtgtatttctctgcatcaacaagtagctgctccacttcagcatcactgggttcattaccggaagatgctatatatgcacggatgaattttcgtcgc

SEQ ID NO: 14059 - DNA, 535 bp, Gossypium hirsutum
  Clone ID: LIB3831-002-Q1-N6-D9
actatgcaaattgaaatgttctaaatattatgtaacaagcaaacccttagacttgtatgtttctcacacagatgcaaaaatcctaaaccatccttaatgctttatgtatttacaataccgtattctattaggctatgttattcagagtatccaaacatttggcacttgtgaccaacacattcagacatgagtacgaacatatgatcctttaagcaaagaccctctaagtacatgaaaaagctttagaacaaatttagcatactcgtatctgatagacctgatccgagtctgagcaataggccaccaccaccaggctaggtttatactacacaacctatataaacctatagctgcacttgaaggctacaatgcctcaaaaagtcaggaactcaagagcaagggctttgttaaccagtactgctgaaacctctgacgtgcatactccaggtagttgaagtctatcttgtttacatgacctgagatgattccccataagccccaaaacagatgattagcaagagtgtatttctcggca

SEQ ID NO: 14060 - DNA, 659 bp, Gossypium hirsutum
  Clone ID: GOSHI-09MAY01-C88336_1
cggacgcgtgggcggacgcgtgggtgggagtcttccttattccatttccactatggttactcttacttacctgaacgtaagccataattcactttccccttcagttggagatgtttttgctaatcttaccgacctcgggaccttggatatttccttcaacaattttagtggggatctacctgtttcatttagctcattgaccactctttcggcgctgtatatgcagaacaatcaattttccggttctcttaatgttctctcgggtttacctttgaacactctaaatgttgccaacaacaatttaagtggatggattcctcaagagcttttttcactcccgacttttatatgcgatgggaattcctttgccaatggacctgctcctctgccactaccatatagtccacctccacctggtagatctcgtcataaacataaaactcgaccaggaactcgtggggcccgcgattccgatgctcaatcttcagattcagataagggaccatcggctggacaaattgtaggcattgttcttggttctttgttgctacttgtccttgtactacttgctgctgttttctgtgttcatcacaataaacggaaggtgagcggtgcccgagcttcaaagggaagtttttcagctggcctcctatgctggt

SEQ ID NO: 14061 - DNA, 876 bp, Gossypium hirsutum
  Clone ID: GOSHI-09MAY01-C89946_1
ggaaaaccttagatgtttaccccttttcgatctgccattcaaccaccaccattccaccattataatcggtggatgatagcaggcgatgaaatcattccattcccccattctaaatcttgcctcaaaaggtcagattttagcctcgagaacctatctcaagtttcgatttcaacaaagaagatacggcctccaatggctcatttgaaggtaagcttttttttttaccttttttatgcagaaacccacatgaaaaataaaaaatatggaccaaaattagggaaagcaaatatgaggcattcgaaatcaccttttaataatttctagtttctttttactcaatatgcctaaccttttcagagtacaaatgatggacttttatagccagatttataaaataaataaaaaataaaaatcatattttccttctgtcatttggctatgtattttattggttgtttctcgtgtattctgttgcaagcatggttatatggaggagaagacccttgtgacgtgaaagccaagcgtgaaaatttgctcgtgggagcccgaccctctggcgctgctctagcgcattcccgaaacttcctttgaaatcggatggctaggggccaagtccattgttgcggcgctaatcagcagactagggtttccccttctgaaatcagcctttgggtcatttgggccattgggccatttttgcatttgggcctttgggttcattgggttaggattattaggccattcgggctaggtttattgggttaggaattaatttggtatttaattttaatatttgggtttggtttggttttggcccaaaaattttgtaaatggacactatacttttaaatttgtatcctttatttgttttttttt

SEQ ID NO: 14062 - DNA, 603 bp, Gossypium hirsutum
  Clone ID: LIB3543-051-Q6-K6-H9
acgcacaaacaaaggggggggggaggggggggaaccttagatgtttaccccttttcgatctgccattcaaccaccaccattccaccattataatcggtggatgatagcaggcgatgaaatcattccattcccccattctaaatcttgcctcaaaggtcagattttagcctcgaggggggatctcaagtttcgatttcaacaaagaagatacggcctccaatggctcatttgaagcatggttatatggaggagaagacccttgtgacgtgaaagccaagcgtgaaaatttgctcgtgggagcccgaccctctggcgctgctctagcgcattcccgaaacttcctttgaaatcggatggctaggggccaagtccattgttgcggcgctaatcagcagactagggtttccccttctgaaatcagcctttgggtcatttgggccattgggccatttttgcatttgggcctttgggttcattgggttaggattattaggccattcgggctaggtttattgggttaggaattaatttggtatttaattttaatatttgggtttggtttggttttggcccaaaaattttgtaaatggacactatactttt

SEQ ID NO: 14063 - DNA, 697 bp, Gossypium hirsutum
  Clone ID: GOSHI-09MAY01-C89466_1
ccccgcgtccgcccacgcgtccgggggacagcagcttctccaccttccatgggacactgttgattctacttgtttgtctcataaatcaagacaggagaaaggtgcaaccatattggaaatgaagcaccaggactattgttacggaggaggggtcaaagactggaacaagttgcttcaaaaacgcttgattttggatgatctaagagttcagtcattgcaagcccggataaaaaacatggcctctacccaaacacgtgatgtttccgatgatagacttcccttaacttctggagtcgaactcgggacgctaaactacattgttacagtcgaaatagctggtcggaaaatgacggtgattgttgataccggaagtgatttgacttgggttcaatgccagccttgcaaatcatgttatagccaaaaagaacctcttttcaaccctactgcatctccttcctaccgaacagtcccatgcaattcatctgagtgtcaatcacttgcatttgctactggaaacaccggaatctgtggggaaaacccgcccacctgtaactatgttgttagctatggcgacggatcctacactcgtggtgaattagctcatgatcaaactcaatctagggaagactccagtggacaatttcatatttgggtgcggccggaacaataatggtctgttcggtggaacttcaggtct

SEQ ID NO: 14064 - DNA, 653 bp, Gossypium hirsutum
  Clone ID: GOSHI-09MAY01-C89116_1
cggacgcgtgggttctagatcgcgagcggcccccattgttttctctgtttttcctttggtcatggccagcaatttcttcgaacaaaagcccttcaagccaccttttgagatcatagccaggagaacgaaaacactcgacgttaaatacaaagaatgcaagcgtaaccatgcacctcaacttggtatcaatgttgtggatggttgtggagagttcgctcccaaaggaatgtcgccgtcgtcggaaacgggacatgtcgtggattttgattgtgaagcgtgtggttgtcatcggaattttcatcgcaaagaagtgacgaagcaggttagcataacgttcattgacaacgaaggagccaatttatatcgttttcagccacgatctcctcaattgaacaatgagcaagaagcagtggagaatggagagttggatgggggaatgaagaaaccaaaaaaatgatgaatcgatgtaaaaggcaaaaggagccattgttaagctctttttattttaactttaatttagtttttctcatagtgtgtggttatttgcttattactatagttttcgttctcatattgtattttgtttgtaatgtttgagcattctatataaaatatatataccgcaaggattaattgaatgatgcttaggtttt

SEQ ID NO: 14065 - DNA, 572 bp, Gossypium hirsutum
  Clone ID: GOSHI-09MAY01-C89056_1
tcatcacagagatatgcgcttggatatagaggatatgtcttacgaggagttgcttgctctgggagagcggattggcaatgtgaacaccggtttatcagaagaaatgattagacgtaaattgaaaacaagatcgtattcgacatttgctacaaatattaatctggaagaggcggcacccgttgaacaggaacctgatttttgtacaatttgccaggaggattataagaaccaagagaaaatcggaacccttgattgtggacacgagtaccatgcaagttgcttaagaaagtggctgctcgtgaagaacgtatgccccatatgcaaatcagaggcattagccacataatccaaggatgtataaagcatggggttgacttaagtccaacaaaagtaataaactacataaaacggttgatggtctgttttaaatataaatcgatatttgtcgagtattttgtacatgaacttgcagatatctaacagacaatcatttatttgttggctctgtaattatcaacaattgtacagactcccattatgaagtctcatgctattatattcaactttcaact

SEQ ID NO: 14066 - DNA, 781 bp, Gossypium hirsutum
  Clone ID: GOSHI-09MAY01-C89346_1
gccatgttgactagcactcaacctttgttgttctttattctttcttcttcttcttctttttttcctccttttttttcaaagatttgaaaaaaaaaggaatgaaaagcgcttgccaaaagaataagttcgaaaggaaatccaagttagggttctgagaaaagaaaaatgaaagcttcattgaaatttcgggaagagaagcagccagtgttgagggccaaaatacctctaagcattttgggcttgccatttcagtcaggcatcgtcgccggcgaacccaaggagctcactttaaatctttctacgttctttgaatctgggccgtccatcaagattgcttaccgtcctactgacacgtggaaccctttctctcttatcgtcaagactggcaccggccccttcggttctcccatgtccacctctttgcttatgagtgctgagttcaaccttcttggccgtggaaaccctagctttatgcttcacctcaagcctcagttcggggatttctccatcaagaagtcccagtcttccgctttcgataaagtcgtcgaagatgacgaatgacgccgttgcggatgtcgattcctcggctaggggcgatttcgcgggtttcttcgccgagtaggggaaacttgggactttgaactcgggagatattgcgaggattctgtccggaatggaggtagcggcgaggacgtctgtgccagtgaagggaaaggcaatgttgaaattccgatggggaatgaggattccatcggagatgaataatggcgtcggcggggct

SEQ ID NO: 14067 - DNA, 626 bp, Gossypium hirsutum
  Clone ID: GOSHI-09MAY01-C89366_1
ccccgcgtccgacttttgtctttctgggtttctctttcatatgaatccctctaaattgtagctctttgttatctcctttttggtgtgtgttgtaaacaaaaaaatttaatcaaaagtgaggtttgtttgtttcttcgggggtcaatggagtgttttcatttctctggtaatgacaagaatgatgaaccgaaaactacaaagtctatttcggttcgatcctctgaatctgtttcgatatcgacggatcatgatatgaggagatcagggtctgagtttaattctcagaatgtctcggattttagcaccgaatcctcgacgaagaactcgtttgctgctttgtctcaaaggcaaagtaatctcagagagttcacattcttggaattgaaggctgcaacaaagaatttcagccggtccttgatgataggagaaggcggatttggcggtgtgtatcgaggtgtaatccgcatctctgatgattaccataagaaactcgatattgccgttaaacaactcagcagaagaggattgcaggggcacaaagaatgggtgacagaagttaatgttttaggggtagtcgaacaccaaaaccttgtcaaactggtgggttactgtgctgaggatgatga

SEQ ID NO: 14068 - DNA, 634 bp, Gossypium hirsutum
  Clone ID: GOSHI-09MAY01-C89316_1
ctggggtcgatgtattggctgcatccagttatgcagttcttctcctccatcttcttgctatcggcactattgcatctgttgtagaagagagatcgatatatttgattttgatggaaggagaaccagtagcatttcatggtgatgttctatctagtcaacaaggaagaagattcgaccccaaaagtgaagcttacaaagttcatgcaaacaagttggtagattctcatgatcaagttcttgaaagcactctagataagggaagctataacaagctatacagcttcaaacatgtccttaatggctttgctgtccacactacaccatctcaggctaagaaactacaacttgctcaaggagtgaagttggttgaaagagatcgaagagccaaatcgatgactacttatactccagagttcttagggttacctcaaaccgtgtggactcaagaaggaggtgatagaaatgcaggagatgggattgttatgggttttgttgacacagggatcaacccctttcacccaagctttgcttatgacatactcaaccctttaacgtccaatctctctcatttttctggtgcatgtgaaaccggtcctctattcccaccgttttcgtgcaatggtaagatagtttc

SEQ ID NO: 14069 - DNA, 607 bp, Gossypium hirsutum
  Clone ID: GOSHI-09MAY01-C89336_1
ggcctcctaattcttcgcctctggttttcaccagccagaaggaccaagcgagcaagaaaatgacgtcgttttgcaggacagcattaatggcggcttctagatccctctcttctcgacccaaatcccttaatttaagaaccctaaccccaaaacccatttcttctcctttctcttctccatcaacaagaaccctcccttgcgcttcaaggatcgtatcggcgttgggaggagtagagtcgatgatgccacttcatagtgccattgcttctgctcgattacaatcaaacatcgccgttgattcttccttctggagctggctctctcaagacttcgcggttcctcggtgacaagagtgagagcttccgtcattccaaaccgaactgtcttgcagtcaaccagcagttcgttttcatcccttttctgcatttctcatctctttgctggaatcattttctacctggggcagaaattgagttttcttttcttttcccccaaaaacattgaggagacattggatattgtcacatttgactgtttgtatccgaatatgatgattttatatacttgtggacaaaagattgaagtcaaatgcaatgccatttacatt

SEQ ID NO: 14070 - DNA, 1010 bp, Gossypium hirsutum
  Clone ID: GOSHI-09MAY01-C84596_1
gcgttcgcccagcgtccgccgtcttttccaggtgttcaatcgcattgagccacctacttcttttaaagatactaaagtgtattaatcatttgtccactgatccaaactgcttagagaatcttcaacgagcagatgcaattcagtatttgatccccaacctacagctcaaagatggccctcttgtatcccaaatgcagcacgaggtcctcaatgccctgttcaacttgtgcaagataaataagaggagacaggaactagcagcggaaaatggaatcgttccacacttgatgagtttcatcatgtcagattctcccttgaagcaacgtgcgttgccgctactgtgtgacatggctcatgcatcacgtaattcaagggagcagttgagggcccatggtggattggatgtgttcttgagcttgcttgatgatgagctgtggtctgtgacagcattagatgcacttgctgtttgcttggctcatgacagtgacaaccgcaaggtggaacaagctttgcttaagcgggcggcagttcagagattggtgaagtttttccaatgttgtccggagcaacattttgtccacatattggagccattcttgaaaattatcacgaaatcatcccgaataaacacaacattagctgttaatggtttgacgcccttgctaatctcaagattggatcatcaggatgctattgctcgtcttattctacttaaattaattaaggctgtttatgagcaccacccgcgaccaaaacaattaatagtggagaacgatttaccacagaagcttcagaatctaatcgaagaacgcagagatgggcagcgttctggaggccaagtgttagtgaaacaaatggctacatcgttgctcaaagcccttcatgttaacaccgtcatgtaagttatttgtgttcaagttctcctccctgtatgtatatttttgcctcgttagtaaggcgtgattctccctccacctttgattttctccaaattttttgccccttagttt

SEQ ID NO: 14071 - DNA, 598 bp, Gossypium hirsutum
  unsure (1)..(598): unsure at all n locations
  Clone ID: LIB3829-023-Q6-K6-G6
ccgggttgacccagcgttttgggaaaggtggcagnacttcttcttggggtgggccaagcagnaactaccgttaagtcctacatgtgtagccaaagcttgcttaaccgtcttttccagatgttcgatcgcattgacccacctattcttttaaagattctgaagtgtattaattatttgtccactgatccaaactgcttaggggaggttcagcgagcagatgcaattaagtatttgatccccaatctagagctcaaagatggacctcttgtatcccaaatgcagcacgagataaataagaagagacaggaacaagcagcagaaaatggaatcgttccacacttgatgagtttcatcatatcagattctcccttgaagcaacatgcgttgccactactgtgtgacatggctcatgcatcacgtaattcaagggaacagttgagggtccatggaggattggatgtgttcttgagcttgcttgatgatgagctgtggtctgtgacagcattagatgcacttgctatttgcttggctaatgacagtgacaaccgaaaggtggaacaagctttgctaaagaaggatgcagttcacagattggtga

SEQ ID NO: 14072 - DNA, 584 bp, Gossypium hirsutum
  Clone ID: GOSHI-09MAY01-C84536_1
ttcctatcttcgtcgctctacaagcttcacatctgcacccttgattctcaatcagacggctgtgacagctccaccccatcacggccgtcgtgatgtccgagaaaaacaaaaggtagtaatgcaaatgggacaagctccaccgaagccaaagccgacggaaattcacgacgtggtctttggaatcgcggcttcttccaagctatggcagcagagaaaagagtacatcaagatttggtacaagccaaaccaactgcgtggtgtggtttggctggacgatcgcgtcaaatactctgcccaagacaaccgaacccttccaccgtttcgagtctccagcgacacttccaagttcccttacaccaaccggaagggtcaccgttccgcgattcggatctcgaggatcgtgacggagactttgaggatgaagatggataacgtccggtgggtcgtgatgggcgacgatgacaccgttttcatcaccgcttatctggtcaggattttgaggaaatatgatcatactcagtattattacatcggaagcttgtcggaatctcatattcagaacatttttttctcctacggcatgg

SEQ ID NO: 14073 - DNA, 486 bp, Gossypium hirsutum
  Clone ID: GOSHI-09MAY01-C84656_1
tacattgtacgcctgcgggtctccccttcgcaccggagaatgggaatagggctaaagctggtgctaagagtggatgagtggtttgtccaaaacggcactgaatactcttacttagccacggaaaacgacaaccaagcttccgttaatctcttcactgataaatgcggctactccaagttccggaccccttccattttggttaaccccgttttcgcccatcgactccctgtttccaaccgagtctctctgattaagctgtccccatccgacgccgagtcgctatatcggcgtcgtttctccaccatcgagttcttccctcgcgacattgactcggtgcttaataacagactcagcctggggacctttttggcagtgccacgtggatgttgctatacgcatgaaacgtgggccgggtgtgataagtttttatccgacccgccagagtcatgggcggttttgagtgtgtggaattgcaaggacgtggtt

SEQ ID NO: 14074 - DNA, 827 bp, Gossypium hirsutum
  Clone ID: GOSHI-09MAY01-C84676_1
tcactattttgaaagctggcgcccctgcatgccccggcccggtatcccggggagtctccttggtgcagatcaacataacgttggcccttatgcaatttctgagttacgtgagcatttcttaaacggataccttactgaaagtacacttgcatggtctgaagggagaagtcagcggcaaccattgtcctcaattcccgagtttgttgctgtaattagtcatgaggccaacaatttttctgctacaggtggcgaccacgcgtccgcccacgcgttcggccacgcgggcgattcaaatgcagtgccttccaatgatggtgatggtagtgatgaatttgagaaatggcagagagagattagagaggctgaggctgagacagaacgtttgaaaactggatctgtttctagaagtactggtgatgcctttggttttgatgatcaggataggcctctgacaccgccagaaggtgaagacgaattcactgatgatgatggaaccaggtacaagtgggatagaaatctgcgagcatgggttcctcaggatgacatgtcaacacaaaatgggaactatggagtagaagagatgacattcttggaagaagatgaagtttttccaactataagtgctactgatgcttctgctgctgtgccggatgcttctgttagagaaaatgttaatggaagtggtgagcaaacagaagtaaactgtaatgccaagaagaaactgtggaaaaaacccgttgataagaaggaagctaataaacctccggattcttggtttcaactgaaagtaaatacacatgtctatgtgactggactacctgatgatg

SEQ ID NO: 14075 - DNA, 629 bp, Gossypium hirsutum
  unsure (1)..(629): unsure at all n locations
  Clone ID: LIB3828-016-Q1-K6-C11
gnaaagaatatttatttcggccaactcggcttttcatcgtataccgaacagcgccctcttccagactcgtctctcttcgccctaccgtatccctgtcagctcatttctgctcacgtctctcctcctcttcctccgatctctgacccaagccctctcttccactcaagtttccgacgaacccaaccaaagacccggatattaaataaagactatgttgtcttcggatggctcagacaaccatccacagtccgttgctggtgtaggctggtatatacttggtgaagatcaacaaaatgttggcccttatgcaatttctgagttacgtgagcatttcttaaacggatacctcactgaaagtacacttgcatggtctgaagggagaagtcagtggcaaccattgtcctcaattcccgagtttgtttctgtaatttctcatcaggccaacaatttttctgctacagtgtcctcaggcgatgatgatgctttcttgaacagtatgaaggagggcgataattcaaatgcagagccttccaatgatggtgatggtagtgatgaatttgagaaatggcagagagagattagagaggctngagctgagacagaatgtttgaaaactggatctgtttcta

SEQ ID NO: 14076 - DNA, 350 bp, Gossypium hirsutum
  Clone ID: uC-gsflmaxxa009e11b1
atatacttggtgaagatcaacaaaacgttggcccttatgcaatttctgagttacgtgagcatttcttaaacggatacctcactgaaagtacacttgcatggtctgaagggagaagtcagtggcaaccattgtcctcaattcccgagtttgtttctgtaatttctcatcaggccaacaatttttctgctacaggtggtgatgatgctttcttgaacagtatgaaggaaggtgataattcaaaatgcagtggctcccaatgatagtgatggttgtggggtatgcagagaacaggcttagagagatttaaagaggcggaaactgacacagaacggatggaacaagtcacagtt

SEQ ID NO: 14077 - DNA, 531 bp, Gossypium hirsutum
  Clone ID: GOSHI-09MAY01-C84636_1
cccaagcaaacgcagaaagcaaagccaagtgcagaatctgcagatcaaaagcaagaaattttgactcatcaaaaagccgtcgtggtgttgatttggatcttatcagcaaattctgcagatggcatcgcgtactgtcagtttgattcaagatcagaatctaaatgttcagtttaatggcaaggctaatatctctaaagcaccgagaaaagccagtactggtggaagaaaaccacttggtgatctatcaaattcagtgaacccaaccgcaaagcagatatctaaaaaggagaattccaagatcattactttcactgagaaagaaacagttgcctttaaactcccaaatgattcaagcaggaaaaagaatgtccctaaggcctcagagaaagttcaagctagtggcaggaaagctctctctgacatttctaactcaggcaagcctcacttgcaaggaacatcaaagaaccaaactgcaaagctatgtattccagaagatatttcagaggaagggtttcttgcacatcatgaaga

SEQ ID NO: 14078 - DNA, 503 bp, Gossypium hirsutum
  Clone ID: uC-gsflmaxxa041e08b1
tcgcccacgcgtccgcccacgcgtccgcccacgcgtccgcccacgcgtccgggggaatctagtgagtcccaggaacggcaactgaaggcaagccattgccagcctcaatcatcacagctgcaacataatgtagatattgaacattcacacacgtcacttacagattctgccttgagggctatcagatgtgcacttagatattctgccagccctaaaactaacaaatctaaccaagaaaatcaagggccgttgggctgcaccaaatcccagcctgagcagagcccacagagacccgaacagcgacagttcacaaagaagaggaaaggaagaggtcctactcgctgcctcttcttaaatgatctggcagatggtgagcggatatttgtccacatcaacaagtttggacagcctgttggtccaaattcatccaagctaagcagcttcctgggcactgtagcacggaatggacacagggcaccacttaattttatagactggagggc

SEQ ID NO: 14079 - DNA, 479 bp, Gossypium hirsutum
  Clone ID: LIB3493-039-P1-M1-B10
caacagtccccgttgagccgtagtgaatctagtgaacctcagcaactgcatccaaagacaagccattgccggcctcagtcatcccagctgcaagataatttagatattgattctgccttgaggggtattagatgtgcacttgagtattctgcccgccccacaaccaacaaatctaacaaagcagatcaggaccaattggcctctgtcaatctccagcctgagcagactccgcagagcccggaacatccacagcgcataacaaagaagaagagaggaagaggtcccactcgctgccgcttcttgaatgacttggcagatggtgagcggatttttgttcatttcaacaagtttggacagcctgttggtcctgagtcatccaagctaagcagcttcctgggcactatagcacggaatggacacaaggcaccccttaattttgttcactggagagcaatgccagattcttacaaagaggaaat

SEQ ID NO: 14080 - DNA, 559 bp, Gossypium hirsutum
  Clone ID: LIB3825-022-Q1-K6-C7
aagaactgaaaagcgtggcagtgattgagctgcgaagtgagacaaaaagaattttgcgaggaagaaaaagaagaatatgcaaaggttttgcttattcttcttcttcttcttaaatgctttgagggattaagttattcgaaggaaaaagttcgtcgtcttccttcgctgcctcagaaaagctaaacgtttcgttctgtgctgtctgcgtattgatttattgtaatggcgtttgcttttttttccgacgcttgatggccttcttctctgaatctgctgttgtataaggcaataattgaagtccggtcttactattgcaagaaatatggattttgagtcgaacaagagatggaaatctatgtctgtggtgccacgtctgttgaaaaacaaatcagcctctcgttgttttctaccgaaggtgaagccagctagttctgatccaggctacacaccggtctatctgaatgtatatgacctaacgcccatgaatggctatttttactgggcaggccttggtatctatcattctggtgtcgaagttcatggtgtggaatatgctttt

SEQ ID NO: 14081 - DNA, 528 bp, Gossypium hirsutum
  Clone ID: AI730308.1
aaaaatgtttttcatatatttgaacatcctctgatgctttgatacttgttgttcttgaaactgctcttacgagattgttacgtgttgtaatacgagagcaacggattgtaccttcatcgtcttcttttttcagattccattgttgttgtataaggcaataattgaagtccggtcttactattgcaagaaatatggattttgagtcgaacaagagatggaaatctatgtctgtggtgccacgtctgttgaaaaacaaatcagcctctcgttgttttctaccgaaggtgaagccagctagttctgatccaggctacacaccggtctatctgaatgtatatgacctaacgcccatgaatggctatttttacggggcaggccttggtatctatcattctggtgtccaagttcatggtgttgaatatgcttttggagctcatgactatccgaccagtggtgtttttgaggttgaaccgcggcagtgtccgggcttcaagttcaggaaatcaatattcatcgggaccacttcag

SEQ ID NO: 14082 - DNA, 448 bp, Gossypium hirsutum
  unsure (1)..(448): unsure at all n locations
  Clone ID: LIB3582-037-P1-K1-A2
attttgcgaggaagaaaaagaagaatatgcaaaggttttgcttattcttcttcttcttcttaaatgctttgagggattaagttattcgaaaggaaaaagtatcgtcgtcttccttcgctgcctcagaaaagctaaacgtttcgttctgtgctgtctgcgtattgatttattgtaatggcgtttgcttttttttccgacgcttgatggccttcttctctgaatctaaatatggattttgagtcgaacaagagatggaaatctatgtctgtggtgccacgtctgttgaaaaacaaatcagcctctcgttgttttctaccgaaggtgaagccagctagttctgatccaggctacacaccggtctatctgaatgtatatgacctaacgcccatgaatggctattnntactgngcaggcctnngtatctatcattctggtgtcgaagttcatg

SEQ ID NO: 14083 - DNA, 857 bp, Gossypium hirsutum
  Clone ID: GOSHI-09MAY01-C86996_2
gtacattgtgttaacccaccaatagaaccaagccaagtaaacttttgaccttctatccttcttaaccacaacataccctcaccataatttcaattctgcacttgtgacttcctttccactttcttcatttttttttgtagtgcagcagaactctcttggcacgcaccttcaccattctatctgcatttgaacaataggatctttgctaataatggatatttctcactgggtctttgttgtttcggttcttctcctctttttggcatctggatctttctcaatcgacaattttcaccaaccatttcctattgtggagcctgatcctggtcatacaaagcttcgcctttcgagggaaggcttggaagccatcagcagaataaataccccaattgcagctgttgctgtcataggtccctaccgctctggcaaatcttttctgctgaatcttcttctttcactgtcttgtgatgaaggatttggggccgggcacatgcgtgacacatatacaaagggaattcgggtttggggaaccccgctcgaagtggatattgatggagtaagaacttctgtcttctaccttgacaccgagggttttgaaagtgttgggaagtcaaatgtatacgacgataggattattgcattggcaactgttatgagctctgtactaatttacaagctgcctgagacgactcgtgaagctgacatatctcggctgtcatttgctgccgagcttgctgaagaattttatggaagagtgaaggggcaagacattggtcttgaacctggagaacttttgtggcttatccagcgtgatttcctgcaaggaaaatcagtgaaagatatggtggatgatgcac

SEQ ID NO: 14084 - DNA, 664 bp, Gossypium hirsutum
  Clone ID: LIB3828-001-Q1-K6-C8
gtgacacaaaacaaaggtaagagacagcagtgatgttacaattatgcataatggttacacaattgatgtttacactcatccgtattaggaatttgggtttggggaaccccgctagaagtggatattgatggagtaagaacttctgttttctaccttgacaccgagggttttgaaagtgttgggaagtcaaatgtatacgacgataggatttttgcattggcaactgttatgagctctgtactaatttacaacctgcctgagacgattcgtgaagctgacatatctcggctgtcatttgctgttgagcttgctgaagaattttatggaagagtgaaggggcaagacattgcttttgaacctgcaaaacttttgtggcttatccagcgtgattttctgcaaggaaaatcagtgaaagaaatggtggatgaggcacttaggcatgtccctaacagtgatggggacaaaaatattgatcaggtgaaccagattcgggactcattagctgtaatgggggataacagcacggcatttagcttaccacaacctcatctcatgcgaacaaagctttgtgacctgaaggatgacgaccttgatcccatgtatgttaagaaaagagggcattgaaaaagctgtggctagtattatacgcccaaaaatcgtgcag

SEQ ID NO: 14085 - DNA, 570 bp, Gossypium hirsutum
  Clone ID: AI728277.1
gtagtttttctctctgaaatttcctctcatgcgggtttacgatgcttaacgtacactcttctacagggtctcgttagatcccattcttgccgttacctttttatttctttccttttatcttttatttcgttcttttcatgtttgccttattcgtatagttcttctatctgcattgggaaaatagcgatctttgctaacaatggagatttcttattggatctttgttttttcgattcttctcgtctttttggtatctgggtcttcctcaattgataattttcatcaaccatttcctattgtggagcctgatcctggtcatacaaagcttcgtctttcaagggaaggcttggaagccatcagcagaataactacccctatttcagctgttgctgtcattggtccctaccgttctggcaaatcttttctgctaaatcaacttctttcactgtcttgtgatgaaggatttggtgttggacacatgcgtgacacaaaaacaaagggaatttgggtttggggaaccccgctagaattggatattgatggagtaagaacttctgttttctaccttga

SEQ ID NO: 14086 - DNA, 554 bp, Gossypium hirsutum
  Clone ID: GOSHI-09MAY01-C86986_2
gttttgcagtgtttctcttttacattagagaatatattactgcatttcccttgaatcacattaataaactatatttcctttatttttaaattttaacccagcaaataaagatggctcgccaagttatgctcgtcgtcgcccttgttctcattgccgttgttggggcttatgcggcggatgtgcccaagacctcttcttcttcatcaccttcaacatctcccgcctcatctccctcctcctccattagcactagcagttcccctcctacaccagacggcggtgctctcgctccatcaccatctagtgccgtttctctcaaagcctccagcttcgttggtgctgttaccgctgttgccggactgggactcttttacttctaaggtttaacacgccacatgcatggcccgtggatcaacgctttttatttatttatttatacatatatatgattaaaatgtattttgcttgcgaatagccgcggcatagaatgtgtgaacagtcttgaataataataataataacaagactttggcgagtgtttatttatttaaaaa

SEQ ID NO: 14087 - DNA, 595 bp, Gossypium hirsutum
  Clone ID: GOSHI-09MAY01-C86986_1
gttttgcagtgtttctcttttacattagagaattattactgcatttcccttgaatacattaaaaacatttacttatatttcttttatttttaaaatttaacccagcaaataaagatggctcgccaagttatgctcgtcgtcgcccttgttctcattgccgttgttggggcttatgcggcggatgtgcccaagacctcttcttcttcatcgccttcaacatctcccgcctcatctccctcctcctccattggcactagcagttcccctcctacaccaaacggcggtgctctcgctccatcaccatctagtgccgtttctctcaaagcctccagtttcgttggtgctgttaccgttgttgccggactcggactcttttacttctaaggtttaacacgctacatgcatggccggtggatctacgctttatatatatatatatgattaaaatgtattttgcttgcgaatagccgcggcatagaatgtgtgaacagtcttgaataataataataagaagactttggcgagtgttttttttcttttttttttttcccattttgtttgcttttaccgcataggaaatttcaaaggatataat

SEQ ID NO: 14088 - DNA, 481 bp, Gossypium hirsutum
  Clone ID: GOSHI-09MAY01-C86876_1
cggacgcgtgggttctcctacagggttgttgagtttggttgtgttcatggtcttggtggtggagcctcatccagcctatggctcgagccgtggtggttggtttggccgaaaccaaggtgcagccactccactagtcaatgggatatgcgccgcctcggtcactatccatggttacaaatgtgaggaacaccaagtgaaaacccaagatggatataacttgagcatgcaaagaatcccagagggacgtataggtgggaatattagtggaaataagaagcagccggtgttgatacaacatggtgtacttgtggtgagcccctttttttttttcttcttttctttttaccatattggatgaatgttttacgtgatttacttttacaaaagaaattgccaagactttatctaagcaccataaaagaatgtctaccttagtttgggtgcaccatgtgtgggaataaagtgacatttgtttcaaaaa

SEQ ID NO: 14089 - DNA, 845 bp, Gossypium hirsutum
  Clone ID: GOSHI-09MAY01-C86586_1
tcgaaaacagattgagagaacaaggagggagaagacacacaagagatgattctatctactctataccaaagctttgatcttctgtcccaaagccataaattccccttccatacaaagttccaagacatgagcttggagctttgaattgatctgttgatgggtattttttagattctgatttggaatcaggaacttgaaggtttggatattgataattacttgaagtataaagagcagcggagattgtttcaaattttgggaggagttggtcttggaaaaaggaggatcaagaagttttaccaggatgatatctctgtatccttagttaggggagttagggcccgaagaagatgaggaagactttcagagctgttgtgaagatgatgaggtatggaaggacaatgaagaggtggcgaaagaggaagaaaagaaagagcttgatgaattttcagtgaagatgttcttcaagggcatctctttagctgaaactggggactctagttctgggttttcaggaattggggtggtcatggagagatcagccagtagccctgttattcaagtgcagaaaaagcttgacttttatgttgaggaatctgtggctgattatttagccttaatggatggtttgacagaggctatgcagaacaaaattcgccgagtatatgcttttactgattccgcattgctacatgatcagattacatgtgaggagaaccttgataatccacttttgatggcgttaagggaaagagtcatggaacattcccgtaatttggaagagtttgtcctgaaacttgttccaagcaccgatcttttgaggccattgcagctagcccaagtag

SEQ ID NO: 14090 - DNA, 517 bp, Gossypium hirsutum
  Clone ID: LIB3583-013-P1-K1-C5
acgccatgaaacgaacagcaaataattggtcttttttccctttctttttctttccaaataatgatctttgatcttaatttatagaaaaacaaaactaagctaaaaacagatttgagagaacaaagaaggaaaagaacacagagagagatgattctatctactctctaccaaagctttgatcttctgtcccaaaggtttggatattgataattacttgaagtgtaaagagcagcggagattgtttcaattatttggaggagttgttcttggaaaaatggaggatcaggaagttttaccggataatatctctgtagccttagttaggggagttagggccgaagaagatgaggaagactttcagagctgttgtgaagatgatgaggtatggaaggacaatgaagaggtggcgaaagaggaagaaaagaaagagcttgatgaattttcagtgaagatgttcttcaagggcatctctttagctgaaactggggactctagttttgggttttcaggaattggg

SEQ ID NO: 14091 - DNA, 968 bp, Gossypium hirsutum
  Clone ID: GOSHI-09MAY01-C86316_1
gttttccatgtatagtagattgagagaggcgtaagggcaaagaagctactaaagttttgatccatgcgctcactcttcttctgattagggacgacaagatatagtgactctcaaggtatgggatgcctggtttcaactcccaaggattctgggggaaataggcggaggccaggaagtattggggaagtttctgtgtatgtcccaggtttacgaattcccaagcctgtggatttctctcaatcactcggtggtcacgtgtcaaagacattagtggagcgccttactgccttgagaactcgtatagttgttatggctggccaagaagcacctacaattacaagaacaaggaggaaaactgctacacagcatgggcgttcaacattggcagatcttcatcaggctcttgaagactacttgcctgtgcttttgggattagttacagatgggagtcagctacaatataaagtacagtttatttgggtaaatcaggaggatgatgctgaggaaacagcaatgtttaatgcttggtatgaggtgttgtcagtattgcatttgatggcgatgttattgttatcacaagccaacttattgcttcttcctaggacttctgctgatggttatcaaccaaaagtatcagaagaaagcaggcgagcttctattgatattttcttgaaggctgcggggtacttggattgtgctgtcagacatgttcttccccagttgccatctgaacttaggtgagaaatttgccagtagacctagcagaaggagttcttcgagcactatgtttgcaggcattaggacagggtgttgatatccaacttggaatggcaattgatagtaccaaggctactctagctgtgaaacgaaggcttgcatgtgagatggtaaaatactggcagcaggctcaggataatattatgaatcttccactatcaaatggatgggggtgaaaagcatcgggcttt

SEQ ID NO: 14092 - DNA, 639 bp, Gossypium hirsutum
  Clone ID: AI054493.1
gctagggtttggactttggacgtttggagtttgactcggacgcatgaaactactagacttttgacccatcccttcaccttcttctgataagggacaacaagatatagtaactctcaagatatgggatgtctggtttcaactcccaaggattctgggggaaataggcggaggccaggaaatattggggaagtttctgtatatgtaccaggtttacgaattcccaagtctgcggatttctttcaatcactcggtggtcacttgtcaaagacattagtggaacgccttactgccttgagaactcgtatagttgttatggctggccaagaagcacctactattacaagatcaaggaggataactgcttcacagcatgggggttcaacattggcagatcttcatcggctctttgagactacttgcctgtgcttctgggatagttacagatgggagtagctacaatttaaagtctagttatttgtgtaatctgaggattatgctgatgatcagcttgtttaagcttgtatagggctatagattgctttgtgctgatttcttgctttcatgctgctgattgttattccatgacatgctctggtttaatcaaattctggttatttagtcacttctgtgatcttgaaa

SEQ ID NO: 14093 - DNA, 782 bp, Gossypium hirsutum
  Clone ID: GOSHI-09MAY01-C87696_2
ggaagcaaagtaactacaatggaaaagcgaccgagtataaagactatgcagctgaagacccgcgcgtcccgaaggacgtgacagctgagaagacaaaacaggggacggaatatgcagcggagaaagcaaaggaaggtaaggatacaacagttagtaagcttggggagttgaaagattcagctgcagacgctgctaagagggctatggatttcctcactgggaagacggaagaaacgaagcagaaggcatccgagactgcacagaacaccaaggagacattgagtgaaacgacggagtcagctagacagaagatggaagagatgaagctgagaggtgatgaaggtagaaggaagacttacgatgatgatgtgaaacgccaaggtcgtgaagggctttcagagacgatagtgattaaggttgaagaatccccggcaggagccgttgatgctaccgtgagatcatctgatgaaacattcaatgatgttgggcgtgttggggaggaaggcgctattcgtgatcgctccagcaaaaccaaaatgtgatctcacactgcacatacccttaatataggggtggaatatttgcgttgcttttcattattttaacttctgtttgtgttgtctttttgtaatacaagtacgttctttgttgcatatcttctaaataaacagaacagtatgaattctgggacgaatgtgcatttctgggtgtttgaatgataatgggaagtatggctagggtgtgagttttggttctagaaatcatgtcttcattgtgaagcc

SEQ ID NO: 14094 - DNA, 1711 bp, Gossypium hirsutum
  Clone ID: GOSHI-09MAY01-C87696_1
atgagcttgcgtttgagattgaatcgaggttgaatatttagccatggcgacgaggcaagagaaggagcgaagagcggaggcggcggctagacaagccgcggatgatcttagggatattaacagtggaagagaatatgaagagagagttgtttatcaggaggaattggatcgatcgtcacagcaacaacaacaaaggttgcctgaagaaagttttgcgtataaagaggaatggggaagggaaacttcaccccagcaacagcaacagaggcctggagttattggaaccgtgttgagggctgtgcaaggtacttacgagcatgcaaaagaagctgtggtcggtaagagccatgagagggaaggagtttacggaggtggagggaagacatgggggactactgatgaaggtgacggtcccgtggggtttgctgagaggcaaagacactaccatggaaaagctggtgagtacaaagactatgcatctgagaaagcataccagagtgctgataaggccaaacagatgaaggatactacgaaggaaaaggctgctgaatatacagattacgccgctcagaaggcaaaggagacgaaaaactcagcagcccagcggacaaaagaaaccaaagacactgtaacaggtaaagcttctgagtatacagattatgctgcccagaaagctaaggacgcaaaggacaccacagcaaaaaaggcttccgagtatacagactatgcagcacagcaaactaagggtgcaaaggatgctacaacggggaaagcgactgaatataaggattatacagccgagaaagccaaggaggcaagagataccacagcccaaaaggcttctgagtatacagattatgctgcccagaaagctaaggacgcaaaagacaccactgcacagaaggcttccgagtatacaggctatgcagcacagaaaactaaggatgcaaaggatgctacaatggggaaagcgactgaatataaggattatacagcccagaaagccaaggaggcaagagatactacagcccaaaaggcttctgagtacacagattatgcagcacagaaagctaaggatgcaaaggatgccgcaattggaaaagcgactgaatataaggactatgcagctgagaaagccaagggagcaaaggatacgacagcgcagaaggctcccgagttgacagactacgcagcgcagaaagctaaggaagcaaaagatactacaatggaaaaagcgaccgagtataaagactatgcagctgaaaaagcgaaggaagcgaaggacgtgacagctgagaagacaaaacaggggacggaatatgcagcggagaaagcaaaggaaggtaaggatacaacagttagtaagcttggggagttgaaagattcagctgcagacgctgctaagagagctatggatttcctcactgggaagacggaagaaacgaagcagaagacatccgagactgcacagaacaccagggtgatgaccttatttattccaacctttttcctttataaataatattttttaatcgtgatacataatgatactgtatgttgtaatttcttcttttctttttctttttttgcttcttacctgctgtgcaatggatattggattcacgtagatcttgtcgtgtaacatattcattttgagcatttgacgtctgttggtcctaataatttgtatgtgatggcctgattttctttc

SEQ ID NO: 14095 - DNA, 458 bp, Gossypium hirsutum
  Clone ID: GOSHI-09MAY01-C87686_1
cggacgcgtggggtttgccgcagcctcccttttcttccactccagatccacccattccgacggcggaatgaagatccctcaacgccgtatgcgacttttttcgcatgtatgaaagtcgtggaggacgtgcgcaaagtgctgaacgtggggcgatgttgaggcgtgggtgaggttgtcgcggctgctgattttgctgctaggtttctctgttttgtgttttaggctagtgggttaattgggccctgtaattgggttaagcttggcccaagttttattggatttaattgtatttaatttgggcagtgttatgatattgggttggtcttattttgaatgggccgggcaaaactgggttattacacatataatgtttggtttcttcgaataaagtaatgtaactgacttgaaaagttatagtaatcattaagtaatggattaaatatagaattggtacttgg

SEQ ID NO: 14096 - DNA, 623 bp, Gossypium hirsutum
  unsure (1)..(623): unsure at all n locations
  Clone ID: uC-gsronu33B074a10b1
ttcagatccacccattccgacggcggaatgaagatccctcaacgccgtatgcgacttttttcgcatgtatgaaagtcgtggaggacgtgcgcaaagtgctgaacgtggggcgatgttgaggcgtgggtgagtgttgtttttttttttttttttattttttttttttttttttntttttttttttttttttttttttntttttttttttttttttttttttttttttatttattatttatatatttttttttatattttaattatttttttattattttattatatttttttatttttattattttttttttttttaatattttttatttttataatattattttttttattatattattatttatattatatatattattttttttaagtatttattaatttattttttattttttattttttatttaatttttatatgtatttattgttttatttatttattttttaaatattatatattaattattttattttattattatgtaattattattaattattttttttttaagtatattaatatattattcattatttttaattattttttattattttttattatttttatatatcaatattaattaattttatattatata

SEQ ID NO: 14097 - DNA, 428 bp, Gossypium hirsutum
  Clone ID: uC-gsronu33B039e01b1
cgtacgcgtgggcggacgcgtggggtttgccgtagcctgcctgttcttccactacagatccacccattgcgacggcggaatgaagatccgtcaacgccgtatgcgactattttcgcatgtatgaaagtcgaggaggacgtgcgcaaagtgctgaacgtggggcgacgttgtggcgtcggcgaggttgtcgcgattgctgatttagttggtaggttgatgtgttttgtgttttaagctagtggtgtcatcgggccctgtgatcgggttcagatgggaccaggctttattggatgtaatagaattgaagatgggcagagctatgaattgggggaggcaatatttaccaggggaccatgtgagctcatttatttgaacaagtatgagatgataccttcgactggaaggtcctgagctgctggggcttgtat

SEQ ID NO: 14098 - DNA, 1044 bp, Gossypium hirsutum
  Clone ID: GOSHI-09MAY01-C87166_1
aattgcttttggtcaattgaaaggtttgcttggagggaattacagttggctactgatagcttcagtgaaaagaatatcctcggacagggaggttttggaaaggtttataaaggcgtgctttctgataacacaaaaattgcagttaagagattaaccgattttgaaagtcctggaggagatgcggcttttcaacgtgaagtcgagatgataagcgtagctgttcacaggaatctcttgaggctgattggcttttgcacaacaccaactgaacgccttttggtttatccgtttatggagaatttaagtgtggcctatcgccttagagaactcaaacctggtgaacttgttttagattggcctcaaagaaaaagaataaccctaggtgcagcatgtgggctggagtaccttcatgaacattgcaatcctaagatcattcatcgagatgtgaaggctgcaaatgtattattggatgaagattttgaagcagttgtcggtgactttggccttgcgaagttggtggatgtgaggcggacagatgtgacaactcaagttcgcgggacaatgggacacatagcacccgagtacttgtccactgggaagtcatcagaaagaacggatgtctttggttatgggattatgcttctagagcttgtgacaggtcaacgtgcaattgatttctcacgcttggaagatgaagatgatgttctgcttcttgactatgtcaagaagctggaaagggagaaaaacctggatgctatcgtagatcataatcttaataaaaattaccacatggaggacgttgaggcaatgatccaagttgcattgctttgcaccccagcctccccagaggaccctccggcaatgttcggaggtggtgaggatcccggaggaaacaggcctcccccaaaggtgggaagcaatgggcccccgtccaggtccccctttcggcgtgagttgtcacttgactgcgcctggatatttccccggggggatagactgcctccttcaccgtggttcgccttcgattggctccgctcgcagtat

SEQ ID NO: 14099 - DNA, 507 bp, Gossypium hirsutum
  Clone ID: GOSHI-09MAY01-C87386_1
cttgagtccagtggagctgttgatgctctcaccaaagttttggttgcattgtatgaacaaaatgagaagccatcttcagcccttgagttcatacaacaaaaattagggggtccaactatatatgaatatgaaaagctacaagctgagatttcagatttgcaaacaaagtacaatgagctattgtgtaagcatgaggatgcttgcaaagagttagaggagcttaagaatatgcattcttcagtttcaccatcgacaaaggagactaatgatggggagccattgaaagatgagcatgttgagaagaactcatgaagcagttcttcatatggttgtgatctactgctaatgactcattgtctctattaatgtctgtaaaatatttgttgatttgcactttgttactcattgttgataccccatttatatctgtgtgagtttatccgtgcatttgaagggatacctatatgattatgtggatgattcgtatttattgtatttgcagtgtat

SEQ ID NO: 14100 - DNA, 1057 bp, Gossypium hirsutum
  Clone ID: GOSHI-09MAY01-C80146_1
tctgttctatgatcctgatccaaatccgaaaatgaggaacaggcagttgctagagctcaccgaattggacaaacaagggaagtcaaagtaatttacatggaagcagttgttgacaaaatctctagtcagcagaaggaggatgaattaaggagtggaggtacagttgattttgaggatgattttgctggtaaggatagatatatgggatccattgagagcctcataaggaataacattcaacagtataaaatcgacatggccgatgaagtaatcaatgctggacgttttgaccagagaacaacacatgaagagagacgcatgactttggaaacattgttgcatgatgaggagaggtatcaagaaactgtccatgatgttccctcattgcatcaggtaaatcgcatgatagcaagaagtgaggaagaagttgagctgtttgatcaaatggatgaagaactggattggactgaggagatgacttgtcatgaacaggtacctaagtggcttcgagccagtgtaagagaagtaaatgctgctgtagctactttatcaaaaaagccatcaaagaacattttatttactgctggtggcggtactgaatccaaagaaacagacacaggtaaaaggaggccaagccatttatgactttctagtttctagatcatcaccttaaaaaagaaaaagaaaaagaaattgctgccattgagtgcaagtgcctagtgtattttgtggctcttcatggcctgtacaactgcaattagatcataccattaatgtagtgtaggctcattgatccccctcgctgtatacgtctttccgtagtagtttcaatgcaatagttttcatatctgcagcttgcaggtatcactatttatacccatattttccttttggaagaaatagattgcagttttagtaggagaaaagagcttgcgaatattaagattcgagtatcgtatttactgcatgaatttgccattgacagaagacaggcttaattgtacatttatttagtgacagcaggaactattgagagttgagaaagttctttcctcgt

SEQ ID NO: 14101 - DNA, 318 bp, Gossypium hirsutum
  Clone ID: LIB3585-051-P1-K1-C5
cccacgcgtccggaaaagtctatggtaaagcctaggactggatctgttggccccatttcagccggagtatagttcgcaacatcaggagtccaacagcagggtcagtctctaaggatgtgagaccgacccaacagaccacccatcagccttggcccaaccaacctgctcatctgtcaaatgagcaggttggttgggccaatcctgtgaagaagttgagaacagacacaggtaaaaggaggccaagccatttatgactttctagtttctagatcatcaccttacaaaaaaaaaaaatgaaaccaacagaacaaagacaag

SEQ ID NO: 14102 - DNA, 682 bp, Gossypium hirsutum
  Clone ID: GOSHI-09MAY01-C80176_1
cccacgcgtccgcgttgcctcttcctccaggagcagccatggcttcgtcatcagcggcgcgttccccaagttacaactaaaccagagccgttgccaatgaattgtcaatggcaaaaaggcaagcttatcgggcgtggtacatttggaagtgtttgtggggcctgggacagagaaacgggagctttatgtgcaatgaaggaagttgagatatgtccggatgacccgaaatctgcagagtgtataaagcaattagagcaggagattaaggttcttagccacctcaagcacccaaacatagttcagtattatggtagtgaaatagctgaagacaagttctacatatatctggagtatgttcatcctggttcaattaataaatatgttcgcgaccactgcggtgccattactgaatctgttgtccgcaattttactcgccatattctttccgggttggcttacctccacagcacaaagacgatccacagggatattaaaggggctaatttgcttggtgatgcttcgggagttgtcaagcttgccgactttgggatgtccaaacatcttagcggacaaagagctgatctatctttgaagggaagcccatattggatggctccagagctcttgccagccgtgatgcagaaagataatcgtctgaacttgctctagctgttgatatttg

SEQ ID NO: 14103 - DNA, 665 bp, Gossypium hirsutum
  Clone ID: GOSHI-09MAY01-C80076_1
cccacgcgtacgggttttcgaggcggtggcggaaatgaaaaacgcttacgtaaggctacaagaggggcattgtccgtgtgaccctgagaggataactgctgctgacgttgccgtggtaggtgagctgacgaggcttggggtgttcagggaaaggtttaggagaggtacgcgcgctggtggcggtcgaaggaaaggacacgtggctatgctgaaggaagtggtggcgccatacgaggcggcggtggaggactggaagagggaagtgaaggttaaggaggtggagatcgagaacctgaaagagaagctcaacactgtcacttgcctttccaatggcggaaagaaaggacggagtctttccaagaggaaagtcagctgcaggcaagtacttggagcagcgccagtaccaacaccggagctgttcgaggctacaatgtgtcaggtgaaggaagcatcaaagtccttcacatctctcctcctttccctcatgcgcgaggctcgctgggatattgctgccgctgtccgatctattgaagctgcaacagctgctcatgataccaccgcttataccaccacgataactccctctgttattgcaaatcaccatgccaagtacgcgctcgagtcgtatgtttcacgcaaaatttttcaaggattcgaccacgaga

SEQ ID NO: 14104 - DNA, 933 bp, Gossypium hirsutum
  Clone ID: GOSHI-09MAY01-C80026_1
gggcgtacgcggacgcgtgggaagaaaacaataataatttatacggcgtcacaattgtttgctggagggggaaggatatcaagaaacggggacccgctattaaacggatcaaatccaattgggttcctaaattcaacaattctagcggcggaaacgctaatatcaacggcgaaaacaacacggaagataaatacagtggtggtgaagataacgatgtgttcggatgtggagaattcagagagtcccattaaagaacagagtccaattcattggtttggataatttgggtatccacaccgggagacctgtgcatgaagatggggtgcgaatatggctaaataatttgggtttaggaaggtacgctccactgttcgagatccatgaaggggatgatgaggttttgccattgttaacattggaagatttgaaagatatgggaataaatgcagttggttctagaaggaaaatgttttgtgctattcagaagcttagtaaagggttttcataacgtttttgcagtgatggagatatttatccgccattgcaatgtaagtttaagcttgtattagctctttctctgtttacattaacatttggtggagtgaagtaggagaatcattagggttttttttgtaaaagtatcattgacgagtctgattgtattttgacgttttcactcatagcaaattaatccctatacattatatcaaagagtaaattgtccaattctatggtaaaaaattggtctttgttctgtggcaccaatttttaataataaatattgatgaaaattttattagaagagactaatttgctctttaatcaaatgtacagggattaatttacttatttttaagaatagagcgggtttgtatggtagctttactgggtttttggttaatttttaaggtgctcttttgttaagttaatgct

SEQ ID NO: 14105 - DNA, 953 bp, Gossypium hirsutum
  Clone ID: GOSHI-09MAY01-C80326_1
cccacgcgtccgcccacgcgtccccggagaattccaaattggtaataacataaagccactgaaccccaatactgttgcaagtgtggttcgttatgggaggtcaagggttccattaactgatgaagccagtggttattctttggtgtacaaccaactttatccctttgaaggtctccagaattacacttctggaatcatccaccatgttcgtctaacaggactgaaacccagcacactctattattatcgatgtggagatccctcaataccagccatgagtggtatctaccatttcaggaccatgccagtttctggtcccaggagctatccaaacagaatagcagttgtgggagatcttggactaacatataatacaactgacactatccataatttgaaaagcaacaagcctgatctagttctattagttggtgacgtaagttatgcaaacctttaccgcacaaatggtactggctctgactgctatgattgctcatttccggagactccaatacatgagacctatcagcctcgttgggattactggggcaggtttatgcagagtttaatttctagaactccaataatggtgatagaagggaaccatgaaatagaggagcaagctgggaaacagagctttgtagcttacagttcgcgatttgcattcccttctgaagaaagcaaatcttcatccccattttactattcctttaatgcaggggggatacattttatcatgcttggagcatatgttgattatagtaaatcaggtagtatctgtccttgactccttgtataatcattctacaaagctttttcgtaatgatatcaaggataataatctgttactaatgtagagtttcaagcattttaatctctttgaaatgaggcaagcagttgggattttctaccatgttatgagagtaaacaatatcttagaatatgtaccattt

SEQ ID NO: 14106 - DNA, 531 bp, Gossypium hirsutum
  Clone ID: LIB3585-054-P1-K1-D12
cccacgcgtccggttccattaactgatgaagccagtggttattctttggtgtacaaccaactttatccctttgaaggtctccagaattacacttctggaatcatccaccatgttcgtctaacaggtttgagacatagtggttaccttactttaactcagtatcatatggattttaacttggaatccagtatgccgctatgcctggttccaccggatttttttctgttccaacaatgtgatgatagtatttgaagaggtctgctgattggaaaaaagttaaaaattaaataagaaacaatagagacgagcttaatgaaaacttttggccttattcttgttttattggattggtaaagtgtttctacttttgatggaggagatgttggattcaatttacagttatcatgcagtttgcaatagtagcaaccaggtaggatttaaatcaaatagttatttttaccaccaatttttataatatccacaaatgtttgagctgaagataatgcatgaactctgcgaagaaactaggat

SEQ ID NO: 14107 - DNA, 427 bp, Gossypium hirsutum
  Clone ID: GOSHI-09MAY01-C81686_2
ttcacgcgtccgtccaagtcatatttgtttcccaatatgaatgttttgagaggaattggagtccccgaatcgaatatccttatgctgctttaccgtcagcctcgaccgcttttgtatggtccggttcggcttaaggagattgtggaggaagtcaaaggaatggggtttgattcttcgacgaagaagttcctcgctgcggttattgctttgagttcaatgagcaaatccactctagagaagaaatttgatgtatataggagagggggttgggtcggaccaagagattcgtgaagcttttcacaggttatccttcctgtgtggcagtttctgaggataagatcatggcccgaatggattttctggtgaacaaaatgggctatagttcgactctcgttgccaaacaatcgagttttttaaggcagagttt

SEQ ID NO: 14108 - DNA, 562 bp, Gossypium hirsutum
  unsure (1)..(562): unsure at all n locations
  Clone ID: AI725695.1
agtttatatccctaaaaagggaaaaggaatacaccatcggagtgttttggaggtttagccggtgccggcagtgagcttcagctctcccgttctctggcggaaatttctgattctatctttggggtcacataaaagaggctggttcggcttaaggagattgtggagggagtttaaaaaaatggggtttgattcttcgacgaaaaagttcatcgatgtggttattgctttgagttcaatgagcaaatccactctaaagaagaaatttgatgtatataggagatggggttggtcggaccaagagattcatgaagcttttcaaaggtatcctatgtgtatggcagtttctgaggataagatcatggccgtaatggattttctggtgaacaaaatgggctataattccaatctccttgccaaaacatccaattattttaaggcagacttanaaaaagaagattttccccagggctttgtttgctcaaaaattgttatcacaaggtttggttactgactttaaattgtctgtattgtctcacacatcggagaaagtgtttgttgacca

SEQ ID NO: 14109 - DNA, 1105 bp, Gossypium hirsutum
  Clone ID: GOSHI-09MAY01-C82986_2
cccacgcgtccgcaaatagtgagtcattgtctcaagattcaagtacttcaaacagtgaaactgagagacacttggagaatgtaaaactgaagtctatgaagaaggaacaagagtctaagggcatagtttggtctcatgagctcctcaaatctcaatcagatgctgtgaacaggaagagattggtcttaaatttttttacaatacttgaaattgctgtttattgttgctccattttatggatcgataggtgatagttggtcctttagtgatataatgaaatgcatgtctgagtgaattcactagctaaatgttttatgatcaatgctgcaaacttttgcttctaaagatgctagtagtgggaattttctaaacagcgccagttcctcttgtaaggtcttcctctcttgaaccgttaacctcctctcctctgtcaggttttgaaatggttgctttcagccttggcctagctttgaattcaagggtcacttaattttgatttcatttcctccatatctttggcaaacttaagatcctcatcagtcttcaatgttttcaccttgtaatccttcacaggcttcaattcctcggtctctagaatatcctccattggctttgattcctcatctttcaccggctttaactccttgctattgaaagaattattctttggcttcagttcagtgtcttttattatatttaaattgtcaccaaaaatatcattcattggcttcagctctgcatccgtctttggcttcagttcagtgtcttttattatatttaaattgtcaccaaatatatcattcatgggcttcagctccgcatccttctttggttttaatttctcctcatataacatatctttcccttgaattccactctgcatcctttgttggcttcaaatcctcagtatttctcatctttgattcctcaatcgtcacaaccgttggaagtgttgcaaaagtctcaactctatcataatccattccctgattccttgtccccttaattggtgatagcactggcgaatcagaagggctgacaagggcaaccttaagcttgttctcttcaatatgtcttccactgtccttgacaaatgtgaaagaga

SEQ ID NO: 14110 - DNA, 1161 bp, Gossypium hirsutum
  Clone ID: GOSHI-09MAY01-C82986_1
cccacgcgtccgcccacgcgtccggttcaaatgaaaattgtacttgtatgtataaactgctaatctatgggttacctcatatgttccttttcctttaaccacaaacgttcacaaaacaatttttttgctttatattagccatccctataaaatattgtgcacacttgctatgttgaggaaagtaaactacaatcttctcttaactattaacaaacccactgcatgattgttgcgggaccacgccatcacatggagtatggctttgtcactgctgcatttggtaccccataaacatacttccgactgctaccatacacacaaataggagaggaaatcccacttgaactcttcttacatcactctttttcctcaacagcgccagttcctcttgtaaggtcttcctctcttgaaccgttaacctcctctcctctgtcagttttgaaatggttgcttcagccttgcctagctttgattcaaggtcacttaattttgatttcatttcctccatatctttggcaaacttaagatcctcatcagtcttcaatgttttcaccttgtaatccttcactggcttcaattcctcggtctctagaatatcctccattggctttgattcctcatctttcaccggctttaactccttgctattgaaagaattattctttggcttcagttcagtgtcttttattatatttaaattgtcaccaaaaatatcattcatgggcttcagctctgcatccttctttggcttcggttcagtgtcctttattatatttaaattgtcaccaaaagtatcattcatgggcttcagctctgcatccttctttggttttaatttctcctcatataacgtatctttccttgaattccactctacatcctttgttggctttaaatcctcagtatttctcatctttgattcctcaatcgtcaaaactctatcataatccattccctgattcattgtcccattaattggtgatagcactggcgaatctggagggctgacaagggcaaccttaagcttgttctcttcaataatcttccactgtccttgacaaatgtggcagatgtaatgtcttcatcagttgttcctactgggacaactgtgctttggattaagaacttatctctacatatcatatcaggaggggctccgga

SEQ ID NO: 14111 - DNA, 555 bp, Gossypium hirsutum
  unsure (1)..(555): unsure at all n locations
  Clone ID: LIB3582-060-P1-K1-C2
ccccgcgtccgctcaaacaccttcagncgttttgaaaaccaaagcttagtatagtttctctgaaatctgctttattccggaaccatctctccatttcttccttatttggcttcagtctggttctctcaccctgtcgatttctgcttgaatttctgcaactccaggggctcttccgaccaggtaaactcctctactactcttcatcgcttcagatgcaagattatgcgcaaggccatttgtagatcttgggagctttcctacatgtgattgcttccgctccaaaagctgatggaacccattgataaacctctgaacaagataagagaactgaaccctcttcatttctggccacaactccgatagccgctttattttgtcctcttacaaaagctgcatcaaaattgattttgataaaactgtccgttggttttacccatttttttccagttgtggaggactgtcggctagttttagcaactgagtctaactctgaaatgtaactgctaacaaatgtccctatttcttttgcagatttacctactttgttatgtaacc

SEQ ID NO: 14112 - DNA, 510 bp, Gossypium hirsutum
  Clone ID: LIB3582-027-P1-K1-A5
cccacgcgtccgcatctctccatctcttgcttattcggcttcagtctggttctctcaccctgtcgatttctgcttgaatttctgcaactccagcggctcttccgaccaggtaaactcctctactactcttcatcgcttcagatgcaagattatgcgcaaggccatacgtagatcttggggtatgctcaaacttacattccttaaagtataccgaaagctgatggatatcatgaataaacgcactgaccagtgatttatctgggttttgagttttacacttctctattattgataacgaatcaccttcaataataactctgtcccatttcatatgtacgccgatctggagagctttcctacatgtgattgcttgcgctccaaaagctgatggaacccattgataaacctctgaacaagatttacctgctttgttatgtaacctggtgttcctatcaccccaaatggcccagactgcaacacagaaaatccgacggagggatgctgagcact

SEQ ID NO: 14113 - DNA, 695 bp, Gossypium hirsutum
  Clone ID: GOSHI-09MAY01-C82146_1
tgaatgacataaataaacaaaaaccctaatttccttcttctcaaactcttaaactcctctcttttcctgcaatccaaacaaacaaaaactctctctttatctgtgacaccaaccaagcagcaaaccccccctgcataaatgatcagattttaataaatcggagaagggatattaatggaggctaacatttgtgacatcaatcacttggatgcggatgtcctcctgcctccccggaagcgcctgcttgcaggatttaagaaacaggcatccaatgccaatggtgcttcagatcagcctgcagtggcttcttcctcttcatctcctccttcaccttcaccttcaccttcaccttcaccctcaccctcacactcgccttctacttcttcaagtgatgttaatgaccatcttaaaaatttattgatgagttcccatttatataacccaaatctttctcctgaggagattttggaggcctcaagagcagcagctacctctgctgctaaagctgctgaggctgccagagctgctgcagaggagaaggctgcaattgcagctaaagctgttgctgcagctaagaatgcattggacatggtagcaaaattttctgaagacacgattaataaggaaagacacctaaaaaagaataagctcaagaaacatgtccctgttcaactcttgtacaagaaacacgaacc

SEQ ID NO: 14114 - DNA, 675 bp, Gossypium hirsutum
  Clone ID: GOSHI-09MAY01-C82096_1
gtcgaccacgcgtccggatgacaagaatgtacatgccacaccctccacagtcacaaacactggcccttcttcttcaactgaagctaatgagcaaaatttgtcatatgtacgtagttcacctagaaatttatctgatgatgacacaggcacagctcgtggttctgtacctcgtactttacctggcttgataaatgacattatgagcaaaggcaggcgaatgacttatgaagagctttgtaatgcagtcctgccacattggcctaacttgaggaaacataatggagaacgatatgcgtattctactcattctcaagctgttcttgattgcctaagaaatcgacaagaatgggctcagttagttgatcgtggccccaagactaattcaagtaagaaaaggcgcaaggcagatgctgaagattcagacgataatgaatttcggcaagggaagaagtacgaaagaggtagaaaagcaaaagcctcgagtcacagaaagaagaggtccccaaaggccaaaaggaaagccgaggaagcgcaggcgaattggctttgcaaggaagaggaataaaagatgtccgcaggagaaggaaagtagatttcagtgatgatgatgccggacccttctctaactcaagtgaggagagcatgttcagtgacgatgagatccaaatcctactt

SEQ ID NO: 14115 - DNA, 461 bp, Gossypium hirsutum
  Clone ID: LIB3585-003-P1-K1-E12
cccacgcgtccgcccacgcgtccgcccacgcgtccgcccacgcgtccgctgcattccgttacaatggcgcgattcccaagatccgcagtcccgcgccttctctataccttcttctccagcaaaacgaggaggttttacccctcgccgaccgccgcccttctactagggaattttgaggtccgtcaattctcagctggcaacgtcgcgcgagccaaggatgccaaagaaccatggtggaaagagtccatggaacgactccgaaacatcggaatttctgctcacatcgactctggcaagaccactctaacggagtggattctttattatacgggccggattcacgagatccacgaggttcgtggcaaagatggcgtcggagcaaagatggattccatggatttagagagagagaaagggattactatccaatctgctgccacgtattgcacctggaaggatta

SEQ ID NO: 14116 - DNA, 431 bp, Gossypium hirsutum
  unsure (1)..(431): unsure at all n locations
  Clone ID: uC-gsflmaxxa046b09b1
agaacattcactcttttccttctcaagtgccgggaatttcaacgccggctgctaactccggctcggggatgggaattccggtcaggcaaagatggcgtcggagcaaagatggattccatggatttagagagagagaaagggattactatccaatctgctgccacgtattgcacctggaaggattaccagattaatattatcgatacgcctggtcatgttgattttacgattgaagtggagagggcgctgcgtgttcttgacggtgccattttagttttgtgtagtgttggtnggtgtacaaagtcagtcaattactggttgatcgacaaatgagaagatatgaggttccgagactcgcctttattaacaagcttgatagaagggatctgatccatgaaagttctcaaccggcgaggtctaagcttcgacat

SEQ ID NO: 14117 - DNA, 728 bp, Gossypium hirsutum
  Clone ID: GOSHI-09MAY01-C82226_1
aaagcctttgggggtccgcctgcctcctgatgaaaagttggaggaattcctaaggcatctaatgggtgaccactgcactgttgatcgaaatgagatggctcagttacccgaagcatcactgaactatgcatcacgaaaagctgccggtgcctctgatcaaatgctgtaatgtaattgtactttctgcaacaaatgctaccgagctggaaaagcagtgggattgtctgatcgaattgactggatctgatggcttcttagtgacaatcgaatcatactcctcaaagcgcttgacgacaaatctaacagatgtagaaactgctcaacccctatccaaactttgtcttgaatttccagacctttacattggctgtttccgcagatctagacaaggacctctcgtaattagctttgagggcaaggatccatctagagttcaggcaggtgttgaagcattgtgcaagaagttcaatgcaggggcattctctgaagtcaactagacaaatacctgctgttctttcttttgcttgataagcttcgaaagctgataagcttctttgactgctgcgactgtcacaccgagtttcagagtataagtggtagattagcgccttcggatagctgagaagggagaaggaaaggtgaagatgacataaggatttattatgtattggggtatatgatcatatgaacattaatactaccagctgtcacaatgaaagtgaacttac

SEQ ID NO: 14118 - DNA, 477 bp, Gossypium hirsutum
  Clone ID: LIB3543-022-Q1-K1-A11
cccacgcgtccgcccacgcgtccgcccacgcgtccgcccacgcgtccgcccacgcgtccggtacgcaaaagatggcatgaactggaaaaatgataactggccgcaaaatgaaagtgagaagaatggacatcatcagggctctaaccaggggaataaaggatggaattctacttctggaggacaatcctcctctggtgggaattctaactctcgtacctcaagttcttgggatgactgggacaccaaagacaacaggaaggaaggtactacagaggtgactacttctcatagcaatgatgcttgggctggttgggacgaagccaaggatgatggatatgataatttctataatggcacatctaataaaagagctgttggtgacaatggaaaatcagatgtcacatggtcgggtggaggctttctttaaggttaatttctcatatatatcctcattcgcatttcctatatagtattaga

SEQ ID NO: 14119 - DNA, 464 bp, Gossypium hirsutum
  unsure (1)..(464): unsure at all n locations
  Clone ID: LIB3585-040-P1-K1-C7
aaaaaaatgatgactggccgcaaaatgaaattgagaagaatggacatcatcannnctctggccattgtaataaatgatggaatgctacttctcgaagacaatcctcctctggtgggaattctaactctcgtacctcaagttcttgggatgactgggacaccaaagacaacatgaaggaaggtactacagaggtgactacttctcatagcaatgatgcttgggctggttgggacgaagccaaggatgatggatatgataatttctataatggcacatctaataaaagagctgttggtgacaatggaaaatcagatgtcacatggtcgggtggaggctttctttaagtcaggttgaacttgaattatgttatagttatattaattaccaacaaagggtcacaagcgcacaattgatttttattcggacaattcatacggggtttggatataacttaatagaacttc

SEQ ID NO: 14120 - DNA, 766 bp, Gossypium hirsutum
  Clone ID: GOSHI-09MAY01-C83616_1
ctagactgttgactttactgccaggattggtctcaacttaggtgggcgtacgtatttttcctccgccgaggatgactttgtgaaccggctttatcgcaggtctagacccggagatctcagctcaaccaattcccccaggtgccaagccgagggttgcaatgccgatcttacccacgctaagcactaccatcgccgccataaagtctgcgagttccattccaaagcttccaccgtcatcgccgctgggttgactcaacgattctgccagcagtgcagcagattccatcttctgtcagaattcgacaatgggaagcgtagctgtcgaaagagactggccgaccacaatcgtcgcaggcgaaaatctcaacagcagcaacccaatgccactcaagaacaccagaagcacctcccgcttgaaagtggtggcaatccctcctgtgataatcccccaaggtcaccgccggattctggggtccagtcatcttcttcagtaacggtggcagcttcgccggcccgaatttcattggattgtttcaggcaaagacctcacaatgcaacggtctcttcatcatcatcaggcacactttttttctccaagtgggtaacagttaacaatggagtagctagccaaggaattagcaagctgaaaacgtcccgtctctgctatattcttatctctgaccccccttcattgtttaatattcagatggtgttagcttatactgacatcaagaaatttggactaatttatagaacaatttatatt

SEQ ID NO: 14121 - DNA, 538 bp, Gossypium hirsutum
  Clone ID: LIB3584-042-P1-K1-B11
ccagtgacgggcactaggcctgatgaagaggtatgatttacttctctcctgatattatgaattattctctatcatgtttggtacgtatctgactgttcaacaatgtacagacaattgaaaaattgattgatactggagatagcgaacaaatattccagaaagcaattcaggagcagggacgaggccgggtttgtcttaaatttcctttttcttccttcataataatagtatttttcttaagcaatttcaggaagctaatatttttctttcatccctaaaaccatttttgattttcaaaaataaactttcatttgatagcttgagttttggatttcagtattctcttttcccttatctcaagctatagtgatactgaccttgttggtagtgggactgatttcatggacgataagttattagaaattggctatggttaaactaatgtttggcatgtttgcagataatggacaccgtatctgaaattcacgagcgccatgaagcagttagagatttggagaaaaagcttcttgatctacaa

SEQ ID NO: 14122 - DNA, 437 bp, Gossypium hirsutum
  unsure (1)..(437): unsure at all n locations
  Clone ID: LIB3083-062-Q1-L1-A8
tcagactctgagggaaaccatccatcaagagtatcgggatgttgttgggagacgtgtttacgcagtgacgggcactaggcctgatgaagagacaattgaaaaattgattgatactggagatagtgaacaaatattccagaaagcaattcaggagcagggacgaggccggataatggacaccgtatctgaaattcatgagcgccatgaagcagttagagatttggagaaaaagcttcttgatctacaacagatatttttggacatggcggttctggttgatgcacaaggagacatgcttgacaacatagaatctcaggtctcaagtgcagtagatcacgtgcagtcagggaataccgctctccaaagagctaagagcttgcagaagaactctangaagtggatgtgcattgctattatcatncttctgctaattgttg

SEQ ID NO: 14123 - DNA, 773 bp, Gossypium hirsutum
  Clone ID: GOSHI-09MAY01-C83296_1
cgaaagttgttcatcgagacgtaaaatctagcaacatcctgctcgaccgtcaatggtaccctaaggtttcggatttcgggcttgccaaactcttgtgttccgaacggagttatgtgactactcgagtgatgggcacatttggctatgttgctccggaatatgcttgtaccggcatgttaaccgagaagagcgatgtctatagttttggcatacttattatggaagttattagcgggagaagtccggttgactatacccgaccacaaggagaggtgcatttagtggaatggttaaaacccatggtcggaaaccgaaaagccgaagaagtaatcgatcctaagttacccgtgatgcctgcttcaaaagcgcttaaacgtgtactattagtcgctcttcgatgtgttgatcctgatgcaacaaaaaggccaaaaatggggcatgttatccacttgctcgaagctgatgatctactattccgcgatgaacgccggatcacaaaagaaccttgggattcgcattccggtgacaggcagccgaatcacaatgcaacgaaattaagttagagacacaagtgaaggtgatataactatccccagccaaagcttttatcaactcttaggagactaacaaatttaagccccttttaattagttttcagaagtttttaaggtttatatgtttttcaattaggtcccgagttttttttttggttgtatctttaacagtaatctgcatttttttttcccatgtgaatataaagtatgcatttgtac

SEQ ID NO: 14124 - DNA, 472 bp, Gossypium hirsutum
  Clone ID: LIB3584-044-P1-K1-G9
attaagagtcaaaatacaatttgatttctagtacaggggtatctattatacctttaccgcctttgtcctttttctctccaagattaatcattttgtccatttttttccagctatgttgctccggaatatgcttgtaccggcatgttaaccgagaagagcgatgtctatagttttggcatacttattatggaagttattagcgggagaagtccggttgactatacccgaccacaaggagaggtgcatttagtggaatggttaaaaaccatggtcggaaaccgaaaagccgaagaagtaatcgatcctaagttacccgtgatgcctgcttcaaaagcgcttaaacgtgtactattagtcgctcttcgatgtgttgatcctgatgcaacaaaaaggccaaaaatggggcatgttatccacttgctcgaagctgatgatctactattccgcgatgtgagcttcgttttcatttata

SEQ ID NO: 14125 - DNA, 680 bp, Gossypium hirsutum
  Clone ID: GOSHI-09MAY01-C58985_1
ctagagaagtcaaccaatgttactaggcctatgaacactccatccagcccaagaagcttgaggggcgtaaaattccttgaatcccaaatccaatccacaaaagaaattaaccacaacaagatccttatggtatttgcaagatggaagggtctattccaagggacattgctccttataagaaccttgccatattcacatcaagctctatggacccgaaatgcatttcgagttcaagttctattcctttacttaaaaagctaagggtcttgatgagcaatctccagaaagtggatttaagggcattaacttaccagcagaaactagcattttggatcaacatgtacaacgcctgtattatgcatggatacctccgatatggtccacctgatacttctgaagatctcttggctatgacgaacaaggcaactctcgatgtcagaggtaacaaaataagtgctcaagcaatggaacatcacattttggggaaacaatcaacaggtttaaagatacaagagggtagtgacaaagaagacgacagagaagccaccattcggaagctttacggacttgaattaaccgaccgaaacgtcatgttcgctctatgttgcggaactcgatcttcaccagcagtgagaatatacaccggtgatggagtttcagctgagttagagaaattaaaa

SEQ ID NO: 14126 - DNA, 282 bp, Gossypium hirsutum
  Clone ID: GOSHI-09MAY01-C58975_1
aactttttaagcatgacgctggaattgttggagcttgacaggtacggatgaagcagatgcatgagctcgatgggttgatttcatgcaaagcaagtgtttcggagttctgcacatgatgaaaagcagccataaagcttggatattggtgcttaaaagtaaatcatatatgcagctgagcacacaaggtaaggtatttgtagaggcagatctaaatatataattgaaagttacaaagttggtaggtcgcctgatactattctctgactttatctgctttaaaaa

SEQ ID NO: 14127 - DNA, 275 bp, Gossypium hirsutum
  Clone ID: LIB3149-057-Q1-K1-E3
aaatatttatgcattaggcgggaaatgagagagattccatgatatggttgaggaaatcgaaagagcttggataataaagatgatggaaagcaagtgtttcggagttctgcacatgatgaaaagcagccataaagcttggatattggtgcttaaaagtaaatcatatatgcagctgagcacacaaggtaaggtatttgtagaggaagatctaaatatataattgaaagttacaaagttgatagtttgtctgatactattctctgactttatctgca

SEQ ID NO: 14128 - DNA, 661 bp, Gossypium hirsutum
  Clone ID: GOSHI-09MAY01-C58895_1
agcaagggtgtgtgtctgagtttccaaagcaactgattttgccttgaccagcaaaacaaatagcaggcatgggagaggaggtgatgatgagtatgacagaaaaggaaacagcagccatgaataatccacactttgtgctggttcatggtattggtggaggagcctggtgctggtacaaaatcaagtgcctcatggagaattctggttacaaggtttcatgcatagacctcaaaggcgcagggactgatcgctctgatgctaattctattgtatcttttgatgattataacaagcctctcatggacttcatgtctgccttgcctcattctgaacaggtaataatggtaggtcatagtgctggagggttaagtgtgacgcatgccactcacaaattcgccaacaaaatccgtctggcggtgtatgtagcagccaccatgctaaaatcaggcttcttgactgatcaagatatcaaagatggagtacctgatttatcccaatttggtgatgtgtacgaatggggatttggattgggagctgagcagcctccaaccactgccattgttaaaaaggaattccaacgtaaaatcatctatcaaatgagccctcaagaggattcgactctagcagcaatgcttttaaggccaggaccgatcctagcatt

SEQ ID NO: 14129 - DNA, 666 bp, Gossypium hirsutum
  Clone ID: GOSHI-09MAY01-C58875_1
ctgatcttaaaaaaccctaagtttaaaactttcttgtttctccttgccacagctgaagggctaacagcccccaccaccgccgaaaccaactgcaacgaatggtcctccaatggagcggtaagtttccctctctcccttatactttagtatgcaaaagaatctaaatgaagagctgaaagtaataggggaaaaaatatgcaatcacctttaaaataaaaaccaatattcacttgctgttttttgcctgtattcggtatctcgtgtgaatctttgtactcgatttctattttatttctctgaaaaaaaaacaacacacccttttacaatcaaaatttgaaggttttatagccaaatacaagcggtttctgcctattctcttgctcaaattgcaaatcgtgaagacgtggagagacgtgggcgagcaacgagcgagttgggggtcgtgcttggtgtgtcgacgagcgtggtagagggaagcagcggctgttttctctttttgctgaaaaattagttagttttgggctgtttgggctctagggttaagtttattttgggcttataattgggttagttgtttttgtaattttggactcttttttttgaattttttatgtcgattatttgggttttatttatttattgggctggaattagatagcccgggct

SEQ ID NO: 14130 - DNA, 389 bp, Gossypium hirsutum
  Clone ID: GOSHI-09MAY01-C58775_1
caaaaatgctgcatgtgagggttccttcaagtccttttgcctcctgaatgcatggggtgatctcatgatgcttccatctgagatgcttgcggataggtccacaggaaaagagccccaagttcagcgtctccctcatcatcagggttcttaacgattttgtacctgatgagttcaaccctaatccagcttcacaggccgtttttgaagcattggaaaaggatctttctgagggtggggaagagtctatcacaaactatccatgtatggctactcctattgtctattcgccaccttccgcaacttccctaaccaacattataggaagccaagtcatggaaaggagtaagtcattggtacttagaaaatcatacactagtgatgatgagctt

SEQ ID NO: 14131 - DNA, 711 bp, Gossypium hirsutum
  Clone ID: GOSHI-09MAY01-C58765_1
agaagatgctggcaaaccctccagagagagctgggacagtaaactggttaatacatgcgggtgttgaaattttggtgctaagatgtctgacgtcatccaaagaaagtgcaaaaatgtgattagcaagcttcagaggagaatagataaggagggtcaacatatagtaccacttttgacggacttgtggaagagaattgaagactctggttacacaggtggaagtggaagcaatcagttggatttccggaagattgatcagcggtgttgaccgattagagtacagtggagttatggagcttgtttcagaggtgcagctagttttaaaaagtgccatgcatttttacggtttttcacatgaggtcaaatctgacgcatagagtgcacgatctgtgtttcgacattgttgaagatagtatttacagatacagatttccggaagctagaaattcattatctttcttcagtccagcatctacgtccacctcgggtccttctttagacaggtagctgttggcaagagacagaagctgatgacgatgtagaatctgttcatgcttgcttcaaaagtcgtccacaacctggatcaaccatactggtgaggaactaggatataatgcatgcgccaaagaatctaggttggaatggaatacctggaacctttaacagtgatcttttcactatcggggacggtcctcactaaaaagaaaaggg

SEQ ID NO: 14132 - DNA, 505 bp, Gossypium hirsutum
  Clone ID: uC-gsronu33B011c12b1
tgtttatgccgagatgaggggtattgagatggaggaattcgagaaagcttcgattgtaggggctgaaaacggggtgacattgaaattgcttgataccactaggatgtcaatgttgcggcctgacggtcacccgggaccttatcggcagtttcaaccctttgcaaaggataaaaatgtcaaagtgcaaaatgattgcttgcattggtgcttaccagggcctatagattcatggaatgatatactaatggagatggtaattagaggggcacattaataatttagccattttttgggggacttgagttgcaaaaatgcttttattttttaaaaaattttaattttttgttcaaaggaaggggatcatggtttccaagttgcttggaattacttattttttaacaccaccatcaggtcctattagcttctccaaagaaattaaaagcccgtttgatgaaacttaccttgggtcctctatcaaattgattattaaaaatcaaataaattc

SEQ ID NO: 14133 - DNA, 204 bp, Gossypium hirsutum
  Clone ID: LIB3149-051-Q1-K1-B11
catggaatgatatactaatggagatggtaattagaggggcacattaataatttagccattttgtgggggactggagttgccaaaatgcttttatttttatttttgtttttttttaattttaaatttttgttgagaaggaagggatcatggtatccaagttgcttgtaattacttatttttttaacatcaccataaggtcctatt

SEQ ID NO: 14134 - DNA, 428 bp, Gossypium hirsutum
  Clone ID: GOSHI-09MAY01-C58245_1
tccgattctctcagcctttaaatccaccatatgtttgttgcttccgaggaatccgaccagattgggaggctctacgaatttagtggatgcctcaacgaggctaaggttaagtctcaagttggtctttcctcattcccccttgttctctctatttctagggttttgcatttttctttctgtaatttgtcccactaacatgtgcatatcagttgtagaagaaatggagaagaacaacttgtgctccagcgccttgaagaacaacatgccctatagaagcgctgccttgaaaaccaccaccgttctaatgacaccgccaataatacctctgattcccattctgctaagccctcatccgaaatccttttctaaaaataaaaatcttctcctgcgtttgtgttactaacttggtgcatcccaatacaagaatt

SEQ ID NO: 14135 - DNA, 777 bp, Gossypium hirsutum
  Clone ID: GOSHI-09MAY01-C58265_1
cccacgcgtccgcccacgcgtccgtgctaatcaaggatttgacataccatcagctattgtaagctttcccaacttccatgcaagagtggttttccttgaaaatgactctttgaacaagtcacccttgttgtcaaagtttcaggaaaagagtcctgtcatgtcttacacagaagtattactggtacctttgacaactcctgattttagcatgccttacaatgttatcacaatcacatgcacagtgtttgcattgtattttggatcattgctcaatgcactaaggcggcgtgttgctgaggaggagagatttcttaaagacaaagctgccaagaaaatgggtcggatacctctgctgctaacaaagttgtttgccaagcttagaggtagacatttggaaggtcctcaagcacccccagcttcatcatccttcattaactctaaatcagtactcaaagtcatactcatagctggactcgcagcgtgttggcaatactatttttcatgaagatataatagaagttttcagtgtacaatacaaggaaaacgaaagcacagtgtacctcaggttagggaaaaaggattttgtgtatcattttgagctattgttcattttgttttagtttttgaaactttgaaccatttttataattttcctgaaaatgtaaagattttaaccgacctttgtcatgcaaaatgattctcctttggatttccagctctgttggtgtaacggcttaaggaagggtttgataaaaaaaaaaaaaaaaaggcggccgc

SEQ ID NO: 14136 - DNA, 714 bp, Gossypium hirsutum
  Clone ID: GOSHI-09MAY01-C58235_1
cccagcgtccgcccagcgtccggtgcaaaaaacgaaagattttgagaacgaccttatcatgagcatagcagagtttatccaactagaagctgaaggctctggcacactcgaaggatctgtcgacggacgaatggctgttgtaagggacatccgaaaaattcggcaaaaggttagaaatatccgaactcgaacgaaatggagaagctagcagttcaatgccccctaccattttgaatagtagcaagtcacacatattacagtacctccaatccacatacgagatggaatcacctggatccaccctaaggcggcgtgtccgattcaagctgcaaccagacatgaattacagggacccgaacgtgaaggatgagcggccggagcttgtagaagctatgcaatctggggtggcatacgtattaggacactctcatataagagcaaaagtgaatgcaccatgcttgaagagatttgtgatccatgtggcctatttattcttacgtaaaaactgcagggcacctgccgtggttctcaacattcctcagacatgtttgattgaggttggcatgaactattatctgtagagctactactttcttctcaaataattgtttcttttttttgtttccagtttcagatgttgaggaagttttagctgtgtctacaaattctttttgcaatatcttcttaaaacaaaattatagggaattatttttg

SEQ ID NO: 14137 - DNA, 423 bp, Gossypium hirsutum
  Clone ID: GOSHI-09MAY01-C59475_1
atgagccaggtaggggaacgcagcggccagacacctcagcgctacctggcagaactggatttctctcccaccggcggcttaagtctgactgccagcctgcctgccacagccggactccaccactccggtagcctcatggctgcaacctgtgagattagcaacatttttagcaactacgtcagtgcgatgtacagctcagaggactccgccctggcccctgttccccctgctgccgcctttggggccgatgacttggtgctgaccctgagcaacccccagatgtcattggagggtacagagaagaccagctggtcgggagaacagccccagttctggtcgaagacacaggttctggactggatcagctaccaagtggagaagaacaagtacgacgcaagcgccattgacttctcacggtgtgac

SEQ ID NO: 14138 - DNA, 474 bp, Gossypium hirsutum
  Clone ID: GOSHI-09MAY01-C59005_1
tccacgcgtccgaccatcaccacccaagcacccttacaagttcaagtccccaccacctcctcccgtttacaagtctcctcctccaccaccaccccattatgtctactcttcacctcctcctcctcaccactactaagtgacgacggctttgaccatactcctaggagaagagaagattgtgattcaaataaagccacaaaagatgggttgaaaagaaatctagagggaatcataaagaagaagattggaagcccagcctacctagtctccgcgtttgaagtgaataatgttagataaattgtgtgttattcggtggcttcactcgatttatttctttatttctgtttaaaagaatcatatatgtaactgtgtattgtgctctgcacccattttgcaaatgcctgggttggtttttcctttattattaatgtgaaaaatggttaaaactcttgggtatcacaaatttaattgggg

SEQ ID NO: 14139 - DNA, 951 bp, Gossypium hirsutum
  Clone ID: GOSHI-09MAY01-C59355_1
cggaaaatgcatagttaaaatgtaaaagccctcagacttccccagaatcccaggtctcagtcagtcctcctcagccctcgctctttgcaaaaggtattattccattcaacccacaacaagctcgaacgccacattctttttccatagtaatgtctagggttttcaaaggtttgagggccttgttagcctccccagcatcgtcttcttcttctgcagcagcagcagccaagttttcttcttcttcagcttttaccgcgactgctggcaaatcagctacgtcaaaagcggctcagaaaactccgaaaaagccgatcgcttcaaaacccaagactgaaaaaccacctactcctcgaactaccactcgaccgtctgggatttttaaacttacccctgtttctcctgctttggctcgattccttggagccccagaggcttcccgttccgatgctgttaagcagatctggagctatatcaaatcccagaaccttcagaatcctgctaacaagaaggagatcttttgtgatgagaagcttaagaccatttttgatggaaaagaaaaagttggtttcctagagatcgggaaaatgctatcccgccattttgtgaagtccagctgacctctattttcatgtttaaccactggttgccctaccaacatcaagctagctcttgttattctgaactgaactttttttatgtatgttcatgttttgcctttcattttgcgagctaaactcccctcgtgcccggcaactgaggaaatgttcccagctggacttgtgtaaaaattctgtagggactagggagtgaaaaagtaacattttcatttggtttcctgattttcatttgtactggtttatggtaactggatctttgatcaactagtagcttaatcattcagtcttgcgccagtaaagatgacctttgagggaccagagatgagcactactg

SEQ ID NO: 14140 - DNA, 431 bp, Gossypium hirsutum
  Clone ID: GOSHI-09MAY01-C59205_1
tgcaaatgcctttttaaaaaaattaaaaattctgttgtttgtactccggatttatccttggataggaacctttttttattggaaatgtcttcttacttttcgcttaaatggaacctctttaattaattttgtgccttgtttcccctggtcaactttacctggattgatgcattaaggataatacacactaaaatattcgatgttggctttatgtgcaattggtaaagatagttggttatgtgcccctgccctcaacttattgctttgaatttgatttagatgaacttaaactcttcttcgcttacttgattttggttttctttgataataactttggatagactagattcttttgaattacctatttcttgcaatattgttatttcatttagaactgatttagtcagtttttgaagcatctttcctatgga

SEQ ID NO: 14141 - DNA, 707 bp, Gossypium hirsutum
  Clone ID: GOSHI-09MAY01-C54975_1
cccacgcgtccgcgaaaccgaccctaggagttgtgccaaggaaaggtgccatttcgggggtgtcagcctcgattttaatccctcaattcatacttggtggactgacggaagcgtttgcatccattggcctcattgaattctactacaagcagttccctgaaaacatgaaaagcatcggagggtctctattctactgtgggttggcaggttcaaattatttcagtagcttgctgatctttataattcatcgaacaacaaaccgcacagccaccggaaactggttaaaggaggatctgaataagggaagattggattactactattacataattgctggcctaggaatcttaaacttgggctactttttggtatgcgcaagttggtataagtacaaaggaaacagcgacaacacccctgagcttgaacttcacgttaatggcgagaaacaacagttagataaaccttagtcttatgttgaattgtattcatatatagatgatgtataggtagctagcttagatgaaaaccctttatttctttagctttagattataagatccaacaagaatatgcagttgtaggactgaagagaaacaggataatttcaagagattttgatgttgcatctaattcatattctattgacatgttcctacgaaacaagaaaaataaaaaggataaatgagaagccaaaattcttgatcctc

SEQ ID NO: 14142 - DNA, 607 bp, Gossypium hirsutum
  Clone ID: GOSHI-09MAY01-C54965_2
gcgttcggccaaatcttatacagctcatccttctccgcacaaaatggcgtcgccatctgatcgtaaagcgaccattatcgacggcaaagccatcgctcagacgatcaggtctgaaatcgccgacgaggtccgtcatctctcccagaaatacggcaaggtgccgggcctagctgttgtaattgttgggaacaggaaagattctctaagctatgtgggaatgaagagaaaagcctgtgctgaagttgggattagatcttttgatgtgaatctccctgaagaagtacctgaatccgagttgatcagcaaagttcacgagctcaatgcaaatcctgatgtacatggcatattggttcagcttcctttaccaaagcacataaatgaagagaaagttttgggtgaaatcagtcttgaaaaagatgtagatggttttcaccctttgaatatcggcaaacttgcgatgaaaggccgagaaccccttttccaaccttgtactcccaaggggtgtcttgaactgctatctcgtagtggtgtaagtgtaaagggaaaaaatgctgttgttgtgggtcgaagtaacatagttgggttgccagtttccttgctgcttctc

SEQ ID NO: 14143 - DNA, 662 bp, Gossypium hirsutum
  unsure (1)..(662): unsure at all n locations
  Clone ID: AI055541.1
cagcaacgaagatgatgaatgtcctcagagaaaggatgcgactagtagatcggcaactaatgatgtgaaaaatgaagaagtacctgaatccgatttgatcagcaaagttcacgagctcaatgcaaatcctgatgtacatggcatattggttcagcttcctttaccaaagcacataaatgaagagaaagttttgggtgaaatcagtcttgaaaaagatgtagatgggttttcaccctttgaatatcggcaaacttgcgatgaaaggccgagaaccccttttcaaccttgtactcaaggnngtgtcttgaactgctattcgaagtggtgtanagtgtaaagggaaaaatgctgtnntgtgtggtccgaagtacatagttgggtggccagtttccttgctgcttctcaagctgatgctactgttagcattggtcattcacgtaccccggatcccgaaggctagttcgtgaagctgacattgttatagctgcagcaggacaagctatgatgatcaaggcagttggatcaacctggtgctcggttatgatgtttgaaccatgctgtgatgaccactaagaatcagatcaggtaatggagaactgtttgaacacctgtaggtgctggtgttacaccgtcttgtgcgttgcccagacatggatgtgttc

SEQ ID NO: 14144 - DNA, 440 bp, Gossypium hirsutum
  Clone ID: GOSHI-09MAY01-C54845_1
aaacatccacaaaaacatgttggctatgagtaaatggttcacgctcacaccttttatgtctgagcaggtttagtaagagagttgggttgtccggcagccctggttctgttcgagcccatgtcaatggaggaggagacgacaccaacaacagtaaaaacaacgacaagaagaagaagaagaaagttgtggtggttggctcgggttgggctggtctcggtgctgctcaccatctctgcaaacagggatttgatgttactgttcttgatggtggtgatggtataggcactccagataatgtcggtatccaagggttttggtatccctataaaaatatattcagtcttgttgatgagttggctatcaagcccttcactagctggacaagatctgcacagtattcatgggaaggattagaggttgaatttccagtataccaggaa

SEQ ID NO: 14145 - DNA, 960 bp, Gossypium hirsutum
  Clone ID: GOSHI-09MAY01-C54825_1
ggttggagtattggctttacaggatcttttaacgaacacatagcagcgctaaggaggttaggaatgaaaggagtggaaataaggaagccagagcagcttcaaagtatcagctctcttatcattcctggtggagaaagcaccaccatggctaagcttgctgagttccacaatctttttccagctctcccgcgcttccgcccacgcggccggccggtttgggggacttgtgcaggtcttatatttttggcaaacaaagctgttggacagaaagacggaggacaggaattagttgggggtctgaattgcactgtccatagaaattactttgggagtcagatccaaagctttgaggctgagctcttagtgccagaacttgcctcccaagaaggtggccctgagacatttcgtggtgttttcatccgagctcctgctgtccttgaagtggggccagaagttgaagtgcttgctgattatcctatcccatcaaaaaaagttctatattcaagttcagctgttgaaattcaagaggagtctgctgtgcctgaaaagaaagtgatagttgccataaagcaaggaaacttgctggggactgctttccaccctgagttgactgcagatacgagatggcatagttactttctaaagatggtaagagatgtcggagagggaacctcgaataccactgttgcagtcagtgaagcggcttcaagttttgaccgacaaacaaaatatgatcttcctatattccgataatcagtggcatcaatgagattcttttcaagtattttcagtttctcttttattttctttttcttccttttgtttcccccatgtttgcagatgtttattttttttgtcataaggtaagtttctatttgacaagtaattttgttctttttaggtggcatttatgcacatatcactatataattataatctattgttaccctgatatttcat

SEQ ID NO: 14146 - DNA, 387 bp, Gossypium hirsutum
  Clone ID: LIB3165-038-Q1-K1-B4
ctgcttctctcgtcgagtgaaagaaataagcatggccgtggttggagtattggctttacagggatcttttaacgaacacatagcagcgctaaggaggttaggaatgaaaggagtggaaataaggaagccagagcagcttcaaagtatcagctctcttatcattcctggtggagaaagcaccaccatggctaagcttgctgagttccacaatctttttccagctctgcgggaatttgtgcaaatggggaagccggtttgggggacttgtgcaggtcttatatttttggcaaacaaagctgttggacagaaagacggaggacaggaattagttgggggtctgaattgcactgtccataaaaattactttgggagtcagatccaaagctt

SEQ ID NO: 14147 - DNA, 667 bp, Gossypium hirsutum
  Clone ID: GOSHI-09MAY01-C54185_1
cccacgcgtccgaaatcactgctacgctctctaactccaagtccgacgccccaattcggtccccgaaatacccacacacactatctactcgtcatgcaaacgctactgctcccggctactcgctccggtatatgtgcggtggcggcgggtcccctccgaccaccgctcactctctctcctccaaattttctcacttcaatcaaaactcggaaccaaaacctccgttgtcccctttcgcatcctacgaccctcttaatgttctaagatctacgcttttttcgcccaaagtctcttcgtcctcagtttcacccagttttacctcctctaatgatgatactgacaaggcgaagcttgctcaggtttcgaagaggctagagaacacgtcgaggtactttaagcgattgggcaatttagggttttggggacagttagtgtgcactgtggtttcagcggtgatactctcattttctgtggtttttccggggaaaatcacatcgccggctactttttatgctaccgccagtggaatcgtggctgctttcatatcggttttctggtcatttgggtatattcggctttcagagaaactcaggagaactgctaatgatccttcaaaagctcctcctcgagctgatgttgtgaaaagcttgaaaaacgcatagttctg

SEQ ID NO: 14148 - DNA, 410 bp, Gossypium hirsutum
  Clone ID: GOSHI-09MAY01-C54085_1
tcctcttttaaccaaacactccacaaaattttctcgaaaaaaaaaaaaaaaatgaggaagtgtgaactatgtggaaggctagctcgaatgcactgtgaatcagatcaagcaaatttatgttgggactgtgatttcaaggttcatggagccaatttcctcgtagctaagcataatcgaaccctcctttgccatgtttgtcaaagtcctactccttggctcgcatctggtcggaatctcggctccgcggtttctgtttgtgattcatgcgttgtaaacggcaacaataagtgtgagtcatcggagagagagtatggtgaagaggaggaggaagaagaggaggagggagattatgataatgacgccgtggaagaatcgggggaggaagaggaggccgagattgaagatgctta

SEQ ID NO: 14149 - DNA, 470 bp, Gossypium hirsutum
  Clone ID: GOSHI-09MAY01-C54075_1
gacggaccttttttcgccgaggtcgacatgggtggcgatgcctccgtccccaccgtgcgagctaccgtggtccaagcttctaccattttctatgacacccccgctactttagacaaagcggagaggttgttggctgaagccgccggatatgggtctcagctagtggtgttccctgaagcgtttatcggcggatatccacgcggctccaacttcggcgttaccattgggaaccgcactgctaaagggaaggaagagttccggaaatatcacgctccagccattgatgttccggggcctgaaatcgagcgtttggcggccatggctggaagagtataaggtttacttggtgatgggtgtgatagagagagatggatacactctatattgacggtggtgtttttcgattctcaaggtcggttcctggggaagcacggggagatcatgcccacggtattgaagcgcataatttg

SEQ ID NO: 14150 - DNA, 478 bp, Gossypium hirsutum
  Clone ID: GOSHI-09MAY01-C54225_1
ggaaccgggggacccacgccgtccgggtcagtaaagcttcaattcaaaggagtgttagtttccatggcgttttcttcttctgctctctctcacacctcttcttcatgcctctcttccttcccacatgccttcacaaccagaaaaacccatcttcgcttcccatcatttttactcataaaagcttcttctgaacctgacaaaggaaaccccactgctacacagaccaaaaacgctgaaggctctagcaatgctcaacctcaacctcaagccactcccgccgccgccgctaagccacctcccaaaaagcccgtttattccatgaagaaaggccagattgttagggtggataaagacaagtatctcaacagtattaattatctatctgtagggcatcccccctattacaaaggcttggactacatatacgaagaccgtggtgaggttctggatgtacgcatttttgagacaggagaacatg

SEQ ID NO: 14151 - DNA, 583 bp, Gossypium hirsutum
  unsure (1)..(583): unsure at all n locations
  Clone ID: LIB3825-017-Q1-K6-H2
cggccgcgtggggccggngctttttttctcgggcgccaacaaaactaagaaaatccttcttttttttcttaacaaatttctntgaaaactattgtttaattaaaagttttgttaagaaatctcgaatttctatcagttttccagtttcaagatccgatttttctccattttcgaataaattaagggaaaaaattcagggtttgaattttgaaagaaaaaaagttattttttttccagaaaaggtttttatttttttaatcttaaggctctgtttggcggcgcatagccgaattttgtaacaaatggtagtaaaagtagcagcaaatttgcatttacagttatcagagccaaaccttacccaatcgtcggcggtaatcccttcaccttcatttctaaaacggtgccgtaccgacgccgtccttgtttcaaagaccgttaatcggtctactcttttcggttcacgttccgccattatcaaccggtctaaatcctctgagattttcaaaccgaaacataaagcttcttcaccaattgcttgtataccctacttatcagacgatgaatttcccaagagaattaacga

SEQ ID NO: 14152 - DNA, 354 bp, Gossypium hirsutum
  Clone ID: LIB3165-055-P1-K1-B12
caaaaactaagaaaattccttttttttttcttaacaaatttcttgaaaactatggtttaattaatgtttcgttaagaaatctcgaatttctatcagttttccagtttcaagatccgatttttctccattttcgaataaattaaggaaaaaattcagggtttgaattttgaaagaaaaaaaagtttttttttttttcaatcttaaggctctgtttggtggctcatagccgaattttgtaacaaatggtagtaaatgtagcagcaaatttgcatttacatttatcagagccaaaccttacccactcgtcggcggtaatcccttcaccttcatttgcaaaacggtgccgtaccgacg

SEQ ID NO: 14153 - DNA, 742 bp, Gossypium hirsutum
  Clone ID: GOSHI-09MAY01-C55905_1
caaaaactccttcttcccttctttgttgttagggggtgttgatttagggttttttcaaaagcaaaaaaaaaaaaagaaaaaaaaggagagagtagcaaattaagaaatgcagatagcgggtgtagcaactgaggtattgatagccatcccttcagctggaaccctcaatttcagacactggcatcccaatcatttcttcctctcttctcctttcttcaaaagatgtcccacgttatgcattccaaagctaggaatggtccccgataagtaccgaggaggaagatgcttaactatgagagcctcgggggagtcaggtgataatttatcaccaatggctcctgtagaattggaatctccggttggccggcttttggcacaaatattgagaactcatcctcatttattgcctgcggctgttgatcaacagctcgataaccttcagagtgataaaaatgaccagacagaagaaactccacaatctcaagatctcctctacaagagaatagctgaagttaaagaaaaggagagacagaaaacactggaggaaatcatatattgtttgattgtacagaaatttgtcgacaacgatatttcaatgattcctaaggtaacggaaacttcagaccctactggacgagtggacttttggccaaaccaggaacaaaaactggaatttgttcattctcctgaagcatttgaaatgattcaaagccacttatcccttgtgctcggagaccgaatg

SEQ ID NO: 14154 - DNA, 693 bp, Gossypium hirsutum
  Clone ID: GOSHI-09MAY01-C55895_1
gataaggcacttggcaactctcagttaacggttattccttgtagaaagagggcaatcgagatggctagtaatcctgatgagacgactgtgaaggctcctaagccaaagaaatcacgattcaagaagaaaatgttgaaaacaaaattcttggggaaaaaagctgatcgttctcaagacaatcctacaagcaatttggctattggttcggatgattcgcaaaaacctgaatcaatccaaactgattcttttactgcaataggttcagaaacgttaggtgccgaagcgacgaggaatctcaaagatacaaagataacgagtgactcgagtgagcgagagatgccttctgcagatgtggcattggctcctgaggtttctgatgattctaaaaatgagcagttaatggctgcatatcctcttcatagcaaccatgaggttccagatgttgaaaattcctccatggtctgtgatgatcaaaccgattcggttaaattgcctaacggggacgatgttgcttcaaagattactgatccgacttcaagtcaaatggaggcttcaaaaatcatgcctggtttagaccaagtagtagagaaaccccatgcaaatgcaggccaagcacaggtcctggaaaaaatagacattggttcggtccccgggattcagtttcgcaattagggacaacaaggaatggaagga

SEQ ID NO: 14155 - DNA, 617 bp, Gossypium hirsutum
  Clone ID: GOSHI-09MAY01-C55465_1
ctcgaacccagaattcgcagttccttcctaacaactccctgttggatgcttggtagaaatcgtataaaactctaataaagggagcaactttatttcatttatgtttgccaccaatggcatctccttcgcagtcaactaacttccccaccatcatcttcatcttgttttcattcgttctcatccgaaccataaatgccgttcctttcatcgtgttgcacggcattagtgataaatgtagtggccatggagttactcgatttactaagcttctaagcagctggtctaattctcaaggatactgcgtggaaattggagatggttcatgggattcatggactatgccccttttggaacagacatcaattgcttgtgaaaaggtgaaaaacatgactgaacttagccaaggttacaacatggttggactctctcagggtagcctgattggtcgaggcattattgaattttgtgatggaggacctcctgtcaagaatttcatatcgttggcagggccccatgctggtattgcttcaattccattttgtgaatctaccgtgatatgcatatttctcgatagcttaatcaagtccgaagtttatagcaactttgtacaagaacac

SEQ ID NO: 14156 - DNA, 224 bp, Gossypium hirsutum
  Clone ID: LIB3189-015-P1-K1-F8
atacatcttcaaagaagctggcaatccattttcatcatcttttaaagacttttctgaaagtcggtaaacttataaaggagcgggcggctttcttacatatatgtttgccaccaatggcatctccttcgcagtcaactaacttccccaccatcatgtccatcttgttttcattctttcttatcctaaccataaatgcccttcctttcatcattttgtacttcttt

SEQ ID NO: 14157 - DNA, 493 bp, Gossypium hirsutum
  Clone ID: GOSHI-09MAY01-C55645_1
tttctcttgctctctcgtaaaaaacattccttataaatcctctagatctctttttacctttgagtaactctaggttattccgctttgccctaaatggagagggagctgctgcatttgttcgacgccgccaaaaaagctgccgatttggccgcctccgacgccgtttcctccaacgcccctgaaagtttccagatgcgttgacgccttgaaccaccttaaggatttccccgtcacttatgacactcttgtttctacacaggttggaaaaaagctgcgacctctcactaagcatcctagagagaaaatcaagactgtggcttctgacttgctttgagttgtggaagaaaattgttattgtggagactaccaagagtaagaaaaatggcaccactagtgctgtcaaggttgagaaacttcctaagccaagtgctgtaaagtctgaaaaactctacaatacagaatctgtgaaggttgagagatctaaaggtgattc

SEQ ID NO: 14158 - DNA, 460 bp, Gossypium hirsutum
  Clone ID: GOSHI-09MAY01-C55015_1
tccggttgaaaaaccggcgcggccccacccgtccgggaagaatcaatgtcgactgtaccttcttcttccctttgggcctccattttcagctggggtacaccttctgcctgctttgtctgtcttaatatcactatcggtactatctttttcacttccaccttctcttccaacaattctggcgccgccgcttctggcggtgtcggcgacggcccatcactccacgaaggagatgaaacaaacgagcctagactccttccatctccatctgttttacaaaggctcaaatccatctactggtactcttacggatcccaacaactcttttactacccccaccgccgccgccgaaatcccagattccggcgccgttttccatatctcttttcaacaacaaaccagtgaaactgaaaccacacctgaaccagtcccaacccacctcgatagatctccttctgttttg

SEQ ID NO: 14159 - DNA, 722 bp, Gossypium hirsutum
  Clone ID: GOSHI-09MAY01-C56985_1
ggcaaaaagaaatatatgtttggattggacgccactcgactattaaatcaaagcaagaagcccttaacttgggtctgaaattccttcaaacaaacattctggaagaagaactttctttggaggctcctatatatggtattaccgaaagggcatggaccacccttcttcacatggttttttggatgggatccctccaaggccaatatgcctggcaattcatttggaccggaacctacctcccttgaagggaaaaccatcgaggggaactgccccttccaaaattgccctaaaaccgcgctccagggaagctaccccagatggcttaagaagcagatctagcagttcaaatggatgggaaagaagtttttctccagcatcaacagtatcaggttcacatttgaagttttctgacaactatagtgtatccagtccaactccagttgccaggaagctctttacgggatcctctccttatcaagattctcccgtaatagagccaagctccccttccacgaatgagaaatccaccagatcgatgcaaacgagactagtgcagattcattaatatatccttatcaaagattgacagtgtcgtcaactgaaccagtctcaggcatagatgtgaccaaaagagaagcatacttatctgaaggagagtttgcagaaaaattggcatgccaaagggggccttctataaactacctaaatggagacaaacaacc

SEQ ID NO: 14160 - DNA, 884 bp, Gossypium hirsutum
  Clone ID: GOSHI-09MAY01-C56825_1
ctggaatctcttgaaaagatcaagtttaaaaaaattgttctgttacatggagaaggctttggagcttggtgttggtataaaacgattgctcagttggaggaagtaggccttcagcctactgcactggatctcacaggctctggtattgatctgacggatacaaacacagtcaccacattggctgaatattcgaaaccattgattaagtatctagagaaccttcccgtagatgagacggttatcttggtaggtcatagcagccgaggtgcttgcctttcatatgcatcggagcatttcccggaaaagatctccaaagcaattttcctttgtgctacaatggtgtccaacggtcaagagaccttttgatgtgtttgccgaagagcttggttctgctgaacgtttcatgaaagagtcgcagtttttgatttatggaaatggcaaagataagccttctacagggctcatgtttgagaaacagctgatgaatgggttatatttcaatcaatcgccaacaaaggatgttgctttggccatggtgtccatgagatccaccccactaggtcctatcatggaggaactgtcattgacccccgagaagttcggaactgggcggcggttctacgttcagacattggaggatcgtgctctttcgccagatgtgcaagaaaagctagtaagagaaaatccacctgaaagagtttttaaggtcaaagggagtgatcactgcccattcttctcaaagccacagtcacttcacaagattttaatagaaattgttcaaattccttagcttaattttcagattaaaaaagaaaagaacatatttctttagtcttttatttctatagtgaaagaagacgataataagttgtcattacacttgt

SEQ ID NO: 14161 - DNA, 173 bp, Gossypium hirsutum
  Clone ID: GOSHI-09MAY01-C56535_1
tttggtagacatatgtggttttgagtatatttgcccaatgtgttgggaaaatttttgggcttcattgcgccgattttgagaaaaccggatcgaatgttgaaatgatttgcactatgaggtctttttatgattgttcgaaatttttaatgcccaaagcttggattattttcgtc

SEQ ID NO: 14162 - DNA, 758 bp, Gossypium hirsutum
  Clone ID: GOSHI-09MAY01-C56485_1
gtcctcttctttgaccaagtcagggctacttcatcagctgaaaacagcacgtccgatctcccaggttccatcagggcccttctccctggtgggtctcatggcagctcaaggtccactacaacgaacaccgaagaggattgggattcggtgccaacagctgatgatatcaaagctttgaaaggggagcttgctactctaagattaggcagtaatgatagtggaaatgaggcagctaaatccgatgttgaaaaggttgctgctagtcgaatgaaaggtttggtgatgtcaaaaatattctcgaaactttggtcgagtaaggaaagacatggtgaaattagcagctcggatacatcagacagccatggatctgtgaatgcggaagaaacaaagtccaccccttctagaagtaggagacattcactatcttagttgaggatgatgcccttagcagagcattgaaacttgccttttgtctggctttgtaaaattgtctaagaagatgacagtaggagactagaaccaactgatttttctagctaagcttaccactttggatgtttcgagcaaatggaatgatgcacgttgaataacccagcgattgacttgtaacaatctaaattgttcattgttgctacaaatgtacccagaagaaatgagaacaaagaatcttaggctgctaagcttcttaaccaaataaaaatataatgcaataaactttctatataatattaaatcgtcaacgtattgatgagtttttc

SEQ ID NO: 14163 - DNA, 560 bp, Gossypium hirsutum
  Clone ID: GOSHI-09MAY01-C56475_1
ttcgaaatgatgcgagggtcagtcctagtgacccttccattgctttaggacctgaatttgaaaagattagcgatttcaagcgccgctttgaaacaattcctagcattgtcaagctggatagcttggaggtgaatggtgatgtttggttcggagctgatatagttctcaaggggaaagttgtaatcgatgcatgccctggactgacattgcggattcctggcggagttgtgctcgatgatgaggagatcaatggtcccgcagacatttaagggagggaatcagttgttgctttcttggtgattgcgttgaacatgaagctcatcacacaaaaaaaaagcctttgtaatgctttaatattttgttattcaaattttgtattgatcaatgttatttgttattggaagaggaaataatagttagagcttgagctgagtgattgattcctcattataagcagcttaatgtagaatgatggctctaacttcagaacatgagaattgagacttggcctttttgttgctccggttagcgggtgcccattatttatttatcattttaaa

SEQ ID NO: 14164 - DNA, 567 bp, Gossypium hirsutum
  Clone ID: GOSHI-09MAY01-C56705_1
atccgctgcgtccaaaccgcatccgaggtcgtcgccgccctgtgtgccgtcgatgtcgaggccaatgccaagtcatctgccgacgtcataaaattcgacccatcaaaagtcaaggtttctattgagtatggtttgtgtgagatgttaaacaaagaagcgattagggttgatgtagcgccgaaagatggaaacttcggtttcgatgttccactgcttgagactatgttcccgagtgggacgttggatcctagtcttggacgagtttacggaaagatgccacaatgggaagaaacggtggttgaatctagaagtagatataaacaaattattaaggcattggctgataaatacccctctgagaacttgctattagtcacacatggggaaggagttggagtttcgatatctgggttcttggagcacacgacagtggttgaagtagaatattgtggttatgcagagttaaaaagattaatgacatgcaaaaatgggtcaaccactgctggaaactttttggtgcttacaaaaagtggtcagagtgggattacttattttgattaaagaatg

SEQ ID NO: 14165 - DNA, 740 bp, Gossypium hirsutum
  Clone ID: GOSHI-09MAY01-C56625_1
gctagagttgcttgcttgctgattgaattggcaaattacatagctcgatatgttagctgcataatcagattttatgaatttctctacatgcaggcaccagcagagaagagacacgtgtttgctcttgagctgcagagggctggtaatgcaggagctaaagtgctacgtgagctgggacagaaagttgaaaagatggaaaagttaagccccggagacatactgagggaagtacacgaggcaggagaggatttgcaaatgaagatagacgaaaagtcataccttctagtcaattcagaaagctgggcaactgcaccgccgctctcggaattggaagaatctgggagcatggctgatgttaaagacaatgagcataaagtgataaaatccctgagcgacatgtgggaagttcagcacacgattgatcctcgtgcgccggacttaattacctcggagagcatgctccagaaaccatcatggccccgtctctcgtttactgcagaagcattgctgcagcaacaggaatctaaaatatatgaaagtgctagtgctttatccttagcaacgttcgcatcactattgattgagtttgttgcaaggctccaaaatctcgtggatgcatttcaagagcttagtgagaaagcaaatttcaaggttcctgtggaccaatcacctcaaaaggaggctccaggattttggagaagattaagaaattgcttccagtcaaaagaactaattctatt

SEQ ID NO: 14166 - DNA, 623 bp, Gossypium hirsutum
  Clone ID: GOSHI-09MAY01-C56175_1
gttgatggtgggccctcgggggatccagtgcattacttttacgatgagccactgcttttgatcccagagtgtgatggagtgaggattttatcgaacacaagtttggagtttctgcaacgggttccagattctactgtatctatattcaaaattggtagcacatcaccagctgcattgctttatgatgccttggatcattttgaccggagaagtgccaaggcagatgaaaatttgagattgattcagtcatccttgcctgaggctgttgaagcctgcattgatgctgctggtcatgaatttgatgtttcacgtcaaagaactctattaagagctgcaagccatggacaagctttctgcagtacttttcaacgtgatcgcattcaggagatgtgtaaaaccttgcgggtcttaaatgctgtgcgtgatcctgagattggcatccttctcagtattaatcaatataagttgcttacaccatctgtgctgattgctcgtttgattaatgcccatcgccaccttcttgcactacggatatcagagtatgttggaatgaatcaagaggtggtgataatgcattgggcatgctcgaagaacagcttcattagcaattccagatgccactc

SEQ ID NO: 14167 - DNA, 665 bp, Gossypium hirsutum
  Clone ID: GOSHI-09MAY01-C56105_1
aaacccgggcggaccgacgcgtccgcctttacctgagctaatagcagatttatttgatgcacgttcaatgtcatttggtgggacacacgagtacttggctccagagatcatcaaaggtgaaggccatggaagtgctgttgattggtggacttttggaatcttcctctatgaactcttgtttggtaaaactcctttcaagggatccgggaaccgagcaacattgttcaatgtcgtaggacaaccttttcggtttccagaatcccccattgtgagttttgcagcaagggacctcatacgagggtctacttgtaaaggaaccacaacatagattggcttataagcgaggtgcaaccgagattaaacaacatcctttcttcgaaggggtgaattgggcattgaattcgttgtgctactccacccgagattccaaagccagtcgagcttgaacgagttccagcttcaccggcatcaacaagtgaaaaggttgctgtcaatgcagctgcttataatcagaaaggttcagacaattatctcgagtttgatttcttttagcggttgttggtattaaatcgcagaaccgaatttgtttctttttaacaggaacaattattatgaacatctcaatggttgtcagtaatccgaggctgaaagtttcttcttgatgg

SEQ ID NO: 14168 - DNA, 453 bp, Gossypium hirsutum
  Clone ID: GOSHI-09MAY01-C56095_1
gttgaagctcagctctataaaaaaatatgggcaccacattgttttccggctggcgtagcttttcatggcagcaactatctctttcttgcagtttcgctcactcttcttcatcagaaaatgggatttcaaggccaaaagctgttcccacgtcaaggggaggggggttggttgttttggagaaggacaattcattggggatttcgagtagacgatcccttttgatcactgggatatctgtagcgtcatcgtctgtattaggatttccaggtgagggaatggcagtcgtcaaacaaggtcttctagcaggaaggatacctggcttgtctgagcccgatgaacaaggttggaggacttatcgaagaccagatgacaagtcaggagggcatggtgttggatggagtcctatcatcccttattccttttcagtgcctcaagattttgaggaggttcctg

SEQ ID NO: 14169 - DNA, 855 bp, Gossypium hirsutum
  Clone ID: GOSHI-09MAY01-C56045_1
ttttatccgattctaattcggtaagacattttcaggaaaattagaagccaacaccgattttttgcttccccttccccttcccccatctttgacacctgatcttctgcttgccgtcagccaacactgattctcaacaccagacaccggcgttcatcaaagcttttacccattttcgcctttcgttgtcaaaatctgcactggcattcatcttcttctctcgaagattcgatcatagtgcttattgttactttaaaatttatttactgaaagcatttgtggattgcaacggatgggtgcactttgtgaatataagatattgtgtctagttaaaagctgatctttgtgcatttgaatcaagtgcttaccatactcttcattccatgaagcttatggtaatgattgagctaaaagtcgctcgagccactttaaatccccaggctgtttaccttatggtggcaactcatttaattcctatgatggtcataatcgaaacatgggagcttatagaactgagggatgggatactgagaagacggggatctgatttgcaatctggcaatcagtttgaataccatgccttccctcaaacgttagatgagttggagttggaatttaagatagaggcaatggaacttggaagaattcgtgataaggaagaagatgaagagaattataagtatcgaaaagtaagatgtttatcttgtttgactatcgtgtgtgcttttggtgctaaatggtttctttgacaagcctatatccttctcagataaggtaaaattttttataacttagttatcaatgttggattgtaactttctgtactgttaattaactacaatgaacaccacgaagttc

SEQ ID NO: 14170 - DNA, 521 bp, Gossypium hirsutum
  Clone ID: LIB3829-034-Q1-K6-H8
tgattttctgcttccccttcccccatccttgacacctgatcttctgctagaagtcgctcgagctactctaaatcctcaggccgtttaccttatggtggcaactcatttaattcctacgatggtcataatcgtaacatgggagcttatagaactgagggatgggatactgagagacggggatctgatttgcaatctggcaatcagtttgaataccatgccttccctcaaacgttagataagttggagttggaatttaagagagaggcaacggaacttggaagaattcgtgataaggaagaagatgaagagaattataagcatcgggaggtaagatgtttatcttgtttgacaatcgtgtgtgcttttggtgctaaatggtttctttgacaagcctatatccttctgagataaggtaaatttttttataacttagttatcaatgttggattgtaactttttgtattgttaattaactacaatgaacaccatgaagttcaaaaatctaaagccggaaacagatg

SEQ ID NO: 14171 - DNA, 829 bp, Gossypium hirsutum
  Clone ID: GOSHI-09MAY01-C56005_1
cggaaatccgactcaaatggactctctgcaagtctccctccactatcgactctgtccacctcagtttcctctgccctcaacgctaaactcggcaccaaccatgatctaacccaagcaccaagcatcgtcgccgagtttctgactcagtgcgatgatctggagcgaaatctagtccaccacaaccgtaccctcgagtcaaacctcgcatcttacgcttccttttctaatcgcatcggccacctcttcggcattgtaaattcgaaattgaccgatctaggatcctccgtttgccttcggtcctccgtttcagacggagaagggttgggagaggagttgccgtcgttggccaaggaggtggccagagtggaagcggtctgagcatctgcagcgagagaaagttgaacagttgctacttgaatcaactacaagttatcccatcatttgtgacaacctcaaaaagatatatcctgcaagggatggaaatcctgcgaaaattgctgtgagaggattgtctcttgctttgcctagaggggagtgttttggcatgcttggacccaatggtgctggcaagacttctttaattaatatgatgattgggctcacaaaaccaacctcagggacaacatatcttcagggtttggatatactgacttctatggatataatctatacaagcatgggtgtctgtctgccccggacctgctctgggaaactttaactgggagggagcacttgctattttatgggagactgaagaacctcaaagcttctgcattaaatcaagcagtggaagactctcttaagagtgtcaacctatttcatggagggg

SEQ ID NO: 14172 - DNA, 469 bp, Gossypium hirsutum
  Clone ID: GOSHI-09MAY01-C56365_1
gaagaatcaaatctatcagatccccaagatggaagatttttggaagcgagcgaagtcattcgctgaagaagcagctaagagatcgcaaaccctaacttcgcccaacaaattggccgatcttgtcgctgaaaccgccaagaagtccaaggaactcgctgtcgaagccaccaagaaagccgatgagctcaaaactgccgctctcaaacaagccgaccaaatccaaatccaatccatctctaagtccatttccgattttatccctcctcaactctcctccctctccatttcctctcccgcctccacttcttccgatcctcctcctatccccgactcggagctccgcaagttcggactcaccgatgatttgagagattttgtccaaggctttacttctactactttccaaaacttcccttcccctgtccaagacgaaccaaaccgtccgattcgactactgcggggtccaatt

SEQ ID NO: 14173 - DNA, 392 bp, Gossypium hirsutum
  Clone ID: GOSHI-09MAY01-C56305_1
acatcaagaggctttgcaagtttgcaaaaaaaatgagtgaccccaaatatgcttatccctaccctgctcaaggctattatcaaggtcccccaggggtggcaccaccgcaatatgcagctccaccacctaggagagaacctggtttccttgagggctgccttgcagcctcatgttgctgttgtcttattgacgaatgttgctgtgatccatccatcatctttatcagctgataataaataaaaatattctctgtaatctcactatatatattgtgatgctaggtttaaattcttaggaggattaatcttttcaacactagtaaaattataatttatagatagtgatgatgggtgtgttttgtgctttggtggttcgaagaacctggctgcctt

SEQ ID NO: 14174 - DNA, 390 bp, Gossypium hirsutum
  unsure (1)..(390): unsure at all n locations
  Clone ID: LIB3149-014-Q1-K1-B3
ttattatcaaggtccnccagtgatggcaccaccgcaatatgcagctccaccacctaggagagatcccggtttccttgagggctggtatggtgccaatattttgaatgaatgttannattattctttaatgtgtaannattaattaattatatantttatttttggcagtcttgcagctnntatgtngctgtgtcttattgatgaatgtngctgtgatccatcccatcatcttatcagctgagaataacanaaatatctctgtatctactattatatnggatgctagggttaatctagagataatcttttaccactataatatattataataggatatggttgttggtttgggtgaaactgtgcttagtttgttctcatctgattctacat

SEQ ID NO: 14175 - DNA, 396 bp, Gossypium hirsutum
  Clone ID: GOSHI-09MAY01-C56275_1
gacatgtttgagatgtattcagtaacttccaccggtctgtctcctgaaattgcatacttccatactaaggattattttgagagtggtctggatggcggaaataacagtgcagaatatgtaagtgacataataatcaaacatgcagaccgtcacaatctatggcgtccagaaactggtgaatccctgttcgggttatatcgaatcactcaggatccaaaatatcgagaatggggttggcggatctttgagtcatttgagagatacacaaaggtcgaatccggcggatactcttctttagatgatgtcaccacagttccttcttcaaaaagagacaggatggagacatttttcctgggtgaaacattgaaatatatgtacttgctgttcggagatagc

SEQ ID NO: 14176 - DNA, 671 bp, Gossypium hirsutum
  Clone ID: GOSHI-09MAY01-C56215_1
gattatcaaggcttttgggtaactcggaaacccatgcaacaactggtgtagccggcacatttggatatgttgcaccggagtatgctatgacctgccgtgtatccgagaaggctgatgtctacagctatggggttgtgcttctcgagttgatatcagataaaaaagctttggatccttctttctcctcgcatgcaaatggtttcaatatcgtctcttgggcctgcatgatgctgcgacagggtcaagcaaaggatgtgttcactgcaaggttatgggatagcggtccgcatgaccatcttgtacaactgctgcacttggccattacatgcacagttgatagcctctcagcaagaccaactatgaggcaagttgtccgtcggttgaaacgaatccaaccttcttcggtaagataatctggtttctgggtgcagactatgatcttgtaaggaacagcttaagtgcacaagtcataacagacttgtagtttgtacattcgcaccaaaaatcaaaaatgtcatcccctggctgagaacaatccttaatgatctgcacaaaaatagcagatatgaattttggagactgctttatataaatgtatttcagttctctttgcttttgtagtgctaatcaaggcaggtttaatatgtcaagatttttacttttgtagtgct

SEQ ID NO: 14177 - DNA, 435 bp, Gossypium hirsutum
  Clone ID: GOSHI-09MAY01-C57495_1
gcgtccgaatttttttttgggcttttgcttggttctttctctacatacttcaaatcacagccaataccaggggacaataatgcaagtgtgctagctgtcgtgggaaagacatttgatgacttggtcttgaacagtcccaagaatgttcttttagaggtatataccccgtggtgcatcaattgtgagaccacgagcaagcaggttgagaaattggctaagcattttaaaggcttggacagtctcatctttgctaagattgatgcttctgctaatgaacatccaaaacttcaggttgacaactacccgtcactctttttatacaaagctggtgataaagacaatccgatcaaactttcaacaaaatcaggttcaaaagaactagcagccttcattaacaaacaagtgagacccaagatcaagcggccaaagatgaac

SEQ ID NO: 14178 - DNA, 725 bp, Gossypium hirsutum
  Clone ID: GOSHI-09MAY01-C57015_1
cccacgcgtccgcccacgcgtccgattttgtattaaacgaactatataagctagatatttccgttttttttttcttgagaagtttctctctctagcccttagatttacgttttaaagagtgagagattatagatagctaaccgttagagaaggaaagagggagcccggagatctcgagagttttttgtttttctttttctgaagctgatctatctgggtttttcaagactggtctacaagatttctttagatttttttttcaaaaaaataatgtggtggatgatgaatgaaggaggaggccattattgttctaaaaaaactgatgacatctgtggtgatgtttgtggtcaggaatcaagccggctgagcatgtcaagaatccgttgtatactgcgtggcattgatttgaaaacgtatatatttctatttatactggttccgacctgcatattcggtatatatattcatgggcagaagatttcatacttcctgcgcccgatatgggaatcgccacccaaaccattccatgatatcccacattattttcatgagaatgtatcaatggacgcgctctgcgaacttcatggttggagaattcgtgaatttccaagacgggtgtatgatgctgtgtcgcttagtaacgaagtggatatccttaccatacggatggaaagaggtgtacccttacataacgcattttgttcttcttgagtctaattcaacat

SEQ ID NO: 14179 - DNA, 459 bp, Gossypium hirsutum
  unsure (1)..(459): unsure at all n locations
  Clone ID: AW186838.1
aggagtctctcactgtctaaatttcggggctttttgtgttttttttccttgtgaaaagggatattatagttaagaggtggccgttgtaagtggaacaaggttgctgaagatcgagcgagattttctggaagttgagctttctgggttcttcagcactgaattacaatcatattttttttaattttttttattactaaaaggagttataaatttctagaaaaaatgtggtggatgatgaatgaaggaggagggcattgtcctaaaaaatctgatgatatctatggagatgtttgtggtcagggtttgagccggttgagcatgtcnagaatccgctgcatactgcgtggcattgatttgagaacttgtattttgctgtttgtgctggttccgacgtgcatatttggtatatatattcatggacagaagatttcatacttccttcgaccactctgggaatcc

SEQ ID NO: 14180 - DNA, 530 bp, Gossypium hirsutum
  Clone ID: GOSHI-09MAY01-C57395_1
atcctttctttgtcatatacccgacatgcagaagatattcgtcatgctcgttcttttctttctaaactgggtgagctcaaccagactcaaatttttgccaagattgaaaatatagaggggttaactcattttgatgagatcttacaagaagcagatggaatcatcttttctcggggaaatctggggatagatctcccgcctgagaaggtgtttctatttcaaaaagctgctctttacaagtgcaacatgatgggaaagcctgcagtggtcactcgtgttgtggacagtatgacagacaacctaagacctactcgtgctgaagcaactgatgttgccaatgctgtgttggatgggagtgatgcaatacttttaggggcagaaaccttgcgtggactataccctgttgagactgtctctacagttggaaaaatttgtgctgaagcaaaaaaagtttttaatcaagatttatactgtcagaaaactgtccaaaatgttggagaaccaatgagtcatctggaatccattggttt

SEQ ID NO: 14181 - DNA, 433 bp, Gossypium hirsutum
  unsure (1)..(433): unsure at all n locations
  Clone ID: LIB3829-003-Q6-K6-E5
cggncgcgtgggcttgaacctctttaaaaatttctttttatgcttttttctaggcctgccatcgaaagccgttcttgtaaatggaagggaattaacataccgtagttacccatcgaaagcagccactgtttctcctgttcttggttgaaatgccagccaagtagatttagctgtaccgaagttacccatcgaaagcagccactgtttctcctgttcttggttgaaatgccagccaagtagatttagctgtaccgaattttctttaattttagaaaatgcgatacgctggtttcatgaattctatttctgttcgacattagtattcaggcataggtaggtatttggtgatagactaaaattttgttgcaagagttggatgggatggaatcaaacgttggctttacaatattgataactttgtaattgtgattca

SEQ ID NO: 14182 - DNA, 252 bp, Gossypium hirsutum
  unsure (1)..(252): unsure at all n locations
  Clone ID: LIB3146-022-Q1-K1-F4
aaaaaagaancgaccgcacgcgtacgggacatggagcacttgaacctctttaaaaatattctttttatgcttttttctangcctcccgtcttaatgccgttcttgtaaatggaaaggaattaacataccgtagttacccatcgaaagcagccactgtttctcctgttcttggttgaaatgccagccaagtagatttagctgtaccgaattttctttaattttagaaaatgcgatacgctggtttcatgaaaa

SEQ ID NO: 14183 - DNA, 555 bp, Gossypium hirsutum
  Clone ID: GOSHI-09MAY01-C50585_1
aatagaccttaaaaatttggaagaaacttggcgatacagatgtgaagcacttactgcagaaaatgaagcatcctctggtgaagatatacgaaaagaattagaggagacaaaactacagtacaagcggttgaaggaagagcatgcatcacgaccagaccttgctgataaaatgattgaggagaaggataaggagggttgtatacttttggatgacaacaagaatcttcaacgatctctggagtcaagacaactggttgatcacactgacaattacaacacagccacacataaacaagatgctccaaatctaaacacctctgcagcagaacagcagattctgcttttagcaaggcagcaggctcagagggaggaagagctggcacaatcacagcgacacattttagcccttcaggaagaaattgacgagctcgaacgtgaaaatcgtctccacagtcaacaggaagctttgctgaaggaggaacttctcgacatggaaaggtcgaaaaggagagaaggtgttgaatttacgtatctgaaaaatgtaatcataaagct

SEQ ID NO: 14184 - DNA, 513 bp, Gossypium hirsutum
  Clone ID: GOSHI-09MAY01-C50565_1
ggcggcgggatttcacttgttgccggaaatggcgaagagaaagcatcttgaaatacaatttataggcgagggtgaaggggggacttcctgtatgggaactcattccactgtttcagcttcaggtcgtttcttacgtaataagaggagagttaacgccagaaacaccaggcaacaagggatgttaaatagcaaacagttttcagattgctttgagaaaatatggaagatcttcccggataatcagagggcttcttttacttacctcgattgcttgtggttttcatggtacatggatgaattgtttaaagaaaaagtgttggtatggatcagtaggaaacatattttcaccaagaagtatgttttcgttccgatattgcactggagacattggaatctattgatattctgcaactttgataaacctttgcaatctaaaactcaaacaacttgtatgttattgcttgattcaatgcaaatgagtggcccaagacggctcgaacctactattagaaa

SEQ ID NO: 14185 - DNA, 1017 bp, Gossypium hirsutum
  Clone ID: GOSHI-09MAY01-C50115_1
actctgtactcttcccactcgtccgcaattgtggaagctctcaaatctcagctgctatggcacccatcgcacggttacttttgctcgcgcttctctcaactgcactcacgatttcatcagggtctggggatgggtacaccatcaatggtcgagtgaagatcccccaaggtctgggtacaaaagggtttgctttgcctggaaaaacgtcaaatgtcaaagttatactcaatggtggccaaattgttacttatctgagacctgatggatatttttcatttcagaacataccagcagggactcatttgattgaagtggctgctattggctatttcttttctcctgttagagttgatgttagtgctagaaacccaggcaaggtacaggctgcattgacagagaacaggaggggtctcagtgaattggttttagagccgttgagagatgaacaatattacgagattagggaacctttctccataatgtcggttgtgaaaagcccaatgggtctcatggtgggatttatgctggtggtggtgtttttaatgcccaaattagtggaaaacatggatcctgaagaaatgagacgagcacaagaagaaatgagaaaccagggagttccctccttagctagtttgttaccaggaggtgggaggaattaagtgttcgattgaggagcaggaacttcgagataatggtttggcaaaatcaaggggcagttcaaacgtcgagctcgattggtcttctaccctgatattcatcttttgattgcagaaagaagggatgataccttttgaattcctgggggcatctcaaaggttatgtagtgttttacttgatagttgcagattttcagaacttattatgggattcaacttctcataacatctattcattgttgtgatgctttgatgtcataaacaaagaagagttgaaaatttattgttatagacattatccatctagtaagaagtccgcttctaagcctttggttataacacgagttccatcatcccattt

SEQ ID NO: 14186 - DNA, 399 bp, Gossypium hirsutum
  Clone ID: LIB3493-005-P1-M1-E11
cttctctttcatactctctaattttctttttagatcgctttgaaaaaaaaaacccaccaccattgagttcttttgaagtttagattttttgatttaatttagaaattcagttattgactttatcactgtagtcacctggttcatctcaaccgaacgtcaagtctggggatgggtacaccatcaatggtcgagtgaagatcccccaaggtctgggtacaaaagggtttgctttgcctggaaaaacgtcaaatgtcaaagttatactcaatggtggccaaattgttacttatctgagacctgatggatatttttcatttcagaacataccagcagggactcatttgattgaagtggctgctattggctatttcttttctcctggtagagttgatgtagtgc

SEQ ID NO: 14187 - DNA, 611 bp, Gossypium hirsutum
  Clone ID: GOSHI-09MAY01-C50095_1
gtcgacccagcgttcgcttattttggctggttttgagcaaagtgagtattactattcttctttcattaaaaagaaagaggtaagatggttattttactggtgtatgttaatgatcttcttatcactggaaataacatagacaagattgctgacttgaagggattctgaaccggaattttaagatgaagggtgggggagaattaagatactttcttgggattgaaattttaaggtctccagaaggcattttgctaaatcagctgaagcatgcacaagaactcatccaagacactggtctaagtgacgcaaaggttgctcttacaccacttgagcagaatcaaaaactaacaacagcagaatttgatgaagtcactcagcagcattaagaagataagttgttagaagataaaacagtttatcagagactcattggaagattgatctatttaacccatacaagacctgagatcacctttgctgttactcatcctagtcagtttatgcaaaatccaaaacaatcgcatatggaagcagcattgagagtagtgagatatataaagagggatccagggcttggtatttttttgaaggctaacaataaacaccaattg

SEQ ID NO: 14188 - DNA, 871 bp, Gossypium hirsutum
  Clone ID: GOSHI-09MAY01-C50025_1
gtgattttttcagctgccataggaataatggcctcaggtcaagccaacactttttctggggtgcattgttacaacaaggcaacaggttttggtggcacggggatttacttgaagctgcctggtcttacacaaacccggatagtgaattcatacctagattacactgggattgtggctgaagacccagtgcaacttcatatctctagcagttttttcctcggtgatgcatttatcctcttgaaatcaataaatggggtagcaaatggagtgactatagtggataacatgttcagtggatctaataagggggttgatatagtccagttagagggtcctttcacacaaattgatcaggttgtagttgataggaatagtgccaaggggatgaacattaaagcaacagttgcgagagggtctgttgaagggaatagcagctcctggacggttgattttaatcctgttcttttatttcctaacctgattaagcatgttcagtattcactaagctcaagcaggggcagctcatttcctagccatgccctgagaaatgtgtctgaaaatcaagttgtgattgagtctgatctcgctgtgccggcaaatgttttcgtcacggtggatcaagcttaagcaccatgacctgacttattattattattatcatcatcatcatcatcattatcagcatcatcatctgatggagagttaagatcctttgacaattgtgaatatggggtgaaagactagtattgtctttttctctgaaagttcaactcaaatcaaacatatatcggctaaaaggatagacttccagaagatacaaaattgacaagaaggaattgaatgaataaaagctttccctcacccatttact

SEQ ID NO: 14189 - DNA, 425 bp, Gossypium hirsutum
  unsure (1)..(425): unsure at all n locations
  Clone ID: LIB3493-038-P1-M1-A7
tcccggttcaaccaacccttccgtgattttttaaactgccataagaataatctcctcaagtganagccaacactaatttgtggaaccgatactcaccacctgacaacaacttttggtagtacggagacttacttgaagccctctggaataacacaaacccttatagtaaattcatacctacattacaacgggatagtcgctggaaacccccagcaactctatatgtctagcactttttttctcggtcatgcatttatcctcttgaaatcaataaatggggtaacaaatggagtgactgtagtggataacatgttcagtggatctaataagggggttgatataatccaattagagggtcctttcacagaaatttatcaagttgtaattgataggaatagtgccaaagggatgaacattaaagcaac

SEQ ID NO: 14190 - DNA, 359 bp, Gossypium hirsutum
  Clone ID: LIB3146-011-Q1-K1-C12
gggaatagcagctcctggacggttgattttaatcctgttcttttatttcctaacctgattaagcatgttcagtattcactaagctcaagcaggggcagctcatttcctagccatgccctgagaaatgtgtctgaaaatcaagttgtgattgagtctgatctcgctgtgctggctaatgttttcgtcacggtggatcaagcttaagcaccatgacctgacttattattattattattattattatcatcatcagcagcagcagcatcattatcagcatcatcatctgatggagagttaagatcctttgacaattgtgaatatggggtgaaagactagtattggcttttttctctgaaagt

SEQ ID NO: 14191 - DNA, 758 bp, Gossypium hirsutum
  Clone ID: GOSHI-09MAY01-C50385_1
acggtggggaactagaaaaggaagacatgaaataagcgagggaaagaggctggaaaggaaaagttacaaaacctggtcgagttatacgccctggagcaatcaggattaatggaaaatgcccattgactcctttagaggttggattgatgcttagaggaatgggatttgataataatacatatatctttttggcttctggaaagatatacaattctgagaaaacaatggctcctttactggaaatgtttcccaacttgcaaacaaaagagatgctggcatctgaggaagaacttgttccatataagagattttcatccaggatggctgccatagactatactgtttgccttcatagcgaggtatttttgactactcaaggtgggaatttgcctcattttctgatgggccacaggaggtaccggtacggcggacattccaagacaattcgaccagacaagcgaaggttggcactgctatttgataaccctaatattgggtggagaactttcaagcgacaaatgctgaatatgaggtctcatagtgacacaaaggggtttgagctcaaaaggcccaatgattcgatatataccttcccatgccctgattgcatgtgtcgtacaaacaaatcagaagcagcaagatcatcggctacgtgatcttggaggattttgatgggtgaatgtattttgttcctgtaaacatagctagcacatattggccctgacccccctttttggtctaattttttcattctttta

SEQ ID NO: 14192 - DNA, 751 bp, Gossypium hirsutum
  Clone ID: GOSHI-09MAY01-C50275_1
gatgggagaagcgtcggcggctaagttggtaattatcttcctggtcatctgaacttgttagcctcgttgtcgggtgctccaggaagttcgggtcggagaggcgaggatcctcgttgaatttggctggacaagtttacccctgttatcgggagtatatatatagcttggttttgatgtgtgtggatgtggaagagggtttttaggtgcaggcgtgcagctttagggtcagggaattaggggtaaattttggggacatttggttgatgattaattagggttgtagagccgtcacaaattgttcacgattgtgagagttcatgcgagggagaatttggggcttggagccacagacagggagagatcatggtacttggggatatatatggcatgttaagaatggtgttaaagctacttgttttcagacgatgaagctgcaaaactaacggtcgattcttcttgtttttacacttcattgggtgattgggagatttgccctggatcatactagcaattgactcaccggtgtggcatatggtcttcgtaattatgattctgtttttgagaatcattagttagtttgctgcgtaccattgaatttatggctctcaaggtgtgggatttatgtctctctctctctccctctctctctctctgtttctgccttcagtgtcagtctttatgtcgatcacatgatcgtaaaggagactgctgtgtcaatagtttatataaaaaaagaaaagcagctctgctc

SEQ ID NO: 14193 - DNA, 690 bp, Gossypium hirsutum
  Clone ID: GOSHI-09MAY01-C51995_1
tttggacgcgtgggttttttttgtgcattgacatctggtttttagggtttaaaaactaggatcatgtagtcatatatatatattaaaatgctttttttaccaacatcacttcatatcttaaatgtaataatatgtgaaaaaaatcaaaacaccatcttcccttagggaaagggaagataatggtttttaagtacaaacttaccctagctttgttttcttttgtaaattcattaatggtggctaaaactttgggagtatttagcccctttctgattgaactatggtaaatagtttcttcttttgtgattttaatatgcatttagcttttttctaacatttcatcatgaaaaaggagctccattaatggatatggagctcgcaagcattttgcatgcaaaccctaggagatatttgggttccttagggttcttctcttctaatgtaccaaccatggttaggaccttctctctctaccctctcttgaacttggaacttgttattttatatatagggtttggattataagtagggacttatatatatatattcattctccatccaagggttgatgactgagaatggatgatgcaatactatatatttgcattaatttcagactctttctatgtcactgctgctaatgttgtactttgatcaccaaactataatgtgctaaattttatttttttt

SEQ ID NO: 14194 - DNA, 371 bp, Gossypium hirsutum
  Clone ID: GOSHI-09MAY01-C51935_1
ggcggcgaagatggaaacggaagtttgaaactgtttggggtgtggttgaaaagcgcgggaaaaaagcggccccgcgaggagaaaattgtgtacggtgggccacacgctaaagagatgaagaccgttgattttcgccacgtggctttgatgatgaagagcggcaaggtttgcaactgagcctatcaccggtcctcatcgacagcaaggaagttgatttcgttcaaatataactaggattaaataaaaaagtttttttgttttttggataatatatttaatatatgggtggaagctgttttcctttctcttgtcgcctggttaaaaattgtcaaatgtatttaattaatatttaaaaataaaaatatataatt

SEQ ID NO: 14195 - DNA, 494 bp, Gossypium hirsutum
  Clone ID: uC-gsflnu33B059f03b1
cccattcgtccgcccacgcgtccgaagatcgtaataatgaggacagtcgcaacagagatgagagcaaagagaagatccctgatcgggatagagacagggaacatggacaggataaggtgaaaacaacagataaccagaagcttttggatgccaaacaactaattgatatgattccaaagaccaaggaggaactattttcatacgagataaactggaatgtgtatgatcagcatgcattgcatgagagaatgagaccctggatctcaaagaaaattacggagtttttgggagaagaagagaaaactctggttgattacattgtgtcgggtactcaggaacatgttaaggcttcccaaatgctggagctgctgcagtctatattagatgaagaagcggagatgtttgtgcttaagatgtggaggatgctgatatttgagattaaaaaagtagaaactggcctggctttgcggtcgagatcctgaactaacattctt

SEQ ID NO: 14196 - DNA, 271 bp, Gossypium hirsutum
  Clone ID: LIB3146-036-P1-K1-A4
cccacgcgtccgatcgtaatgatgaggacagtcgctgtagttgcaatagcaccgagaggagccgtgctcggaatagagacagggaacatggacaggatagggtgaaaacaacagttaaccagatgcttttggatgccaaacaactaatagatttgattcctatgaccaaggaggaactattatcatacgagataaactggaatgtgtatgatcagcatgcattgtatgagagaatgagaccctggatctcaaagaaaattatggagttttt

SEQ ID NO: 14197 - DNA, 458 bp, Gossypium hirsutum
  Clone ID: GOSHI-09MAY01-C51875_1
gcaacgtgtcgaacaccgatcgcggcctgaacatcggaagcttcctaaagaacctaagcaaatttgcggttgattccgccattaacgtctccctcaaaggtttcactggtgggaagaaactgtatcagacatttttgcaggaaaagttaaaagatgaggcaagcaatgtgaaactaatgaaggaggagacacaatcaacaaaaatggaagacattgcaaacaaagctgtaggaggaacagagcctgtgaagaagaagaagatggtacctcaagactcgaaggaaatggagctcgaagatcctaaaaggaaaacaattttcattcgatctcgcctgtaaaatactaggaaaagttaatgggtaaattgatacttcaattatatatatttcgaagatgtacttttttttattgtaccttgttaatgtttaagttataatttgattaaggtttctattgct

SEQ ID NO: 14198 - DNA, 653 bp, Gossypium hirsutum
  Clone ID: GOSHI-09MAY01-C51585_1
tgaagcagaagaagatgatggtgagatgtatgatgagtttggcaatctcaagaaaaagtttcgggcaaaaacacaacaagctgaagctgctcgagtgctaccacgttcaggccgggctggctgggaggttggggaactaggtgtgattgacagggatggaagagaaagaagcagagacagaggaagggaacgggatgatagagaaagtagcaagaatagagagcgtgaagatagggaaagacgccgtagtcgaagcagagagagggataggggaaaggatcggagccgtgattatgattatgagcgtgatagagattatggacgggatcgagaccgaggcagatacttttactgagaaagaaagaatgggtgacgttaatgtggttagaatatggcagttgattgaaacattttgagttgaattggcatcttagcaaagactagtgtctagagttggatgtattgtggatttagtgtgatggggtggccacagttttggtactataggagagtttagattttgaaattaaaacagttaatgattttatctccttgctatggtatttcaaagccttctttttagcattcttgaaactcgggatgaatgttcgagcaaaagttggttgacatcattcttcaaaaaaaaaaaaaaa

SEQ ID NO: 14199 - DNA, 1100 bp, Gossypium hirsutum
  Clone ID: GOSHI-09MAY01-C51505_1
ctatctacctctctcgtccggtatccagaaccagatgtttacgaggaaaatagaaagtattccccaagagatcatgtcagcaagagggatcttggctatttcaactctgacatccgatataatcgttacaaggaccaacagagaccaaattcccagagtttcaaataccaaccaggtgatagtagaggcagagcttatcgtagggcatcgagaagtcctgaggctgacactaaccctcactgtggaaggtctattgatagcagaaagcatagagaaagaagaggtgcatcacccttggaaagaagctggaaaagggaaagatctccatcaaaatcaacgtctcagagatattgccatgaggattctagtttcggaaggtcggggagtttcagataccagtcgggtgatgatactggcagaaactatcatacagtgtaccaaagacccactgatgtcgatatcccccacgatagtaggtttattgatagcagaaaacatagagaaaggagtggttcatcgcatatggaaagaaactggaaaatgaaaaggagatctccatctaaacctaagcatcagagttatttcgacaaggactcccatagtttcagatgccagccgggtgacagtagaaccaaaagttatgacagtaaccctcaccatggaaggtctattgatagcaaaaagcatagagaaaagagaggtgcatcacccttggagattggtaggagtcacaagagtagacatctttcagcggaagaccgaaaagatggttacagagacaacggtgatgagaagattagtgagcctacaggtggcaggagtggatgtcagagtaagccaaccgtgggtgaaacttgggagaaaacactatattaggtacgaggaagatcaagaggcatatatgtgctagcttatgtcgttttaaagcaacttttcgtccctagtagaacattgtttagtcttcctgttgggttatgtttctttggtagtgctcagtaatgtggtacttactaaaaacattttcttattttgggtttatgtactattcggtcaatggattaacattggagcaattagaaaaacaaaccctttgtgccgcc

SEQ ID NO: 14200 - DNA, 327 bp, Gossypium hirsutum
  Clone ID: LIB3146-032-Q1-K1-F3
aaagaacatgaaggcctacaataagagacaggctgagggtcccaaagacgaagatgttgagtctgacaaatcagtgtctgaggtgaatgatgaggatgatgatgaagaaaacactatattaggtacgaggaagatcaagaggcatatatgtgctagcttatgtcgttttaaagcaacttttcgtccctagtagaacattgtttagtcttcctgttgggttatgtttctttggtagtactcagtaatgtggtacttactaaaaacattttcttattttggttttatgtactattcggtcaatggatttaaaaaaacgatattttttgg

SEQ ID NO: 14201 - DNA, 411 bp, Gossypium hirsutum
  Clone ID: GOSHI-09MAY01-C51485_1
aataataaattgcatctcattaaaaatattttatgtatgaaattttacatcatcccgtgaaaaaggcatcaatttttgttaaaaaaacaattttaaaaaaaaataaaagttgatggtaaaaaaaggtttaaaatacaattaaaattattttgacaaaatatgtaaacgttaatcactgaattatcattaagccttctgaaatttatccctttctactatcagaatgaattttccattttcaattttttttccccggtgatggtgtttgggccttagcccaactataacccaaagatataatttcgacgccagcgcgcaagattgacgtagaagaaagatgagtgccgaaaaagaatcctctgtctctcaacgtcgcttgtcctgcactaaatgcttggacttgctctggtt

SEQ ID NO: 14202 - DNA, 519 bp, Gossypium hirsutum
  Clone ID: GOSHI-09MAY01-C51795_1
ctgcattgaggtttgttgttgataatccaggggtttgggcatttcactgccacattgagccgcatttgcatatggggatgggggttatttttgctcaagatgcccatcgtgtaggtcaaataccaaaagaggctcttgcttgtggattaacaggaaacaagcagaactgagagactgatttgagctaatttatgtattacgctatttggtgtcaggctttttttctttatttgctggtgtttgttagatggggttggtcttggttaaggaaaaagggtaggctacttgtcaagggctagccatggacaacggttctagtttgggcctggtcttgtcttggtataatatgtatctcatgtcaggtcatttgggcattggctaaagtctccaagtccatcttgtttcaatgggttgagggaaactatgttcgacaactcgcaagtcgcaactaaacttcaataatatcgaattccgctattgccaaaaaaaaaaaaaaaaaaaaaaaaaaaaaaaaaaaaa

SEQ ID NO: 14203 - DNA, 520 bp, Gossypium hirsutum
  Clone ID: LIB3829-003-Q6-N6-B10
cgatgttatcgaagtttagtagcgacttgcaagctgtcaaacaaagtttccctcaacccattgaaacaagatggacttggagacttcagccaatgcccaaatgacctgacatgagatacatattataccaagacaagaccaggcccaaactagaaccattgtccatggctagcccatgacaagtagcctacccttattccttaaccaagaccaaccccatctaacaaaaacactacttctcatcattcagctcaaatcagaccaaataccaaacacgagcaaataaagaaaaaaagcctgacagcaaatccctaatacataaattagctcaaatcagtctctcagttctgcttgtttcctgttaatccacaagcaagagcctcttttggtatttgacctacacgatggacaccttgagcaaaaataacccccatccccatatgcaaatgtggctcaatgtggcagtgaaatgcccaaacccctggattatcagcaacaaacctcaatgcagtccacccaa

SEQ ID NO: 14204 - DNA, 1703 bp, Gossypium hirsutum
  Clone ID: GOSHI-09MAY01-C51195_1
gtgaagtgtttacttgaactgtttagaaaatgttattctagtccttaccctcctatcgtccatttaggtgggatgcttggcattgttaatgcttttggggcaggtgctggaaatttagttgattttcacccttttaactcctctgtgcaaactggttatgatcaaaaggaaccttcccatatttcaggtccaatacttgtgaatcctgtttgtgaagaccactcaacatcactgatgcaagagatttttcttgttgctcaaaatcctgatgataatcaattgcaacaatatgcagcgtgggcaatttcatttcttcgacagcgactgtggtctagagaaatttcgaatagtgctggtggtacacaaactgagtctgctggctcaaaatctatttcgcaaggtgttcccgaggacagtgcagtcatgaaactgggtctgtggcttaaatcttttaatcattccagggtaccagtacacatgtatgcacagtaactgctattttaaggtgtctatgactagctcctaggttaccaaccttggattggggtgcaattgttagacgctgtatgagatatgctcaagttactcagttgccggcaccaaatatcactcttaaaggaggaatcctcagggaggaatgcttgcagtttgccttagttcatgcaaagcaatttgaccctccccccgcattcctagatgaactgtctgacctttcccggttcaggacactggagataagtctccaatcttgtctgctcaatcatttggctgacctgataaaactattctcgggttcaaggctggagaaattattggatgatgtgagtaattacttttcttcacttacaacagaccaggtgctaaagtcggaggagagaagttcattacggagttcttgttggaagggtctcaatcagtgtctggatgaagcatctctcgactctctagaatacattaaaaatatcggaaggtgcatggaagtgcttttttctttattaccattacctcaagctcctgttattgtgcaagtgaatcagttggactcagttgagtggtccgaggcggttaggtgcttggcaaaggctcgcccaggctggttattggattttctgcatgtttcacatccggactcagtaacaagagatgtccagttcgtcgaagtgctgaaaaagattcaagctaaagccaagctagttcggattggttccatcccactgactgaactgggaaaatcaaagtcttatttattgaattcagaaccacttggtacttggggtgtgcttcttgaagttgtagcaactctacaacatgtggagggaagtgtaaaaagacaatggttggttgatgcaatcgaaatcagctgcgtttcaagttatccttccacggcaatgcagtttattggtcttctatctggttcttgctgcaaatatatgcccctcctcattgcggatcggtcatatgttctgaacgatataccagttacccttacatctctattgtcggatccaaactgggaagtggttgcagaaagctgtacttcttatcttttgtcgtcaacagaaaggatttacagttgggctacgaaattatcgtcaaagagtggtgataatagatcaccaagttcagaaagtatcgatgagagtgaaaagggaatggctcaaatctattgcttgttatgcatcatgcatgtgtttgtctgaaac

SEQ ID NO: 14205 - DNA, 440 bp, Gossypium hirsutum
  Clone ID: GOSHI-09MAY01-C51095_1
ccggagttctcgtttgtagcgtctgcttcatctttgcttgagaaaatagtaaggtttcatatactacctcgaaagctcacctacatggaacttgcttctttacctgcaaatgcaacattatgtactttagctccggaccatgatctcgagatatccaaggccgtaaatattacacaagaattgatgattaaccaagttaagattgttgcaccaaatatgtttgaatccaagaagtttgtgatccatggaatatcacaagcattcaaattgggtgagcttcctaacaccttccagatgaatgcatttttatagtaaagaaggattcaatagcttggagaatttcattagaggcatgtatatttgacctcttacttgtttgtataatttttggtatttgagagcctgccagagctcaatatacaatgagtaagatcttgaat

SEQ ID NO: 14206 - DNA, 568 bp, Gossypium hirsutum
  Clone ID: GOSHI-09MAY01-C51085_1
gtcagattgtttaaagtacgagtcttacttcagtcaaccggagttaattgaatttccgacagtggttcctggtcaaaatgcctatgcttactattatccgccaactaatccgctttatcaagctagcctccgagaaaagccaccattgctgttgaaaagtcacggaggacctactgctgaaactcgtggaattttgaatctaagcatccagtactgggactagcccagggtgggcatttggggatggtaactatggtggaagcacaggttaccgaagagaatttcgtgaacgacttttggaccgttggggaattgttgatgttgatgactgttgtagctgtgctaaatttttgttggagaacgggaaggcagataaggaacgactttgtataacaggaggctctgccggtgggtacacaaccttagcagctcttgcttttagagatacattcaaggctggagcttccctctatggggtagctgacttaaacttgttgaaggccgagacacataaattcgaatcccgttatcttgataaactcgttggagatgataaggctttcttcct

SEQ ID NO: 14207 - DNA, 600 bp, Gossypium hirsutum
  Clone ID: GOSHI-09MAY01-C51255_1
cgatgacatattctcagacagtgatggagaggaatcaggggcttcaccgagtaggccgactcaaccggctgctggagcaggacctacaatctccagcaatctattgaaccctgcagccgagcaaaaaggaacatcaaaaccatctgtcaaaaaccaagagctttcatctaataatagttccaaagacattgccattaatggagttggcaaacattcaacaggacttgagctccccagtatggagttgatgggcgcaagtgacacccgtcccattgctgctgatgcttcagtcttcagttttggcgacgacgaagattatgacagtgagtgagctaggtttgtctaaacatcaaaacgagaaattcccattgatttttttttgaaaaaaaaacacacacgataaaatgcaattgaacaatttattgtacgaatttgttgcactaatgagaggttgagggtgatagcttgacctctcgttagctgccatttgttctttgctttatattgaattctcttatttattattatcttgcaaaaaaaaaataaaaaaaaataaaaaaactatttaaaatttttttaaatatattaaaattaatttat

SEQ ID NO: 14208 - DNA, 725 bp, Gossypium hirsutum
  Clone ID: GOSHI-09MAY01-C51215_1
attctacttccattcaatacaaaaaaaggcctgtgacaagtttgatccatccttttatcctcgattcaagaaatggtgcgatgactatttttacattaagcatcgaggtgaaagacgagggctcgggggaatattttttgatgatctaaatgactatgatcaagagatgcttctttcatttgccactgaatgtgcgaattctgtggttcctgcatacataccaatcatagagaaaaggaaggatacaccattcaatgagagccaaaaagcatggcaacagttgcgaaggggccgctatgtagaattcaacttggtctatgatcgaggtactacattcggactgaaaactggaggtcgaattgaaagtattcttgtttctcttcctttatctgcacgatgggaatatgatcataaaccagaagagggaagtgaagagtggaaactgttagatgcttgcatcaatcctaaggaatggatctgatacttctggtcgagtttctttcaatcctttcgaaaattcccattggttcctttatttttaagatgctctccttttagggagttccttcttgcagtagtagttgtaagttttagcttcatggatttgttgtattaatgtaaatcacgtgaatgtaattagatgccctataatacgcattgcttagagttaagaggtctaacagttgctaatggattgtgtatctgctaacatatttgtgtacttt

SEQ ID NO: 14209 - DNA, 835 bp, Gossypium hirsutum
  Clone ID: GOSHI-09MAY01-C52965_1
ggcaaagttggtcgtgagaaagagcttgaagccgctttgttgtgcctcaggggagataaagctgatatttctgatgaagcaattgaaataaaaaatcatgtggagtctcttaaaagttcctcaaggggaggaattgtccgcatatttcaaaagaagtatgttcggccattgcttactgttgttggaatgatgctcctaacaaatttgggaggaataaatgcatttgcatactattctggtgctatttttgtctcagctggtatatcgagcatggtaggactcatcacactagctgctactcagacagtagttggtattttgggtacaaccataattgataaattaggaaggcgaccactcctactggtttcatcagctggattatgctttagtagcttcctcacaggagtatcattcttcttaaaggattttaattggtgggatcaaggtagtcctattttggcattcattggcttatggatgtatatgggctcgtatgcacttggcggaggactaccatggctgctactatcagagttattcccaataaatgtaaaaggttcagcaggaagcatctgtaattttatgggcaattccactggttgggttgtcgcatactacttcaacttcctaactgaatggagctcagcagggatattctttatatcttcagcctttagctctgcaaatttcatcctaacagcgacaatggtacccgagactaaaggacgaacactggaggaaatacgagcatcaattactcattcttcagattgaaatagcaatttgatttaaatattgatcactctagctgctggtgttactagacactgat

SEQ ID NO: 14210 - DNA, 411 bp, Gossypium hirsutum
  Clone ID: GOSHI-09MAY01-C52905_1
ggcgcagataagagtgataggttcgtacggagcgagggcaaggcaggatctaccaaagttggtaaaactagcagaaacaggaatcttcaatctaaacaatgctgtttctcgaaaatacaaatttgaagagggaaataaagcatttcaggatcttaaccagggaagaattgtcagccgaggtgtaattgagataatgtaagttgcttttccttttctcaacaataatacaactttgacacacgcaattcagcaaaatcaaagtaatattgggacattatggagttgtggttgtcacatttcccattatgtttgttgtaatgttttcctctgtaattgtctggtagtatgtattttactgtccccatgatccgaggaatgttcaatcaagtattagaattggggttacatgtc

SEQ ID NO: 14211 - DNA, 347 bp, Gossypium hirsutum
  Clone ID: GOSHI-09MAY01-C52925_1
gtctatatggcatggatcgaaagtttcgctaccgtgttcaatataggggttgcgaaggctctcgacattggcttacaaatggtttatgttggcaaaaacaatgcacgggaacgagtgaaaaagattactggtctaatcaaagagaataaacttagccacgcttgggaagatggcaatgtgtggtttcttttggaaccgcttagagagcatgttgttctcgaaaacccaccatgggaaagccattgaaaacgatgttttaaagcaagaagtgatgaccttgcttgcatatgacggtagtgaaaaatggatggacagtgttcttcactggttcatatgaaatggtgaga

SEQ ID NO: 14212 - DNA, 621 bp, Gossypium hirsutum
  Clone ID: GOSHI-09MAY01-C52885_1
atttaccagtctttcaattctataacatggctccagtgcctagtttaccaattaaagttggacatattgatgatgtccaagaactaagaaaagctaaaccagccacggttcctgaaagatttatcagagacatggctgataggccaaaagttgttccaaatctatcatcatctcttgacattcccatcattgatctttctaagctcatgaaaacagacaaagatgaagttatgcagctcaaaactgcctgtgaagaatggggatttttccaggtactgaaccatgggattgatctgaatgttgttgaagacatcgaaaaagtagccgaggatttcttcatgttacctttacaggagaaacaaaagtatccaatggctccagggacagttcagggctatggtcaagcttttgtgttctcagagaaccaaaagttggattggtgcaatatgtttgctcttggtgttgagccaccttgtataaggaacccaaaactctggccatcaaaacccgttaacttcagagaagctttagaaatttattcaagagaagtgaggaaactttgcaagacacttctgaagtatatagcagtgagccttggactaaagggggttggtgaatgtc

SEQ ID NO: 14213 - DNA, 446 bp, Gossypium hirsutum
  Clone ID: GOSHI-09MAY01-C52845_1
cggaatatcaagttaccttaactacgaatccgctgtggaatctgccgaccagcaaatgagttgggtacttttcgccacaccagtcgtgttaatactcttggcacgatggctctcctctatggaagtctctggtatgctgtttggttcatcaccctgggaacgtatccgccggactcatcatcacccttctgaaggtacctcaccctgggtggtggctgctttcattgtgttgctgttagtcctgttgcagtaccagtccatttttcgtgagagctggatggtatgatctttatatatgtgtgtgtgtagtactatagtttgaaaaaactgtgttggaatttctcatctttaacagggttttgccttgttagatccaacacagtatctgtgctagcaacggttctaaatatacactgcaaaatttaagcaaaaaaaaaaaaagaaaa

SEQ ID NO: 14214 - DNA, 728 bp, Gossypium hirsutum
  Clone ID: GOSHI-09MAY01-C52515_1
gggtgaagatggatgcataatgcttgaatttgtgtaaatggtggttccgatgctgaagaaattaatattcacggtttattggaatcactgaaccagagaaaagatgaaagcaagaccataccaacatgtatctcatcggtggttaccaaattgagtgcaaatgggataggaacagtatttggtcggctatttattggagcagctgaaaagattccaccatcagaacttgttgacacaaccggtgccggagacgcatttattggagcagtagtttacgctctctgtgcgggcatgccaccggagaagatgttaccatttgctgctcaagtggctgcatctggctgtagggctttgggagcccgaacgggtcttccacacagaacagatccacgcttggcgaccttcttgtgacatgtcaactatgttagaggttaagtaaattgaaactttgccctacaaccaagagcattgatattgccatgacagacttctgtaagctttactttcatcaacatcataacatggtccctagtacaagctaagacatccttttatatagagtaaaggattatatatatatatatagaaacacaaccttctttgcctacattagacttctggtcttaattcacttatgttacacttaatattacaggtcagggtcccagagaggagttatgaatctcacattgacagtgtactagagtttgattgaagactcacaaagt

SEQ ID NO: 14215 - DNA, 892 bp, Gossypium hirsutum
  Clone ID: GOSHI-09MAY01-C52525_1
tgtaaagttgagttgtacgttgggtttcaacttgattttgtgaattggttaagtatgcctcggataggctgtggaatcttgacaggcagtatgccaacaatatataactaccaagcttgtcatgttatgtaaatcctcatagatgctgttcaggatagtcagagaaggtagaaagtagactacaatttactttttctgtggccattcggagttcggtgttctgaagatatatgcagctaaattggaccttgtgagcagttttctatgtggtgtttgaagtttgaaccaggtcggggataaaatatttccagttcgccaattgttgaatttaagaattcttttttggtttattgacacaaataatagtcaggtgttgagaatttgtgcatccgaacctggatgactgtagcattgcttcaagctccttcaggtttgtacagctactgaagcaaaccactttgtgataaatatgctctatctcagaaacttgtgcgattcatgcctgtattggagttggggaaatctaaagttggattatcacaaacattttgtttgtttccatgatttagtaggtcttaaaatgttgggaaattaggcactgcaggctgaactttgtaataatataaaaaaagaaagaaatgttcaagtattgtgtgtaaatagtattgatagggccttttaagttatgatacccatttatgaaagttttttattgtaatttattccccctttttaaggtttttttttaaattatgtagctatataatattatatggagtctgttctgaaaaaaaaattttttttctctcctcttttatcctcatatatctctattcctctctttactatcaaaccacttccctaattttttccctcaaagttctttaatttt

SEQ ID NO: 14216 - DNA, 1057 bp, Gossypium hirsutum
  Clone ID: GOSHI-09MAY01-C52455_2
ctttgaagctgagagaaagagagactaatacagggggaaagaggattctttttcaactggttcaagcggaacaggatctccccaaatttcaacagatgaattcagggaccagatgaaggctcaacttgcccaggcttatgctcaagagttcctcgaggttgccctctctttcctctttcttaattccgttcctggggttttcgcaactttatgtgaactatcaaaatcttgaatttacaagttcttttttccatagttatctaatgtttaggttgcattgaaacccagaaaagcagccaccatcctaaggtttctattaagtggtttaaacccatcgaccccatttgacttagcatgtctcaatagttcattttcgtttgtcacaaaagcatgcttggtaggagcttgttgactaaggttatcactgattaacttgatctctagaaagtttgtttatcatagcttgtttgtatgtttatctctatgcttagatatttgtacccaattcagattctttagtttcttcatattaacataatgcaatcttggctgttgctataaaatgtcagctttctgagaataagaatgcgatgttggttatttgattacagcatcacatgattttcatcatgctttctaagcattatttggggctaaatgcatatattctttctggtcatacagactgtgagggggaagtgctttgaaaagtgtatctcaaagccaggaacaagtcttagtggaagtgaaagtagttgcatctctagatgtgtggatcgttacatcgaggccaccggtattgttggcagagctcttttcacatcgcgctgaaattcttaaacccagactgttgtttttgaagaatatgttagctagctgctaaagtttggaaacggaaatctcaaattcaaggatgagtgagaattgcaacattgttttttgttatgacgttttctaaatttgacttggaacattataactttgcataaaatattttctgaatttgtacttgcccagaaacctccgtgagatgttacatggttaatgttatttgctt

SEQ ID NO: 14217 - DNA, 648 bp, Gossypium hirsutum
  Clone ID: GOSHI-09MAY01-C52455_1
ctgctttgaaggctgagagagaaagacagagcttaatacagggggaaagatggattctttttcaacaggttcaagcggaacaggatctccccaaatttcaacagatgaattcatggaccagatgaaggctcaacttgcccaggcttatgcccaagagttcctcgagactgtgagggggaagtgctttgaaaagtgtatctcaaagccaggatcaagtcttagtggaagtgaaagtagttgcatctctagatgtgtggatcgttacatcgaggccaccggtattgttggcagagctcttttcacatcgcgctgaaattctgaaacccggactgttgttttcgaagaatatgttagctagctgctaaagtttggaaacggaaatctcaaattcaaggacgagtgagatttgcaacattgttttttgttattacgttttctaaatttgacttgggagattataactttgcataaaatatttctgaatttgtattttcccagaaacctccgtgagatgttacatggttaatgttctttgcttattatatgttccttaagttgttccttttccttatcaatctcttgttttcgtcctgcgaattgtgattattggatctgttagcaatatagagcctatgtgatgatatgatc

SEQ ID NO: 14218 - DNA, 726 bp, Gossypium hirsutum
  Clone ID: GOSHI-09MAY01-C52415_1
ctgaatctagccccaacgacctaacccattagcactaatttgtctattagcaagtattgctatctcatatacgtgtttcctcttgatccacactttgttttcactgttccaactctatctctctaagctcccaatatggccaattcccaccaaccgtttgttgcactcatcgtcggcgtcaccggcatggcggggttgagcctagctgaagccttgaagagccccaatgccctcggcggtccttggaaagtttatggctctgcttcacgtcccataccaacttggttcccttcctcgcttctcgataaatacatcgcttttgatgccaccgacgccggaaacaccgctgatacgctcactccaatctccagcgaagtcacccatgttttctgggtggcaatccaagttcgtgaaagtgaacaagtaactgttacagttaacgcaactatgttatccaacgttctcgatgttttgaagagcggcccgggcggcaacggaaccggttcaaggctcagccatgtcacgggtcagacaggtacccaacactacatgggtccgaccctttccgacgaatcggcaaggtctcgaaccatgaccacgtaggagagattgcccgctgcctacccaactttactcgcctaaagactttgatataccgcatcatgactattgtgacggtgcatatatagccgtctcagacgttcacgcctctacatactgtcgctg

SEQ ID NO: 14219 - DNA, 468 bp, Gossypium hirsutum
  Clone ID: GOSHI-09MAY01-C52425_1
cagaattactcatcttctgctccttacgtaggtcctggtgcaccgtcttcaatgtatatgggtgtaccaccttatgggtcttcccttttcaatggtccttctattcctccatatgaagctcctttttctggaggatcagcttatcattacaattatggcaatcgtcttcccggtggcagtccctttcagccgttgcatatgtctggaccacccccttattctagtggctctatgattggaaatggtatcggtgggatgtatggcatgcctcctttgatggaccggtatggcttgggcttgcccatgggtccccctccaatgggaccaaggccagggttttttccagatgataaatcacagaaaaagggtgctgatgctacacgtgataatgattggacatgccctaaatgtggcaatattaacttctcttttagaactggctgtaacatgccggaatgcaacacacct

SEQ ID NO: 14220 - DNA, 352 bp, Gossypium hirsutum
  unsure (1)..(352): unsure at all n locations
  Clone ID: uC-gsronu33B089g02b1
cccacgcttccgcccacgcgtccgcccacgcgtcctagaagattcgtgtgctcatgggcgagcagataagctcaacttttatgcaataaacagttgttttctggaattggttctttcaatcagttgtggataatatgaaagaaccatccttattttggaagaacaatgttgtttcagctcttaaattttaaacacatatcagaagtatgtttggcananaaaaaaaaaaaaaaaaaaaaaaaaaaaaaaaaagacattaaaaaataaaaaaaaaaggaaactcatatacaaaaaagtgctgtttttgattttgaaaggcgaaccccaacatggttatagtggagggttgttt

SEQ ID NO: 14221 - DNA, 345 bp, Gossypium hirsutum
  Clone ID: LIB3146-048-Q1-K1-F4
agaaaacataaggtggcttaaaaagattcgtgtgctcatcaacaacaacagataagctcagcttttatgcaataaacagttgttttctggatttggttctttcaatcagttgtggataaaatgaaagaaccatccttattttggaagaacaatgttgtttcagctcttaaattttaaacacgtatcagaagtatgtttggcaatagagaatctgaactcatgcagaactttgcacgttttggaccaaaaaaaaaaaaaaaaaaaaaaaaaaaaaaaaaaaaaaaaaaaaaaaaaaaataaaaaaaaaataaaaaaaataataaaaaaaaaaatattttttttttt

SEQ ID NO: 14222 - DNA, 615 bp, Gossypium hirsutum
  Clone ID: GOSHI-09MAY01-C52725_1
gagatgagcccgatttatcatgggttcagtctcttgtaaaagagtctcccactgagatcaaagacaaaatagcagcaccggtctcaggtgagggttctagcaggaactcggatacagttgataatgccatgctgggagcttggcttgagcaaatgcagctcgatcaacttgtggctcagcaaaactgaaaaatgttttagctgagccctcctgaggtagttcatcaaaaaaaggttttggtaaataacatttgtattttttcttcggattttcggattctgttggtgatttaatgttgaaggtaaagaggaacaaggtgaaggcaaagagattgaggtcagtttgacgaaaggaggcttcaattttcatttattattattattccaacaaaagagttagaacaggatgagaataatatccatcatgtttaaagaaattgaccagtttttttcttttcattataatttttcttcccctattcctaaattagatttccgttgctgccatctcaaaatttatgatacttcgatgatggtggtggtgatgatgatgatgatgatgtaaccttcaactgaagttggttgcttaattgctattccaaatagcttcgttttt

SEQ ID NO: 14223 - DNA, 520 bp, Gossypium hirsutum
  Clone ID: LIB3828-023-Q6-N6-H9
gaatgttccaaaatataaaaaagtgttattaatgtatcaaaattcatataaatataaaatactttacacaattaggaaacggtaaaatacatgaacacgacaagaaaatacaaattgctagttctatcggagaagatcaacatggcttattattggatttagatggtgaagatggcatggctttggcaaaatcaagaaggtctctgaagaaagcatcttctgggtttacttcttgggttgggatcttagaattaatggagagattttgagtttgtccaacaagactgtcataagaggaatcaaaaccattaatggaatgagaagaactaccggtataaccatgttgttgctcaaagaattgatgtctttgattgaacatagaagacggtgggtagtttccagcaggattgtccaactgaaccggaggcagctgctcagcatcggcaggtttgactaaggaagccagtttaggttgttcactgaacacaggtgcagatccagtgtcaaccgaacgggaagg

SEQ ID NO: 14224 - DNA, 301 bp, Gossypium hirsutum
  Clone ID: LIB3146-039-Q1-K1-B12
tatgaattttgatataaatataaaatattttaccgtttcctaattgtgtaaagtattttatatttatatgaaatactttacacaattaggaaacggtaaaatacatgaacacaagaaaatacaaattgctagttctatcggagaagatcaacatggcttattattggatttagatggtgaagatggcatggcttttaccgtttcctaattgtgtaaagtattttatatttatatgaattttgatataataacacattacaacccagaaaatacaaaaattaatcacctagaataaaaatat

SEQ ID NO: 14225 - DNA, 440 bp, Gossypium hirsutum
  Clone ID: LIB3146-038-P1-K1-C7
atttgttgaggatcctcgtgatgctgaagatgcaattcgtggtcgagatggttataaatttaatgggaatcgtctaagagttgaacttgctcatggtgggcgaagaccttcttcatctgtggatcgttatagtagttacagtggtagcagtagtcgtgggccttccaggcgctctgattatcgtgttttggtgactggtttaccttcttctgcttcatggcaaaacctaaaggcatgatagggattgtagattacacaaactatgatgatatgaaatatgttataaggaagcttgatgactctgagtttcgaaatccatttagccaggcttacatacgggtggagtatgattcaagatatgattctaggcgcagctactttagaagtcctagtcgtagcccatatagtcgaaaccctaatctagaattgaatctatcaat

SEQ ID NO: 14226 - DNA, 413 bp, Gossypium hirsutum
  Clone ID: LIB3146-056-Q1-K1-H3
gttggtatttgtgtatactttaacttaaaaggctatacttcctctaattagctatcttaggttggaagataaggaagcttgatgactctgagtttcgaaatccatttagccaggcttacatacgggtatgtttagatgcattttaagtcttagatctatgcttctgcgacattacttgatagcgtatctaactgtcttttttttcaggtggagtatgattcaagatatgattctaggcgcagctactttagaagtcctagtcgtagcccatatagtcgaaaccctaatctagaattgaatctatcaatcctttttcaacagttaattctgcccatttgcaaacatattctatcattgtaacatgcttacgcatatctgctggctggtttattttatctcagctgtatttagat

SEQ ID NO: 14227 - DNA, 928 bp, Gossypium hirsutum
  Clone ID: GOSHI-09MAY01-C52245_1
ataaaacaaaaaagaacaactcagttttctttgtttatttcaagcaaaaatcccaccccgccggccacataatgcgacggcaaggacacattcaggcgtaatcagtgaactccacacgtctccctggcattcgccggtgccctacttgttcggcgggttagctgccatgctgggtcttatagcggttgcgcttctcgtccttgcatgttcttattggaaactattgggttacaacgagaacgacggtgaaggggcaacggcgagagacttacacgccgcagatggtaataggtgaagctgctcggccggctatggaaccaaaggctcttgttataatggcgggggatataaagccgacgttcttggccaccccaattggtgttaacgggtcgtattatttcggtgacaatagtgaaaagcgatgttgctgtagtgatcaaaagggagaggaaggcaagcaagatgagaaagaggtctgccgtggtggtgatggtggtggtgacggtggagctgaaactacggtgacccaacaatcttcaagtgatgatcattgattttgtaaaagaaaaaattgaagaaaaaaagaaaagaaaatttaggatgatataaggtcagatattgagtatttcaaggtgggggttcttttgaaggatgggtggtggtggttgtgttgtcggtctgtatatttagctttttatttttcagcttgcaattgcatgctccattgatgttagctttagctttttcagttttccttttggttttttctgttttttttgggctcttcctcttccattttttttgttatgtcagcttttcactatgttttacagttcatggtagaggttcgtaatgatctttttttttaacattatcatctctattaatttttcttttttaaagtataatatatcttatcattcgactc

SEQ ID NO: 14228 - DNA, 1319 bp, Gossypium hirsutum
  Clone ID: GOSHI-09MAY01-C53805_1
gatgttttgttcaggagacagacacatctagttctgaagatgtggttagtgccagagagtctctctgtagtgagggaaggagcccagatgctgagttctcagatgaaccatcgagtatattgttagcaggagatggtagttcaagaagaataacaaatgctgatgtgtcagcactgaacagtgagtcatcagactctgactcttctgaagaccctgaagtgattcaggggtcccccactttggacggcagggaggataatgatcttgatgtggcttcagaaaggaatgttcctccctcaagcactgaagggatatcaaagctacgtgcaactgaagatttttcaacctggcagcgaatcatccgtctagatgctgttcgtgccaatgctgaatggatgccatactctacttctcaggctttggtatcagatgggagggcacgccgttcagctgaggctgttgggttaaaggattatgatctcctggagccctgcagaattttccatgctgcacgtttggttgctatccttgaagcttatgcactttaccaccctgtaattggctactgccagggcatgagtgatctcctttctccaatagtttcagtcatccctgacgattatgaggctttctggtgtcttgttggcttcatcaagaaagcccgacctatcttcttgccttgatgaggtgggaatcagaaggcaacttaatattgtttccaagataataaaatgtaaggactctcacctctacaggcatttggagaagctgcacgcagaggattgtttttttgtttataggatcgtgggtggttctctttaggagggaattgacatttgaacagacaatgtgcctatgggaggtaatgcgggcagatcaggcaaccattagagctgggctttcgaaatccacctggagtaggataagacagaaggcaccccccacagatgatctattgctgtatgcaattgcagcttcagtcttacagaggaggaaattgatcattgagaagtacagcagcatggatgaaattttaagggagtgcaacagtatggccgggcaacttgatgtatggaagctccttaatgatgctcatgacttggttgtaactcttcatgacaagatcgagtcgtcattttgatcacctcgccataattttttgtcctctaattttatgtgcttcggttttacttcaacatggctttctgtgagtattacaagtcctccatttcactgcatgaaatgtttctgtgcttgtgctagatattctcacttattgtttgtcaatgcttgaaaatttgttggagactgtacactta

SEQ ID NO: 14229 - DNA, 536 bp, Gossypium hirsutum
  Clone ID: GOSHI-09MAY01-C53505_1
cccacgcgtccgcaaactctcaagtttttaaagacaaaagtgccatttctagagttccaaatgtcagttattaggacaagtgctaacatgattatgaaacaactcctccatcacccgccgttatctttcatctcattctccggtcggccgcttcttccctgttcccgtaaccccctcatccgactgacgcccaatcgtggaatcagttgtagtcccattcgttgcgccgcacccgacgccgatgccgacagaaaagtctccgctcgtctctcgcaaatgcagcagctccttcaggaagcggaagagcgagccagctccgccgggaatgggcccactcctcaaatcactttggatcatgttacggtgagttttgcaaggagtggtggccctggtggtcaaaatgtaaacaaggttaacaccaaggtggacatgcggttcaatgtaaaacaggcttattggcttagtgacaggattagagagaggattatgcaaatggaaaagaaccgtataaacaaggatggagaagtcgtgatatc

SEQ ID NO: 14230 - DNA, 431 bp, Gossypium hirsutum
  Clone ID: GOSHI-09MAY01-C53495_1
gagagctgtgtggcatcgattattgggtatttggatcctccacaaatatgcaagttggcggggttgaacagagcgtttagggccgcttcttgggctgatttcgtttgggaatcgaaattgccaccgaattatgaaacccttgtcggtgaagttttgagctttgtgcctgagaagttgggtaaaagagacatttatacgagactctgtagagttaatacctttgatggtggcaccaagaaaatatggctggataagagcacaggcggtgtttgtatgtcgatatcttcaaagggtttacagataacagggattgatgatcgaagatattggaatcatattcctactgaagaatctaggttcggttccattgcatatcttcagcaaatctggtggtttgaaggtgatggagagggtggattttcgttttcttc

SEQ ID NO: 14231 - DNA, 1200 bp, Gossypium hirsutum
  Clone ID: GOSHI-09MAY01-C53725_1
ggtagttccgcggcaatgtcacatggagcatgtgggataccccccttgcttacaggtaacaaagcatctcaccagtccaaggattctcatgtgaaattcagcattaagtcctttagaattccggaactttatatcgaggtgccagaaagtgcaactgtcggttcactgaagaggacggtaatggaggcagtgactgccttacttggaggtggaattcgtgttggggtactacttcaagggaagaaggttcgagatgacagccgaactttatcgcagactggtatttcctgcgaagaaaatctggattctcttggtttcactttggagcctggtcctgcgaaagctcctccgccagtgtgctcggaagaaccacatcttctgatgtcatgtgaaaaaggccctcaacaactaacaagccttccagccactccggttgtagatacagcgattcccgatgccacacctgacccactgttactaaccgatacagcacatcctgtggatagtaatcatgaaccggtttcctcccaaactgacgttctaactgatcaaagtctatcggagtctagagctatagttcctgttccagcaatgaatgttgaggcactagctgtcatccctgccagcccaaaagtccgaaaaaccgaacttgcacagcgtcgaactaggaggccgttttcagttttagaagtagaagcattggtacaggcagttgaggagcttggtacggggaggtggcgtgatatcaaactgcgagcttttgagaatgccgatcaccgaacttacgtggatttgaaggataaatggaaaacattggttcacacggcgaaaatttccccacagcaaagacgaggggagccagtaccacaggaactgttggacagggtattagctgctcatgcatactggtctcagcatcaagctaaacaacaaggcaagcaacaacccggaactttgaggatcactgacaccgaacccgacagaaacagacttgcaacagtcccaaccgttccgatgtaaaaaggtaaaccattgaccaagaacaagaagaaaaagaaaaaactatgtacaaatttgattgacatcgttatgtaatattcctcacactactcacttgattcattttcccagccattgacattttgtaaatgaattcgacgaaaaaaaaataagatcggtctaaccggaatttttacgggt

SEQ ID NO: 14232 - DNA, 754 bp, Gossypium hirsutum
  Clone ID: GOSHI-09MAY01-C53665_1
gtgatttcactttcccgctcccagcccctaattcccaatgcctaattcactttaccgattacaacccctaattccccttccaaatccctaatcactcattcacagagacgacacctcccccaccaatctaggttttatttttgtttcttcgattcttcatttgttttttttcctcaaaaagaagatttgtttcggtttcttatcaacattcatacgaagacggagaagacgaagaagaaaaagaacattcccattctgttttttggtcaagcttcaatcaggactcaagaatggctgggaaggcagcacaatctgtggtgaaggcagtgggagaataccaatatccatggcgtgaaaagttggccaagtacaaagtagagttatcaaagggagtatggggctattgggaacttggagcctggaagcctctaggcatcagtgccaggcatcgagccagactccgaaaagaaatgcttctagcgggccaagattggccatacgatccagagaagaaagagatgagaagctagatgaaaggtcacaagtgcgacagaatagccgcggagagaagggagattactgctaatttgatgcagaaaatgcctgagatgttgcttgcttataagaaacgcagatgggagaagaaaatgaaggaagaagagaaagctaaagataaataaatctgcatttttttccttatttgggtggttgagaacaaaagaaaaatgttgaatcttgtactaatgaattcaat

SEQ ID NO: 14233 - DNA, 392 bp, Gossypium hirsutum
  Clone ID: GOSHI-09MAY01-C53165_1
ggaaatgttcatgctgcggtggaacggttactgggaaatcctggtcagtaacctattaccggcgatctagttaatgtagaaaactgagagttcgaagtttgaacatgtgtaggatgttgctgaaagtccaatgtgagggaggaactagcttagattatgaaaaatggtgtaaatgaattcgggttgtgaaatgtgtttggtttcataggtccattttccttgaaggaggtaaggctatgagtcaatgtgtgtatgttttcactatagtccacccttcgctgagtgtgttttgtcagccacaaatctgaatgagcaaaaacaaaatactataaagagatgatatttgcgttgcgttgccagccattgaaatcaattcttcttctccttggccc

SEQ ID NO: 14234 - DNA, 533 bp, Gossypium hirsutum
  Clone ID: GOSHI-09MAY01-C53375_1
gcaatattttctaaagcttatgttgaggctgccactaagatgaatatgactagagtagaaactgtggctccattcggactctgctttagttctaaagggccattggtgcctgaaattgatctagttttgcaaagtgagatggtgaagtggagaattcaaggtaggaattcaatggtgaaagtgagcgaagagagcatgtgcttggggtttttggatggagggttggagcaaagtagcccaattgtaataggagggcttcaaatggaggataaccttttggagtttgatattgggagttccatgttaggatttagctcttctttgttgttgaaggaaacaacttgttcttcatccttactggattccacgctgaagcaatttttctgatttatctttatcctttctcttcttttctcccttttcttttctgtttgtgtaaaggcaagtttgatggatgcaatttgtaaagcatcattactagtaatatgaggagaggcactatagctttgaattttaaaaattttgttcccctc

SEQ ID NO: 14235 - DNA, 518 bp, Gossypium hirsutum
  Clone ID: GOSHI-09MAY01-C48965_1
ccatttccagttttagggtttaaataaaagcacaggtttagggtttatcagtgattttcagggttttttttacaatgaagagagtcagagaagatagagaaatagaagctatggcaatggcgaattgtttgatgttattatcaaaagttggccaattcgatccaccaaagcataatactattcatcagcgtggagtttttgcatgcaagacgtgtgataaacggttttcatcttttcaagcactcggcggccaccgtgctagccacaaaaaaccgaggtttacggacgcggacctaccggcttcacctaaaaagcctaaaacacatgagtgttcgatttgtggactcgaatttccgatcggtcaagctcttggaggtcatatgaggaaacatagagttgtttcgaatgaaggaatggtggtgactcggccggtgacggggaaattgaacggcgatgacgctgataatgatgggggtttgtgccttgatctgatattggcgccttgtggaattgatttg

SEQ ID NO: 14236 - DNA, 903 bp, Gossypium hirsutum
  Clone ID: GOSHI-09MAY01-C48895_1
ttgtttagcttgtttttgatgtgcagttagtattaaaaagtgcaatgcaattttatgggttttcacatgaggtcagatctgaagccaggatagtacatgatctgttttttgacttgttgaagattgtattttcagataacgatttccgcgaagctagaaatgctctttctttctctagcccagtatctacctcgacctctggtccttctgcaagacaggtagcagttatcaagaggcagaagccaataaatgaggtggaatctgatccagacctaactcaaaaggcatcgcaacgtgggttccctcatgcgggtgaggaaacaagggtcagagggcacatgccccaaaaggaatcgagacttgggaaaggaagtggtattatcaaggaacatcagcaggatgattctcctctaactcatccaggggagctggttatttgcaagaaaaagaggaaagaaagggaaaagtctatagcaaagcctaggagtggatcagttggccctgtttctcccccgagttgacgccacaacatgaggagtcagggtccaggtatcagtctccaaggatgcaagtcttacccaacagagtagccatcagcaaggtttgcccaatcagcctggtcatccctcaaaaggttgtggtgggagtgttggttgggccaatcccgtgaagaaattgagaacagacgcgccccgctcgcgaccaagccttctatgacattctagagtatctcacgtaatgaaaaaatattttgttgccattgactccaagcactgagttgtattttatggctcatcacggcctgtacaattgcaattagatcataccattaaagtagtgtaggttcattgagccctcgttgtatatccgtctttttcttaggttcaatcaatgcaatagttt

SEQ ID NO: 14237 - DNA, 1247 bp, Gossypium hirsutum
  Clone ID: GOSHI-09MAY01-C48825_1
caacgcagttggttctaaaggcccacaaagaggctgtcaattccttaagtgggaatggttctgcaaagttgggtacggttgcaactgtagttgctgctgcaaattcaacagccagggaatgttctaaagaaattgaagcggcaatgcagatatctttgagaaatgccttaggattggtgacaaatgtacccactgatggtccaatggatgaccttacaattatgaaggagacactaagagtcaaggatgaggaattgcagaatttggctcgagatcttcgggcccgtgattcaacaataagagaaatagcagacaaactttcagagactgctgaagctgctgaatctgcagcatctgcagctcatataatggatgaacaaagaagaatagcttgtgctgtaattgagcgcttaacaaaagattcagaaaatcaaaaggaagctttcatgttaaagctgagggagtctgaagaaaagcttgggtccctaagtaaagaaagagatcaattgattaggcagagagacactgccatgcaggaggcacatatgtggcgtactgagcttgcaaaagctcgagagagtgctgtgatattagaagcagcagttgtgagagcagaagagaaggtcagagttgctgaaatggatgctgaggcaagaataaaagatgcagcacagaaagaggctgctgcggtgaaggaaaagcaagaacttcttgcttatgtgaatgtcttacaggcacatctccaaagacaacaagagtgacgcaaagcaaatttttgaggagaagaccgagtcttcaaataccagtaacagtccacctgatacgaagaatgttgacttgtcagagaatgtcgataaagcttgtcttaccgtttctagagcagtgccggtgccaggggagagcgtagtccgcatggcggtggatcaagtcaacatccaaccagttggtgagggtgaatggagtgattattcaggcaacagaggcaagaatagctgatgtgagagagatagccccagagacagaaggaagcagccatgacatttgcgtcgataaccaagcaatcgataagcaccacgagccaggagcaagctctttccgccagccttgagaaagcattccataatacagatgcttacgatcatagggaactcacgtgatttgggcttatatcttcaagctgctgattttaagctcaataaggagtatattataagctggaacatcccatcccatggaccatgtttgta

SEQ ID NO: 14238 - DNA, 1054 bp, Gossypium hirsutum
  Clone ID: GOSHI-09MAY01-C48585_1
cctccccctgccccagcacaaaatcagcaccccccgagtcaatatttgacttctgatcctcagtaccgaccgcctcagatacaagtcttctctaggatgccaacacagcctacacaagcccgaggttatcaggtccaatcattccctcagtatcagcagcaatggcctcaacaattatcacagcaagtgcaaccgcagcagcagtcctctatgcaaccacagatgagggccccatcaacaccagcttactctccctaccctccaactcaatcaacaaatcaatctcaaccagaggcgttgccaaacagcatggccatgcaggtctcatattctggacttcctcaacccgtgtctagccgtgctgataccattacttatgggtacggagtacctggcagaacagctccccaacaacctcctcaacaaatcaaaggcacttttggagcacaaccgactgataggtacacaggacctggctccaatcccacctttcctccaggaagtgcatacatggtatatgatagtgaagggggtagaacacatcacccgtcccagcagcctaacttcacacagggtgggtatcccccagcagcaaatgtctctcttcagactcaaccaggtgctggccctaatgttatggttaggaacaccaaccatccgcagtttgttcgcaatcatccctacagtgagctgattgaaaagttggtgagcatgggtttcagtggtgatcatgttgccagtgtgatccagagggggggggagagcgggcagcctccggatttcaatgctgtgcttgatagattaaatgcacattcctctggtggttctcaaagaggaggatggtaaagcgcaatcgcatacctgagttgggctttggatattattcgaataaagggtggtagagttctcgtttatatgttgggagggatatgaatatttgtatgttacctcctaattaaaacttctactgggaaatgtgtgcttttatttggggttaatttcagtttttattatctaatgcattaacccctcctgttgcttaaaaaaaatatat

SEQ ID NO: 14239 - DNA, 376 bp, Gossypium hirsutum
  Clone ID: GOSHI-09MAY01-C48525_1
gcttccaagccaatgcgtatgctttaaaagttagacttggaacaacaataacccgtatctgtactttattaatgggttaggaattcgtagtggggcgttcttttcatagatcctttgagcgagaaaggtgctgcaccttaccggggcctttgaccctcaaggtcatccggagccactttaaagcagtttattggccgtagcaacgcaatgttcagtggtggggcaaagcactagcgagaagcttcccttgggatttttttcccaggcaagaaagaagtgaacggaaggaaaggaaggccgtcgtgagagctgttagtggtttagtaaggaaggtcattaggctcagtccgttgcttgttccctcactgcacacaaa

SEQ ID NO: 14240 - DNA, 736 bp, Gossypium hirsutum
  Clone ID: GOSHI-09MAY01-C48485_2
aatctggtgacatcaaaagtgggttcaatggagttccagttttcctggcgcgcccgcttgttgtgaggaagaaaaccaaccgttcctgcccattatatttcattaaggaagattttgaaaaagacctttcaaaggtttcaaggccttcaagaggacctggtgtttctcaccaaatcatggttggaagcttggaagacgttctgaagaaaatggagatgaccgagaaaaactcgggctgggaagatctaatattcattccacccggtaaaagctattctcaacacctccaagatgtggtgaaagtatgaggcagttcggatgttacttctgcctgtccatttgataacataaaaaatgcgattacagcaactcagaagctcttcccgcgcgtcccggaatggaagagatgggaattaagagtgggatgtacactgtctgatgggttctccatatgttaccgggaaaaaaagaagagaaaagaaagaggcaagggaaacctagtagtgcggtcattgatatgcatatttatactttgaacgagttaaattggtggagaaagcattagttgggtcttggcttacatcttacatttcttcatcaaggaagagttttaagaaaagcaaacatagaattgcaaattatttgctaaaaagtattcttgtttgagttccctcaaaagcaggggaacccgatgataaaaaaaacgccttcgggacatccctttcttgattttttt

SEQ ID NO: 14241 - DNA, 777 bp, Gossypium hirsutum
  Clone ID: GOSHI-09MAY01-C48485_1
gaaaagtaaaatggaattcccaaaacctcctccattcccctcaaaccctctcttatccctctccaccttcatccaccgtctcggcgctgagctcgccacccgcctccaccataccaaccgtcttgcctccaactttgccgccggtttctccccctctgcgacttcccaccatcgtccgctctttgcctcagtttctcagccgaaggctgcggtagcggcggctgccacgttgaatcccgagcaagttgcgaaaactctagccggcaccgctgtctatacagtgagcaactccaacaatgagttcgtgcttatctctgatcccaatggagccaagtctattggcttactttgctttcgccaagaagacgccgaggcttttcttgctcaggttcgattacggagaagggagctgagaagtaatgctaaagtcgtgccgattacacttgatcaggtatactcactgaaggttgaaggaattgcatttcgttttctaccggatccaattcaaataaagaatgcactagagctgaaatctggtgacatcaaaagtgggttcgatggagttccagttttccagtctgacctccttgttgtgaggaagaaaaacaagcgttactgcccaatatatttcaataaggaagatattgaaaaagaactttccaaggtttccagggcatccagaggacctggtgtttctcagcaaatcatgtattcatttcatccaatatgttggagcaggttggaagcttggaagacgttcttgagaaaatggagatg

SEQ ID NO: 14242 - DNA, 1649 bp, Gossypium hirsutum
  Clone ID: GOSHI-09MAY01-C48725_1
attttatttggcgcctggcttctctttgaataaaaaagtgaatgagtaggctcctgacatgtagttaattgtcaagttgctagataggactgctaaatgtttttagttaaacctttttatttggagttgaatttattgcttcatcaaattgagcatatgtggcttagaaataccttttttttttcccctattatatttctcctgttaattaatacatctgctaataaccatatgttctgcctttgcattctgtttgttctttatcaggaaatggtaattaaagactatcaaaatttcaagtttcagcaaccctatcaacaggctatgtactattgctcattaatactaaaggaccagacaaggtcttgggtggaacgacttgatgttttgcctcatcttaatgtggaagaccttacaaaatttgctccaatgatgctctcacaggccttcctagagcggtcccgtgcggggaacattgaacgggaggaggcagaaacaatggttcagcatgttgaagatgtgttctttaagggtccaaaccctatatgccgaccgctgtttccatcacagtttctaacaaatagagtggtcaaacttgaaagaggcatgaattactgctacagtaaggaaggacttaatccaagtgatgagaattctgccttagtccactatattcaggttcatcaggatgattttatactgaatgtgaaacttcagctttttgctcttgttgcaaagcaacctgccttccatcagcttagatccgtagagcaactaggatacattactgtcctcatgcagaggaatgattctggcatctgcggggtgcagttcattatccagtctacagtaaagggtcctgcacatattgattcgagagttgaggcattccttaaaatgtttgagagtaaactatatgaaatgacaaatgatgaatttaagagcaatgtaaatgcattgattgatatgaagctcgagaagcacaagaatttaagggaagaatctcggttttactggcgagagatcactgacgggacgctcaagtttgatcggagagaagctgaggttgcagcattaaagaaacttacacaacaagaactgatagaattcttcaatgaaaatgtgaaagtcggtgcaactcgaaagaaaacacttagcgtgcaagtgcatgggaaccaacatttggccgaataccactcgcagaaaagcgaagcagttaaaccaaataccatccaaatcgatgatatcttcagctttagaagatctcaacctctttatggttcatttagaggaggcattggtcatgtgaagctgtagcataaaggctcatctcttgttggaaaatcggaggaacatttatttttccggtaagttttcatataaaagttctacattgaagaaaaacagagaatccctcttgtctgttaatttattgttgtatctcacttagttatgaaaaataattcccttggttcagaaacagaattcatgtcccccgctttttggtcttatttaagctctggttcgaatccactgatataattgaacgtgcaattctatgttgcttcagagtcacaaaatgtgtctcatagggacatgcgtctgatgcaaggtttattcgaattattcttataaaaattgaagttcat

SEQ ID NO: 14243 - DNA, 305 bp, Gossypium hirsutum
  Clone ID: GOSHI-09MAY01-C48185_1
cgaatgaccgcacgcgtccgcacgtccggaaagccataacgatatccaagctaggacaattaacttcctcaaatggctatgggagaggaaagaacagtagatagcactggggagccatggtatatgttcgcaaaaagcgatgagcgaacttgttaagaataacacttcttaccgcttgccacttcgaggacatccgattaaattagaacgaaaaaatgggtaccctttaatgctagatgagtatgctttaattgttcaaactaactatgtgaataatggctacaccccaaaatataaacttggtg

SEQ ID NO: 14244 - DNA, 487 bp, Gossypium hirsutum
  Clone ID: GOSHI-09MAY01-C48385_1
cgagaaactcaaaaggactgttaattatcctttaaaggctcctcctcttgccaatggtgtgggtagctttaaaaatggtatcattcttaatcttttgggaatgggtgctctattcttgtcatgcaagcaacagtcggcttactactctcgaaggcacttacctcctccacaactccttattaccaaggaattgctcccggctctggtccagttcttgccttggatgtattcttggtgcaggcatcggcaaacactatcctttcgcactttctggggctggtgttctcgctggaactgttacgctcggtgacattgcctaatacacagagcattccaattcccaagcttgcataaattctgcctttcatggtaaatgtagaatagttgaacgtgattttactgctgataactggtttacaagccacccttagcattcttttaataaatacatgtattggtgcaaaattgatcatattaacacggattt

SEQ ID NO: 14245 - DNA, 841 bp, Gossypium hirsutum
  Clone ID: GOSHI-09MAY01-C48235_1
ttctcacgcgtccgcccacgcgtccggaaactggtcccaattctctcattttctaaattcagggtttttgaagttttggattttttttcaatggaaaaagaattagatgggttagggtatttacctctccgcataattctatcaaaattatctccttcagatattattaaagtttcttgtgctaataaaaggcttagaggttcagcttctgacgattccctttgggctcaaatttgttatcaagaacttcagctttcaacccctcaagatgatcatggaaaccctctaccttgttttatgttagcttatcagttgtggcgagaggctttctcgatgtatccatggccgctcgttaaacgagttaaaagatgttgggataagcttaagaaatggtttaacaacaatttcccggaggctgaggcgacacttagaaggggtgcatcggaatctgatattgaacaattacaaacacttttaaaagtcaaattgccgcttcccactcggcttctctatcgctttcatgacggtcaagaactgccggacataatgaacccgaagacagcttctagtagctggttgggaattataggtggttactctttctatcaaaattcagttaatgtttacttgttaccattacatcaggttattgccaagacatgatatgtcattcgttacctaggtttttcgagccgatccaagtgcatcatcgtggcttcttctttcgcttctagtaggaaactgtttttcttgaactgtaccaatggccaactttttgtcagtacaaggaagcctcttacagataatgaaatgattccatgtgtccgaatacacttattcc

SEQ ID NO: 14246 - DNA, 643 bp, Gossypium hirsutum
  Clone ID: GOSHI-09MAY01-C49945_1
tccgcattcccggtcgaccccgcgtccgcccacctccgccaccgtcgacctttcttcaggcgatatccaacaaatacaaggtctgtcgaaatatacctgtcggcttacaagaaggcgaaaggttggttcttctgaggctgcacttcttgccaagcttggaatcaggcccttctcatacggtcttgtcgtcctatctgtttacgacaatggctcagtctttagccctgaggtcctggatctcactgaggaagatctgattgagaaatttgctaccggtgtctccatggtcaccgcattgtctcttgccatctcatacccaactcttgctgctgcaccacacatgttcatcaatgcatacaagaacgtcttgtctgtcgcagttgcaacagagtattctttccctcacgctgataaagtgaaggagtacttggcggatccaagtaagtttgcggttgctgttcccgctgttgctactgatgcgggtgcagccccagctgctgctgctgcggcagccgaggagaagaaaccagaacccgaagaagagtcggatgatgatatgggattcagtctctttgactaaggttgtattattatttgtttgggttgcaagacatatcagttacaatggtgtggttagattatt

SEQ ID NO: 14247 - DNA, 332 bp, Gossypium hirsutum
  Clone ID: LIB3149-047-Q1-K1-C5
acctgtttcttccaagtgctgaatattccaaccaagattaacaagggtactgtctaaaggatcacccctgtcgagcttatggagaaaggcgtaaaggttggttcttctgaggctgcacttcttgccaagctaggaatcaagcccttctcatacggtcttgtcgtcctatctgcttacgacaatggctcagtctttagccctgaggtcctggatctcactgacgaagatctgattgagaaatttgctaccggtgtctccatggtcaccgcattgtctcttgccatctcatacccaactcttgctgcttcaccacacatgttcatcaatgcata

SEQ ID NO: 14248 - DNA, 665 bp, Gossypium hirsutum
  Clone ID: GOSHI-09MAY01-C49865_1
cacatgatggaatttcaaaccccaatccctgtctcctttttgtcttgctttttcatttgttttcacaaagatggaaatattcaaaaccccaaatccctgtctccttttatgtcttgtggtactctgtttcactatcccaatcgcattaaccaaggcagaagcaactacaaccagcctccctgaaaacgaagcgaacaatgctgaacctgtgagcaacaatgctccatttgctaaacttgttgggaacaacgggaaacaatcccaactgggttatcaacagcagaaagacccaaactatccacaacaaggcattaaccagccactatcgtcagggttgaaccagccgtattcggctacgaaccagccttactctgccgggtttaatcagccgttttctagtatcagtcagccatttgggggcaccaaccaaaggggctcaatggaaaacgttgctttcgaaaatggggttaaaaaggagaagactgggattccaagtgttgccttggtttgtctatttacattgatggtttgctttgggttttagtaacccattgctgagtcatgaactatgaatcaaatagttaagcagacgttcatgctatgtaatctacgtactcgtttatttgtaatccctagttttatctaatgaaaagcttatgttaatg

SEQ ID NO: 14249 - DNA, 425 bp, Gossypium hirsutum
  Clone ID: GOSHI-09MAY01-C49545_1
acaagttcctgcttgggatccaaattttcaggctaggctgccatatggatcagttcctggtcaaacatatcaatcgttgacagcccctacatacgttaatgcggcaagacctgcaggttcatcacccctttcacaacctggtgcatcttccatgcccatgcagcagcagcagcagccgccatgggctaatgttagacaaggaggcgcagcggtgctgggtcggcctccttattacagtcgatgacctgtgtctattctataatgaaattaaatgatccctcgtctatcttatattcctcatataaggattcgccaattggatctctttaagttatgactgaaatgaacttcccttttgttgccggattggaagtgttgttttttttagttgttttggaaaccatctccaccattgatgccaaaaa

SEQ ID NO: 14250 - DNA, 409 bp, Gossypium hirsutum
  Clone ID: LIB3146-043-Q1-K1-H4
cccacgcgtccgttcagctgcaatacaaggtcaacctcttgctgaacaagttctggctgggatccaaattttcaggctaggctggcctattgatcaagttccggtcaaaccttttaatcggtggccagcccttcattcctttatggggccagaaccggaaggtcattaaccctttcacaacctggtgcatttttcattcccattccacaacaacaacaaccggcatgggcttatggtagacaaggaagtgccacggaacttggtcaaccttcttattacaatcgatgacctgggtctattctattatgaaattaaatgatcctttgtctatcttatattcctcataaagattcgccaattggatctcttaagttatgactgaaattaaattttttttttattggattgg

SEQ ID NO: 14251 - DNA, 421 bp, Gossypium hirsutum
  Clone ID: GOSHI-09MAY01-C49575_1
gacgatctgtcatcatccccaccgtccactttatcatcatcaacatcatcatcaccatcaggctcgattcaatcagcaacagctccgtcgtctccttcaacactggattctcccaccagacgtctgaaaatgacaagctctgaatagagcagcatattttactactaataaaaaggatttcaacttttagaagactagaccaaacccctccctgcaattctcccgttaatattttttgacggttcttgttgcgctttgcaaatcaatcaaagctcccttatcttcttctttctaagttttcgtactttctgttaatcatatttatataatggaacaaaatgggattccaattactaactcagattaaattatatttattcttctttttttacatatatttgaggccaatttcttttgggtt

SEQ ID NO: 14252 - DNA, 698 bp, Gossypium hirsutum
  Clone ID: GOSHI-09MAY01-C49535_1
cacttcagccgcttgccatgtggatgatgaaaaaggccttttaaccttcaaatcgggtatcacccaggatccgtcaggcatgctcagttcatggaaatcgggtacggattgttgtaattgggcgggtataaattgccgtgaaaacaatcgggtcaccactatttctctttacgggcaagttgataaacccgacagctacttgacgggtactatctcttcttccccggtaaatgtccaaaatctagacggtatttactgggttgacctaaggaatatttccggtccttttccggatcttcttttccggttacccaaactcttatatgcttacattgagaacagtaagctttcgggatccttacctgtgaatattgggtaagctaaaacaactcggaggccttgagtcttgaagggaattcggttcactgggatccataccgagttctatctctgagttgactcagttaactctgttggttcttgggaaaaatgaattctccgggcatttcccggcggggattaaacagattaggaaccttagttcccggtgtttccaaccatccgaaggtaccttcggattttctaatcttaaagacttaattttaacttcccaaggaattttggaatccctactataggtttgtcctaaaggatctgaattgcattatttgttgcgtataattacatggagtcaaaat

SEQ ID NO: 14253 - DNA, 1095 bp, Gossypium hirsutum
  Clone ID: GOSHI-09MAY01-C49415_1
cggccgcgtgggctttaccagctgcagcttctaatttgccaggttctcagttaccctgaagcactccccttttgctgccaccctttggtacaggcacactgaatttgcaatcttcccctccccccccccagtcttctaatgtagcttcggactcattaactagtttgaatcaagatagggcctctgctttaactcttcctactgcagctccaagtagtagcttgccactggtacctccatcaagtactgctttagataaaactgctgtcgtgttgcccttttctgaaaaaactaagacagttcctgatcctgtaatgccattcaaaggcatgcctgattctgcttcctccaccattgggacaacaagttcagttttaaatgatgggatgcttccttcgttagtaaccccaggccagcttttacaaccaggactggtcccagcatctttgcctatgtcttcacaaacagctcagaaggatgtggaagttgttcatgtgtcatctccagaactgacaacatcagcccctgcactagcacctgggcctgcaaaagcatcacaacctgtgttagcacaagcaccgcaatcattgtcggcgcaagcagcgccaccattattagcacaagcaccaccacaaccatcaaaaacagaaggacaggaacctatattgccttcgccttcaccctctgatcataagctacatggagctccaatgcatgctcatcagtatcataattatagaggaggccgtgaaagaggacgaggaagaggaagaggaagaggaaatgagatttcacgttcggcaaccaaatttacagaagaatttgacttcacggcaatgaacgagaagtttaacaaggatgaagtttggggccatcttggaagaagtagccgagctaaggaagatgctgatgatttacaaaatgaagatagtgttgaatcctcgcaagttgaggttaagcctgtatatgtcaaggatgacttttttgattccttgtcctgtgattctcttggtggtgggtcacggaatgggaggactagattttcagagcaaatgaggagggatacagagacctttggtgatttcccaaggcatc

SEQ ID NO: 14254 - DNA, 524 bp, Gossypium hirsutum
  Clone ID: GOSHI-09MAY01-C49435_1
catccctatgtatcaccattttccattcattcttttctccccctttttgtttctttcttaatttcattcattattgttctttcgttttaataccatttttgcttcccctataaggctcttcgagttttttttttttcaaaaaatggttcagggtttcatggaaaagcttgaatgggcgagtagttatggcaagaaacaatgcagaaaccttttttggaaaatgaaagcagctttgaagagaagaagcaaaaggcagttcaagttccattatgatccttcaagttatgctctaaactttgatgatggttattgccattgtggtgtcggaacaagtacagtccaacttgctagattgcagggattttcagagtgtgagaatgttatttggggttatgtttttgggatcaaattgtaaaaaaaaaaccaatctctttggttttgctttccatgttctgtttttgttcatcttgtttctgtagaaataaaagagggtaaagcttgcagctatggttttttggaggtac

SEQ ID NO: 14255 - DNA, 813 bp, Gossypium hirsutum
  Clone ID: GOSHI-09MAY01-C49425_1
gtttcaacttcttcttctacatctcaactcttgcaagattttcttccaaacttccattccagaaaattactgttacattacacacaatcaaaccaatcatcagctcctcctccttaccctcaaaattccagttttgatcacaatgttttgatggttctttcgatcatcctttttgggttaattttttcattggggataaacttaataatgatcagatgtgtgctaaggggctcaaacggggtggattccgactctattcgaaacccttctgctgcaatagtcaacagcggaatcgagacaaaggcaatcaagactttccctgtggtgaattactcggcgcagatgaatctgccagggcaggactccgaatgtctgatatgcctgtcggagtttacggctggcgagcgcctgcggtttctaccgaaatgctcccatggatttcatgttcgttgtgttgataagtggcttaaatcgcacacatcatgccccaaatgcaggcattgtttgcttgaaacatgccaaaagatcatggggtttgatcaaagtagctcaccggaatcatgtgttccagctcaggacatcattgtgcatattcaatcattggaacctgaaggtgtggcgcgtgatattaggggggttagctgatataattctttttcttttggccgaaactggaaatccctttgccactccatctgaaggcgttatattccatgagcgaagctctttttggagtttgaaaggcacccaatttacaacattaatgttgttcgcaagttccatttatcaagcaaaccaaacttcataacatta

SEQ ID NO: 14256 - DNA, 611 bp, Gossypium hirsutum
  Clone ID: GOSHI-09MAY01-C49615_1
ttccttggcttagaatgtttttggtgcattctagcttctcagacacatccaataagatggtctgagtttcattaatttcctttatttattttttcctactagagagtactaccttagtactcacattaaagccagtgtgtgcttgttagtgtgtgccattcttctgtttgtcatctcatccgagcggtttcgggtgtctcttccatccttttaatcaagttttttgtccttgatttgtattctagtacagaacctacttcataaggtcattagagtgtaattatacataggcaacttgcctaaatatgataaaagatagagaggaagaaaaaaaaagagaaatagtaaaggaggattaaccttctataatgttgtcgggtgtgcaggcggtatagaataagttatttttgtggttttctatcctgattttctaatgtaatgaaactcatatgatttgagtgaatgtgttttgactttggtgtggaaaaaaaaaaaatataaaaaaaaaaaaaaaaaaaaaattaaggaaaaacaaaattttttattttttttttgtacaaaaaaaataaatgataatttcttacttatggatatgaaaaaaaaaatttttc

SEQ ID NO: 14257 - DNA, 886 bp, Gossypium hirsutum
  Clone ID: GOSHI-09MAY01-C49135_1
cccacgcgtccggcactctgttccagaacttcactcatgattacaattcggaggatgcttctggcttctttgtttcgttactttttggcctcggacctttgctgggtggcctcattcttgttgcatttgctgttgctttctgccttaaacatgcccttctcatgggtgctgcttctggcctttgccttcatccttggtgcctggcgaccattgcaactgcttgtattttctaaaatgggatttttcccacttgtgtcgctacttgccataggtgctgcatttgtccatgtttcaagctccagtattttgaagattatgtgcaacaaaagagcttcttcaaataacctaccatcagttacgggatttcctgtgagtgttctgacgcttcagtcagttttagcatgtggaacagtggctttctatgcactggctgagggccttgcgctgggagtggcggcagccggaggcttacggacttggccggcacatggtcgtccctgtctcccttcatggaattcctcgtggtgcagcagtggccagctgcatctttggagctactgaaagttggcatggatctctagcagcagctgctctcattgcgtttgttggtccaatatctgcaatcggagcaatattggcaggaattgactacagtggtctggaccatgtgttggtgttggcctgtggaggattgatcccatgctttgttagaatagttgaaagggcgataaggttcgatgtgcgaaaaaccagctgtggggttgctataggaattggttttgcctctctttgtttaacatgcaccaagttagtttgcttacacacaccttattgcgattctgctccagaggctgttagataaggaagattgattaatagtgggtta

SEQ ID NO: 14258 - DNA, 1026 bp, Gossypium hirsutum
  Clone ID: GOSHI-09MAY01-C49005_1
gcacgatgttgaatatgaacatcatgatgatgctgacaggaagcttcatgcacttggcttcaatgaagaagctgaaaatatgatccagaaggtgaagaaagcattggacaatggagaaggatgccgggtttatggggtattagatgtccaaagggtggctggaaactttcacatctccgttcatgggttaaacatttatgttgctcaaatgatctttggaggagcaacgcatgtcaatgtaagtcatatgattcatgatttatcattcgggccaaaatatccaggactccacaacccgcttgatggtacagtgcggattttgcatgaaacaagtggaacattcaagtattacataaagattgtccctaccgagtacagatatatctggaaagaagttttgcctacaaatcagttttctgtctctgaatacttttcccctatgaaggagtatgataggagttggccagctgtttactttttgtatgatttgtcaccaatcactgtgacaataaaagaagagcgccgaagctttctccattttatcactcgactttgtgctgtcttgggagggacattcgctttaacaggaatgctagatcgttggatgtataggcttattgaagaagtgactaaagcaagcggtgcgcgtgcatatcggtagaagagtttgggttcagttcggagtgcaagaacaacagcaactcacatctaatgtgtctcgatgtctcaaaaaaatcaattacaatgcagagtggggataggcagaagaatatacatatatatatatataccccgctggtactctatggttgttgctgtggctttccttaattattcaatgcagtgttgggtcggatattatgggaattaagatttcttttaagttgtatcatttttgtaatcctaaaatcaaaaggaacaagaaagaaagaaaaaaggggtttgggactagctattaacatgcacacctcttatgtttgatttttatgaccaaaatttgtcaattgtctcaaaaaaaaaaactta

SEQ ID NO: 14259 - DNA, 531 bp, Gossypium hirsutum
  Clone ID: GOSHI-09MAY01-C49305_1
cccacgcgtccgcccacgcgtccgccgttcgtttggtttcctgaattcgctccgcccgatttctcagggtccatttcaaagagaagcgaccaagtaaactacagattgagtgaataaattatataaacccttgcccaaatcttcctcccccaccaccaaaacgtggagaagaaagttttatacagtcggtcatttacagaggcattgaacaatggatgaagatcacaacaacggcggctttttgatatgggaaaaactgatagatcgttttggttgatgaagtgccccgtcgtggtcgccaagtcatggaagagccaactagcttcttcttcttcttcttcttcttcttcttcttctgattctcagcctctcgccaaggttgtcttctccctcgaaccctctcaaacccgacgacccttccttacaccagtttactatggaggtggctggattagagaccgaaagaatacccaaaagctactctttgaacatgttcaaagactttgttcctatgtgtgtcttctctgaatc

SEQ ID NO: 14260 - DNA, 584 bp, Gossypium hirsutum
  Clone ID: GOSHI-09MAY01-C49285_3
ggcacttgccaagttgttcacccatctgctgatcaaagcaatttggcttctatcttagaactatcacaggacatggtcaaggatcaaacatacttcctttcgcatctctcacagttccagctcaaacaacttattttcccacttggatgtctctcaaaggatgaagttcgccaactagctgctaaatttgacttgcctaacaaaggtaggaaggattcacaaggaatttgctttcttgggaagataaggttcagtgattttgttgcaaggcatattggggagatggaaggaatcatattagaagccgagacaggagacttccttgggaaacatagagggttttggttctacacaattggtcaacgccaaggcctacgtctccctgggggaccttggtatgtggttcagaaggatgtaaaaaataatgctgtatttgtgtcaagatattatttctcgttggacaaaagaaggcgtgtgtttcgtgttggctctttgaggtggtttagtgggtcacctcctaaccatattgatcagctccaatgcaaggtcagacatggtcctggcttttataactgcaattttaa

SEQ ID NO: 14261 - DNA, 649 bp, Gossypium hirsutum
  Clone ID: GOSHI-09MAY01-C49285_2
ctgctggccggtccagactcccgggtcgcccacgctccgtgcgcaccagattaaattggtgcatttatggacgctatctacaatatggattatgactattttgcttctgggcactatgccaatgttgttcacccatctgctgatcaaagcaataaggcttctatcttagaactatcacaggacatggtcaaggatcaaacatatttcctttcgcatctctcacagttccagctcaaacaacttattttcccacttggatgtctctcaaaggatgaagttcgccaactagctgctaaatttgacttgcctaacaaaggtaggaaggattcacaaggaatttgctttcttgggaaggtatataatgaaagctaacacgtgtttccccctaagttctgcttagaggtgttcatgggtcaggtcaggccaggcctatgcatgatatcagtaccatacacagttgcccaagcttggcccaacttgaaatatgggcctcaaacgttgccccagtctgcccatatttgtaaatggctaactcaaacctgtttaggcccttccatattattttatttttaaatgtgattgtgttatttaattttaggtattatgtatatttactacccttatatatttcttttctttataaattttt

SEQ ID NO: 14262 - DNA, 971 bp, Gossypium hirsutum
  Clone ID: GOSHI-09MAY01-C49285_1
tcgcgccaactagctgctaaatttgacttgcctaacaaagaaaggttcagtgattttgttgcaaggcatattggggagatggaaggaatcatattagaagccgagacaggagatttccttgggaaacatagagggttttggttctacacaattggtcaacgccaaggcctacgtctccctggggggggggggtatgttgttcagaaggatgtaaaaaataatgttgtatttgtgtcaagaaattatttctcgttggacaaaagaaggcgtgtgtttcgtgttggctctttgaagtggtttagtgggtcacctcctaaccatattgatcagctccaatgcaaggtcagacatggtcctggcttttataactgcaattttaaaatggagcatggtgaagatggcaatgacgatattgcggttgcccagttatctgaggatgatcaaggtcttgccgctgggcagtttgcagccttctatgagagacaaacctgcttaggttctggtgtgatattggagtcctgggatgatcggggatttcccgtttgtgccaaggctcttgagattgcaagaatggaagataaatcagaacttgggaaaccagttaaggtcatgacaaaaccaggaactcttgcataaatatctgttgtcaatgactacactgaaccctccccaagctcgattggttgctgaatttctgtctcagataaaagggaacatgcaactgcagagcatgcaatgagcagagttttagttgataatttggttgcatctacttgaggttacatatgtggcctcctaatgctgggaaattttaatggactctggaggtgggggtttatgtttcgtccatatttcttcatggagagctctttttatggattagctccttcaattaaacttatttcacccatattgttgtatatcactgctattaagtaatttatggagcaagtcttgttgccattgtttgg

SEQ ID NO: 14263 - DNA, 503 bp, Gossypium hirsutum
  Clone ID: LIB3583-020-P1-K1-E9
ggccaaacagtcttagtaatatatgaaatattttgctgattggatatggtggtttgttatagataaggttcagtgattttgttgcaaggcatattggggagatggaaggaatcatattagaagccgagacaggagacttccttgggaaacatagagggttttggttctacacaattggtcaacgccaaggcctacgtctccctgggggaccttggtatgctatataactattgaactttcctatcagtatgtggttcagaaggatgtaaaaaataatgttgtatttgtgtcaagaaattatttctcgttggacaaaagaaggcgtgtgtttcgtgttggctctttgaagtggtttagtgggtcacctcctaaccatattgatcagctccaatgcaaggtcagacatggtcctggcttttataactgcaattttaaaatggagcatggtgaagatggcaatgacgatattgcggttgtccagttatatgaggatgatcaaggtc

SEQ ID NO: 14264 - DNA, 633 bp, Gossypium hirsutum
  Clone ID: GOSHI-09MAY01-C44885_1
attaatttttatggggtacgggatttatataaaaaagaacaaaggtttttcaaatttaactttgaaaattccagtccctgacccatccttctcttcccttcagctgcctgctattgccttcaagtttcccgacgacgaaattaaataaagattaaacatggctgcggcggtaattaagaagttcttcattgcatcaatgttcatgtggatagctccccttgcaatattgtatggttttaatcataatttacttcccggttcaacaaatttatctccccatgctctgactctggtgagtggattcgttgctgtaatttcggtcaatatagttatcgcattctacatctatatggcaatgaaggaacctgtggataagcatgagccggatccaaagtttctcgctgacgccaaagctagtgtaagccagccaacgggcgaagctccaacctcttccgagtccataaagaaacgagaatagaatagccaaagcctgagtaactacaatggagagaatggaacaatgagggtctgtgctccatactcatgtcttatgattatgaaattgagttctttctaatgtttttggtgtatatttagaactcatttctttccgtcttttcgataacattatca

SEQ ID NO: 14265 - DNA, 577 bp, Gossypium hirsutum
  unsure (1)..(577): unsure at all n locations
  Clone ID: AW186685.1
cttaatttccagtttgttagaatcgacgataaagtaattatctttctggttttttttttaatttaattaatttcatatgtttttgcccctttcttttagattaaacatggctgctgcagtaattaagaagttcttcattgcatcaatgttcatgtggatagctccccttgcaatattgtatggttttaatcataatttacttcctggttcaacaaatttatctccccatgctatgactctggtgagtggattcgttgctgtaatttcggtcaatatacttatcgcattctacatctatatggcaatgaaggaacctgtggataancatgagccagatccaaagtttctcgctgatgccaaagctagtgtaagccagccaacgggcgaatctccaacctcttccgagtccatatagaaacgagaatatattacccgacacctgagttactatattggatagaagggatcaatgatggtctgttgctcatattcatgccttatgattatgacattaaattctctcctatgtttttgttgtattattaaactcattccttttggtcttttctataagttc

SEQ ID NO: 14266 - DNA, 465 bp, Gossypium hirsutum
  Clone ID: GOSHI-09MAY01-C44585_1
ccacaacaaggaaatggtatttaaacatcttggaggctgacaaggtccaaccaccaaagaagacggaagagggaaagctatatactcctgctgcagttgatttattcaggatactcggggagcaagtacaaattgttagggataatagcactgatgccatgctttacaggattgctttggcaataattcaggtaatgattgattttcaagcagctgaaaagcagagacttgaagaacctgcttctgatattggtctggaacctctatgtgcaatgattaacaacaatttgcgctgctatgaccttgcactggagttaagtaacagcatcatagaggctcttccacaaaactatgctgaccaggtaaattttgaagacacatgcaaaggtttcttggaggttgcaaaggaagcagtacgccaaactgttaatgtaatctttgaggatcctggagtgcaagagttgc

SEQ ID NO: 14267 - DNA, 622 bp, Gossypium hirsutum
  Clone ID: GOSHI-09MAY01-C44505_1
aggagctccaggtgctgctggtctggagtcgttgatgaatatgtttggtggtctaggtgctggaagcctgagtgttcccaaccaacctgacgttcccccagaagaactttacgccccccaattatcccaattacaagaaatgggtttttacgatacggtagagaatatcagagcactacgtgctactgctggaaatgtccatgcggcggttgagagacttctaggtaacccggggcagtaattcctcaagataatgcttttaaatttgaacaagaactgtgatgtaagattagttgattcggcctgctgacttagcaaaaccacagattatgctgattccttttttgggcacacgtttactgtttaatgacgtggtaaacaggatgatgtacccagagaacttgatatataggcttatgcgtattcttggatcattccatcttttgcccacgcacttggctgtgtacatacacacattggattaattttgagaactttaaaaggatggttccagcatcttcaattcatgcactctgttgctgttcgattctacggagtcgatgaactgtgagttgcatgtatgttagtgtgtcatgtcctgtgtatataaagggacgtggat

SEQ ID NO: 14268 - DNA, 518 bp, Gossypium hirsutum
  Clone ID: GOSHI-09MAY01-C44665_1
ttgccacgggaaattgcaaaacaggctcctgtgtattttaaaaaggcaattgatgaagccgaggatgagtggagccagcccaatgcaaagaagctgatagacacgagtgagaagggattgcacggttcaatcccgaaaaatttcccatatttccatgttgaattcggtctaaacaaagggtttgtgcatgtaattgatgatgaaagccagttcaagagcagccttggtctcaatgttattagaggcatgttacaacttccagcggaggtcatgtacccccgccggaggcatcaatccgtggaggaacaaaagcagcgctgtggccagtttggttcgtgattgggaagcttttgactggacaaaacaacttgactagcatcatgatctaacctaaaacctaaactgagttccccaattgattgacttgacactgtatatttacatggcgttcggattaatgttttagtgtaatcgtatttgatgtgttatagaaatagaaatttagcacattaattcat

SEQ ID NO: 14269 - DNA, 747 bp, Gossypium hirsutum
  Clone ID: GOSHI-09MAY01-C44145_1
gcgttcgcccagcgtccgggcaattctgggggtgcttgttctgctgaaaaaaagctggagaacttcaagaaaggggccaaataggagaagccatttcaacggaaacaaatgaagattaggttccctgagcgtggaagaagtgggagatctgttgttactattaagaatctggaatttggttaggagggaggagctgctagttgacagggcaagtctttcaattgaaagaggagagaaaattgccattattggtccaaatggttgtggaaagagtactttactgaagctgataatgggcctagagaatccaagtggaggtgaagtgttgcttggggagcataatgttttaccaaattattttgagcagaatcaggctgaggctcttgatttagataaaacagtgcttcagacagtggaagacgttgcagaggactggagaattgatgatattaagggacttcttggtcgttgcaacttcaaagctgatatgcttgacagaaaggtttcccttttgagtggtggtgagaaggcacggcttgcattttgtaaattcatggtaaaaccgtcaaccctgctagttttggatgaaccaacaaatcacctggatataccctcaaaggaaatgctagaggaggcaattagagagtacagtggcacagtcattactgtttctcatgaccgattctttataaagcaaattgtgaacagagtagtggaaagtaaagacgggcatttgcaggactatgt

SEQ ID NO: 14270 - DNA, 834 bp, Gossypium hirsutum
  Clone ID: GOSHI-09MAY01-C44165_1
cccagcgtctgtgattttttcttctcaatagcaaaaactcctttttgctcttctagggttttgacctcaagcaaaacacgccgtcgccagaccaccaccatatcaggtgaccggtaacgcgcgaaaggctcccgtttcagacgaagaacctgatcgacgaaggctaaacaccgaggtaagtaccccttttctttttatttatttcttttaaaatagatttgaaaccaaaaataagaaaaaagatcgaaagaaaaaaaaaagaaaagagcatagaatccaaaaacaacctttttttttttgtttttgcttttgatttctcgtatgcgtgtgaaaataccatcttttttgtcttccaaaaatcccccaaatacaatcggttccccctatttattttgctaccctcttctatttgttgcttgctgttttctttctttactttgcttgtctctctgctattttcctgtttcgtttgctggtctaggcaaaagtgatgggacgggttggtgcaaggacaagcagaggggtcaggcctcgaggccaggcgcgggcggtgcactcgaggcacgtgggggagcagcgcggcccaaagaggggctcaaaaaccctagggtctctgagttggtttaaggtcttgggcctattgggtcgacagaagctgggtttgtttattattgtttgggcttgttaggcccgggcaaatttgggcccgtacaattatatttgaaactcacctctttatttaagctacttttatgcaagattagaagtgtaatacaaccaactttgaatccaaacaaattattcactcaattatttaattcgttctatttagtc

SEQ ID NO: 14271 - DNA, 445 bp, Gossypium hirsutum
  Clone ID: GOSHI-09MAY01-C44055_1
aaaaaaagaggaaagaaaatggggtgtttcgcggggtgcttctcgggcttcgacggaggaaacaaagaacagcgacaggagcaagacagattggcctctgccgaagctcgtgccaaagccgccgaggctgctcagaaaaggcaagagcagtttgaacagtcagccgcgggaagagctgctcgtgcccaggtgcaagcggctgcgaagcagtcagcaaattctaataaaggcgaacctgttttgaagtggcagctgggttgaagatttgcctagtctctcttcagccaaaactgctaatgtagatatggaaataaattttgatgtacatagtttccaagttgtgaattcctcgccatttagcaagtgatacggtacaagtgcaccagcagtcaattcttttttctccattttcagttgtaatgtgtatgataaatccaagatgaag

SEQ ID NO: 14272 - DNA, 710 bp, Gossypium hirsutum
  Clone ID: GOSHI-09MAY01-C44295_1
gatcaatggacggtgcgagagactccgagatagcaatgggggcgtaccaaccatatcatttatcgattaggcaaccagcaaggggtcaagtccacggtttccgtctggcgctatggtacgagcacctcggcatcctacatgacggcttcttgaccccagaaagcaaggaatgcgtgaagaaagtgaaccaaatggctgacaaatattgggacctattctcaaaggacgaccttgaccaggacttgcctggtcacctactaagctaccccattgccatttctaatgatggaaatgtatctgagctgccaaattttgagaacttccctgacactaaggctcgtattcttggtgccaaatctgattatctcccacctgtgcgcgaccacctaatgaatggaactatgtatcgaataaaaacccgaaccacacatgggtgatcaatctgctacgttgaaccgataaaaatttggtttaactattaaaggccttaaaaaatcaaggttttttcttcttttttctgaatttctctcgttttttcccttattttcacttttaatcccttagttttatattacaagaaaaaaaaaaaaaaaaaaaaaaaaaaaaaaaaaaaaaaaaaaaaaaaaaaaaaaaaaaaaaaaaaaaaaaaaaaaaaaaaaaaaaaaaaaaaaaaaaaaaaaaaaaaaaaaaaaaaggggggccgttttaaa

SEQ ID NO: 14273 - DNA, 321 bp, Gossypium hirsutum
  Clone ID: GOSHI-09MAY01-C44225_1
gtagccgtgacaatcaccctcttcgaagttttgggctcctctcgttaaggaaatgatggagaagattatcagttgcaagctgatctttttaataacttacaatctcaattgtagacgttttattctcaccaacatctttcaaaaaatttattcgtgaaattttttgaactgaattattagattaattctcttttttggtttattttggtgttccttttaattcgtctaaaatcgaaatcaacttttgtaattgatggttaaattttactaacaagtgacgtttgaggtttatgcattctgcactcctcaaacatttgtatc

SEQ ID NO: 14274 - DNA, 599 bp, Gossypium hirsutum
  Clone ID: LIB3829-001-Q1-K6-G1
atttcattaggttttcatttttaacatagaaaagaactgtcaatcctctgtagatctaaccctcacacactgagcaatgtcaactacccctccttccaccgctccaaacggccgatccagggttttcagcgaatcagacgaaatccagatcctcaaatgtttaatcagagccaccaaatccattcctccgcccatcaccaccgtgggtacctctaccatcaaccgcatcatcaagcgtctcgaccacaggttcaccgtctcccagatcaccgacaagatccgcaggctcagagacaagcaccacaaccatgcaaggaacagagccctggtaaggaaccatcacgaccggcgaatattcaagctttccaaaagaatttggggcaagaaagcaacacccagaaagaagaatagcaagtcagaagatcaaggggctattgaaatgggaggtgatggggtcgagaaattggacaagtttccatacctggtggctgagttttccaaggttttgcccgaaaatgaagtgtggaaacagaagatgaagagagtggaagaggagaagttgaggaagatggatcaagaatgggtgatgttgaaagttg

SEQ ID NO: 14275 - DNA, 418 bp, Gossypium hirsutum
  Clone ID: LIB3148-045-Q1-K1-E6
caccgacaagatccgcatgctcagagacatgcaccacaaccatgcaaggaacagagccggggtaaggaaccatcacgaccggcgaatattcaagctttccaaaagaatttggggcaagaaagcaacacccagaaagaagaatagcaagtcagaagatcaaggggctattgaaatgggaggtgatggtgtactatggtcatccgcctcattcatagtaaatagaaacaatcttttagattaggcagatgagaactttgaaattttggtttgtgaggaattgaaattgtggagtaaatcagttgtagccagaataatcatacaaatggtttcgaggagcaactaagtacctggcaagaaataacatttttatttatttatttttcagaatgagatgattttggatcgtgctactttattt

SEQ ID NO: 14276 - DNA, 453 bp, Gossypium hirsutum
  Clone ID: GOSHI-09MAY01-C45555_1
gaaatttataaagtcacccttagagcaagacaaggtttcttccaagtaaaggctgtaacacaaatctaaaattttctccaccaacaaatgagatactggtgacagctgaaatattccagcaatgtaagcccctgcagctgtaattgatccctgttatctactgatatgttaaacggccatgccaagctggattttgctcactctgactagtttgactaagttccatggaagcttgagtttccagttggtataatgtttattgccattcgttcttaaaagacaatgctatgtagtttattttcttttttgtttttctccgtgctcttgcctggggcctgtgcttttattttctattattgttttttctttttatttttttatttttatatatatattattttttttaattattttttttttattttttttttcatatatttttttttatatttt

SEQ ID NO: 14277 - DNA, 333 bp, Gossypium hirsutum
  Clone ID: LIB3196-059-P1-M1-C4
ggttggggcttacttttttttctaatttttatcttttcttttgtcttactttttcttttttaaataattaagctgaagctgaaaaaaataataaggctagtgatgggtcacctaagtctgaacctctagctggaagggtattgtctttaagtgacatactctatcgcacagaaggtaacagtgatgcttcacaagatgggccaagatccgatagggaagattctgattatgatgaagagctggaattagattttgaaacttcaatatctggcgatgaaggccatgatgttgaatccaatatgctacatggaaggttaaatcttagaattcatc

SEQ ID NO: 14278 - DNA, 296 bp, Gossypium hirsutum
  Clone ID: LIB3148-041-Q1-K1-F5
gaaaacacaaagaagctttaaactttgctgttgcagcacaatgtgtctctccatttgatactatggcggctgagaaagtggagaacctaaaaaaacaacttgcagtagctgaagctgaaaaaaataataaggctagtgatgggtcacctaagtctgaacctcgagctggaagggtattgtctttaagtgacatactctatcgcacagaaggtaacagtgatgcttcacaagatgggccaagatccgatagggaagattctgattatgatgaagagctggaattagattttgaaact

SEQ ID NO: 14279 - DNA, 550 bp, Gossypium hirsutum
  Clone ID: AW187415.1
gaattcttccgtggttctgcacgactttcttaaggtagctcgacctatttggtgcagtgccattaaggacattttagagggttatgcaaaggaaccttctgatacaaattcgccaagatagccagattaacaaggatgggcagtttcaagggaagtactcccttgagttgtggcaaggacttgattgatcgttgtttagcatcgtggttgactgccgaagaacagcagaatgatgaattcgaggccattaggttgaagctttcccatgctacgatcaacctcagtggagttcaagttcctatagagaccaaatagtacttgattggagggaaaaaaaaagagattaggtaccatttgattcttgccattgttgcaaagataaagagcgagtggcatattcctttggttttgttaaaatctgaactagaactaatcatatttggtgattcaacccgtgtgtatttttggttttattgcctaattataaaccatgtaccatctatatcttgccttattttttgttctaatgctttgctctctagaagttcac

SEQ ID NO: 14280 - DNA, 283 bp, Gossypium hirsutum
  Clone ID: LIB3148-040-Q1-K1-G6
ggaaccctctgacacaaacctcgccaagattgcgagatttacaaggatgggcagtttcaagggaacttgtccctcgagttgtggcaaggacttgattgatcgttgtttagcatcgtggttgactgccgaagaacggcagaacgatgaattcgaggccattaggttgaagctttcccatgctacgatcaaccttagtggagttcaagttcctatagagaccaaatagtacttgattgtgggaatcactggctcatgggtttacacttttggactgggaaaaccc

SEQ ID NO: 14281 - DNA, 541 bp, Gossypium hirsutum
  Clone ID: LIB3828-032-Q6-N6-G10
actcaaatatagtaaacatatatacagatatatcgcaggggattacatataggtattttaaggtcttgttcttatcagaccattgtgacctttcgatattaacttcttgtcctttagcaacattattgtaaatcttattatagaagtctaagtttgggtacaatttgatcagcatttcagcaaggttttacttaaagatgtatacaaagctgccatcctccacttaaagaagctcccactctgaatccaacaaatcttgagttgatgatctccttgtagcctctcttgtttgtgcagacattgagctccccttggagtcctcgtcacattttccaacatccccataccatttagcaagttgtttgtactccattttccttgctgacctcattcgtgaagaaatagcatcacgaatctttttctggtaagggctgtgtttgccttgcctatgaggatgacaatgaagttcagcttcattcacaatgatacaactttcatcaactcctgttttatccaatgggtggaactgttccactttctt

SEQ ID NO: 14282 - DNA, 427 bp, Gossypium hirsutum
  Clone ID: LIB3148-039-Q1-K1-H1
tggatagctcagggagtgctgttggaaggaaagatagtggaacagttccaccattggataaaacaggagttgatgaaagttgtatcattgtgaatgaagctgaacttcattgtcatcctcataggcaaggcaaacacagaccttaccagaaaaagattcgtgatgctatttcttcacgaatgaggtcagcaaggaaaatggagtacaaacaacttgctaaatggtatggggatgttggaaaatgtgatgaggactccaaggggagctcaatgtctgcacaaacaagagaggttacaaggagatcctgataaagagttttattttaggggttgttccaaaagtagtaaagtttgttttattagtatgtgacctgaaaaaattaagtgtctatattctctatgttataaatgcaaatccatatgccata

SEQ ID NO: 14283 - DNA, 766 bp, Gossypium hirsutum
  Clone ID: GOSHI-09MAY01-C45415_1
gaaagaaactgagaaaattacacaacaattggaataatcctcaccaagtgcatctaaatatggtgaggattattccaattgttgccaaggtactgcattctttcctttgcaaagctgcatgaaccattcttgttgtcctaatgcaaaagcattcaaaagagaagaggatagagatggccaagcgacaattattgccctccggcctatttgcaatggagaggaggtgaccatttcatacatagacgaggaccttccatttgaagagagacaagcattgcttgcggattacggttttagatgcaggtgccccaggtgtttagatgaagaaccctagaccctaaattgccaatgaagtggttgtttcatagcattcggaaacataaaccagaaacatctctatgagaattattaaatgttagtacaagaagctatggaaggagctgttccccctttggatctctatgccattagattgcagattcattagcctgctcagaggccaactcgaggtgtgatcagattttctctttttcctttaatttatttaatttaagacgaaagtactattatgggtataattaggcacttaatttttcttctaccatcttcttgtgtgcttgtgggcaatatgttacttttcgttgtggtgtcggaaacagtgttgtattctcttcccactgagaccataatttgtctctggttcaaggtgtgttttcgcgtctgatatgttatatttatttgaaatcatataaatcttgattttgat

SEQ ID NO: 14284 - DNA, 429 bp, Gossypium hirsutum
  Clone ID: GOSHI-09MAY01-C45435_1
agaaagtataaatcatcttcattggctgttcaatgacataaatccagcaaagtcctcatgtaaggcttggaatgatgcttgtgatgcaaagtttcagcgctattgggcattggtgataggcactccaaaggagaatgaaggcttaattcgttctcctctttcaaagattcttcttcatgatggtaagactgagagggtcatcttggctcaaaatgtgggtttagaaccttctcaagaggctgtgactgaatatcgggtattaggtcctatgataaatggatgctcgtgggttgaactgcgcccacttactagcaggaagcaccagctccgtgtccactgtgcagaagctctagggactcctataggtggtgactataagtatggctggtttggtcacccgaagtggaagcagatgcctcgagttgatat

SEQ ID NO: 14285 - DNA, 748 bp, Gossypium hirsutum
  Clone ID: GOSHI-09MAY01-C45685_1
atagggtgaaggttttattgagatcaattcatgggttccgagcgaaagccttccccaatggaacttgcttgccagaaagcagttgggtaactttgtgtataattgtgctgtgatggatgctagagagatagattttggtggcatctcgtgcggttgaatggtgctgcgctgccactggggtttgcaccatcggttttttcttaaacacacaactctgaatttttactaatggtaatttccccttctttcttttttacatctttacccttttggatgggggatgatggggaagatttcagattactcaagattcaatagaatgttttattgataggggtgtcttgagtttttatttctttttccaaactttcattcaaaatttcttcgattaaatttgtcttcccccgttttcagtgacatgagaacttgcaaaggctggcgtcattagcacaggaataggtttaataatttgaagtaccaacacattggtaggttgccattagagtttgttgaaagctttttaagaacacagaactagtcatatgggtttcttcttccttaattttcttggaattgtcttcaagggaggaaataagttccggaggctgttatcttagatgtttgctgatgtactgattacattgatcattacaattgatgaactatatactcccagaaattttcttatgtacactttggaatccttcattgtttttagtttcttttgttcaaaaaaaaaaaaaaaaaa

SEQ ID NO: 14286 - DNA, 404 bp, Gossypium hirsutum
  Clone ID: LIB3148-054-Q1-K1-C5
gtagaaaccaaatcaagaagagcaataacactgtttgaatatcttagcctttttcttttcagttttaaattttaattggccttttggagtttgatttttctttggtccttcctaaatctttagttgttcaacattctctacagtcaagaatggaatgattttcattcttcaaatgttctgttgtactttgcgtcattattgtagaatggaatattatttggcttaaaaaaaaaaaaaaaaaaaaaaaaaaaaaaaaaaaaaaaaaaaaaaaaaaaaaaaaaaatgaaaattaaatacaacaacaataattacctttattacaatgctttctactttataaaatatttttaaatttttacatattaaccatttcctttttaaatttttacgggggggcccctttt

SEQ ID NO: 14287 - DNA, 266 bp, Gossypium hirsutum
  Clone ID: LIB3146-001-P1-K2-E1
gacattctctacagtcaagagtggaatgattttcattcttcaaatgttctgttgtactttgcgtcattattgtagagaatgtcggttgaaagctttttaagaacacagaactagtcatatgggtttcttcttccttaattttcttggaattgtcttcaagggaggaaataagttccggaggctgttatcttagatgtttgctgatgtactgattacattgatcattacaattgatgaactatatactcccagaaattttcttatgt

SEQ ID NO: 14288 - DNA, 1086 bp, Gossypium hirsutum
  Clone ID: GOSHI-09MAY01-C45605_1
cccgggttcgacccacgccgtccggatgtttcctgccccagcatgggaactaatgcacagacaatggcatggattttggatgagtattctaagtttcatggacactccccggctgttgttacaggaaagccgatagatctaggtggatcgctaggcagggaagctgcaacaggtcgaggtgttgtatatgcaactgaagctttacttgctgaatattggaaggcagttaagggtttgaccttcattatccagggtttcggtaatgttgggtcttgggtagcaaggctcatacatgagaggggtggtaaggttattgcggtgagtgacgtcactggtgctgttaagaatcaaaatggaatcgatatacctcagctgctaaagcataaagaagctactggaagtttgacaggcttcagtggcggagattccctggatccaagtgaactgctggtacacgaatgcgatgttcttgtcccatgtgctttaggtggagtgctgaacagggaaaacgccgcacatgtgaaggcaaagttcataatagaggctgcaaaccatcccactgacccggaagcagatgagattctatcaaagaaaggagtaataatactacccgatatatatgcaaatgcaggaggggtgactgtcagctactttgagtgggttcagaacattcaaggtttcatgtgggatgaagagaaagtgaaccaggagctgaagaaatacatgactaaagcttttcataacatcaagaacatgtgccagtcgcacgactgcaatctccggatgggtgcatttacacttggggtgaaccgtgttgcccgtgcaactatcctgagaggatgggaagcataaacgcctcccttccggcttttatttctcttagtttatagtctccattgaaaagcacaagcaataactttcaagaattcttagcttacccctccaaagcgttttttaactttttatggttctcccatttatccttgatgaaactttatacaaactccaaatttatacttatatattctttcaactttgggattggattattattattattattattattattattatttccactgc

SEQ ID NO: 14289 - DNA, 568 bp, Gossypium hirsutum
  unsure (1)..(568): unsure at all n locations
  Clone ID: LIB3825-028-Q6-N6-G8
aacaatggtaaagtaaaattgtatttaatttgataatatgaacacgtcacttcgaaacgaaacggaacttacaattgcatggnaaaataataataataattcaaccccaaagttgaaagaatattgaacacattgaatgggactattccaaatacaaagctggtacaggtatcccccctaataaatataaggataaatgggagaaccataaaaagttaaaaaaagctttggaggggtaagctaagaattcttgaaagttattgcttgtgcttttcaatggagactataaactaagagaaataaaagccggaagggaggcgtttatgcttcccatcctctcaggatagttgcacgggcaacacggttcaccccaagtgtaaatgcacccatccggagattgcagtcgtgcgactggcacatgttcttgatgttatgaaaagctttagtcatgtatttcttcagctcctggttcactttctcctcatcccacatgaaaccttggatgttctgaacccactcaaagtagctgacagtcacccctcctgcatttgcatatnatatcgggtag

SEQ ID NO: 14290 - DNA, 780 bp, Gossypium hirsutum
  Clone ID: GOSHI-09MAY01-C45385_1
cggccgcgtgggcggccgcgtgggagtgtttttgtgataatttggctggctgtggggagatcatcagcgaacacgaacatatcacagcgatcttaaatggactaccatctgagtacgaggcaattgtttctatcattgtcgccagtccaacgcgtacagcctttagagtgtcatgactatgctgattgatgctgagtctcaacaacaagctctaatggttgaggctcccagctctgccaatctagtttcacagcagtctgttgactctcctactgagaggtccacaccggtttatcggccatctacctctcgtggtcgtgggcgtggccgttcttctagcatgcgatttcaatgtcaattatatggtaaaataggacatcttgtggaccgttgctactaccggtttgattcgtcctacaaaagcactaactacaggcctcatccacaagctaatgtctgtatggctgctcctcctatggttccatactctaactggacatatcaggtgactcatccttctagctggccaaattcttttgttggtaacccagtgcaacaggttccatccatggctgtgtctgctcctcaaccccatgctatggtaactactcctgatacggttggggatgctgcatggtatcccgattctggggtaacgcatcatctcactcactcagttgaatctcttggtgataacacgtctcgtcatggaccagttcaccagaaacaatcaagtgatgtttaaaatctttccttcacaatgtcaagttcgagacttaa

SEQ ID NO: 14291 - DNA, 410 bp, Gossypium hirsutum
  Clone ID: GOSHI-09MAY01-C45355_3
acgcaactttgcgccgctctccagccttaaacccgatcggactccgattcagacggagcaaaacaggttacgatggcgcctactctggtatacgggcgtgagggtgcgcatgtacggagttgcggcagagtgcaggcagaaggcgtggtccctggtggtggcgtggctcggctcggaggcgctacacgagtgagggggaagcctggctcagttgcggcgctggaggcttaccctagctgctagggttttctgattttggtctctgctaggctaggtgttgggccatcaggctattaggtgttgggctagtgttagggtagtttaggttaaaagtggtttgggccacgtaattgggtctgtaattggacattttgggacatttaattatttttggtttttatttcgaaaaa

SEQ ID NO: 14292 - DNA, 451 bp, Gossypium hirsutum
  Clone ID: GOSHI-09MAY01-C45355_2
ttgacgcgtgggcagagaacaaaagcccccccccatttgcgccgttctgtggagcagtcgttcgaaaaggaaatctaaatccttgctcaaaatccgattacgacggagagaagcaaggtccggctaacaggtacggatgtatgcgggcgtgcgtacggcgtggtccctggtggtggcgtggctcggctcggaggcgctacacgcgggcggacgcaacacgcgcgagggggaagcctggctctgttgcggcgctggaggcttaccttagctgctagggttttccgattttggtctctgttaggctaggtgtttggttttgattttgggctgcaatgggtttgtcatttgggcctggggtagggtcatgcaattaggcaatgcgttaggttcatcctggattgggttttgtaatactaaacaattaaaaaggactgctattggtttttatttt

SEQ ID NO: 14293 - DNA, 389 bp, Gossypium hirsutum
  unsure (1)..(389): unsure at all n locations
  Clone ID: LIB3493-016-P1-M1-B6
cggacgcgtgggtttgcgccgttctgggagcagtcgttcgaaaaggaaatctaaatccttgctcaaaatccgattacgacggagagaagcaaggtccggctaacaggttcgtttctcttcctcccttcctttagtttatatatgtattctatgcgattaagagcaaaacagagaagaaaaaaaaaccactggaaaagaaaagccaagagaaagaagaaaaccttcttttcgaaattttntactgatcccttatttggtgtttcatacaaaaaattctcccctttacagatttttgacatggctttatattgcaaaaaaaaaaaagaaaagaaatgccccccgaatccctttttacatatntcttaattactcctattttctctgatttt

SEQ ID NO: 14294 - DNA, 177 bp, Gossypium hirsutum
  Clone ID: GOSHI-09MAY01-C45315_1
cccaaccctccggactttttctctattcgacttgtatcaaatttgtggctttgactattattattagtacttatgtctaagattcgaacacatctagacatggttatacagatatgaccttcaaatgtatgaaactcttattttcttgaaaaacttgaacaaaccgtgttagattaa

SEQ ID NO: 14295 - DNA, 515 bp, Gossypium hirsutum
  Clone ID: GOSHI-09MAY01-C45305_1
gttttttatgtataagaaattgctatatgcaatcaatgaagggcaaggatcttttgatttgtcatgagtccaccgccgcaaggctaacgaacagaagagagttgtgtggtgttgtgttgaggcagtgtgtatatttctgaacagcacaatccgagggtcaatttttctcacctgctgcgagtatttttgatgttccaaagtagcatattgattttgctcaaataatggcatttctcttcactgctgcgtctccgttactagttttaatggggtgactatcttttccaacttcaaacttttctcaaatcctgcgtagacacaaatctgattttttcccctttagtatttctaatattttccccagttgcatgcgacttatatgctaaagcacggaagaatttagtaggatgttttttgttaaagcacttttgcattcagctgctagagctttgtatataaaattagggaggaaaatgaataaaataatgatgaaattgttattcctttttcttttt

SEQ ID NO: 14296 - DNA, 316 bp, Gossypium hirsutum
  unsure (1)..(316): unsure at all n locations
  Clone ID: LIB3083-062-Q1-L1-E2
tctcaagtttttttgttgttccaaagtaccttattaattttcttcaaagatgaccttttttcttaattgttccgtttccgttcctagtttaaatggggtacctatctttttccaacttcaactttttctcaaatcctgggtaaccacaaatctgattttttcccctttagtatttctaatattttccccagttgcatgcgacttatatgctaaagcaccgaagaattagtangatgttttntgtaaagcacttttgcattcagctgctagagctttgtatataanattagggaggaaaatgaataanataatgatg

SEQ ID NO: 14297 - DNA, 642 bp, Gossypium hirsutum
  Clone ID: GOSHI-09MAY01-C46995_1
ctttcgctcgctcacttcccatttctgaatttctcaatcactttcaggtatctgaagaatcagcaaaatggtttcctttgaaatgaacgatcgaaaaaaattgggctgggattaacgggatttggcatatttttctcatttctgggaattatcttctttttcgacaagggattgcttgccatgggaaatatccttttcatatcaggagtgaccttaaccattggtctgaagtccaccatgcaattttttatgaaacctcaaaattttaagggaacaatttcttttggtgttggcttcttttttgttggcgtgggatggcccatatttggcatgatattggagacatatggattcgttgtactcttcagtggtttttggccaacactggcagcgtttctgcagaggataccaattcttggttggctattccagcaaccatacatcagatcgttattggatcggtatacaggcaggagggtgcctgtctaaccatgccatatatcagagaattggaaatagtggggcgtcttatgaacaaataggcacatgctcaaagcgatggaatgaatggggtgaattatataaaaaaaagtctatgcaaagtggtgaaacatgctttcatgaaatgatgttatgtagtac

SEQ ID NO: 14298 - DNA, 558 bp, Gossypium hirsutum
  Clone ID: GOSHI-09MAY01-C46805_1
gttggctctaacagaagaacacttgttcaggtcctaacggagccaaaaaatgcactaggcacgcaatacaaaaagatgttccaaattaatggcgtcaaactgcatatcactgaaaatgctttgaaattaattgccagaaaagcaatcaataaaaatacaggcgctcgcggcttaagagccatcttggagaatatcttgatggatgccatgtatgagataccagatgttaggaccggtgatgatgtaatagatgctgtagtagttgatgaggaagccattggatctgaagaccatagacagggagctaagattctttatggtaaaggtgcattagaccgttacctttcacaacaaaaattgagggacttggagacaactgtggacggattggacggggagctggaggtggaagcagagcttcgttcggttgttgccagtatgtgatacatatattgatgaaattgtagatgtaacttgattgtacataataagctcacattgttttaaaatagactgtacaatatgcataaaccattttatgatatatatgcagttctt

SEQ ID NO: 14299 - DNA, 454 bp, Gossypium hirsutum
  Clone ID: GOSHI-09MAY01-C46595_2
ccggaattggaggaacgaccccgacccacgcgtgcggtaggaaaaaagcaatactatgttttctcctctgtgcaaaccctaaagtttatagggttgggcgattttgtttctctgtggataaaaatgggaagaggaaaattcaaggcaaagcccaccggtcaacgccacttctctactcctgaagagatgcttgcgggtacctcatctcgtcctcgcacttttaagcggcaagaagctgcatacaaggaggaagaagaatccgaggaggtatctggacaggagtctggagaagaatccgaagatgaaactgaacaaaagcgcaagggaactcaaggtgttattgaagtcaacaatcctaatttggtgaagccaaagaactttaatgctagagatcttgaagcttgttaaactactgaacttgtcatgtgtgaaagggatgaactagaaaattata

SEQ ID NO: 14300 - DNA, 703 bp, Gossypium hirsutum
  Clone ID: GOSHI-09MAY01-C46595_1
cccacgcgccgcccacgcggccgcccacgcgccgcccacgcgccgcgaaggggggccgcggggaacaaaaatgggaagaggagaatgcttggcaaagcccaccggtcaacgccacttcgctactcctgaagagatgcttgcgggtacctcatctcgtcctcgcacttggaagcggcaagaagcggcatacaaagaggaagaagaatccgcggaggaatctggacaggagtctggagaagaatccgaagatgaaactgaacaaaagcgcaagggaactcaaggtgttattgaggtcaacaatccgaatttggtgaagccaaagaacttgaaagctagagatctcgatgctggtaaaactaccgaactgtcaaggcgtgaaagggaggaactagaaaagcagagagcccatgaacgatacatgaggctgcaagagcaggggaaaacagaacatgcaagaaaagatttggaacgcctagctcttattcgtcaacagagagaagaagctgctaaaaaacgagaagaagaaaatgctgcgagggagcaagatgaaggttgaagctcgacaatgacattccctcatacaaagcttcatatacatcaaatgtttttctttcatagaaggatatttgtggtgttttctccatttaagcaaaatagatagtttaaattcaaagttttttttattaattaatttttcgttaaa

SEQ ID NO: 14301 - DNA, 853 bp, Gossypium hirsutum
  Clone ID: GOSHI-09MAY01-C46585_1
cgtgatcttgtcgacgacgtaataacagtttacgatactgaaataatcaaagcgatgagactctgctatgagatccttaaagttgcagttgaaccaagtggagccataggccttgcagctgtcttatctgatagcttcaggaccaaccctgcctggaaggactgcaaccaaataggaattatactttcaggaggtaatgtagatcttggaagtgctgtggaattcatttagcaaatgaaatttaccattgtgattgctactcctatttaaaccttttttttcccttttaaatttaagtttgatctctaaatgctgatatgtaaaccaattactttggtggcaactattaatcctagtatgatgatatgtcattcaaccattcgtgcaaatatagatgtagcactgtaaattagtataaagaagctgagcaaggaactccaacaaataagcatggaaaatattcaatatcaacagacgctatcgctgtcaatactctccaaaagagaaagaaactgcacttaccaatagtcgcaactccaggaaacgcataagcaagatagatatgaatggcatggctgcaaaaatttatatatactgaatatgtagggaaacctttgaaatggggggaaaaaagcaaggggtatatgaaatactttttaaatacctctcaaacaacttaaatcttccatcagcaatggcaggcagcttttgcatgagatttattgctgcaacaaaatcataggaataaaaactgaacatgtccagtttcctacaaataatttcataacaataattaattgattataatttgaaaggtgaaataattaagaatgaaagaataccttcgtcgaac

SEQ ID NO: 14302 - DNA, 425 bp, Gossypium hirsutum
  Clone ID: GOSHI-09MAY01-C46465_1
ctcaaaattaaggatggagttctggaagaaatttactttcgtcttggctatgatggcggtagtcctggcagccaccatgcctccaacggcaagcgccgctcgcaaagaggaggtgactctccctgccgacttgagctcaacaaccactttggccaaaattttagatgttgaagacaaacctgataagaaatgcctcaaaaattttgaattttgcatgtttacggccagagtttgctgtgaaaattgtgcatgtttaggattatgcctgtgtttgtaaactcttccccttttcccttatcatataactgcttgtattgtactaaaaaacatggtggtccgtctgtaatcatcggcacccaaatgcatgctacacatcataagtgtagattgggggcacgcaatgtatatacccttaaatagtaaac

SEQ ID NO: 14303 - DNA, 421 bp, Gossypium hirsutum
  Clone ID: GOSHI-09MAY01-C46645_2
gcatcatcatctaccaaagattttacttctctatttctgtattttttttggcgttataaaggaaaaatgttcctatcccatagcaatagcttccaagctggccaggctcagggccaagctcaggagaagaccagtcagatggtagaacatggctgggggaactgcacaatctgcatatggattcaatgcaccaggctgggcagcagatgctggcttttgcacacggcgcagcagatgccatgaaggatacaatggggatgaacaaatgaaactactccagcttgatcccaaattaccacccctctcgggcacctatctatctatatatgtatgtatgcatttttagctcttgatttttgttttgtcaaaagtttcttcattttgctcttataatctttgagccaagaagaaagatttaccc

SEQ ID NO: 14304 - DNA, 686 bp, Gossypium hirsutum
  Clone ID: GOSHI-09MAY01-C46645_1
attatcctctctacttgtgtgtgttttttctcccatccatattcaaaatgaaccaatcccagttttcgagccaccaagctggccagaaaatgggccaagctcaggagaagaccagtcagatggctgacaaggctagggaaactgcacaatctgctatggattcaatgcaacaggctgggcagcagatgcaggccaaagcacaaggcgcaacagatgccataaaggatacaatggggatgaacaaatgaaacttctgctgcttgatcccagaccgcacctctccggcacctacaatattcatcttttgagctttagttttattttttggcaacattttcttaaatttgctcatatgttcttgagctacaattttcagtttcaatcatttctacaagttttatttttagccatttgtacaataaaatttgggatgtaataatggtgccaattacttaaagtgtgtactgtgaagagataatgggaaaggttcatttatcttattcatgtctcatctcctaccccctataccaatgttcatttgtttctaaaaaaaaaaaaaaaaaaaaaaaaaaaaaaaaaaaaaaaaaaaaaaaaaaaaaaagaaaaaaaaaaaaaaaaaaaacaaaaataacaaaaaccaaaaaaagcaaaaaaaataaactaacaaatagggacaccaaaaataa

SEQ ID NO: 14305 - DNA, 601 bp, Gossypium hirsutum
  unsure (1)..(601): unsure at all n locations
  Clone ID: LIB3543-028-Q1-K6-D8
gcgttcgcttgcccttgtcaaantacaccaggactacagagttggttatttgaaggtatgcatgttaaaaactttatttatgagtttcactctcgtctttaatcttgtaacccttgcttttgattgtttctttgactgcacatataatacaacttacataatgtattaataattttgcctctatgggttatcagatgaaattaactttgcatgttgcatattaccatgccatctgaagttaatatctttatcttttgttctttttccaggtcttcaccttagagtattctctaatatgcaaaatttcagattacaagaagctttatagagcattctctattttgggtatagtttttagttatagtatgtatttagtatttaaagataaagatatacactgattctataggtaaaagtaggtttctcaacttcccaataaaaaagagacagtttatggagcattggacaaatgggtagcttgggagactgagtttccattgattgcagctgtaaaagctttacaaattttcaagaagaggagccaatggttgcgtgttattcaagtatattcagtctattggtattcttactttgtattttc

SEQ ID NO: 14306 - DNA, 420 bp, Gossypium hirsutum
  Clone ID: LIB3148-049-Q1-K1-H10
aaggaaaagggaggaaggttgaggagctactaaaacgatgcccaaatcttaagaaaattattatttttagggttatttcaaaagccaagccacacaaggaatgccagggaagtgtatgcagtatccattgttggtccttttcctattgctgtaactaatttattggatttaacaaataggtagcttgggagactgagtttccattgattgcaactgcaaaagctttacaaattttcaagaagaggagccaatgtttgcatgttattcaagtatatttagtctattggtattcttgctttgtattttccagcttctaaaatacattcattgatgcaaggaagccttatatgtccaacaaaaaaaaaaaattcaatgaacgacaaaaaacaacgtcgagactggaaaaaccatggcaatacc

SEQ ID NO: 14307 - DNA, 647 bp, Gossypium hirsutum
  Clone ID: GOSHI-09MAY01-C46125_1
caaatatggctatggtgcccatggttctaccagatggccgaataggatacgtcctccaacagccaggagtgcagatgccaaccccacgtcctcgaagagttgatcggggcaatggcccgggaggaggagcagggcgaagtggaaatagtggaggcgttgaaggcaaccgcagtagaaggtacagaccctattagtttgtgggagtgtggacatcaggtagcgcttttgctgggaaacaggagacagacgttgtagttggatgaatggtgaaggggactgtttaaccaccctcttatctctctcgttcactgcctccatacccaaaatcgtggattataaaacgaaattagagagtgaaaacaatgttggaatggggaaatttggagcatcatataaaaaacttaaaaaggtctgtaggagaggtagttgaaattatattgttcgacaagtttagttgtacttggtggattgctttattgttacatagcaggaaacagaagttgggttttgcttttaactctaggggctatatacaggctccactccgtactccatgtttgaagtcgattccttgtagtttcctctgtttcgtggatatggcctaactggattggttttgggtaactctcaacgcaattttttggtgc

SEQ ID NO: 14308 - DNA, 614 bp, Gossypium hirsutum
  Clone ID: GOSHI-09MAY01-C46025_1
cccacgcgtccgatcaacatctgcagaaagctttgtaacaatggcggattggactaagaagaccatgcggagaaacgaagctcttcaaaagtatatctatgaaacaagtgcttatcccaaagagctcgagcaattgaaggaattgagagaagcaactgttcaaaagtataatgatttgagcgttatgaatgtacctgtggacgaagcccagttcttaaccatgcttttaaagcttatgaatgccaaaaaaacactggaaattggggttttcacaggctattcccttcttactactgcccttacattgcctgaggatggcaaggttatagcaattgaccctgataaagaagcatatgagggtgaagaagggagcttcgatttcgtatttgtagatgcatacaaaagcgactacctaaaatttcacgagctgacgctaaaattagtaaaggtcggaggaattgtagcttacgacaacacgttatggtatggatcagttgcgcaatcggagaaagaagtggtggaggatctcattaagaaggtaccgaaattttgtgatcgaattcaatagctttattgcagccgatcttcgagtagaggtaaaaaaactttccatt

SEQ ID NO: 14309 - DNA, 209 bp, Gossypium hirsutum
  Clone ID: uC-gsronu33B086d08b1
ttcctcgcgtccggggagcttcgatttcgtatttgtagatgcatacaaaagcgactacctaatattttacgagctgacgcttaaattagttaaggttgaaggaattgttgcattattaaaacacatatttttttgtttttattattttatctactattatatcatttaatatttatcttcatttcatattaatttttttttctttttct

SEQ ID NO: 14310 - DNA, 610 bp, Gossypium hirsutum
  Clone ID: GOSHI-09MAY01-C46395_1
ttactgcttccttagggtttcttcaacccccaaatggccgccgttcagccttatgccagagccccaatcacgacgaagccggcaacaactaggtgactccaacgaaaggtactgtgtgcggggaaggcgcgagattcgcggcggcgaggggcgcgatgtgcgggatcgacgggcgcaacgcgagggagcagttgcagcaccagctgctgcgacactgaggcaggggctgttagggtttctgaaattctgatgctctttgggctaaggtctaaaaattagttgttgggcctgctactggtttgggcccgtttattggtttgtgcctgggcattattgggtttggacagcatgttagatcaaagaacaaattgattcttctgtcgaaaaatctcatccctttctactgttaaaaactgatcattgtacgtgaaaatgaggtacatgtggcacaccacatgtaactatctggttattctataaaccatgttagtttttaaaaatagaaatgaatgaagtttttaatagaaaaaaaaaaaaaaaaaaaaaaaaaaaaaaaaaaaaaaaaaaaaaaaaaaaaaaaaaaaaaaaaaaaaaaaaaaaaaaaaaaaaa

SEQ ID NO: 14311 - DNA, 471 bp, Gossypium hirsutum
  Clone ID: GOSHI-09MAY01-C46255_1
gaaaatcagaagcctcaatcccatcaaaacctcccttcttctcctaataaatcaatcccagaaatcgaaagcaacgccgcctctgatttctcgggccatcaaagggtccgtttccccaacccacccgacctcactaaccctgacccttctaccctccgagatcaatggaggtacgccatccggcagtacagtcgttggtactctcacgcctggggcaccgctattcttgctggggtttcctttttcgccctcggttgggtcatcaaaggctctaatcccctcccctctttcaactccgacacgaacaaaaatgactccgacactaacaaaaatgacaatagcaagtgatcttccaaccatcctcaatcttctgtggatatgtttggtttcaccacaactgttgaagaggccagtttgatcaaaaagaaagactgaaattggaagagattgtagtgtgtactggcatcatag

SEQ ID NO: 14312 - DNA, 523 bp, Gossypium hirsutum
  Clone ID: GOSHI-09MAY01-C46235_1
gatctgctaaggcctctgcgtgacctcaatgatggacctaacctttgcatatatcttgagagtgcgttttacaccttgcgcaagcctgtggcatccaccatcaatacattggctggcgccctgtacaaggtgttcagtgcttcacctgatcaagcaaggaaggaaatgcgccaagcttgcttcgattatctaagccttggtggtgtattctcaacaggaccaatctccttgctctctggtttgaatcctcgccctttgagtttggtgatgcatttctttgccgcggcaacatatggtattggtcgtttactggttccattcccttcacccaaaagaatctggattggagctagattgatcacgggggcatcaggaatcatcttccctattatcaagtcagaaggagttaggcaaatgtttttcccagcgactgttcctgcatattacagagctccccctcttaagtgagaaacccatacttcctaatctcattagtgttcccccttttctagagtgtgggaaa

SEQ ID NO: 14313 - DNA, 502 bp, Gossypium hirsutum
  Clone ID: GOSHI-09MAY01-C47915_1
cccacgcgtccgaatgtcggccatggaaacgaaaccaagctctaaaattcccctctttttcccaattcttttccttctattatcaactctaacccaacccccattatcatcatcaatcgacaccatcatcatcaatggcaaagacccatcaatctctttacggcgccgtattctattagcttctcaaaggaacaacaagatgaaccacatccctaattgtggcgaaagggtgtcgagatctcagtgtttacaaaacccaaagtgtcgatggtgtcgtagtgaagctcttgatgatatgtgctttaaaaaagctgaagcttggcgattgcctcaacaggttctttctttgtaattgatattcgattttaggttatttgggaaatgaatttgatctgaatttatgatatggttttttggaaattttcgtactgtttgattgggtgatttatggtggatccttttgaatggatttaaaatttttgcgggttttagtggaaatttg

SEQ ID NO: 14314 - DNA, 486 bp, Gossypium hirsutum
  Clone ID: GOSHI-09MAY01-C47925_1
gacccaagaacaaaactgaactgcgggcaaagatgtacagcgagtgcaagagtgacagaaaggatccgcaaggctcttgaagcttatgatggtgagccccctttgaatgtccagaaataccttcttgatgagtgcagaaagtggaatctagtatgggttggaaggaataagggtgcgccactcgaagctgatgaggtggaaaggcttctgggtttccctaagaaccatacacgaggaggaggaatgagtcggacagataggtataaatcactgggcaattcattccaggtcgacacagtggcttatcatctttcagttttgaaagacatgttccctggtggtatcaatcttctctctcttttctctgggattggtggagccgaggttgccctccaccggcttggaatacccctgaagaatgttgtatcagttgaaatatctgatgtgaatagaaacatagtaaggtggttggtgggagcaaactaa

SEQ ID NO: 14315 - DNA, 993 bp, Gossypium hirsutum
  Clone ID: GOSHI-09MAY01-C47555_1
ttttctagctaaactgctagaaacaaaactactgcagcttctgcgattcaaacatggccagatctactctgcaagtgtttcggaattcattcatggtgatctgccatgtctaacccccgcgcgtccgcccgcccgtccgatcgatttttcctgtgatccaaaaatctccttgaagctggttgatatggctttgaatgaaatattacgtcttcaagaggagggacctgcagatcaagatgttgaaaccatactcgaaatcgaacagagagcccatgaaaatggattgcaggagaactattactggcttaatctgattctcggcagttatcagtcacggatttattccggcgatatcggaacttctttcaagattctagatgaaacgcgttcgaaagttagaaattcgctgacaccattaacgatgcaattggcgctacggcggataatgcctcgcaacaatccgcacactgttgtgattctaatgccccaaacatcatggcttaagaggataaagtcattttcacaatggacccttcatgggatcgatatgaagattttagcagccattgctggtttcacagttttagctctcagtttgaagagatattcaaagagatcttagaaggaaaaaaaaactgcacacaaaatgcttccagcaagttaataaatgtgaagaaatagggtttcatttccaccatattgatattcattaccagagagattgaatggattcaacaacttcgtgtaatttttttgtgtcgggatcgtatttgtagtttcgatatttttccagtaatttgtattgtgtaattcttttaagacattagcgtattcatatcgtgtttgtattattctttcgtgtggggtttaatagtcaggtttagccaaaaccatgaatttcatactcattgtttgtagtaattctttcatactgcaatatcatactgataaattttaaaataaaataatgaagcatatatttgtttggctatg

SEQ ID NO: 14316 - DNA, 379 bp, Gossypium hirsutum
  Clone ID: LIB3493-016-P1-M1-F2
ggccagatctactctgcaagtgtttcggaattcattcatggtgatctgccatgtctaaccggagatattggtggtgacattcaaatcgatttttcctgtgatccaaaaatctccttgaagctggttgatatagctttgaatgaaatattacgtcttcaagaggagggatcttcagatcaagatgttgaaaccatactcgaaatcgaacagagagcccatgaaaatggattgcaggagaactattactggcttaatctgattatcggcagttatcagtcacggatttattccggcgatattggaacttctttcaagattctagatgaaacgcgtttcaaagttagaaattcgctaacaccattaacgatgcaattggcgc

SEQ ID NO: 14317 - DNA, 717 bp, Gossypium hirsutum
  Clone ID: GOSHI-09MAY01-C47565_1
gctggctccagttccttggataaagaacaagcttcagaagtttcggaagaatgatatgctccagttggtcccagaaaatactgaagagtacccattggaaaatcagaacctgaataatttgcggagaccgctgatgcccagaaagtttatttgactctcctaggatgggtgacattgacattccgggacaggatctttccgtctatcctatcagcagccggacctcacctatacccaagcagaaatttgactttgcgcagtattatgcatttaatttgacaatatttgccctgaccttgatatattcttcatttgcaccactcgtggtgccagtgggtgcagtttattttggatataggtatgtggttgataagtacaactttctgtttgtgtatagagtccggggatttcctgctggcaatgatggaaggctgatggatactgtgttgagtatcatgcggttctgcctcgacttgttcctcatctcgatgcttttgttcttttcagtcaaaggagactccacaaagctgcaagccatatttactcttgggtttgctagtaatttacaaactgttaccttctgatagtgatagttttcaaccagccctttggaaggcatgcaaaatatagacagcattattgatggaccgattgattatgaggttttctcacaacctagattcgattgggatacatatagtttatgattatcaagtc

SEQ ID NO: 14318 - DNA, 657 bp, Gossypium hirsutum
  Clone ID: GOSHI-09MAY01-C47535_1
ttttcgcgtgggcggacgcgtgggcggacgcgtggggtaagttcgggccaattaagagcttgagctgactctggtatttgtaacgctgtatttgtttaacgagccatggagatttggttggtattttagaagacaaatcccataaggatgacaatatacgagcaactaaaccaaataagccggtggggagactcattcaatcgtggtgatagtccaaatacaggatcatccacaattgtagagggggatgttaggctagagaacaaggctggatatatttcttgtgatcaagttgaaccttcaagaagtgatcaagaaacaaacaagcccattgataagacacagagacgtctggcacacaatcgagaagctgctcgtaaaagtcgtctacggaaaaaggcctatggtcaacaattagaatcaagtcgtttgcaactagctcatctggaacaagagctcgaaagaactaggcagcaggggatatacataagcagtccatcagatactggcgattttggactgccgggaaccgtcaactcagggagtactgcatttgagatgagaatatcgacactgcgttgaggtgcaaaataaacagacttgtgaacttagaagtgcactccaggcacatatcactgatatagagctacaaatact

SEQ ID NO: 14319 - DNA, 718 bp, Gossypium hirsutum
  Clone ID: GOSHI-09MAY01-C47425_1
cggacgcgtgggcggacgcgtgggcggacgcgtggggcttcttcttaagtcttcacaagacaaaaggtttgtatgtgaggcagctgagagagctttagaggtcatgactacttctgtcttccctatgtcgttgttgcccaagttgcaaccctatcttaagaacagaaatccacgaattcgagctaaggcatcgatgtgctttagtcgcagtgttccacgactgggtgttgaaggaattcaagaatatggaatcgacaaactgatacaagtagctgcatcacagcttagtgaccagctcccagagtctcgtgaggctgctcgaacccttctattagagctgcaaactgtatatgagaaatccaatggactctcaacaacaatacccgaacaaccagagatgaactcttgggagcatttttgtcagtcaaaactctctcctttaagtgcacaagcagtgcttcgggtgacaaacatagctcgcgaaggcctcgttattggttcctaacagtgagttcttatatacatgtgtgtagcacgtaatgttatcttcttttttattttccatttacccacatatatgagatttagtgtgcagactgcagggtctacactccacagtcaccttttattgcttgggtttgggtttatctttttttttttaatttttccttgggtaatccccctgaatcatccaaatgtcttcatcgtggtaaaaaat

SEQ ID NO: 14320 - DNA, 639 bp, Gossypium hirsutum
  Clone ID: GOSHI-09MAY01-C47065_1
ggaaggcccgggccgaccgacgcgtccgccgacccgacaactcacacgtggcttacgttgccaagatgactcatgtaaggggcagcaagcctagagagcgtcaagcagtgaacgactgtatagagaacatgggtgatacaccggaccgacttagccaatccgtgaaggagctcagccatatgcgacgagctggaggtgagggtttcatgttgcacatgagcaacgtgcagacatgggtcaccgctgcactgaccgatgagaatacttgccttgatggcttcgcaggcagagtcatggatggaaacgtcaaagttgcagtgaggcgcagggttgtccatgtcgctcaagttactagcatgctcttgcattagtgaatcgctatgctgcaagacaccgagctgctatacctactgagaagccttagtttcaacctttaaaaaatctccggtttatgtaaaaaaactgctctgttttccaaaagtaagggttatacctgtcaggattttgtctaaaaggatctagggcctgcttgaattacatgtaactatatcatataatgaatccaagtgtgtgcttgccttgtatgatagtgaagtaattaagtataatggaataatatgctacttctggttcagcaaa

SEQ ID NO: 14321 - DNA, 743 bp, Gossypium hirsutum
  Clone ID: GOSHI-09MAY01-C47025_1
ccaattcgctgctgcttttagtttccctagaaaatttgcagtttgtttgagttcatcttcaggctccaatggtgtcgtcatctttggcgatgggccttacaatctccttcccgatatcgacgtctcaaagtctctcatgtacaccccactcattctcaatcccgtcagcacctcaagtgcttcctttcaaggtgatccatctgcagactacttcattggagtcaatggcatcaccattaatactaaaccagtgtcattcaacaaaactttgctttccatcaacaaagaaggccaaggcggaaccaagatcagcactgtcactccctacactgtgatgcaaacatcaatcttcagagcagtagttaatgcttttatcaagcaaacttccaaggttgccagggttccagcagtggctcctttcagtgcatgttacaatgctaaaagccttggcagcactcgcgttgggccagcagtgccacaaatcgatctcttgctaccaaacaaagtggtatggagaatatttggagcagactcaatggtgccaggcaacaaggacgtattgtgtttagggtttgtagatggaggactggaacccacaacgtcgatagtgatcggagggcatcaaatagaggacaaccttctgcagatcgatctagctgcatccaagcttgggttcagttcttccctcctcttccgtcgaacaacatgttccaacttcaactttacatcaactgcttaaaggg

SEQ ID NO: 14322 - DNA, 661 bp, Gossypium hirsutum
  Clone ID: GOSHI-09MAY01-C47385_1
gcaaagaagcaacacggttcttcaacctaacaaaaagatgtatgcatggtgtgccttgttgttttaggactgtaagctcctataactggcatcttatttccaattatcttgtttttcaggggtccacttcccatcgaaaacattgtgggtagatctgtatttcgctattggcctccatccaaagtttcagccactatatatgactcgaatgtggggaagaatgctgtagcagtttcttgacacctgaaataacttgaaagactttatgtgagtctgagctgcagcgaattcgcacctggatttattgccatggtgcatgttttattatggataatccattcatcatattcgttgtttttgtaaatttattgacggccaattgtaggccactcacaatttttcctgtaattagagtgtcaaattttctttgacaaggatttgggcatcccttttgtactgaactgaattgagaataatctgaggtcttaagctgagtaaaagcagagataggagattgttgaagaaaggggttaggtgatggtcaatgtttgtgcaggctgattcccaactttggtgggcctgtgaatgtaatgtcaatcccatatttggattatgaactttatcttcatttgtaataaggaaaatacctttgtcttgttcc

SEQ ID NO: 14323 - DNA, 557 bp, Gossypium hirsutum
  Clone ID: GOSHI-09MAY01-C47345_1
gggaacgcgtattaccccaatggtgcaatggcctgacaaatcatttacactgggtctttcacaagcgctggcttggaagcaatcagggctcatgatgaggccgtccgttcaatttagcttgtttccaacgtttggtggaagtaatccggggttgcggacggaagttattcacacggtgaaggaggatctcaatctgatttgtggttgtgctctggtgccacatccttccgcatttgcatcaatatcatttgggcgctctaagtggaacggaaatgtcgggaagtcagggatggtagtaggagtagacacgcctctttccagtgttggccgcccatccttttccgttcagataaacaacgttatcgagttctgattgttgggcggccaacacctgctgttaaagtgtatagagacaattgcagataaataaacaataccacgtgtgaatacccaaatgctacttgtgttaactacattaatctctgatccagctttgggggttcctgtcttttcttctttttgtttctaatcttttatcatcttctttttcctgattt

SEQ ID NO: 14324 - DNA, 569 bp, Gossypium hirsutum
  Clone ID: GOSHI-09MAY01-C47315_1
cggacgcgtgggcggacgcgtgggcggacgcgtgggcggacgcgtgggcggacgcgtgggtcatattcgaaatcttcgaaatctctctctaacatcttaacatacgattttggttgtgtgggagagagagatggacgcccttgacaacgtggtagatcctttgagagacttcgccaaggacagcgtccgcctcgtcaagcgttgccacaagcctgatcgtaaagagttcacgaaggtggctttccgtacagcgatcggtttcgtagtgatgggattcgtcggattcttcgtcaagctcatctttattcctattaacaacatcatcgttggctccgcttaggaattgcaggctcgtagaaattggtgggggatatgaccagttggcgtagttgcagattctcatagaaaatgaatgttagaatgcagcagttgggggccaactgctgtccctcttcccttctcattttacattttattagttgaaccaaatagtcttgaatctaaactaaactctcttggaatttctttgagcactttgtaatagattatggttaatttttgccaaaaaa

SEQ ID NO: 14325 - DNA, 711 bp, Gossypium hirsutum
  Clone ID: GOSHI-09MAY01-C40515_2
ccccgcgtccgaggaaagatttttgtgtttttttggggaccaaaaccaaaaaccttttacataaatggaacttttttgaaaaaaaaaaaagaactcatccattttcatttctattttttcttcaattatctcatcacttgttggaaaaccaaccaaatcaaaaaaaaaaaaaaaaattctttgatttgattgatccatagatctacatgaagtttctagcttttttcaattcccggatcttctttttttcaagtatgaaccaaagttgtcaaatttaaaagcaaggagcaggtacggtggtacggttatgactttttaagacaagctgagaaaaacaagtgtttttagtgttgtgttgaagcaaaaaaggaggatattcggttttttaggggctagtttttaaatgagaatttggaggtttttgtggatgaaatgagggatgttatcagggttaatgaatttattgagggcttgttttttaccgagatctgatagacacgttcacaccagttcccaaaccggaggtcgacaagatggtcttttatggtacaaagattcagggcagcatttcaatgggtgagttctcatatggcagtggttcaagccaacaatttgcttgaagaccaaagccagctcgagtccggttgtttgagtttacacgagtcaggtccgtatggtacttttgttgggtgtatatgatgggacacgttg

SEQ ID NO: 14326 - DNA, 1744 bp, Gossypium hirsutum
  Clone ID: GOSHI-09MAY01-C40515_1
gtttctagcttttttcattgggattgctggggggggagttgaactgaagtggtcaaatttaaaagcaaggagcaggtacggtggtacggttatgactttttaagacaagctgagaaaaacaagtgtttttagtgttgtgttgaagcaaaaaaggaggatattcggttcgggtttcgggttgttggggggtctactttttaaatgagaatttggaggtttttgtggatgaaatgagggatgttatcagggttaatgaatttgttgatggcttgttttttaccgagatctgatagacacgttcacacgagttccgaaaccggaggtcgacaagatggtcttttatggtacaaagattcagggcagcatttcaatggtgagttctcaatggcagtggttcaagccaacaatttgcttgaagaccaaagccagctcgagtccggttgtttgagtttacacgagtcaggtccgtatggtacttttgttggtgtatatgatggacacgttggcccggagacgtcccggtacatcaacgatcatctctttcaacatctcaaacgattcacttcggagcaacaagggatgtcggttgatgtgatacgtaaagcatatcaagcaacagaagagggttttttgtcactcgttaccaaacaatggcctatgaaaccacaaattgcagctgttggatcttgctgtctggtcggtgttatctgtaacggaactctttatgttgctaacctcggtgattctcgtgctgttttggggagagctgtgaaggcaacaggggaggttctagctattcagttgtcggccgagcataatgtgtgtatagagtctgtaagacgagagatgcaatcattgcaccccgatgactcacaaattgtagtattgaagcataacgtatggcgcgtaaaaggtctcatacagatttccagatcgatcggtgatgtatatttgaaaaagacggagttcaacagggagcctttatatccaaaattccgccttcgtgaaccttttagaaagccgatattgagtgcagacccgtcaatatcagtgcacgagctgcagccacatgatcagtttgtgatatttgcatccgatgggctttgggagcacctaagtaaccaagaagctgtcaatatagttcaaaatcatccacggagtggaagtgcaaagcggctcgtaaaaactgcactacaagaagcagcaaagaagagagaaatgagatattctgacttgaagaagattgaccgtggtgtccgccggcatttccacgacgatatcacggtaatcgtggtgtttctcaactcaaacctcatgagcagggctagctcagcaaagggccctaatctatccgttagagggggcggagttaacttccctccgaatatactagccccgtgtgccacgccaaccgaacccggcggcacctgatcatatatatatctatgtcgtgttttttttttcgttgttgcatcattttcttatgtgaatacctggtagcttccgaaaagcgataaaaaccggaacaagccttcgattctttgatgtacaccaccgttacttttaaccggaaaaactaatacctgcatttagttttcgtctatgttgaaaaactcgaaacaaacctagagaaatagtacaaggtgttgattgttatagttatttctgggatagtttttttcttactcttttatatatataaataatatatactctcctttttctcctcaaaaaaaaaaaaaac

SEQ ID NO: 14327 - DNA, 687 bp, Gossypium hirsutum
  Clone ID: GOSHI-09MAY01-C40475_1
ggcgagactggaaaagtataccgagcaaattttcacgaccgagacggtaggactgttcttatattgcgaccgggaaaacagaacactacatccttagacaatcagctccgtcatttggtgtatatgattgagaatgctatattaaaccttccagagggtcaagaacagatggtatggttgatagatttcaccggctggagcttgagcacgagtgttccgatcaagtccgctcgcgacaccattaacgtgttacaaaaccactatcccgaaaggttggcgatggcggttctatacaatccgccaagaattttcgaagcattttggaaggtattaaattctaatgcattgtaaaacaacatttctgaattcttgagtgtcgaatgtcacttaaatggagataacatcagtgcatttacaccagcattatcacctgttatggtcaattgggcaactcgggttttttttagtaggtattagattttcgggctcagataatttaaggtctaggtttgatactaagagttcaaatcattttaagttaagtctcatttcaaatatctggagtattttttaattggttaaaatgtcataagttctttgtactattcaaaaattcagaattttatttcggtatttttattttcaagaatttagtccctttacatttttgatttaaaaaaatgggtt

SEQ ID NO: 14328 - DNA, 495 bp, Gossypium hirsutum
  Clone ID: GOSHI-09MAY01-C40725_2
acctacgcttacgcttgcgcgcacgtcggcttataattaatgactgcttgatagcgccaccgagtatcaacatcaacgctctacaatgtccaacaagctagaaggcaaggtagccataatcaccggcggtgcaatgcggcatcggtgcagccaccgtccatcatttcgccgtccatggtgcccgtatgatcgtgatcgctgatatccaagatgaatgaggccaaaaaggagtcgaagccatcggttcaaataagtgctcatacatgcaccgggatgttaccgatgaagaacaagtaaaataatttagtccaatcgacggttcaaaactaccggagcctcgacatcatgtttagtaaccctgggacagttagcaactcaattcaaaccgtccttgaactagacttcgcagcgtttgaccgccttttcaccgacaatgtccgcggcatggctgcttgtgtgaaacacgccgcacgagccatggtggaactgaacgtg

SEQ ID NO: 14329 - DNA, 850 bp, Gossypium hirsutum
  Clone ID: GOSHI-09MAY01-C40725_1
cggacgcgtgggctaacgatgctttcagctttgcttataattattgtctgcttcatagcgtcaccgaatatcaacattaacgctctacaatgtccaacaagctagaaggcaaggtagccataatcaccggcggagcaagtggcatcggagaagccaccgtccatcgtttcgccctcaatggtgcccgtatgatcgtgatcgctgatatccaagatgaattaggccaaaaagtagtcgaatccatcggttcaaataagtgttcatacatgcactgtgatgttaccgatgaagaacaagtaaaaaatttagtccagtcgacggtccaaaactacggcagcctcgacatcatgttcagtaacgctgggacagttagcaactcaattcaaaccgtccttgaactagactttgcagcgtttgaccgccttttcaccgtcaatgtccgcggcatggctgcttgtgtgaaacacgccgcacgagccatggtggaactgaacgtgagaggaagcatcatttgtacggcgagcacgactgctagctgcggtagtgaaagggacactgattataacatgtcgaagcatgcggtgattggattgatgagatcggcaagcaaacaacttggagagcatgggattagggtgaacagtgtgtcgccgttcattgtgggaaccccattactctatcattacctggggacggaggcggaggtggagcagttgtttgagccctacgcacggttgaaaggggtggtgctgaaagcgaagcatgttgctgatgctgtggtgtttcttgcgtcacaggactccgaacttattaccggacatgactcggtggtggatgctggttttcttgt

SEQ ID NO: 14330 - DNA, 424 bp, Gossypium hirsutum
  Clone ID: GOSHI-09MAY01-C40695_1
ccaaattatgaaccgcaagatagtgagaagaaaaagatgagatctccctttagttgccgagcttcagtgtcgaagcaacagaagacttcacatgaatcaccttcaagaggctgcttgccaccatcgtcgaattcgaataattcaaacaatgttttacattgaaaggaaaggtggggttttcttttcgttggcattttgagtgcatcccaagcaacctccaaagaaaaaaaaaaggaaaagaaaggcattaatgtttgaagatttcttttggtgttgtgttcttgttcctttaggatgttgtcttgtttataacacaacaccaatgtgctttttaggtccttatttggagatgttgatttattcctttctgaaaaagcctaataaatgcaagtttctaaattaatgtattttattttatttttta

SEQ ID NO: 14331 - DNA, 583 bp, Gossypium hirsutum
  Clone ID: GOSHI-09MAY01-C40185_1
gcgtatcacaaaaaaactaagagggctccaaaggtggaagttgggaccagggctcccgatgcttcactggatgaatggcttcagggaactgcttacactcagtcggcttccaaatcaaagaagaagaagtagacgagaaaagtgatcgctaaagtcgggctattgtaactcttgccaaggcatttggaaaaattgtaagtgagggcggaggtagttctgagaattaggccaggaaaatagacatatatacctttgctgttgtagcatttgaactttttcggttttcactacatcttttcttgaggatgcttaaatcgaggcttgtccgagcgaaactaactgtgatacgaggcaggactaatgggaccccttttttgttgctcggtttctttgttcatcggatttcggatttttggtttctgggttaaacttaagtattatcagtgtggtggtggtgtgttagaaatcttggtcacagctgctgtcacgttttcactgctattgggaagtatacattaaattcccttgttatgtttcttttgtaatcgatttcaggtttaaacagaaaaaaaaaaaaaaaaaa

SEQ ID NO: 14332 - DNA, 600 bp, Gossypium hirsutum
  Clone ID: GOSHI-09MAY01-C40045_1
ttcagtcccagaactgctgccagttgttacaaccgcaatggtaatgacattcttaggcagagcacaaatggtaacattgctgaacctattaacatggagttctcggatgctacatcaagtgattggtcccttttcacaagctcagacgaggcatctttcacaacggagagtgctagagactcattcagtaccggagattattgccgatgcaatgcatatggagatacctgttctcaatcttcaataactggatcaacgcgcggaatcctcctcgtacaacacggtttcttgtagaatgttttctactagtagaccctatactcgatttgcgttagaggagacaggttatgtttacgattcgtactcatctatgcaacccgagtttaggtttcatgagaacctggaacaggttagtgattcgttgtcggaattttctttagctagtgactatggcttgtttgtaaaatatgggaacaacccgaaaaatagtcttgatagaactgctaattatgaaccctactagttcatggaaattcctactgataattgttttactccatttttgggtttcaatgctttgttgatcacatcaaaaggatg

SEQ ID NO: 14333 - DNA, 411 bp, Gossypium hirsutum
  Clone ID: GOSHI-09MAY01-C40075_1
caactcggaagcagcgatccaaaagaagcatgtgaaaaacgagactgtagagacttgagagacaaaagtgtttgtatatgaggtaaaattggattagatggagtgtgttatatatatatgtatatgggactgagtgaattttgataggtattagcactcgggtctctaaaagccagcatggttagtgtaacatcatcacccagttttatagggacaagattttggatattatctcaaacgttttaaggcctattaacttatggcgtaaattttaagcccaatccctatattattgtataaccatagatacagcccttaatctttaccattttggttaatttagtctgtaacatttcccttttatttcttcttcaattctatttagattctaccagaaagcaatttccaaaa

SEQ ID NO: 14334 - DNA, 520 bp, Gossypium hirsutum
  Clone ID: GOSHI-09MAY01-C40395_1
gagggctccagcagctatccatttcctttgctggagagcttcccagtcctttaaagtttcattaaataaaccaattttaatgtcgtcgtcctcgctctctaatcccgctctctccactcctttcatcggccacaaccttcgtctaaatcagaatacgaaggatgggataaattgttttccctctcttagaaggcatggagtcccaagatgtgcagtggatatgccttacggaggtaatgctccaacttttcctcgaataagagtctgggatccgtataagcggctcggcattagtccttacgcttcagaggaagaaatttggtccgcgcgcaattttctcttagaacaatatgccggacatgagagaagcgaagaatcaattgaagcagcattcgagaaactacttatggccagcttccagcatagaaagaaaacaaagattaacttgaaaagtaggctaaagaagaaagtagaggagtctccaccttggataaaaaactgctcaattttgtcgaacttt

SEQ ID NO: 14335 - DNA, 284 bp, Gossypium hirsutum
  Clone ID: LIB3585-044-P1-K1-A7
acgtccacgcgtgcgctgggatccgtataagcggctcggcattagtccttacgctggagaggaggaaatttggtccgcgcgcaattttctcttagaacaatatgctggacatgatagaactggacattttgtattgcattttttaattactgtaagagaatctccttcaaagataactgactgccatcccttatctgatcctatatgaactgttgcccggcaagctactacttccacagtaaacgcagtggtgatatcgttgtggatctttgaataagataaca

SEQ ID NO: 14336 - DNA, 401 bp, Gossypium hirsutum
  Clone ID: GOSHI-09MAY01-C40285_1
ggtggatagcctatcagatcttagttttgattttagtaggagatagtactgaacttccatagtggaaaatgagtcgaccaatggaggaagatacagtcaagaacgaggaagaggaatttaacactgggccactgtctgttctgatgatgagtcgtgaaaaataacacccaggttctcatcaactgccggaacaacaaaaaacttctaggccgggtgagagcctttgatcgtcactgcaacatggttcttgaaaatgtctgggagatgtggactgtggtgccaaaaactgggtaaggcaagaagaaggccctccctgtttacaaagacagattcatcagtaagatgttccttaagggagattctgttataattgttctcagaaatcccaagtagagtatcac

SEQ ID NO: 14337 - DNA, 851 bp, Gossypium hirsutum
  Clone ID: GOSHI-09MAY01-C41915_1
agagaaagtcctccgtatttatgacttgaatcgcccagatgcacctccaagagaagtggacggatctcccggttcagtcagaactgttacatggatgcatagtgatcagacaatattaagttcttgcactgatatgggaggtgtcagattatgggatgtaaggagtggtaaaatagttcaaacactagagaccaagtcatctgtgaccagtgcagaagtgagtcaagatggtcgatatatcacaactgctgatggatctaccgttaagttctgggatgccaaccactatgggttggtaaagagctacaacatgccatgcacagttgaatcagcttcattggaaccgaagtatggaaataaattcgttgccggaggagaggatatgtgggttcgtgtttttgatttccacactggagatgagatagcatgtaacaagggtcaccatggtcctgtgcattgcgtgcggttctcacctggaggagaatcatatgcctcgggttcctgagggatggaacgattagaatatggctgacaggccctttgactcatgatggcactgaaccatttgcagcaaatgggtcggttggaaaggtgaaggtaactgcagaagacgtttcacgcaagatcgagggcttccagattgcagaagagggcaagactaaagagaaagaaacaggaaaggagtaacaatggtgaagatttctagctttatcttcacggtcaatgcttattaccgcatttatccaagatcttcaagacaacttttttttaatcagagatagaagtagaccgaactgtattttgataaattctagtcttcttgcttttagcatacgtagactaagtccaat

SEQ ID NO: 14338 - DNA, 537 bp, Gossypium hirsutum
  Clone ID: GOSHI-09MAY01-C41855_1
catggtgaacatgtgggccataacccatgaccccaaagtgtggaaagacccggtcgagttcaagccggagaggttcctggaagctgaggtggacgtaagaggcggtgacttgaggctcgcaccctttggggctgggcgcagggtttgccctgggaagaaccttgggctggtgacggtccaactgtgggtagccaagctgatgcaaggtttcaagtgggttcaagattcggtggctcacccggtcgatttgagtgaggtcctgaagctgtcatgtgagatgaagttcccattgcatgctattgctgtggaaagagaggatacccttttgccttagcctacggttttagttttctagggtttaactgttatcatcgttcttggttttatttagtgtgttcttttttgtttctgtttttttgagattgtcctatgtgaaactgtatatttagtatagtgggtaaacgaatttccctgcaggtatttgatatttaggctttgggattggaatgagttttcgtgggctccttaattataatt

SEQ ID NO: 14339 - DNA, 332 bp, Gossypium hirsutum
  Clone ID: GOSHI-09MAY01-C41425_1
ttctctcgtccggtagccttttgtccgggaaaaatttgctgcaatagtatttatagtcaactgttgtgactgaagaattctatttgccctttttcttattccttcgcagtagggcttaaggaagattctttttcccccttgttcaatggaaaggcatcattgcttgcgaagcttgtgccatcattttttttttattttcccggatcataaagaaaatactgttaccatttcccataaaaaaataataaaaaaataattaataaactatatttattaaataataaaaaaataatattaattaaaataataaaataataataaatcacaataag

SEQ ID NO: 14340 - DNA, 668 bp, Gossypium hirsutum
  Clone ID: GOSHI-09MAY01-C41795_1
tcgatcgagcagaatggtgatggggattctataacatttacggaatcagtgatttcaaaccttcagctccagtttgagaaggttgccgcagaagtgggtttgaatagcgatgttgcaactgcctgtgatttaccaaaagttaatggtgctgtctccaagaagagaaagagagcaaagggtgcgagtggccgaaaacctcagaatggggagctaactggtgaagctgatggtgaaggagatggaactgcgaaaacttgcgagaatagcacaaagagggtaagattttcaatgaaaagcaatctggtttggaagccccacagtcctttacctccattaagggggaggttacctccctctgttactcctagaggaagtgctcttaagcaaggaattcctccaggtcctataaaggaaatggctcctatgactaagaagggaaagaaagctaaatctgtgaagaaggctcggaaagtgataaagagtatgtatcctctagtcaaacgcacaaagaaattgaaatctacttcctcttagcagagtctgctcaagggaaatgcctcctatgtataagatggcgaagaaaactaaatctgggaagaatgctcagaaagtggataagaatgtgttttctctagtcaaacgaacgaaaaaaattgaaatccatgccc

SEQ ID NO: 14341 - DNA, 804 bp, Gossypium hirsutum
  Clone ID: GOSHI-09MAY01-C41775_1
ctggagatcgttcgaagaaatcctggacccaagtggagacggggtctgctattacttggaaatacccaagtgttgttttggaaggtgataatacggtgggcgagttttactctgtagcactcacaaataactatcagcaggcagacacgggtacaaaaatgatacacaaagggaagaatacaagaagtaggattatctcaaagggtatttctgttggacattcaagaaactgttatagggggcttgttcaggttcaatcaaaggcagagaatgctagaaattcatcacaatgtgattcaatgcttatcggcgataatgctgctgcaaacacctacccttacatccaggtcaagaatccatcagctcgtgttgaacacgaagccagcacctccaaaattggtgaagatcagttattttactttcagcagaggggaattgattatgagaaggccatggctgccatgatttctggattttgccgtgaagttttcaatgagcttcctgatgaattcggtgctgaggtgaaccaactcatgagtctgaagctcgagggatccgtgggttaagtatgatgaaggttttattcaaccgaggccatgttggacaatgaaataattttgtcaatgaaatcaataaagttcaagctcttagcatctttttacaaatgactagttagctgtaatgtactttgctgttcctgaagtgctgtttagtgtatttcctggaatatacctctgtgtatatatttgatctcttaaaccatgaaaaactgtgttacatgcataaataaaaaataaaatataa

SEQ ID NO: 14342 - DNA, 557 bp, Gossypium hirsutum
  Clone ID: GOSHI-09MAY01-C41765_1
aagagatggtggtaacatgtctccaccctaatctaaacccttgctttaaacccttaatttcattcccttctcaaaaccctaactctttcccttttaaatctctcattgcttcccctaaaacctttagtttcgctaaacccataatctctttacaagtcaaagcaaattctcctgctctttcagatgaactgccactggatgcttccccttctcaatcttcttctggtaaagagaagcttggagtggtggtgaagccattagagaagccacgggtagtattgaagttcatatggatggaaaaagatatagggatggctcttgatcaagtgataccaggccatggttcaatccctttgagtccatattacttttggcctagaaaagatgcttgggaagagctcaaggttttgcttgaaagcaagccatggatatctcacatgcaaaggattcaccttctcaaccaagctactgatatcatcaatttatggcagacaagtggtggtaatttaacctaaagtgtttcaacttacaaagttttgttgcaatctcttcatgtt

SEQ ID NO: 14343 - DNA, 574 bp, Gossypium hirsutum
  Clone ID: GOSHI-09MAY01-C41155_1
gttcctagataaatttgagagaaaattcgtgacgcaaggtgcttatgatactcgcaatatcttccagtctcttgatttagcgtggactttgcttcgtatcttcccacgtgaactcctccaccgtatacctgcaaagacccttgaccagtattacagccgtgatgcaacaagctaagctgatgaaagctagtctgctctttgcttatctacatatatgtcaattttcatataagtcacccgtgggttgttttatttgccaacgctgcttcatggcctcgaccagaatcaaatctcagtggacggtatctctatgattgcatatgttacttcgggttcccgtttcattaaagttcggggcatgtgattattgtagtagtaagtgcaattctttgtgttggggaccgccatgcttttgtggggccattattttgtgattcaaaaccagctgttaagagttgaattgccaggaaagaatcggaataagttacagattttgtgtgttatgtattaaaagtctggtggcaccgtactctgcactagctacttagcaatttcggatatcgtttgggatctt

SEQ ID NO: 14344 - DNA, 895 bp, Gossypium hirsutum
  Clone ID: GOSHI-09MAY01-C41145_1
catcaacaaggctgttgtcgcaataatctgcccatgatcgtgaaggcagtggggggtcaggtttttgtgcttggggggggtgtccgtccgcccgggcccgtcaatgcccgtcggagctccgggttggagacggtgacgcttgcaagagcgcgtgtgaggcattcgggagtcccgagtattgttgcagtggcgcgtatagcacacctgccacatgtaagccttcagtttattctgagatgttcaaggccgcttgtcccagatcttacagctatgcatacgatgatgctacaagcactttcacgtgtactggagcagattatacggttaccttttgtccctcttctcctagtcaaaaatcttcgagagatgctacgccagctacagaagctaccccagtgacaggctcaacgtcacaagggtcagggacacagcccgggtttacttattctggtaatggatatggatattcggtttcagggtacggataccctggttcgggttcaagtactgggtcaggatctgggcaaaccatgttgacagatggatcatggttagctggtttggcaatgggagattcaccaagaacaataccatctcccacttttctagtaccatttgcactcatggcatcaacagctttgtgtttcttgttttcattagttcacttgtagcccatccctatccttttgtattatggcttttgttaaatgtgaattctttacagatccccccccttgatgggtaaaaatggggttttggcctttgtttgaggaaaaaaaagctgacagattcttggtccagattgtaaaccatcatcagcttcaagattccccaatgttatataaacatttaaaactgtggtttctctaacattctgggatttagagatattttg

SEQ ID NO: 14345 - DNA, 584 bp, Gossypium hirsutum
  Clone ID: AW187212.1
gtgtctccatcctaatttaattccacttctaatcttaggaattcggagaaatcaaagatggtggcaattgcgtaatacattcttgtatttgaagccgccgattaaaccgaagctcgtgacactttcattcaaatgaatatttgtcgctgagacaaaaccctctttctattaccaggttgaaatagacaggcgttactaatagtgtccaccgaaaattgggaattgcatcagtgtccaagacatgggatctcaagaaccaaaggctgtaactattaatgtaaccggatttaagaagtttcaagggattgctcataatcccacagaaactatagttaataacctcaaaaatttcgttgaaagcaaagggttgctgcctgctggtgttacattaaggagttgcactgtccttgagactgctggcaatggtgctcttcccgtgcttctcaaggtcttggaatctggcatctcagggattgacaccaaaaacgaacttgttatatggcttcacttgggggttgatggcggagcacaaaaatttaccctcgaacagcaggctgtaaatgaaacttctttcttttgtcctg

SEQ ID NO: 14346 - DNA, 429 bp, Gossypium hirsutum
  Clone ID: LIB3147-037-Q1-K1-C9
tcaaagtgtatattgaaccatgcggtaaatttgttaattgtatgaggataaattaatgctgatctaaagaacaattggatgttgctattaatgttattcggatctaagataagtcatgggattgaatgtaatgtttaattaagctatgagaagaaatatatgaacaatgtataaaaggattttgtttttgcctgctggtgttacattaaggagttgcactgtccttgagactgctggcaatggtgctcttcccgtgcttctcaaggtcttggaatctggcatctcagggattgacaccaaaaacgaacttgttatatggcttcacttgggggttgatggcggagcacaaaaatttaccctcgaacagcaggctgtaaatgaagcttctttcttttgtcctgatgaactaggatggcaaccaatgcgaca

SEQ ID NO: 14347 - DNA, 405 bp, Gossypium hirsutum
  unsure (1)..(405): unsure at all n locations
  Clone ID: LIB3147-037-Q1-K2-C9
tcaaactgtatgttgtcccatgtttctttcttgttatttgtatgaggatacatgactgctgttctaaaaaacaaatggctgttactactaaatgttattccgatctaaaataattcatgggactgaatgtaatgtccacataaactatgagaaataacacttgaactatgtatagaagcaaatggcttttgcctgctggtgttacattaaggagttgcactgtccttgagactgctggcaatggtgctcttcccgtgcttctcaaggtcttggaatctggcatctcanggattgacaccaaaaacgaacttgttatatggcttcacttgggggttgatggcggagcacaaaaatttaccctcgaacagcatgctgtaaatgaagcttctttcttttgtcctgatg

SEQ ID NO: 14348 - DNA, 442 bp, Gossypium hirsutum
  Clone ID: GOSHI-09MAY01-C41295_1
gagatggtaacaacaatctgttcctatggattgccatggtttgctacatgcatcccttgccccattgtcacgactgaaagctgccccaacactgagctatctggaaactataaaagctttcaatgtccaccaaatcattacaatgatctggcctccctctttctaaatactaatgatgatgctatccgtaacctattgagtcccagtcctacgaaggaatttcatatctcctcccttttcattttcttcattgctatttactgccttggtgttatcacttatgggatagctatcccctctgggctcttcattcctgtcatattggctggagctggctatggccgccttattggtagactttttgaacccgctcactactctcaagttggtctgtttgcccttcttggggcagcttcttttcttggtggcactatgaaaatga

SEQ ID NO: 14349 - DNA, 710 bp, Gossypium hirsutum
  Clone ID: GOSHI-09MAY01-C42925_2
tcgaaccatgccccgacatagcaaatcaactaacttgtcctctagaaatgatctcaacatggctaggcttcccttggggtagcaaatctactaagctagcctatggagattatctcaacgtggctagactttcctagcatagagtatcaactaactggcttctaaagatgatgtcaacgtgggcttctcccagcgtagcggatcgactaagttagcctctcgggagatgatcaggttgatctcggactatggagacttacaaggacgtctgtagagaaagggataatgttagcgggcaccagaggacttccttccgaggcatactccaactcaactcaatgatcagtgaatccttccatttatagccaatggtgaagtaacttggtgccatgtgacgtttcatcattagcttggtgttgaggtatctttctgagatgcattgaaccttggtcaagtggtcttgcaagtgggaaccaggtcttggagggtcttccgtttggggccttgccttgggcctagctttccttggattagtcatgttgggtgctctggagatcatcttgagggttttggttgtccgttaccttctgcgatcaacttttattttcatctcaacaagaaccataaaatatttaaagatatcaacttttttaaatagtaaatgacatttttaaaattgtaaatgttaattatcttaaagtttgaccttc

SEQ ID NO: 14350 - DNA, 489 bp, Gossypium hirsutum
  Clone ID: uC-gsflnu33B141b01b1
atgaattgaaaagcatcttctacccctctgggcaatttttcttttcttgcattaagttatacctgatcattgagttgagttggagtatgcctcggaagtcctctggtgcccgctaacattatccctttctctacagacgtccttgaagtctccatagtctgagatcaacctgatcatctcccgagagtctaacttagtcgatccgctacgctgggagaagcctagccacgttgacatcatcattagaagccaagttagttgatcctctatgctgggaaaagtctagccacgttgagataatctccataggctagcttagtggatttgctaccccaagggaagcctagccatgttgagatcatatctagaggacaagttagttgatttgctatgttgggcatggttttcaagatcaaactattagttaaatcgatcaaatcaggaatttttttggctgcttattcaatagggttttaaaccttatttaat

SEQ ID NO: 14351 - DNA, 452 bp, Gossypium hirsutum
  Clone ID: GOSHI-09MAY01-C42885_1
cccacgcgtcgcccacgcgtccgcagctgcacaacttccaggtgattgggtgtctataggacacagtgagcaatggctttggtattctgtctacgcaagcaagcaagtcagttggcgcacaagggcattggtggtctcagactggataaggcgttttattttcgggagggataccagtggcatttaaaaggtccctgggcaacttacaaacattaagatgtctacagtttgggattgaatgctgtagaaaaattttggtttttcctttaccatttaccaattcattcatttgataataattgctgccttgctttggcggttttgaaatgaattttgttacaagtttatactggtttttgaactttatatctgagatccgtgaaaaatatacctatttgcatattggtatctcttctccaagttcttataattgtgttttcccaaattgaaat

SEQ ID NO: 14352 - DNA, 1575 bp, Gossypium hirsutum
  Clone ID: GOSHI-09MAY01-C42855_1
caaggctgttggacctaatggagaatcccttgatgctgaagaagcctttcgtgttgccgggatcgattcgggtttttttgtgttgcagcctaaagaaggacttgctttagttaacggcaccgcggtcggttcgggtttggcttccatggttctttttgaagcaaacattttagctgttttgtctgaaattttatcagcaatttttgctgaagttcccaacggtccccctgaatttactgatcatttaacacataaatggaagcatcatccaggacaaatggaagcagctgctataatggaacatatacttgatggaagctcttatgttaaagcagctaaaaaattgcatgaaatggacccgttgcaaaaaccgaaacaagatcgttacgcattgaggacgtctccgcaatggctcggtccacaaatcgaagtgatcagattcgcaaccaaatcgatcgaaagagagatcaattctgtcaacgacaaccctttgatcgacgtttcgaggaacaaagcattacatggtggcaatttccaaggtacacctattggtgtttcaatggacaatactcgtttagctatcgcagctattgggaaacttatgtttgctcagttttcggaactcgttaacgatttctacaacaacggtctcccatcaaacctctccgctagtaggaacccgagtcttgattatggtttcaaaggtgctgaaatcgcaatggcctcctattgttccgagctccaatacttagctaatccggtcactaaccatgttcaaagtgccgaacaacacaatcaagatgtgaactcattaggactaatatcatcacgaaaaacagccgaagcagtcgatatcttgaaactcatgtcctctacatacttggtagctctatgtcaagctattgatttaaggcatttagaagaaaacttgaggaacacggtgaagaacactgtgagtcaagtagccaagaaaaccctcacaaccggtaacaatggtgaactccacccatcgagattctgcgaaaaggatttgctcaaagccgtggaccgcgagtacgtgtttgcttacatagatgatccatgcagtgctacttatcccttgatgcaaaagctaagacaagtccttgtcgagcacgcattcgccaatggtgacaatgaaaaggatacacacacttccattttccaaaagatcacagcatttgaagatgaattcaaagctgcattgccaaaagaagttgaaggtacaagggtttcacttgaaaatggaaatgcaacaatccctaacaagatcaagggttgtagatcatatccattgtataaatttgtgagggaagagcttggaactgggttgttgagtggtgaacaaggtaagtcacctggtgaagaatttgataaggtattcatagctatgtgtgaacggaagattatcgatccaatgatggaatgtgtaaagggttggaatggagctccactttcaataagttagtgggcagtgacacatcgtttacctacagaatcactttctatggatcagcagcctacttgtcacccaatgtcattgcgaaaaaatataga

SEQ ID NO: 14353 - DNA, 651 bp, Gossypium hirsutum
  Clone ID: GOSHI-09MAY01-C42405_4
agtcaatacacctacaccaatcacacttcatttccttagcattgtactgcactgaatttacctaccatagctactcattttctctggatctgtaagggtttcttttaattctaggctttcatttgtcttctttttcctgcgcgtccgcccacgcgtccggacggagcaaatgtctgaggacgacgagaggcagcaatctccgccgtcggatcttgagttcgtttccaacaaggcgcggaactgtaacgccacgggatctgactcgggtcacccggagttccagtcgacgtacccggaccaggttctggagaacgtgttggagaacgtttttagggtttaaggaacttattctcgtttgctgcgatgggtttggaattagtggccctgctattttcgttaacaagtgcagggcatgctcagttgtctgattatcaatgatattgatgctggtcttggtagatttgatgagcttatgttttactggaacagaaaaccttgaactgtaccaattatgctttaattttcataaatttcctcttgtttaagaagttttaaaagggtacttatatactgatttcgtatcttgaactttatatatttgtcacatcttatctaggtaatactcaaatgacggtcaacaattcagatttt

SEQ ID NO: 14354 - DNA, 629 bp, Gossypium hirsutum
  unsure (1)..(629): unsure at all n locations
  Clone ID: LIB3543-063-Q6-K6-B8
cccacgcgtccgngaaggggcatggagaatcgccattgctcanaagaaagagagagaacacccaaaaagaaaagcttcaaaataatagtattatttcaattactggtttcctttacattgaatccatgttcccttgatctaagaagctcaaatctcaatctcatctctcaccccaaagaagaaaaacagaagaagaataaggaggattgtcttttgagttcgtaaagccgcgcgtgttgtacaaagtcgccttatttgtcttcctttcgttgtttgtcgtgtgagacaacaggacggagcaaatgtctgaggacgacgagaggcagcaatctccgccgtcggatcttgagttcgtttccaacaaggcgcggaactgtaacgccacgggatctggctctggtcacccggagttccagtcgacgtatccggaccaggttctggagaacgtgttggagaacgtgctccacttcctgacctcgaggcgggaccggaacgctgcttcattggtttgcaagtcatggtatcgggtcgaggcactgactcgatccgagctgttcatcggaaactgctacgcggtttcgccgggtcgggccacggccaggttcaccccggtgaaggctcttcacctg

SEQ ID NO: 14355 - DNA, 572 bp, Gossypium hirsutum
  unsure (1)..(572): unsure at all n locations
  Clone ID: LIB3584-008-P1-K1-G9
tctcggnacgcgtgggnaaatgatcagctggggatggggggtggctgattgtccgcctagaggagagctggacaaaataaatgccttaatgttccaaaatagcacaagcacattcaactatctatatgacctttcgatcaagaaagcggtgaagctttgtcgtcagagttcctatttccatctccggtgggagtgggggagtgcctgacagagattggaatggaaaggctaaagtcgttcccttgccttagaaagtcagaactatggtaaacatattagcatgaaaatagaacaattatgaccataataatatccagagctttcagtataaatatttacagatactcagtatgctgtatgttccacatcattgttaatgactttctgcaattgttcttaagtgcatgtttgtttgaattttctgaactaatgcanggcaagatgagttgtctgatgatcaatgacattgatgctggtcttggtagatttggtaatactcaaatgacggtcaacaatcagattgttgttggtaccttaatgaatttgtcagataatccaaccaggattagcat

SEQ ID NO: 14356 - DNA, 585 bp, Gossypium hirsutum
  Clone ID: LIB3829-009-Q6-K6-G7
cacagcagtcttgatttggtttccagttagactctgagaagaagagaggcagtgaactagacggcggcgttgaaggacggagcaaatgtctaaggacaacgagaggcagcaatttcttccgtcggatcttgagttcgtttccaacaaggcacggaactgtaacgccatgggatctggctcgggtcacccggagttccagtcgacgtactcggaccaggttctggagaacgtgttggagaacatttttagggtttaagaaacttgttctcgtttgctgcgatgggtttggaattggaactagtggccttgctattttcgttaacaagtgcagcaattaattggggacaaatattggaattagcccttaaacaacttagttgacagagtggtggcctgggtgtgtgtgctctatcatcatctcttttataccatccattgaagcctctcgtctaatctgcatagaagccacaaccaaataaagacaaagcaggttgcaggttactgttaaatagtagaaagtccagagggaatagtgctttgaggattcgtgaaaccaatgttagttcgtggtaactgactcttcaa

SEQ ID NO: 14357 - DNA, 448 bp, Gossypium hirsutum
  Clone ID: LIB3147-056-Q1-K1-F7
gtgaagctttattgtcagagtttctatttccatatccgattttaagttcatcagtgcctgacagagattggaacggaaaggctaaagtcgttcccttgcctttgaaagtcagaaccatggcaaacatattagcatgaaaatagaacaattatgaccataataatatccggagctttcagtataaatatttatagatactcagtatgctgatgtatgttccacatcattgttaatgactttctgcaattgttcttaattccatgtttgtttgaattttctaaactaatgcagagcaagatgagttgtctgatgatcaatgacattgatgctggtattggtagatttggtgagcttatgttttactggaacagaaaaccttgaactgtaccaattatgctttaattttcataaatttcctcttggttaataagttttaaaaagttactta

SEQ ID NO: 14358 - DNA, 680 bp, Gossypium hirsutum
  Clone ID: GOSHI-09MAY01-C42785_1
cccacgcgtcccgacgcgtccggaaaaaatggcaaaagcttcacagagggccctggtttcaatggcaatctgcttattgtcttccctcgttggcttcgcctatgccagcagtctcggcaacaagttcgtcgtactcggcaaagtttattgcgacacttgccgcgtagagttcgaaaccaaactcagcgaacccataccaggtgccaaggtgaagttggagtgcaggaaagaaggggacgaaactgttacgtacagccacgaagcggaaacagacgcaaacggtgtgtacaagatcccggtggaaggcgaccacgaggaacagatttgcgcagtgagcacagtgagcagtccaagggcagattgtaacgagaagatggaagcatttgaaaaggcacaagtggagttaactagcgatgatggcttagctgagcctagcagaaaggctaacaatcttggcttcaagaagaaggtagctgtccctggatgtgctcaagttcttaaagaaatgggcttccctcttaccgaataaggatttttaaatcccaagatcatatccagtcttaatcatgcaagcatagcatactctcgatatgattttaacttatatatacatatatgtatgtactcgtactcatcatatattgaactttattcaataatttagcatctattttcgacac

SEQ ID NO: 14359 - DNA, 1457 bp, Gossypium hirsutum
  Clone ID: GOSHI-09MAY01-C42695_1
tttacattagtatcggctgtaatttgcctgggattcctcatccaacatttgctagagatccagtgcccttctttctcgctccaaaggtaagcaatgaattaggattagaagcagctgtggaagctactgccaattttctgaacaaagctgtgaagcctgtccttgtgggtggacctaaattaagggttgcaaatgcaaaagatgcctttgtggagcttgcagatgcctgtgggtatcccattgccgtaatgccttcgggcaaaggattggtacctgaacaccatccacactttattggaacatactggggtgcggttagtactagcttttgtggggaaatagtggaatctgctgatgcctatgtttttattggcccaatcttcaatgattatagctctgtaggctactctttgttgatcaagaaggagaaagcaatcatagtacaaccaaatcgtgtgacgataggcaatggtccttcttttggctgggttttcatggctgacttcttaagtgcattggcaaagaaacttaagaaaaataccactgccgtggagaactatcggcgaatctttgtccctccaggcatgcctttgaagcatgggaatgacgagcctctgagagtcaatgttctttttaagcacattcaggatatgctaagcaaagactctgcggttattgctgaaactggagactcatggttcaattgtcagaagctccatcttccagagaactgcggttatgaattccagatgcagtatggatccattggttggtcagttggtgccacgcttggatatgctcaggcagctaaaggcaaacgtgtgattgcttgcattggcgatggtagtttccaggtgacagctcaagaatattcccacaatgatcccatgtggacaaaaaagcatcatatttcttatcaataatggaggctatacaattgaagttgagattcatgatggcccttacaatgttatcaagaactggaattacactgcctttgttgatgccatccacaatggtgaaggcagatgctggacagccaaggtgaggaccgaggatgaactgatagatgctattgcggcagcaacaggagaaaagaaagattcactgtgtttcattgaagtttttgcacacaaagatgacaccagcaaagagttgctggaatggggatccagagtttcctctgctaacagccggcctccaaatcctcagtagagctgttgattctgaaatgtttagggaaagacagactggaagcaccataagctggaaataagatagatggggcagatttgcttggcttggatgagatttctgttaatcttgttactgcattaaactttgtaatcatagcaacttgattaaatgtcgaggcttttctctttgatgcaaaaaaaatagagcatataaaaaaattaaagattaaaaaaaaaatgttactctgaacttctattaga

SEQ ID NO: 14360 - DNA, 630 bp, Gossypium hirsutum
  Clone ID: GOSHI-09MAY01-C42115_1
cccacgcgtccgcccacgcgtccgcgtattgcctttctctccaaaaaccccctttgcattccatttcattggctttttatagccgaataaaaagaataataataataataatacaagaaattttcccttagatctatttgctgtcaatctgttgcgggttgttagtctgctattttcttcttgcaagttcgattgtacggaggagaacgctcgtggggatgacgtggaggaggcttggggctctgtggcgctgaagacccttgctgaggaggctgcaatgttggtcctagggttttagtccctgaaaccgaatattgggccatctgggtcgagtttcaattgggttaaatatttgggctaagattaatgctttgggtctttgtatttatggattgtggactatattttatttttatttggtttatttatttgtttgtaaataaatttaaaggcccgggcaaaatgggccttctacacatagtgttattagtaggctcaaattgacaataccattagttgttgacccgtgtattatttttaaaactaggggcgaagccaaaattgttgataagatgggtaagatatttttataaagggtaaactataaaaatagtcacttatgtatggttt

SEQ ID NO: 14361 - DNA, 640 bp, Gossypium hirsutum
  Clone ID: GOSHI-09MAY01-C42395_1
ttgatcaaagccttgatgaaattaagcttctcaagtatgttaacaaacatgatccagctgataagcatcaccttctccgattgtatgattacttttactaccgagagcatttgctaatagtgtgtgaacttctcaaggcaaacttatacgagtttcataaatttaatagggaatcaggtggagaagtctacttcacaatgccaagattgcagtcaattaccattcagtgtttggaggctcttcagtttttgcacggccttggcctagtacattgtgatctgaagcccgaaaatatcttagtgaaaagctatagtagatgtgaggtgaaggtcattgatcttgggagcagttgttttgagacggatcatttatgctcctatgttcaatccaggtcctatcgggctccagaggttatcctagggcttccatatgacaagaagattgatatctggtcacttggctgcatcttggcatgaactctgtactggcaatgtcctgttccagaatgattcacctgcgacattacttgcgagggtaattggaatcataggtcccatcagacaagacatgcttgccaaaggacgggatacgtacatatactttacgaagaattacatgctttatgaacgttataggagac

SEQ ID NO: 14362 - DNA, 371 bp, Gossypium hirsutum
  Clone ID: uC-gsronu33B098g07b1
atcatagtgtcctgtacatactcaagaatgcatgttgagattgagtagcagctgactgttctttattttccaggagcatttgctaatagtgtgtgaacttctcaaggcaaacttatacgagtttcataaatttaatagggaatcaggtggagaagtctacttcacaatgccaagattgcagtcaattaccattcagtgtttggaggctcttcagtttttgcacagccttggcctagtacattgtgatctgaaaccggaaaatatcttagtgaaaagctatagtagatgtgaggtgaaggctcttgatcttggtatgcagttgttttgtgattcattatttatgatcccttgttccaattctttgtcctatt

SEQ ID NO: 14363 - DNA, 421 bp, Gossypium hirsutum
  Clone ID: GOSHI-09MAY01-C42255_1
atttttcctgctagcaaaacagaggatctgctgccaattgatcgctttgttgttgaagaggctttgctggatgtgcttttgttcttcaatggatgtcgaaaggaatgtgctgctttcatggtaggcttgcctgtgcccttccgatatgagtatctaatggcagagacaatattctcccagctgcttttgttaccacaacccccattcaagccaatatattacacactggttattatggatctctgtaaggctctccctggggcctttcctgcagttgtagctggtgcagttcgtgctctttttgttaaaattgctgatttagacatggaatgtcggacacgccttatcctttggttttcacaccatctatcaaatttccaatttatttggccttgggaagaatgggcttatgtcctagacc

SEQ ID NO: 14364 - DNA, 561 bp, Gossypium hirsutum
  Clone ID: GOSHI-09MAY01-C42215_1
tctgatctgagagcaaggtacgttactctttctcctttttatgcttttttgaataataaaaaaaaaactaaagcaaaagaatggggaaaaatgaaaggaaacttgctccttactttcaatcactgtttttcgtattatttcaatggaagttacagaatctcttctcctttttttacaaaaatgaaatggctttatatatagcttgaaaaagaagaaaaaatagatcaaatatagttgctattttgctgttttttttcttcggactcttttagtccgttttgcaagcgaacgtggtggaaacggcacgcgtggaggccgaaacttgcggcgactggagactgctggggtgtttgagggcggcggctacttgctgctactagggttttctgcttttatttaagtattgggcaatttagtgattgggctagggttaaatgtttgggcttgtttgttggtctgggcccgggcatatttgggcttgtacaccccatgcttaagttttccatatttcaagctatatataccttgacattgaatataattggtggaatttattttatc

SEQ ID NO: 14365 - DNA, 233 bp, Gossypium hirsutum
  Clone ID: LIB3147-054-Q1-K1-C3
cttttagtccgttttgcaagcgaacgtggtggaaacggcacgcgtggaggccgaaacttgcggcgactggagactgctggggtgtttgagggcggcggctacttgctgctactagtgataatggtaaaataaattttggcattcttattttcaaaaaaaaaaaacaaaagaaaaaaaaaaaaataaaaaaaaaagaaaaaaaaaaaaaaaaagaaaaaaaagaaaataaaaat

SEQ ID NO: 14366 - DNA, 460 bp, Gossypium hirsutum
  Clone ID: GOSHI-09MAY01-C42235_3
ggggagctcgcgtccgcccgcgcggccgggggttaatgatgatgatgattctcctgaaaccaattagcggcagagaggccgtcctagtacttaggagcaacgccacttaccagtgcaatggccttctcggcggctgcgttatccgggaagaattggagtcggagctggatttgttgatgatagattctaccgttatcagaatcctccagcaaggtagcggtcacatatctatagaggcgcttaatgctaataaggcagcagcgaagccttgccctgaaaattattcgaattgtattacaaaatccaagtcagggaaacataattgtaatgggaataaccttttttgtagatagtgatgttgatcaacctatctatgacaataagcgccctatgccttattcgaatcgtaaaggttgctacttttgtggactctatttatttctactttgctttttgttgc

SEQ ID NO: 14367 - DNA, 681 bp, Gossypium hirsutum
  Clone ID: GOSHI-09MAY01-C42235_2
cccacgcgtccgaaaagaaaatggggtttcgtgagttatgtgtggggttaatgatgatgatgattctcctgaaaccaattagcggcagagatgccgtcctagtacttaggagcaacgccacttaccagtgcaatggccttctcggcggctgcgttatccgggaagaattggagtcggagctggatttgttgatgatagattctaccgttatcagaatcctcaagcaaggtagcggtcacatatctatcaacacgtttataaagggtaagccagcagtaaatcaaaatgactgcggtcctagttatgggaattgtatttcaaaacccaagccaaatggacataattctaattgtaacggtaatagcccttattgtaaacaatgatgtttatcaacctatctatgacaataaacgccctattcattattcgaatcgtaaaggttgctacttttgtggactcttatctgtttctttgctttttgtaagtagcaatattttcttatttaaaaaatagtaattttttaatgttggaataaacatttccctccatttgattctctaaaaaagaaaaaaaaaaaaaaaaaaaaaaggaaaaaaacaatcaatgaattgatgacaaaaagaaagaaagcatgtgcaggtcaagagaggatagaaactgaaatggggggggcctttttag

SEQ ID NO: 14368 - DNA, 666 bp, Gossypium hirsutum
  Clone ID: GOSHI-09MAY01-C42235_1
gggggaaacaaaggaaaagaaaatggggtttcgtgagttggcggggttagtgatgatgatgattctccgaaaacgaattagcggcagagacgccgtcctagtactgaggagcaacgccacttaccagtgcaatggctttctccgcggctgcgggatccgggaagaattggagtcggagctggatttgttgatgatggattctaccgctatcagaatcctcggggtcgataaaactgtcggtaaaatatacagcacgcttacaaaggataagccagcggtaaagcaaaaggactgcggtcctagttattcgaaatgtcttccaccaccaaacccagataaccataacaaaaatggtaagggtaatagcccttactgtagataggttgatgtttatcaacctatctatgacaataaacgccctattcattattcgaatcgtaaaggttgctacttttggggactcttatctgtttctttgctttttggtggacgtatggtttccctgtatccctttcaactatgatgcatatatgtcgctacgtcttattctactaatatatcaatctgctactttttcttttggttggatcacagttatcaataaaagatacaccgatgctcccattatgggtgaacaaatgtgaagtgaagaagaacttgcttaat

SEQ ID NO: 14369 - DNA, 774 bp, Gossypium hirsutum
  Clone ID: GOSHI-09MAY01-C43515_1
cccacgcgtccgcccacgcgtccgtgttgatgaaggaattcccatctatgtttggggtctctgtcagccacacaacccgtgcaccaaggggcaacgagaagaatggagttcattatcattttactgaccggagtgtaatggagaaagatataaaagatgggaaatttcttgagtttgcttccgttcatgggaatctttatggaactagtattgaagcagttgaggcagtagcagactctgggaagaggtgcattcttgacattgatgttcaaggagcaaggtcagtgagggcaagttctcttgatgccattttcatttttatctgtccgcccacaatgagagagcttgaagagcggctccgtgcaagggggactgagacagaggagcaaatcctaaaacgactacggaatgcggaagcagaaattgagcaagggaaatcttctggcatctttggtcatatattatacaatgataatctcgaggagtgctatgagaatcttaaggaactgctagggctgaatggaagtgcaccaactaatcataagccatcacccaaagggattgatctgccttcgaaccattcggtgtcaaaaatcgataacaagatcctcataaattgtgagactccggaactcgagaaagcgtcaaagaacttgattgcattggatgtgtcgtcgctaaaaggtggggcacccggtcggacaagaggactaaatgtctatgcccttgattcattttcagatggcttaaatgagaaactgagctgacgactgc

SEQ ID NO: 14370 - DNA, 725 bp, Gossypium hirsutum
  Clone ID: GOSHI-09MAY01-C43465_2
cccacgcgtccggaggaaactccctaaagagagttgaagctgtgactgagtgtagggtgtacggaagaggcaaaggttctgtcaaagattctgttaaggaagagaaactaaaagataaacctggattcgaacaccttaatgagccgttgcatgtgttggtggaggctgaacttcccgaagatgtgataaattctcgtttggactacgctgttgccatactagaaaatcttctgaaacctgtggatgaatccttggataactataagaaacaacagcttagggagttggctttactaaatggtacattaagggaagagagtccgagaatgagcccgactatgagccctagtatgtcaccctttgacggtactggaatgaaacgagccaagacaggaagatgacccttatggtgacaggatgttgagtcaagaagagctagtcaaactcgctactcggtttcgagcaacgatggtccacttctaggttgtccttctccattgatcccttttgtttcatatatcaatcccctatcaacatgactttagttaaaaataacctatgccctaattattttagccaaaaacctctactatagttggaagattcttctcacctacagtcatacatatgcagcattctctcttggtgataattactattattatttattataagataaaatcattgtattgtattttgacttaataataagtttttttttttcg

SEQ ID NO: 14371 - DNA, 793 bp, Gossypium hirsutum
  Clone ID: GOSHI-09MAY01-C43465_1
gttggcccggtttgcctagagcccctacaacaccgattgtaaagagagttgttagacttgatgttcccgtggataaatatccaaattacaattttgttggccgaattttgggaccacggggaaactccctaaagagagttgaagccttgacccagcgtccggcgtacataagaggcaagggttcagtcaaggattctgtaaaggaagagaaactgaaagataaacctggatacgaacaccttaatgagccactgcatgtgttggtggaggctgaatttcccgaggatatggtaaattctcgtctggagtatgctgttgcgatactagaaaatcttctgaagccagtggatgaatccttggatagctataagaaacagcagcttagggagttagctttgctaaatggtaccttaagggaagagagcccaagcatgagcccaagtatgagcccaagcatgagcccaggtatgtcgcctttcaacagtacgggaatgaagcgggcgaagacgggaagatgaagaaatcccttgttttctgctggttctgatcatcaattgaaatcgagatggcttggcttggcttttgtgatggatgatgtatttcaccttaacttagggaggctgagttaggaagatctaagtcaaaactcccatcagtttttgggctgcatatgggttttcttctccactgatattccttttcttttccttcttttatgtattattcattgcccctcccataaggtttgacgtcagtctctatttcccctagttcgaaaataacttgtttccct

SEQ ID NO: 14372 - DNA, 523 bp, Gossypium hirsutum
  Clone ID: LIB3583-035-P1-K1-C8
cccacgcgtccgcgacaccattagttttggaggtgatagggttgtcaaaagggagcaaaaacgaaagggacctgggagaacatctgagactccatcgtcaccagcgggagctcataaaagaccaagaaagatgaaagcttctgatctataaaaaaggatttcagggtcattgccaaccccattgttactctaccattggtcattggaagcagatgaacaagttccatagttttgactaccaagttctctctctctctctctctctcgcttttttttttctaaccctttgacctggctttgtaagtttgtgtagtcaagtaggaaaaagacaacatctttttgaatgaatatgcataaagcatcaggatccaaaaacaccaacacgtatttttcacccattttgcttagctgagagagttgggtattttattttgtaaatgttcatatttctatccaggagctacctagatattctgtcgtggtaataatttttaatttctttttcaaaaaattacatgcaatt

SEQ ID NO: 14373 - DNA, 312 bp, Gossypium hirsutum
  Clone ID: LIB3148-012-Q1-K1-B9
cccacgcgtccgtgccaaccccattgttactctaccattggtcattggaagcagatgaggaagttccatagtttttgactaccaagttctctctctctctttctcttttcttttttaaccctttaaccaggctttgtaagtttgtgtagtcaagtaggaaaaaagacatctttttgaatgaatatgcataaagcatcaggatccaaaaaaaccaacacgtatttttcacccattttgcttacattataaaaagaaccaggaaacgaaacaaaaaaatccaacagcaaggttaattgaaggtgatccaaaaac

SEQ ID NO: 14374 - DNA, 832 bp, Gossypium hirsutum
  Clone ID: GOSHI-09MAY01-C43735_2
tctttttgcgtccgcccacgcgtccgcagagacgaagcagggaagtaaaagttttgaccttttgagaaaaatcctgtgagaatccactctctccatagtttcttcaagcaaaccctacgatggcggacgacgactataatgatatggacatgggatatgaggatgagccaccagagcctgagattgaagaaggagctgaggaggatttggaaaacaataacaacgatgatgttcctctagaacctatcgaaaccgaagacaatgtagaccaagatgctaaagacaaaactactcgtaaaacatcaaagtatatgaccaaatacgagcgtgctagaatcttgggtacccgagccttgcaaatcagtatgaatgcacctgttatggttgagttggaaggtgagaccgacccacttgagattgccatgaaggagcttcgagagcggaaaataccctttaccataagacgctacttgcctgatggaagttatgaagactggggagtcgatgagttgattgtggaagactcatggaagagacaagtcggaggagattgattacgtgttcttacttctcgaatttggtgtgtggtatgtaagagtcgtgatgcttagattcagtcagtaaatgtaaaaaagacaatctagaaggatgtctttggaaccgtggtagtagactcgttttgaaccctgttgtgcttttcgacattaacgtaggttataatgggagttttgaccctctgaaacttgttgaaaaaaaaaaaataatataaaaaaaaatataaaaaaaaaaaaaaaaaaaattttttttttttttaattaatataatttaaaaa

SEQ ID NO: 14375 - DNA, 967 bp, Gossypium hirsutum
  Clone ID: GOSHI-09MAY01-C43735_1
cggacgcgtggggaagaacttaaaatcacttgatctttcgattaattcacttactgggtcgattccatcaagctttgggtcacttataaacattgaaaagcttcaacttagttcaaattacttatctgggtcaattccacttagtttatcttcattaaaagctcttaaagtcttaaatgtctctgataataacctctctggttcaatccctgttcaatttagtaacctttctaagttacttgaacttgatcttagtaaaaattcattgtatggatcattacctgttgaattcaccatgttgaaaagcttacaaaagatgataatcgaaaacaaccggctcgacggtcgtttaccggttgatttgttttcgaatcttgttgagttacaagttgtggatttgagtgggaacaagcttgatggtaatgttaatggtagtttttggtcaatgcctaatttgacattcttcgatgtatcgaataacaacttttcgggtcatttaccagctcctagttctaaccatagtgttgctccgggtgccgtgtttaatttgtcaaacaatcagttttacggaactttggatttttcgctcgggatgttcaaattcattgatgtatcgggtaactatttgcaaggcatagttaatgatggtgaaaggaatgctagtgttaacatgaattgcttttatcgaccaaaccagaggagtttggatgattgtaggatcttttataacgaaagagggttacattttgataattctggggcaccaccatcaactgctgcaaaatctagttctgggagccgaagatggatatttatcttggccggagtacttggtggacttggcttcattttagttttggtattggtgctagtgctgctcttgagacggtataatacggggcttatgaatcaaagacggagtaccgatatagggcctgttcgggaaagtgatagcgcccctcaactt

SEQ ID NO: 14376 - DNA, 402 bp, Gossypium hirsutum
  unsure (1)..(402): unsure at all n locations
  Clone ID: LIB3148-016-Q1-K1-D3
gtggtatgtaagagtcgtgatgcttagatttagtcagtaaatgtaaaaaagacgatctagagggatgtctttggaaccgtggtagtagactcgttttgaaccctgttgtgcttttcgacattaacgtaggttataatgggagttttgactaaaaaaaaaaaaaaaaaaaaaaaaaaaaaaaaaaaaaaaaaaaaaaaaaaaaaaaaaaaaaattaaaataaatataaaaaaaaaaaaaaaaaatttataaaaaatttaattttttaatattaatattgatattttatttttgtncnaagtacttgatggacttggctttattttagttttgggattggtgctagtgctgctcttgagacggtataatacggggcttatgaatcaaagacggagtaccgatat

SEQ ID NO: 14377 - DNA, 753 bp, Gossypium hirsutum
  Clone ID: GOSHI-09MAY01-C43615_1
cgtaaacaagtacctttttccttcccttttccctcattttctctcggcccaacaaaacaaaaggaaaaaaagactttgtgttacagacccagaaatgatgtcaaaactagcaatgtttccatactatttccctgaagaaatcttccttgaaatcttctgtaaactacctgtgaaatccctggggaaatgcatgtgtgtttctaaatcctggaattctctcatcaagaacccatattttatttccagccatgtcagccatcagtcaaagcttcgtcgcacaaacgacaacaatctcttctttgtcatgactggccgccatgaagtggaatactctctgcattctgatgaccaagaattcagaaagtacgcccagttagagtacatgccttttgataaccatcattctattgttggtgcttgcaatgggttgctttgtttgatggactttcagtttagtttcgatagcatcttcattttatgcaacccaattattcggaagtctattacgctaccaaaaccatgtttgtctagtttgccatataaaatatccgttgggtttggatttgattcagcgcaaaatgactataaacttctgaaaatcactaagaaaggtgtgctagacaagtatgttgaggttgaactttactcactcaaaaggaattgctggaaaatattagccccaccaaaatttgatctttattttgatgatctcatggtttatgtgaatgaaacttttattggattgcttataaa

SEQ ID NO: 14378 - DNA, 577 bp, Gossypium hirsutum
  Clone ID: GOSHI-09MAY01-C43635_1
acggtgaagggtcgcagtaatatatttgcaattggagatatcactgatgttccggaactcaaactaggtcatgcggctatacatcatgcatatttggttgctaaaaacttgaagctgttgatgggcggaggaaaagaaagcaaaatgtccgtgtacaaacctggtccggaagttgcaatggtttcgctcggaaggaaacacgctgttgcccaatttccttttgcaaccgtcggtgggcgtattcccggcttaatcaaatctggagacatgtttgtaggcagaactagaaagaatttgggtttagaaccttaagctacacacacacacatacacatatatatttgccattgtatttcctcatttccacctttaattcctttttgcttataatgtttcacattttttgcacccctctgttggctgtttcatttgtatgttgttttgctttgcgcttttaaatagattctcaataagatttgatggtaggggcatgtatgtttatttgttagtacagttcaattcttttgcaatgaattatttagacaagttgcaagtaaaaaaaaaaaaataaaagggc

SEQ ID NO: 14379 - DNA, 748 bp, Gossypium hirsutum
  Clone ID: GOSHI-09MAY01-C43185_1
gcatccagcgcttgtagcttggggatactttccagaagatgaaacaggtatcaaaggcaaaagctacgagggcggaatcataacttcattccacaggattgtttcaaaaaaatccaataatgtccatgcaatcatccaagctcctgcactaggaccagcatcgttcgcagccatatctccatgggtttcagggagggagctgaagaaagaatggtgaggtatccaagattggctcaccttttcacgctgataagagaccagggttcaggagaagtaatggaagaagggaagatcaagtatcggttgagtgaagtggataaagaaaatctaaagattgggttgagacaggtgttaagggttctgattgcagctggggcagtggaagtgggaacctatcgaagcgatggccagagaattaaatgcaaaggtcttacagaagaaagtttgcaggagtttttggataacgttcccgtggtaggagggcttagttccaaggatgagtattggaccctctatattacagctcatcagataggaagttgtagaatgggcgcaaccgaagaagagggtgctgtggatgagaatggtcagagttgggaagctgaaggtttgtttgtttgcgatgctagtgtcctgccaactgcaattggagtcaatcccttgatcaccatacaatccacctcctactgcatttccaacaagattgcacaattgttgaagaaggaataaattaacacctttcatcact

SEQ ID NO: 14380 - DNA, 842 bp, Gossypium hirsutum
  Clone ID: GOSHI-09MAY01-C43095_1
gccacgcgtcggttggactcggaagttgcaactatgaagaaatcgaagcagagagatctttattgagaaagatgttaaagaaagaatggagaagacaattgagacggttagagcgaatttcaattccataaggacagggagggcaaacccatcaatgcttgacaaagttgaggtggaatattatggaactccggtcagcttaaagagtattgctcaaatcagtactcctgagtcaagttctctattgattcagccctttgacaaatccagcttaaaggctatagagaaagctatagttaactctgatcttggtatgactccaaacaatgatggtgaagtcattcgcttgtctctccctcaactgacaactgaaagaagaaaggaattgtcgaaagttgtggccaaacaagctgaagaagggaaggtggcagtgaggaatataagaagagacgcccttaaagcctatggtccgcccgcgcggccgaaaaagctgtctgaagacaatgtgaaggacttatcaagtgatttgcagaaactcacagatgagtatatgaagaagattgatggcgtctacaagcagaaggagaaggagttgctgacggtctagtgtttgtttgtacaaagatgtaacgtgttgatcttccatttctatcgagatgaaaagaaaaataaactggttgtctttgctttactttggtgcatagtatttatatcttacttgcagaagagcatgttgaaagttaatatgttatgggtagatatcttgttttggatcgaagtgggaaaaaaaaaaacaaaatgcatcacctctgcttaaaattttttagtgtttatgagagctc

SEQ ID NO: 14381 - DNA, 348 bp, Gossypium hirsutum
  Clone ID: GOSHI-09MAY01-C43275_1
cccacgcgtccgcctgcatttgccttcgctatgaacggggacgatattgtggagtggagtgctgattttgaggcaagaaactcgttcatctcccccctcaccaccatacccgaagtcgatcttgaatattcgttgtcaaaggttgcatcaaaatacatagttgctatcgtacttcttgtgttctgtctctgacgtctgttatcacctaaggtagatggtctttcttcctttccatcaatttctgctatggatctgtggacttcgttttgacatctctcgccctgtggttgctttccccttgtcgaaaccatttttaaatttgaaaaccaaacgaggatcgactttttg

SEQ ID NO: 14382 - DNA, 380 bp, Gossypium hirsutum
  Clone ID: GOSHI-09MAY01-C43235_1
tgggatgtgaatgtgctgttatgatgctctactctgtattgcatcttagagttccagcaattttgttgtcaaaatagtgatatgtataacacatatatattagtaacttttgaacgttacgttcatatggaagacgccatttttgtagatactcttgaaaagatatagatcatggttaaggtgtttcagtggtccaaaatacgatctggcaatggctcatctctttctttggtgtggaatgagccctttgctgccttattatcagccatggatttctcttggaatattatatgaataagatggttggacgaatgtctaaattagttatttaaaatgatactaattttaatttcattaaataaattttcagtctttgattt

SEQ ID NO: 14383 - DNA, 756 bp, Gossypium hirsutum
  Clone ID: GOSHI-09MAY01-C78965_1
ggagaatccaattcctggaaaagagtattcggaaactagattttaggcccggtggaatttgtactattggtcaagtcaatgacttaaagaattccccaggaccagccaggtgggagcttagacaagctaccaaacaggctcttcatttgctccaggacaactatccagaatttgttgccagacaggtgttcatcaatgttccttggtggtaccttgcggtcaataagatgataaatccatttttgacccaaagaactaaaagcaagtttgtctttgctggcctttccaaatcagcggacacccttttcaggtacatcactgctgaacaagtaccggtcaaatatggaggactgagcaaagacagtgaattcgccaccaccgaaactgttaccgagataactgttaaatcagcggcaaaacacacagtagagtttccagttactgaggcatgccttgtcagatgggaggtaagagttattggatggggtgtgagctatggtgcagaattcgtacctagtggtgaaaacagctatgcagttataatccaaaaggctaggaaggttgccgcctctaccgaggaaccggtggtgtgcgacaatttcaaggttggcgaggctggcaaagttgttctcactatccacaatccctcttccaaaaagaagaagctcctctatcgcttcaagtcccaccctactacatctcactagttttattcaaggaaattaatatcacacaaggcattcacatacataacca

SEQ ID NO: 14384 - DNA, 506 bp, Gossypium hirsutum
  unsure (1)..(506): unsure at all n locations
  Clone ID: LIB3582-004-P1-K1-F1
aaaaaacatacagggcaaggaggcataacagatcctaacctttcgacgacatgcatacnaacttcggaacgtgtgcatatagtgattacctataggtccactgccacatggcactgacactcacaatatcgagtaaatggcaccttagaatcttccatatgaaatggatgaatagccaactacgaggaggagctgacagaatgactcgcaagacttagtttgcagtgctcatatacgatcattaattagcagaaaagaacacttgttccaaatggaacgtgactataacgagatgaccgcaactcttcaaggactcatcaatggcctcatagcacaaattaactccaaagacagttatctgtggggttgggagcttcaatataatgctatcttgagacagttgaagggcaagaatgctgtgttgctccttgcgtttgctgtacaaattcgaaaaggaaaagcttgaaactttaagctaagttggttttctttatttgctaaaatgc

SEQ ID NO: 14385 - DNA, 478 bp, Gossypium hirsutum
  Clone ID: LIB3582-004-P1-K1-F7
cccacgcgtccggcgaaagaagcagcacataactgtcccttcggggacatccgataaaattggaacgatacagagaagattagcatggcccctgcgcaaggatgacacgcacaaatcgagaaatggcacttaaatcttccattgaaatggagaataccaactacgaggaggagctgaagaatgatcgcaggcttgtttgcagtctcatatacaagattaattgcagaaaagaacagttgtcccaaatggaacgtgactataacgagatgaccgcaactcttcaaggactcatcaatggcctcatagcaaaaattaactccaaggacagtaatctgtggggttgggagcttcaatataatgtaatcgtgagacagttgaagggcaagaatgctgtgttgcgccgtgcgtttgcttgaaaaattcgaaaaggaaaagctggaaactttaagctaagttggtttccttcatttgctaaaat

SEQ ID NO: 14386 - DNA, 900 bp, Gossypium hirsutum
  Clone ID: GOSHI-09MAY01-C78505_1
cccatttttccgaaaaaaaaaaacaccattgaagaggtgcgtttttttgtcaaaaaaaaaggacccagattctcaaactgggtttttagctttcatttttccaatgtataaaccttgaacactcctttcatccacaagagctctcttttatgattttgtttttcattttgtgtgtgaaaactagcaatgggtaaaaatgtatcagctttgtgtgtgatagctcctttgcttcttcttggagctgtctcttcagctcccactacttcttcacctgcaaggattcttaatgggtttttctctaatgctttatctgcttcactgaaatggttatggtcactcaaaaccactaccaaaacagctattactgggcgtccaatggtgaaatttgaaggtggatacactatagagactgtgttcgatggaaggaaacttgggattgagcctcacactggtgaggttttgcctaatggggagcttttgattttggattctgctaatagcaacctttataggatttcagcttctttatctttatatactaggccacggctggttgccggatcacctgaaggataccctggacatgtagacgggaagccccgagacgcaaggatgaatcatccaaaagggttagccgtagatgatagagggaacatttatatttcggatactatgaatatggcaatcaggaagataagtgatgcaggtgttacaactattgctggtgggaaatggaaccgaggagggagacatgtggatggaccgagtgaagatgcaaggttttctgatgatttcgatgtggtctatgttggaagcagttgctcccttcttgtaattgatagaggaaaccgagccatccgagagattcaactacgttttgatgactgtgcctatcagtat

SEQ ID NO: 14387 - DNA, 635 bp, Gossypium hirsutum
  Clone ID: GOSHI-09MAY01-C78535_1
gccaaaacctggcaaattggtagcagtttcaagtttcaacagcaattggtaaaatagaaatatataagtatagtggcacattgaaaccttgaaaagaatgctttcctctccagaatcagcgccttgaacgggtctctttcttctacacccaccaccgctccagtgaatacactagtactcctacttgcatttctttttcttttttcttcttttactcaacccatcagctcttgtttcacaaagagagatccattctttcatttactgtttctttttccttggccgaatagcaatgggaggtggactactatctcacaaaggaaatggcagtgggagtgggcacaagggaagaccctatgtgttgatgttacttttggcatttggggctgcactgcttggtgttatggtgctgcacacgttcagggagagacgcatcttcaaccttcttatcggagataagaaccgtcagctcctttcccttcagctactggtgccggagggaagagaatacaccaaagacatgagaaggaaagcttgaaagacaaaagcaaagatatactaccttagaaaccaaaaaatggagcttgatcgtaggcttgtggacatgctatctacacttgattcccttaaagatg

SEQ ID NO: 14388 - DNA, 625 bp, Gossypium hirsutum
  Clone ID: GOSHI-09MAY01-C78785_1
atgccactgttatattctgatcaccatccaattcttcttaatactttggggttcgttgtgtccttccaggagacttgcgggcttttagattcgaagctgcctggcttacttgtatggacttttaaggaaatcttcacggagtggatggtgaactcgagcaatattacacaggccattgaagtagccaccagggctgttaaggagtggaagtcctcttttggcaatatatttgtgaggaaatggtcattgatcaaaaggttgcagggtattcaaaattcacctcgttatatgttttcttcttatttgcaacagttagaagcaagaagaattattgtggcttcagaaatctcgtttagactggatttctaagggtaaacggagcactcgatgatttcaccttacaatgttgatgtgacgaactcgaaataaggtgttgggtttattcattgatgattcttgggcatctaatcaaagaagtatgatggaacatgtggtaaattactttgataaactctttgctaagaagcaggtctctccgttaccttgtgattagccttttttccatgaaaggactgaaagctccgggtccagatggtattcaaccagtcttctatcaaaagcattg

SEQ ID NO: 14389 - DNA, 840 bp, Gossypium hirsutum
  Clone ID: GOSHI-09MAY01-C78765_1
gtcttccttcaactattctcaggtcataaatcatttcgccgagttcatttctcgtcgttgttgtttttgctcctgttgttggttttaatctggttttattacaggtgctcgttcgtcgacgtttaccatcataaacaaatgcagctatacagtttggccaggagtgttgtcaagtgctggaatcccaccactttcacctacaggttttgttcttcaacaaggagaatcgaaatctatcgatgttccgacatcttggtcaggtcggttatggggtcgaactctttgtacccaaccctcgtctggcaaatccacttgtctcactggagactgcggttcgtctacgatagaatgctctggtgctggtgctatccctcctgcaacccttgcggagtttacattgaacggagcttcgggattggatttttatgacgttagccttgtggatggatacaatttaccaatgatggtgtctccacatggtggtaaaggaggtaattgtagttcagccggatgtgctgcggaattgaacggtaactgtcctttggaacttaaagttgttgatgggagtgaaggagtggcttgtaatagtgcatgcaatgctttcggggacccgaaatattgttgcagtggcgcttattcgactccgaatacgtgtaagccgagcttgtcttggaaattttcaagggaggccggcctacttggtatagctatgcttatgatgatggaaccagtcccttacttgtgctggtgctgattatgtcattactttctgccctactacaccttccacagtctcaagacttctgacccatggcggcgatatctcagctagttcccggt

SEQ ID NO: 14390 - DNA, 516 bp, Gossypium hirsutum
  Clone ID: uC-gsronu33B108f08b1
ccttttcgtccgatagtttccaatggctgctctgcaacttacgattgtattggttatgttcgtcttccttcaactattctcaggtgctcgttcgtcgacgtttaccatcataaacaaatgcagctatacagtttggccaggagtgttgtcaagtgctggaatcccaccactttcacctacaggttttgttcttcaacaaggagaatcgaaatctatcgatgttccgacatcttggtcaggtcggttatggggtcgaactctttgtacccaagactcttctggcaaattcacttgtctcactggagactgcggttcgtctacgatagaatgctctggtgctggtgctatccctcctgcaacccttgcggagtttacattgaacggagcttcgggattggatttttatgacgttagccttgtggatggatacaatttaccaatgatggtatctccacatggtggctaaggaggtaattgtagttcagccggatgtgctgcggaattgaacagtaactg

SEQ ID NO: 14391 - DNA, 815 bp, Gossypium hirsutum
  Clone ID: GOSHI-09MAY01-C78015_1
tacggattccagttcgacgccacgcgtacgcccacgcgtccgatgaaatgcggttgcagtttttaagatgccgagagacatggctcactggaattcttgaggacttggatcagagaaacgcgtatgagtatctaaaagggacgataagctgtcatagaatgcatcttttcgatgttgttaaccaatatcgagcaatatttgctgatgatacatctggaagtgaagaaaattatgatggcgggcttctttttagttgggccatgcatcaaattacttcacaccttaaactcttaaagtcatgcttccaaagataacagaaggtggatcactatcaaatattctggatcagtgtatgtattgtgcaatggggcttggttgggtcgggttggattttcgaggcttgcttactcctctatttgaagaggctccgctcaatttattctctaagaatatgaatacagcagttgagaactttcagttagttctggattcgcatcgatgggttccattaccagcagttggcttttcagccactagcatcagtgaagaaagtcaggaggatgtaacgccaccatcttatttgatggaacatccgcctcttgctgtgtttgttaatggtgtttccgccgcaatgaacgaactacgttcttgtgccccagttagtttaaagaatgttctatctcaagaattaattaaaggattgcaggctgtttctgactccctacttgtgatacaacgtctcttggatgcttagagaaaacgatatctgggctttttcctttccctttgccgagcaattattgaggccgttttcc

SEQ ID NO: 14392 - DNA, 817 bp, Gossypium hirsutum
  Clone ID: GOSHI-09MAY01-C79975_1
ctgaggtgaagaaatggcctcttcagttgcgcagatctgttcctgatggcatgcctgctaacacaaatggaacttcattggatcagcaagagatgagtttgattcaagagagaacattgccttcctcacctagtccactgtacagttctcacacaaaggctagctttatgaaaggtggtttaggacaacctgccgcaagaaagcagcttttgagtggacaaacatcagttgacaactctaggggattgcttcagtgggtgcagagtatcagttttgtttcagtttcagttgaccattctttacatctagtgttgcaagcagattcaccatcttctggaactcatagtggtactggtccgggtcaatcaagctacatagaagggttcactcctgtcaaatctcttggtgcaactgctgcttcatacatgttgatcccatcacccagcatgcggttcctacctccaacccctcttcatctgccaacatgtctaactgcagaatcaccaccgcttgctcatcttcttcatagcaagggctctgcgatccctctctcaaccggtttcgtggtttcaaaggctgtaccttctatgaggaaagactacagaaatcacccccaagaggaatgcccttcggttcttaccgttagtctcattgattattatggaggttataaggtcacccaagataaagtaatattaggtatcgcaaaacaggcaggaaggacttctacctctctatctatatattccaaaatttataaccatttttatttgccttctttagcaacactatctttaagctctctcatggatgacat

SEQ ID NO: 14393 - DNA, 384 bp, Gossypium hirsutum
  Clone ID: GOSHI-09MAY01-C79835_1
tttttagattccctccctcttccttaagccttactccagtccgttctctctgactctgaactctgatctcatttcaccctctctgcttaaaccccagactgaggatttaaattttttagggttaggccaaatattttccctattttttccaatggatttccagaggaaaagagttcagcttctgggcttcatcgtcggagtcatcgttctcagttacacagctgaaaaatgtaggcacctggttggagaggaggcatcatcccaaagtgggcaatttactttgttaaattgctttgatatgggctctggttccgtagcttgtgcagtgaatgagggtgtgaagctttatttctataacatgggagctgtttatgttgagaaagc

SEQ ID NO: 14394 - DNA, 785 bp, Gossypium hirsutum
  Clone ID: GOSHI-09MAY01-C79435_1
gttcatgcatgcgctgcagggttaaaatctattaccacttctgcaactgcagatgccatggaagaatgccgaaagttgtgtggcggtcatggttatctttcttgcagtgggcttccggaattatttgcagtttatatccctaactgtacttatgaaggagacaatattgtgatgcttttgcaggttgcaaggtttctaatgaagaccatttcccggctggtgtccggaaagatgcctgttgggacagcagcatatttgggacgagtagaacatctcatgcaatgccattgtgaagttcaaagggctgaggattggctgaaacatagcattatattggaggcctttgaagcgaggtctgctcggatgtctgttgcctgtgctgaaagccttagcagattttcaactccagaagagggttttggtgaaatctcagcagatctggttgaggctgccgttgctcattgtcagttaattattggttccaagttcattgagaaactgcagcaagacataccaggaaagggagtgaaaacacagttggagaacctctgcaacgtatatgcattggtcttcttttacacacacatcgttggtcatttcgcctccactggctgcattaccccacaacaaggtgcactagcgaacgatcagctcagatcactttactcccaggtccgcccgaatgcgactgccctcgttgacgcattcaatcacactgaccactaccttggctcggctctcggctgctatgatggaaaatgttatcaaaaactgtatgaggaagc

SEQ ID NO: 14395 - DNA, 427 bp, Gossypium hirsutum
  Clone ID: GOSHI-09MAY01-C79695_1
aaaatctaaaccaaaccttcagaaagatttttctgttcctctgggatattcagggaagaaggaaaatagtgtggtgtgttccgattctcttttaaattatagttttgttccagaaaatcggagaagatgtcattgagaccaaactcgaggacggaggttcgaaggaacaggtacaaggtggcggtggacgctgaggaaggaaggcggaggagggaggataacatggtggagattaggaagaatcgccgtgaagagagtttgcagaagaagcgacgtgaagggcttcaagcgcagccaatgcctgcttctcttcactcctctgccgttgagaaaaagttggaaaatttgggcggcatgggttcctgtttctgggctggccattgttaatatgcaccttgaggcaacctttcagtttaggaagttgctt

SEQ ID NO: 14396 - DNA, 574 bp, Gossypium hirsutum
  Clone ID: GOSHI-09MAY01-C79675_1
tcgatccgcgaaagtgaggattggagatacgactgacggagacgaaataaagattatgacagacgcttgcataagagccgatgtggaatctatccactcttctcccacacaggccgtcctctatctctccggcggcgcctctctcgccttggggttgttgatgtcagttcctggagcttcaaatacggcgctggaagctgctgtgccatactccagaatgtccatgatccaattactcgctaagatgcctgccaagtattgtagtcaacaaactgccgatgaaatggctttgctcgcttacaatcgcgcgctgaagctttcttctccaggttctccagttcttggtgtggggtttactggttctttggctaccacccgtccgaaacagggagaccataggtttcacttgtcaacaagaacctctgatcgacattgggcatccacagttactctatcaaagggcttgaggagtcgagatcaagaagagaaggtttcaagttacttcctactgaaggcgatcgctaatgcctgcaaagtctcttcgacatttgattcagagttgactgaatctgat

SEQ ID NO: 14397 - DNA, 732 bp, Gossypium hirsutum
  Clone ID: GOSHI-09MAY01-C79175_1
gtgaacgccatcgctctgttccagttatctccaaatccaccctccaaaaacccctctcgctctctcctcattttccattgctagggttctgctctctttgggagatttcgattttatcttttgctttttcttctcaacagaaagtgctaaagcagatgatggaattcttggctgcatagctgcctgactcctttttaggaacttatatgaaaaagatgaaaaatggtgatgatttcttgaatttcctcccttgcgacttgtcaataaagatacttactgctttagagggtccatctgatcttgttcgcatcactgctgtctcacgcaactggcgacattttgtgattagacatggtctatgtaagcatctgtccctccaaatgtttccccaattatctagagttgatcgtgtcaatgagctaggtggcagtacaaaaggtcatgctggagctggatctagtaattttatggagtgggaagctttggagagggagcatagagcttatgcctttttagctcgatgttgtttgtcaactactgctggggattgcatctcagaagcaataattgcttctagcactgataattatccagaggaaagcatatgtaatactttggaaccaagagatagggtggctcggacagcttcatactggtctagtaaaggacaaaagaatcctgccgtgcctgaaacattgacatatagattgattgctgatttgtgtgttgtta

SEQ ID NO: 14398 - DNA, 955 bp, Gossypium hirsutum
  Clone ID: GOSHI-09MAY01-C79395_1
gggcaatgaatcatgggaagggattattaagaaactttggcctaaagcaaaatatattaagtccatcattactggtaccatgagccaatatatttcattgctttgatttttatggtggtgggatccctttagtttcaccaagttatggttcttcggagtctactttcgggatcaatttaaatcctctaagcaacccctacgatgtctcttacacctttctcccaaacatggcatactttgagtttctccctatggataaagacggggaagatcaggctttagaatccaatcttgatggtgtttcaagccaatggtcgtcggaaatgacaaatgcaaatggaaatgttgaacctgttgattttgcaaatgtgaaactcagtcaatattacgaggttgtcgtcacaactttcgcgggcctgtatcgataccgagtgggggacgttctcaagttaaccggtttccataacaactctccgcagttccagtttgtcgaacgacggaatactggtttgagtattgatatggacaaaacaagcgaggaagacctcttgaaggccatcgggaacgcaaaacgccatcttgaaccacttggtttcgtactgatgacattcagtagctatgcggagacttcatcgataccaggccggtatgtattgttttgggaactcaagttcaaagaaaggaatagatggctaaaacttgatgccaagataatggaagaatgctgctccatagtagaagaatcattggatttcacatataagtcccttagagaggccaataaaattgcagcattagaggtaagagtggtaaagcatggaacatttgatgcgcttatggacttttatgtatcaaagggggcttctatcaaccaatacaagacaccttcttgtattaaatctgaggaagctgtgaaggtattgaattccggggtgctagaaaagttttcagtccc

SEQ ID NO: 14399 - DNA, 548 bp, Gossypium hirsutum
  Clone ID: GOSHI-09MAY01-C79295_1
ctcttctgttttttctctgcaactcttttcacctaccaaaatagcttcgattgtttctgcttattttctgagaaaaatctccggaagaaaatgaaaccgacccgaacgaccgattttatcttgattcggactctctgtaaaccgacacatcaccctctcctccacctccgagtcgtcttcttgtttgttcccacctaaacacgaaagtacccacccgaaaagattgttgttttaaggtatttttttaacaaattttctttgttgctgaaacccaaaatgttgtcgtttcaatcgagcaagaacgtccttagcttaacagaagatctacttgtccggatctacgaattgctggccgctgagtcggatcggaaatcgtttcggctcgtttgcagagagttccgtcgaattgactcactgactcggaggcatcttcgggtaatacgaatcgagttcttgccgattcttctccgtaagtaccctcggctacaatccctcgacctctcagcttgtccccgcattgacgacggggttgtttccttgctcttaac

SEQ ID NO: 14400 - DNA, 571 bp, Gossypium hirsutum
  Clone ID: GOSHI-09MAY01-C79285_1
aggcctccaaacttcgtactcatctcgcgaatacccaatttatttaaaaccctaaaaaattgaaggaatcatcaaaaactctgaaagccaatattgaaactttagggaaaaagaaaccatataatgcaaggaacagatgagctaagcatacatgacctggcttcaagtctctctacgtataaggaacagcttcagcaggttagacagcttctggctgatgatcctggaaacgctgaatatgtggacatggaaaaggagctcgctgaggtgattgctctgacagaggaactgcttgcaactgcgaagcaaaatgagatttctggatcagatattgggactagtgtcagtgcagctgctgcacaatcgaaggaaatggtgaaaccatcagattataaagataaatttcctgttggcacaaaagttcaggctgtctggagtgaagatggagagtggtatgatgcaactgttgaggctgttactccaaatggttattatgtgtcatttgatggatggggaaacaaggaagaggtggatcctgccaatgtaagggcgattgaatacaaatgcttgc

SEQ ID NO: 14401 - DNA, 661 bp, Gossypium hirsutum
  Clone ID: GOSHI-09MAY01-C74765_1
gcatcttaaactgaacatccggacttgtgatcgagctaacgtctaaagtgcgtgaagagctctatttccagaactacatgaatgatccagatgcgcctggtgggacacctgttatgcagcaacccataccgaaggacaagcctcagagacgtaaagtaatggaaaatcgcttgaaagatgaacgtggcttacgcagagaacgtgataatcgagctaatggtagtgacagatttgatagatctgagaaccctcaatcaagtgattttccgtccaacaatgatggtcctgatggggggaatcatgatgatcctatgtttgacgcttttggtggacaagggatgcatgttgcagctccattttcttcagatgttgcacctccgccagtattgatgcctgttcccggtgctggtccattggggcccttcgttccagctccacctgaacttgcaatgcaagtgttcagaagagcggggtgctcctccttttgaaggcaatggttgaagtggacgccctggacactaatttaagtggacccgccccctttcttttgcctcctggcttccgacaagatcctcggcgcttacgaagttaccaagacttagatgcacctgagacgaagtcacagttatagactatcggagtttgtaggtacaagcaatgg

SEQ ID NO: 14402 - DNA, 383 bp, Gossypium hirsutum
  Clone ID: LIB3584-027-P1-K1-G8
cggacgcgtgggcggacgcgtgggcggacgcgtgggcttgaaagatgaccgtgacttacatagagaacgtgatagatctgacatccctcaaacaagtgatttttcattgaacgatgatggtcttgatggggggaatggtaatgatccaatttttgatgcttttggtggacaagggatgcatgttgcagctccattttcttcagatgttgcacctccgccagtattgatgccagttcctggtgctggtccattggggccctttgttccagctccacctgaacttgcaatgcaagtgttcagagagcgaggtgctcctccttttgaaggcaatggtagaaggggacgttctggacctaatttaagtggaccaaccccctttcttt

SEQ ID NO: 14403 - DNA, 628 bp, Gossypium hirsutum
  Clone ID: GOSHI-09MAY01-C74735_1
attattgccaagggacattatagtgaaagggcagctgcttccatttgtagggcaattgtgaatgtgggccatgcttgccattttatgggagtgatgcatagggaccttaagcctgagaatttcttgttgtctagcaagggtgagaatgctcttttgaaggccaccgatttcggcttgtcggtgttctttgaagatggaaaggtgtacaaggatatagtcgggagcgcgtactatgttgctcctgaagtattactgcgtaaatatgggaaagaaatcgatatttggagtgcaggggttatattatatatcttactcagtggtgtgcctccattttgggcagaaacggagaaggggatattcgatgctattttagaaggagaaattgacttcgaaagtcaaccatggccttctatttcagagagtgccaaggacctagtgcgccggatgttaacacaggatcccaaaaagcggattacttctactcaagtcctagagcatccatggataagagaaggtggaagtgcatcagacaagcctatagatagtgcagtcctttctagaatgaagcaattcagaagaatgaacaaactaaagcaacttgccttaaaggtcattgcggaaaatcttt

SEQ ID NO: 14404 - DNA, 762 bp, Gossypium hirsutum
  Clone ID: GOSHI-09MAY01-C74165_1
cgccggttatcgggtacggggcccccttgaagtcagtataggtctccgactcagaattcggttttcgtttccatttcacctcaaaatataatctcatctctccccttttcaatggctacccacagaatctcgtctctccccattgcaatttctacttccctttctcttccctctaaacgccacgattatcgtctcgctcttcctttcaactctctctatggcactcgccttttacttaaaccctccaatttgagctgtttcgtcaccaaacaccattcttcaaccaccgctaccgtctcacttagcctcccaaccgcgaaaccggagagggcgacttccgagaaatccccagtatggtcggcaagatcaataaagtcctttgcaatggcggaattggaagcaaggaagcttaagtatccgaataccggaacagaagcacttcttatgggaattctggtcgagggaacaagccatgctgcaaaatttttaagggctaatggaattacacttttcaaagtgcgagaggaaacagtaaacttacttggaaagtcagatatgtactttttcagtcctgaacatcccccattaaccgaacaagctcagaaggtccttgactgggctgttgatgaaaagctaaagtcaggtgaaagtggggaaataaccacatcgtacttgcttctgggtatttggtcagaaaaagaatcagcaggccacaagatcttggccacttttggttttaacgacgagaaagccaaaactact

SEQ ID NO: 14405 - DNA, 648 bp, Gossypium hirsutum
  Clone ID: GOSHI-09MAY01-C74305_1
cgtcgtagcgatggacagaaaactgacgctatattttctcaagacaatgaaagaaaagagaagaaaaggaattgggctttgaattgaaaagctttgtatcagtttatcggaacttctcttttcgttttcttgcatatactatcggatttttaatattcaagcgtttgtgtataaagggggattaaagttggtggatttgtagattttcagtgccaagttgttttaagttgcttggcacagcttattaactctggcgggggattgtatagatagagaaagtctatgagcgacctatgcttttctacgttctaattcagttgccagagttagatggacagttcctctccagaagaaggcagtgagcaaactgatcattatccattgctaatggaacgagtggaaagccataatggtgaagaacacataattgacatcatgcggcgtgatgatgcttcatcaagcacgtcccaggatgagcgaccttcgggagtggacttgacacagagtgaagatagaccgtcaagcagcacgcaaactcccacaaatcggacttcttcttcctcaaacagattaaactctaggaattcatcattcgcaagaatagtgaagggtatggtcgacgccgcaggagccctttaaactcgggat

SEQ ID NO: 14406 - DNA, 665 bp, Gossypium hirsutum
  Clone ID: GOSHI-09MAY01-C75535_1
gcaaaagcagtaccatttttccatattagctttgctctcatatttttcttcttcttagggtaggatttgcaaaatgcagtaccatttttccatattagctttgctctcaatatttttctgcttcattagggtaggattggcagacgacaacactgttaaattcgatgaaaactatgtaattacatggggaaatgatcatgttttgtctttaaatcaagacactgaaattcaactctcaatggataagtcttcgggagctgggtttggttcgaagctgagttatggtactgggttttttaatatgaggataaagctacctgataaagattcagctggagttgtcactgcttattacttaacttcgaaaggaaacaagcatgacgagctggattttgaattcttagggaatagagaagggaagcctattagcttgcaaaccaatgtgtttgcaggtggtgtggggaatagggaacaaagggttattctctggtttgatcctagtgctgattttcacaactatcgaatcctttggaaccaacaccaaattgtattctatgtggatgacatcccaattagggtattcaaaaacaacacaaacattggcgttgggtacccatcacaagcaatgaaaatagaagctagcttatgggatggagatagttggg

SEQ ID NO: 14407 - DNA, 635 bp, Gossypium hirsutum
  Clone ID: GOSHI-09MAY01-C75745_1
attggttagggacttggggttgtaaaaactctggggtagcctgaaaatgggtctctctctttctcctttggcgctgatagtccttcttgcttgtttaactgctcttcatcagtgtaatggcaaccccttccgtagaaacaacccttttcgtcaccaccatcaccctcgctttgccaagcataactacagagatgcacttaccaaatctatcatgtttttcgaaggccaaaggtcagggaggcttccttctaaccagcggattacttggagaagagattctggcctctcagatggtgcagccatgcatgttgatttggttggaggatactatgatgctggagacaatgtgaagttcggattccctatggccttcaccaccaccatgctttcttggagtgtgattgaatttggtgggctgatgaaaggagagttacaaaatgccaaacaagccatccgttgggctactgattacttgctcaaagcaaccgcacatccagacaccatctatgttcaggttggtgatgcaaagcaggaccattcttgctgggaaagaccagaagacatggacacctcccagaagtgttttcaaaatagacaaaaactctctggtcagatgtagcaggagaaactgctgc

SEQ ID NO: 14408 - DNA, 880 bp, Gossypium hirsutum
  Clone ID: GOSHI-09MAY01-C75695_1
gccaaaagctggtcggagtcagctcacaggttcttgaagaactgcgctgatgccggaaatgttgaagcttgttacacgctcggcatgattcttttctactgcttagaaaatcgagggagtggagcctctcttatggctaaggcggcgattagctgccacgcgccagcgctttactccttagctgtgattcaattcaatggcagcggcggttccaaaaacgacaaggaccttagagccggtgtggccttgtgcgcccgggctgcttttcttggccacatcgatgccctccgtgagctcggtcactgcctgcaggacgggtacggcgtccgacaaaacatcaccgagggtcgtcggtttctcgtccaagccaacgcccgagagcttgcggcgggtttatcatcagcatctgtttcaaacatcgctacgtgctcttggctcacctggagcccccacccgatcccccacccgaccaaccgtcatccgaacgtgccgggatgcccgttgctgagtgattttggatgcaatgtaccggcgccggaggctcacccggcgaacaagttcttaacggattggttcggctctcgggacgggattcccggcccgggtttgaggctatgctcgcacgttggttgtgggaggccggagacgagaaaacacgagttccgccggtgttcggtttgtggtgccgtgaattactgttcacgcgcttgccaggcgctcgattggaaactacgccacaaagccgagtgcgcgccggtcgagcggtggctggacgaagaaggtgttggtggcgacggaatggatgaagtcattgccgaaagctaaaaatggttacggcgatgttaacggccagggtaatatttcagttttaaggcaatat

SEQ ID NO: 14409 - DNA, 640 bp, Gossypium hirsutum
  Clone ID: GOSHI-09MAY01-C75615_1
aagtaggcgcggaagaccacaggatggatgaatagcggtcttccatggataccaccgaagaaggtctcgaccttagcaacttgacggaaacattaagtggtgccttcggggatgaatcggatggcttgtctgttacactagggatcgctgcagctaccggattaggcttattagcattttcagagatagaaacaatacttcaagttttaggctctgctgctattattcagcttctaagcaagaagcttctgtttgcagaggaccgaaagaaaacacttcaacaagtcgatgaattcttaagcacaaaagtggctccgaacgagcttgtcgacgatataaagcaaataggggtggccttaataccaacaactacaactagtaaggctcttccggcacctacagaggcaaacccagagcctaaaagcgaagtatcagcagaaacgcctacccaaattaatgcagtacctgaatcagaatccaaagcgaaaggaagctcagggactccgagaccgctttcaccgtatccttcggtaatgccagttttcaatttacgcttgatactgttgtaacattaatgctttgtaatagaaatggttgcttctttcttcgccgtgggaaaacatcaaacggcttaggtttt

SEQ ID NO: 14410 - DNA, 569 bp, Gossypium hirsutum
  Clone ID: GOSHI-09MAY01-C75155_1
atggtaattatgattcaccatacggttttaacagtccaagacatcctattccaaggccacgaagccccacctcgggaaggtcgtattatgagaggggtagaaggagccccttggtatatgaagattttggtagtcatggctcctacggttcaagatattctccaagagctcatggatttgaatatgagaccgatgaaagatgggacaacagctacctggattattcatctcggtatagtagccatcgatatcacagccggtggtgactggtgaatggcactgttgtaactttcaattttgtcactagatatgattgtttagcaccccctgtggcccacataacttgtaaagatttctagacaaagggtggatgcattgatagttttagcaccagtgaagtgggaagatcattgtacaatgatttagatagataggcctaaggtgaatttaaattgtgtgtttaccttagatgtattaattgccatcttgctcttattataatctcctttcttggggatgatagttgggttgatattagtaatgtttgaaagatcctaatttttgaactt

SEQ ID NO: 14411 - DNA, 678 bp, Gossypium hirsutum
  Clone ID: GOSHI-09MAY01-C75095_1
cggatcataatgctgcaccaaccaagcaaggttatggatatggaacacgagcttcgtgcattaaggattcaactcgcagagaagtctaagcgttccctgttgcttcaaaaagagctagcaagaagcaagggagtcaaggataatttatctaatttatttgaattggatggcgctgaaactttaggttcatatttgaagatcaaaccttgctctgatattgctcccgaactttcgaaatgttcaattcagtggtatcgtgtttcatctgaaggtggcaaaaaagagcttatatcaggtgcttgcaaatctgtttatgctccagagccttttgacgttggtcgaagcctgcaggctgagattatttatgatggccagctgatcaaattgactactactggtgccatggatccagctgcgtggtttgggaaactatgcggaggcacttgtgcggaaacacgatgttgaattcactgtcatggttacccaagtgaatgctgccgatcaaccatcagaatccattcatgtactacatgtaggaaagatgaggatgaagctacgtaaagaaaagactgcaattgctcaagaatattattccagcgcgatgcaggtctgtggagtccgaggtggcggaaacgctgccgttcaggcattgttttgggtgacaaagaaaggattttc

SEQ ID NO: 14412 - DNA, 511 bp, Gossypium hirsutum
  Clone ID: LIB3584-035-P1-K1-D4
cttaatcagctacataaaaatctttgcgatcccgacattctagcagtcaagcatccaaggtgaatgcactttatgagggtagcttaagtccaaaatcaacctctttcaaagagggtttgatccgaaactcatctttcccgagaagcaccaccagggataagctgcgaaggcgtggagataatcttccgttagccgagagccttaaagttgcttcgactattataaatgattcttctaattgcaatcaagctggaaccgacaatcttctggacagcaagagttgctcgctcactcctaacttccttgaatcacttggaaaacttgctgctccaccaactccaagtggtgtttctcaggtttcctccgtaggacctcctctattttctccttactattgttggtgtcccctaggatcatcgacactacaatgctcagctacttccgaactccctgcctcttgcatctcatcttttaagcttccaccgctttcatcaatgttgccaacaaatgg

SEQ ID NO: 14413 - DNA, 320 bp, Gossypium hirsutum
  Clone ID: uC-gsronu33B138b11b1
gtttgatagtggcctactatggtggcgacgggtgacggagaattagggttcgattcctccgtaggacctcctctattttctccttactattgttggtgtcccctaggatcatcgacactacaatgctcagctacttccgaactccctgcctcttccatctgatcttttaagcttccaccgctttcatcaatgttgccaacaaatggttcttccagctcgttgaaaccgactctacctcttggtcttactgatgtaccatcactggattttccagcttatctcccggaaccattggtccgattaccgttggcgagttcaca

SEQ ID NO: 14414 - DNA, 586 bp, Gossypium hirsutum
  Clone ID: GOSHI-09MAY01-C75315_2
gtttcggacgcgggggcggtcccggcgctttcgaagagaatgcattacggaaaatttgtggcagaaggtaaataccaggcatctccggatgcttatcgagctgcaattagagaacaggacagggattggctgatgaagttgctcacatatccgtctgtggaagaagcgatcaagaaaagagtagaaatgaaagccagagcttacggacaagtagtgccggataatatgaacatgaaggatgctgatccggtttacaaaataaacccaagcttggtagccgacttgtacggggactggatcatgccattgacgaaggaagtccaagtggagtacctgttgagaaggttagacggacccgaatgaataatgtaagctgtttatgatgaaacagagataaaaagtcgcaagggatcaacttttcattagcttgtttggtgatgttgtaaattgttgaaggcactaatatgaactacaacattatttttaagatttaccacattaatttcatagtcatttgagattttttttcttttgcaacttagtcaaaagaaagaaataaaaaataaaaatcttttcatttcttgct

SEQ ID NO: 14415 - DNA, 809 bp, Gossypium hirsutum
  Clone ID: GOSHI-09MAY01-C75315_1
ccaacttccaccaccaccgcagggaacccgcgaaagcagatcaacaagaatcaagccagggtggataagagcgagaacttgaccctcgaggcagtgaggtactcgttaattcgacaagaggacagcattatatttagccttctagagagagctcaatattgttataataaggatacatatgaccctgatgccttttcaatggatgggttccatggctccttagttgagtatatgcttagagaaagcgaaaagcttcatgccaaggttggcaggtacaggagcccggatgagcatcctttcttccctgatgaattacctgagcccttgttgccacctttgcaatatccacaggtactacatcccgctgctgattcaataaacataaatccaaaagtgtggcaaatgtacttcagaaatcttattcccagattagtaaaggcaggagatgatgggaattgtggatctactgccgtttgtgacactgtatgtttgcaggctctttcgaagagaatgcattatggaaaatttgtggcagaatgtaaataccaggcatctccggatgcttatcgagctgcaattagagaacaggacagggattggctgatgaagttgctcacatatccgtctgtggaagaagcgatcaagaaaagagtagaaatgaaagccagaacttacggacaagtagtgccggataatatgaacatgaaggatgctgatcagttttttctcctcaatattattctcctattaaatgtgagttgtcgaaacaaattaacatttaccatgttattatttagcccttgattcgg

SEQ ID NO: 14416 - DNA, 795 bp, Gossypium hirsutum
  Clone ID: GOSHI-09MAY01-C75325_2
atttggcacaaccaattattggatttcttttttcttttttcttttttttttttataaatacaataacttcttgatccaaaaggtcacaacttgaagggcgaaagaagaaaaaatcgaaaatggagaaagatgaatcgttggcaactgtagcacccaaagcaccagtaactagtgaaagaaagattctagataacttggacgaaaaattaccaaagccctatttggcaagagcactggtagcacctgacgtggaacatccaaaaggaacggaaggacgtgtgaacaatggaatgagtgtacttcaacagcatgttgccttctttgatcgagataacgatggaattatttatccctgggacacttacaacggtttgcgagatattggtttcggtccagtatcctcttttatttttggagttctaatcaatggagcaatgagttatcctactctgcctgtttatgccagtgaacctggagaacttgttcaccaagtatgctcgcacagagcccggcaagttaacattcttcgaggtgttgcgattgactgaggaaaatcgggtgccttttgacttcttgggatggattttggccaaggcggaatggttggttttgtattcgcttgccagggatgacgacgggtttctatctaaagaagcagctagaacgtgttgtgaagggagcttgtttgagcagtatgccaaaatgaacaagggtgataacaaaaagcgaaaatgaaataaggcataatgacttttttgaccctccaactttataaaacaattattttagccattt

SEQ ID NO: 14417 - DNA, 1060 bp, Gossypium hirsutum
  Clone ID: GOSHI-09MAY01-C75325_1
ccccgcgtccgctactctgcctgtaagttttactataactttccacatttttaatttactcaaaaactcaatgtatataatctacgtgattgaatacatatatacggggaaatattcacttacagctttacatatatttttatttcatttttttctatcattaagattttatgttctgttcatgtaaatgatgcatgttgagttttgagtaaattaaaaacatcaaactatatacttgatgtgaaaaaaattgcactcattaaatatatattgataaaggcaatactctgaattgatatgataaaatatatctaatcctttcaaaattttatgtgacaagtacacatacataatgacctatgcataatgacttatttgaccctccaacttaataaaaaaaatcattttagccatacattaaatttatcgtttttttagtctttaattttgcgttgtttgtcaaatcaccctaaaatgaatgaaaaaattaaagtttgttaactttgctacgtggaataaacgtcaatccccacatggattgcatgtaagcaattaattaaattttttaaaatttaaaaattcaaaaaaaaaaattatgaagattatttaaaaaaataaaaaaatttaaaaaagatataaaaattataaagaaatattttttaacattaaaaaaataattaattgctaacatagcatacatgtggagtgccatgtggatgtatgttaacaaagttaatagacattaacatttccatccattttggggtgcttggacaaataatgtaagttcaagggagtaaaagagaaaaaagaaataataaatgagaaactaaaatatatatttgtaaaattagagggtcaaataagcaattatgccttatatcccacaaattgctgatatggtttgattgggaaatttggaaggggtggataccaaatattttattacccatttacatagacagaatacataaagcgaagcatgggagtgattcagcaacatttgacactgaaggaaggtttgcatatgagatcagttatatatttcaaccgctgaaaa

SEQ ID NO: 14418 - DNA, 589 bp, Gossypium hirsutum
  Clone ID: LIB3828-028-Q6-K6-A3
attaatgcctgtcaactttgctgacatgacataaacgtcaatttccacattgactgcatgtaagcaattaattaaatattttaaaatttaaaaattcaaaaaatttatgaagattatttaaaaaaaatttaaaaggtataaaaattataaagaatatattttaagatttaaaaaaataattaattgctaacatagtatacatgtgaagtgtcatgtggatgtatgttaacaaagttaataaacattaacattttcatccattttgaggtgcttggagaaataataaatgaaaaactaaaatatatatatttgtaaaattggagggccaaataaacgattataccttatatatcccacaaattgctgatatggtttgattggaaaatttggaaggggtggataccaaatattttattacccatatacatagacagaatacataaagcgaagcatgggagtgattcagcaacatttgacactgaaggaaggtttgcatatgagaatcagttatatatttcaaccgctgaaaattcttttataccctctaaaatacagagttgttgaatgcaggttttatgccagtgaacct

SEQ ID NO: 14419 - DNA, 459 bp, Gossypium hirsutum
  Clone ID: uC-gsflmaxxa055e12b1
tcacaactcgaagggagaaagaagaaaaaatcgaaaatggagaaagatgaatcgttggcaaccgtagcacccaaagcgccagtaactagtgaaaggaagattctagataacttggacgaaaaattaccaaagccctatttggcaagagcactggtagcacctgacgtggaacatccaaaaggaacggaaggacgtgtgaacaatggaatgagtgtacttcaacaacatgttgccttttttgatcgagataacgatggaattatttatccctgggacacttataacggtttgcgagatattggttttggtccagtatcctcttttattttaggagttctaatcaatggaacaatgagttatcctactctgcctgggtggataccaaatattttattaccccattacatagacaggatacataaagcgaagcatgggagtgattcagccacatttgacact

SEQ ID NO: 14420 - DNA, 1195 bp, Gossypium hirsutum
  Clone ID: GOSHI-09MAY01-C75205_1
tcgcttatccaacatagcgttactattaaaaaaaaaacccccctctttccaaatataaagaaaagtaaatatggaagaggagagactggaaatgatgttgggaagttacggagggaaggtgagtgtgttggaatgggagacagaatctggtgctgcggaggagacgatgctgctttggggaatccaacagcccactctctccaaacaaaacgccttcgtttcccactcttctctccaactccttcttgatgcctgcggccattctctctccattctccagtctccttcttccttgggaaaacctggagtaactggagcagtcatgtgggatagtggagttgtgttagggaagtttttggagcatgctgtggacttgggaattcttgttctgcaaggcaaaaaggtcgttgaattgggctctggctgtggattagttgggtgtatagcagctcttttaggtgctcaagttatcctcactgatctgcctgatagattgaggcttcttaaaaggaatgttgaaagcaacttgcctccgcgtccgaggggttctgctgctgtgaaggaactcacttggggagatgaccctgacaatgacttgattgaacctccacctgattatgggccaggtgcggtcgtgagcgaaggagcagttgtggatttgttggactcccttacacagctatgcaggccacaaacaacggtgtttttgtctggggaacttcgaaatgatactgtccttgaatgctttctagaagctgcagtgaaggacttcgtggttgggcgcatcgatcagtcacagtggcatccagattatcgtagtccaagggttgtcatgtacatcctagtgaagaagtgaggtcagacgggaaaaaaatcactgcgaattgtgagcagataaagtcggatattcattcagccaaattttgaacatgtttgagtaacctatttcaatcttttggatacagaatcgaaagaccatatcctggcgtgcttaacgatgcttggattggcttgactgtaggcttattgccaaagatatttgattttcctttgatctactcctatggcatttcttgttcttttagtgataatcatttttaattaatcaagagtagtcgactaagctcatggtgtaatggtaaaggacttgattatcagcagatttagagttagatttctaaacaattccaatcct

SEQ ID NO: 14421 - DNA, 1241 bp, Gossypium hirsutum
  Clone ID: GOSHI-09MAY01-C76945_1
ttaatctaaaggaaggccaatgtgttgacgacgaaagatttcggctccaattcttgtaataaaaacttattggagcaaggtatttttgcagtggttacgaagcaagtaacggcaaaatgaatgagacctcggagtttcgttccccacgagactcggacggccacgggacccacactgggtgggtggccgctggaaggtatgtgtttccagcttctacattaggttatgctaaaggagtggctgcagggatggcacctaaggcaaggcttgcagcttacaaagtatgctggaatgctggttgttatgactctgatattctcgccgcctttgattccgccgtggctgatggcgttgatgtgatttcgttgagtgttggtggtgctgtggtgccttattatcttgacgccattgcgattggtgcttacggtgctgctgagaaagggatttttgtgtcggcctctgctggcaatggaggtcctggtggactgactgttaccaatgtggctccatgggtggctaccgttggtgctgggacgattgatcgggattttcctgctgatgttaagcttggaaatgggaaagtggtgactggagccggggtgtacaatgggcggggcttgtctccgggtcggatgtacccgttggtttatgccggatccggtggtggtgatgggtattcttcttctttgtgtttggaaggttctttggatcccgacttcgtgaaaggcaaaatcgttttgtgtgatagagggattaattccagggctgccaaaggggaagttgtcaagaaagctggaggggttggaatgattttggctaatggggttttcgacggtgaaggcctagttgtcgattgccatgtgttgccagctactgctgttggtgcatcaaatgcagatgagattaggcaatacattgattccgcatcggaagtccaaatcatctgccactgccactattctctttaaagggactcggttaggggtgaggccagctccggttgtggcctcattttcagctcgagggcctaatcccgagaccccagaaatttaaagcctgatgtgattgctcctggattgaacatccttgctgcctggcctgataaagttggtcctgctgggattccatctgataaccgaaagacagagtttaatattctttcaagcacttcaatggcttgccctcatgtttcaagattggctgctttgtttgaagcagctcatccttgatggagccctgca

SEQ ID NO: 14422 - DNA, 597 bp, Gossypium hirsutum
  Clone ID: GOSHI-09MAY01-C76665_1
ctgttgcgtgggcggacgcgtgggtttgaacccactcttcctttccattttcctctctttttctcttcatttccttcatctctcacaaccattaaaaaaaaaaaacttttcaaactccattgatataaacctaaaaaagcttagcttaatgggtcttgatgatgcatgtaatacgggacttgttctagggttaggcttctcatcgacgccggaaactccatccaaggccgacaaccaaaagcccaagaagtcaacagccaaggtggcgccggtcacaagttttgaaccattccttacgctgggtctttccggtgatagctacggagttactgttgccaaaaaggttgatgtcaacaacaaaggtggtggttatcttcatcatcgccatgaagactctccccccaccgctgccgccggtgatttgtaccgtccaggttctccccctagtgccggttcatcgttttctagtggcagggtgaagagggagagagaccatagctgcgaagaagtcgaggtagagaagaattcgtgtagagttagcgatgaagacgaccatggcgtcaatgcaagaaagaaacttaaacctaccaaacaaca

SEQ ID NO: 14423 - DNA, 461 bp, Gossypium hirsutum
  Clone ID: GOSHI-09MAY01-C76385_1
ggaaatagcagccgcaaagactgcctcaacctctcctctgttctttatgccgaaactctcctttttcaactttgatttagacgaagtgaaccaagaggtcgacgtcgtgcctacgttggtaaggatttcctttctcccttttattttttttttgtttggtgtacataagaaacaaagaatcaaagaaatcaaaaagaaaagagaaaaaatgacggaaaaaatcaccttaaaaaaaactctttgcttcgattttccgttcgtattcaatatcccaaaaaaagccccctcttagattttacaaatcggctttctattggccgaatctaggattacaaaataatatttctctattttccctattctcgtgtattctggtactggctgattttgctgtgcttgcagttacacctagctggagcaatggacgctggcgcacacgcgcagaggcacatacacgcgtg

SEQ ID NO: 14424 - DNA, 619 bp, Gossypium hirsutum
  Clone ID: GOSHI-09MAY01-C76355_1
gtggttcacagggatgttaagtgcgcaaacatattggtagatgcaagcggatctgtgaaacttgcaaattttgggttggcaaaggcaaccaagttgaatgatgttaaatcatgcaaagggacagcattctggatggcccccgaggtcgtcaaccggaagggtcaagggtatggacttcctgctgatatatggagccttggttgtactgtgttggagatgttaacccgtcagattccataccatcagttggaacgtatgcaagcattgttcagaattggcagaggtgagccaccgccggttcctgattctttgtcgaaagatgcacgagattttgtcttgcaatgcctacaagtcaatcctgatgctcggccaactgctgctaagctcttgcagcatccatttgtgaagaggcctcctccctcgcactcaggctctgcatcccctcatcttggccggcggttttgattgttcagccttgatactaaattgcaacaacttatcagatgggtactctctttgggtgccgctatgtccatgatgaaaaaagaaaacgctttgcctccaaagctcaatgctttttaacttttacttttgcgcctggagactaaagagtcgacac

SEQ ID NO: 14425 - DNA, 567 bp, Gossypium hirsutum
  Clone ID: GOSHI-09MAY01-C76275_1
ctttcttccaggagcttacatcttatataacccctatgtggggtaaggataaaacagccgaaaaaaggagagttgctatctgtatatttgatgatattgctgagcactgtcgtgaggcagctcttaagtattatgacacatatcttcccttccttttggaggcatgcaatgatgaaagccctgatgttcgacaggcagctgcttttggggttggcttgcgtgctgagtttggcggatcggcgttcaaacctcttatccaagaggccctctccacgctgaatgctgttatcagacaccctaatgcatcgcatttggacaatgtgatggcttatgacaatgcggtttccgctcttggaaaaatatgccaatttcaccgggatagtatagatgctgctcagattctcccagcttggttaagtggcttgccgataaaaggtgatctgattgaggccaagattgttcacgaacagctatgttctatggttgaaaggtcagatcacgaacttttagggcccaacaatcaatatcttcctaaaaatatttctgtttttgcaaaggttttatgtt

SEQ ID NO: 14426 - DNA, 973 bp, Gossypium hirsutum
  Clone ID: GOSHI-09MAY01-C77555_1
cccacgcgtgcgaccacgcgtccgcccacgcgttcgcgagtcccggagaatgatcgccacggacttactttcggtagctttggagtggaacatgattcttcgaggaattttgctcctggttttcatgccactggtgttgcataagactcaaatggggaatctgctgcaagtttgtctgtagctcctgatactttcagtgatgattctgctgctggcaagcccatcaacattatagatgatcaacttagaaattctggatctaactctccaccctctggtaccccacccgtccgtcaattgcctgataagaaagatgcttcaagcccccagaatttgggcagttatgccgatattggaatggtccaggacaacggtcaatcgtatgctccttcagagccacaacagcagcatgatcctcctgaattacccagtttttcggcatatgatccccagactggttatgatttaccatattttagaccctcaatggatgaaactgcaagaggacagggtctactatcttctcaagaggccttaagcgggcatgccccccgcgtccccccacccgcccgcccaggcgtccggcagcaacaacctccagtagcacagatgtatcctcaagttcatgtgccccattatgctaaccttatgccatatcgtcagtttgtctccccgatttatctgccacaaatggctatgccaggttattccagtaaccctgcttttccacatccatcaaatggtagcagctacttgctcatgccaggaggtagcactcatcttggtgcaaatggtgttaagtatgggattcagcagttcaaaccagtccctgcaggcaatcctactgggtttggcaattttaccagtccgtctgggtatgcaatcaatgctcctggtgtagatgggagtgcaacaggtcttgaagattcatctcggaccaaatataaagatggcaacatatatgttcaaaatc

SEQ ID NO: 14427 - DNA, 664 bp, Gossypium hirsutum
  unsure (1)..(664): unsure at all n locations
  Clone ID: LIB3585-032-P1-K1-C7
cccacgcgtccgcccacgcgtccgagcaggcacttgataccaagcaacagcatgattcttctactagatcgaaaggaggagatcatcaggttgccgtttacactcaaacatgtattcatttactcaagaagatgattggtgtttcaactgcatttcaggagctgaaagcataggaggtaagcacccgcctaatggccacatgccgccttcatctgaagttgctctccctctggtgacagttcccacatctgatttcaacaaggataatggcattatgtgggcatcatctcctgatcgccttgagttgcctccaaagccattccatcattccaactgctctgattcaccacgtgtctcagaatcaggctccgatatatatagcaagcgggaagtgatacaaaagctaaggcaacagttgaagagaagggacgatatgattctggagatgcaggatcagattacagagcttcagaattcactgaatgctcaaatttcacactcgaggtatttacacatacaagtgtgccgttgcaaatcgagactggttcgatcccaagagagaaatccaagggctgaggaaggtgattgccgatcattgtgtagtacgcgtcaacacanacgacaagacttcaacaggtacagctttggcacctgacaataaaaa

SEQ ID NO: 14428 - DNA, 547 bp, Gossypium hirsutum
  Clone ID: LIB3583-004-P1-K1-G4
gccttgctgagtaccttatcaatccgccttggtggaaggtgaagcacgcacttgataccaagcaacagcatgattcttctactagatcgaaaggaattggatcttctgacaggaggagatcatcaggttgccgtttacactcaaacatgtattcatttactcaagaagatgattggtgtttcaactgcattgcaggagctgaaagcataggaggtaagcacccgcctaatggccacatgccgccttcatctgaagttgctctccctctggtgacagttcccacatctgatttcaacaaggataatggcattatgtgggcatcatctcctgatcgccttgagttgcctccaaagccattccatcattccaactgctctgattcaccacgtgtctcagaatcaggctccgatatatatagcaagcgggaagtgatacaaaagctaaggcaacagttgaagagaagggacgatatgattctggagatgcaggatcagattacagagcttcagaattcactgaatgctcaaatttcacactcgagtcattt

SEQ ID NO: 14429 - DNA, 633 bp, Gossypium hirsutum
  Clone ID: GOSHI-09MAY01-C77065_1
gattacgtggagagcaaacgcagttgtgcccctcgatgatgttgacttgacacccagtagtacaacaagtaccgacgtggtgtcctcccggattcactctttgtaccttcaacggcaatcacacttacgaagagctgcaagactgacttctctatcatcggcactcaattcagctgaaaggatggttgaggcaatattccgaggcaacccggtgggaagaaatcaggagcaagcaccagcagcagttgtcgatgatcgggactcgttctcaagcattgctgctgtaataaactcggagaggcaaatggacacggccgtcgagatagattctgtggtttcactttcggcttcgtcttctagaagaagaaacgatgtattgagggtctcggatgtcgacagcggtgactctcgggcgcataggaggagacgattgaactaggaaactagaaaaaggatttcacaatgtcatggacctgcttcaataaatagttctttttaattgcagccccatttatattgctctcccttcttcatatgtaaagatttttcagctccaaatatattattcccaaacataatatggattgaaatgttatcttcctttttcctatgaatcactccatttttctgtgc

SEQ ID NO: 14430 - DNA, 420 bp, Gossypium hirsutum
  Clone ID: GOSHI-09MAY01-C77025_1
cccgaaacaatatcgtccaaaggacagtgctgcgctatatatcaacttctccgcaaaatcttgaaaccaaaatttctcgatctgcagatcaatcgaaaattttcttagtttctttctatctttgccgtaagcagaagaaatgggacttcttagtatcattcggaaaatcaagagaaaagaaaaggaaatgcgaatccttatggttggacttgataattcagggaagaccacaattgttttgaagattaacggagaggatacaagcgtaattagtcccactcttggcttcaacatcggaaccatcacataccagaaatatactttgaatatatgggatgtaggtggtcaaagaactataagatcgtattggaggaactattttgagcaaactgatggtttggtttgggttgttgatagctc

SEQ ID NO: 14431 - DNA, 747 bp, Gossypium hirsutum
  Clone ID: GOSHI-09MAY01-C77355_1
cccagcgtccggtgctattatatgtgagatcgcagattgaaaaagcacctattttagagatcgatcagcaactttatgcacctctttatcggaatgtttctatgttcaaaaggagctatgaattgatggaaagcacactcaaagtatatatctacaagggaagggaaaaaaacccgtatttcataagccggttctcaagggtatttatgcctctgaaggatggttcatgaaacaactgcaagctaatagaaactttgttactaaaaaaccaagagaagcccaactgttttacttaccttttagttctagaatgttggaagagacattatatgtccctgattctcacagtatccagaacctcccacgcgtccggaagaactatgtggacacgattgcagcaaaatatccttactggaacagaactcaaggagctgatcattttatggtcgcttgccatgactgggcaacatctgaaacaaaggaatacatggccaattgcataagagccctctgcaattccgacattagagaaggttatatttttgggaaggatgtctctcttcctgagaccaccattcggaaccctcagagacccctccgagacctcggtggtgaacctccttcgaagagatcaattctggctttctttgcaggaggcatgcatggttatttaaggccaattctattacaacagtggggaaacaaagatcccgacatgaaaatctttggtacaatgcataatggtaa

SEQ ID NO: 14432 - DNA, 636 bp, Gossypium hirsutum
  Clone ID: AI727746.1
atttttgggaaggatgtctctcttcctgagaccaccattcggaaccctcagagacccctccgagacctcggtggtgaacctccttcgaagagatcaattctggctttctttgcaggaggcatgcatggcttcttagaccaagtgagtagcattatctgagccttttatcttagaacaatctgatcatgccttgctgtcaatgatcataggtgtcctctgttcctgttttgcttcatttgcttgctgtaagttcatctttgcaaatatgttgccataaaattgtgcaaaaaaaaaaaaaaaaaaaaaaaaaaaaaaaaaaaaaaaaaaaaaaaaaaaaaaaataaaaaaaaaaaaaaaaaaaaaaaaaaaaaaaaaaattattaaaaatttattaaaatataattatttaaataaaattataatttttttttcggggccccccccggggggaaatccccttcccccccttttgtgttcttttttccccgccccccctggggccgtttttttacatttttttgacggggaaacccctggtttttcccttttattccccttgagcccattccccctttcccccagttggttttttaccaaagaagccccccccctttccctctcccccacatttgcccc

SEQ ID NO: 14433 - DNA, 696 bp, Gossypium hirsutum
  Clone ID: GOSHI-09MAY01-C77315_1
tcgaaagagagaaagaaaaagggcgctgttctctaaatgaacctaacagtgaggagattgctgcctatttaaacagagtccattttggttcccatcctagtgaggaaaatgacgaggatggagaagttgaagatgcaattgaatgtgaagaagactcggctgaaagtgatctcctagaattaaatatggacaacaacagcagcaacaacaacaaaaactacaagttggtgtatgcttttgctgctcgtgattcaagagaacctcaaataaatgaagacatcacaggtagaaactctgcctctagcaaattaccaaggaggagtacttctctacagaggagcatatcggacggaattgactggggcatgcagaaggacaggcatcaagattctgttgataatgatttagagtggaatagatttactggatctggagaagcatgtagaaacaaagggttatggagatgaaatgcatggatataaagctgtaaagggtcttagggaacaccttttatctggtacaagggctggtagggtttatgctagtccaacatgttcttcaagagatatcaacaatgtagctcaagagaggccacctttggtgcctggtagtgttccgaagtcgaggttggcagaatgcaggagtgaagccaataatgctaggaaatcaagatggtgaaatacaattttgttgagt

SEQ ID NO: 14434 - DNA, 1127 bp, Gossypium hirsutum
  Clone ID: GOSHI-09MAY01-C70975_1
gttgttggtccgggacttggaagggacccatttcttctggaatgtgtgagcaaaatcatgacacgtgcagggcaatcaaatgttccaatagttgtagatggggacggactcttccttgtgacaaacagtatcgagcttgttagtggctatcgcttagctgtcttgactccgaatgtgattgaatataagcgcctggttcagaaagttctaggttgtgatgtaaacgatcaaaacactcatggggaactgctctctctttcgaaacagatcggtggtgtgacgatcttaaggaaaggaaagtctgacctcattagtgatggtgaaaaagtccaatcggtaagcatttagggatctccacggcgctgtggtggccaaggtgatattctttctggaagtgttgcggtatttttatcttgggctcgtcaatgcaatctggccgccgaaagggaatcaactatcagtcgaacaaatccaaccgtgttgggttgcattgctggctcagctttattgaggaaggctgcagctcttgcttttgagcataaaaaaaggtcaactcttactaccgatatcatcgaacacttggggcaaagcttggaagcgatttctccagtatcttgataatagacaccaacacagatatctgtccccgtatgcactcagaaggctgtttcgatgacaaaagtatagcgcgctaaaaacttttctttcatgtaatggaatataataatatttcagtgtttgcatggaatgttgatgaacataatgtaaaaggtgagaggattctattataggttggagagcaatgaagatctctactattttatcttgaggtgattaaagtaccttggtccttaacccgttgaccattcgggtactttcactttctagcgtcacgtcgcaagccaatattgtcttcttttgagtacctgcaagtctctcaagatccctccattcggtctggcagggcaggtgggttacttgaagaagacaataccagtttgtgatcactatgccaacacagtgcaactacccagggaaatgatagtattaggttggtcggtgagtcgtgacggttgtacaggcatgtcaaaaacatcaacaataaagatgaatgaattcacctaaaa

SEQ ID NO: 14435 - DNA, 874 bp, Gossypium hirsutum
  Clone ID: GOSHI-09MAY01-C70965_1
cggacgcgtgggcggacgcgtgggcggacgcgtgggcggacgcgtgggcttttattaaaaattttcggctttgtccaaatctacgttggtggtaaaccgtgggaagcatagattggaacttggaactgaaactaaaacactggaacattcacgggttttgctagggtttaagcagaatcaatcaaacacaagtaagctcattgtcaaacaacctcaacaccaggctttttgaccttggaagctaatctatccatggatcattttctgagaaaagcttcattttcttctggtagcaagtccatagttcggatcatagccattggtgctgctagtgccggtcttctttacttgaacaacaacccagattcgaaagcaactgtgaaactatcaattcctacaatattgcgtgaacacctcgcatttcaaggacacccttcttttgtttcatctgatcattggcaatttggaaaatttccattatttttatcgagagttgatccggctctagccggagatgtcgcaaagggagctccggtagcggttggagatgggggaaaaccaagttgtgggatgtttaggtagagagattttattgccaatgcagctgcaaagattgctcctgctgttgtcaatctgtctgttcaacaagatttatatgggtttacaaccgtgaggagtatgtgttctggaactattattgatgccgatggtactattttaacatgtgctcatggtgtagttgattctcaaggcagacaactaacaaccaagggaaagattgatgtcactttgcaagatggccgaacatttgaaggtacagtaggtaattctgatttacattctgatattgcaatagtcaagatcaaatcaaaaa

SEQ ID NO: 14436 - DNA, 849 bp, Gossypium hirsutum
  Clone ID: GOSHI-09MAY01-C70835_1
gatgaaatcaatggaagagatgtggcaaaagcaaatggtatcactgcaaacaagtcttactgcagcccgaaagagtcttgctgctgacaatggtgcaggtcagctaggaagagctgatgtgttatcgcctcgatgctatgattctgaagataacgtgtccatgggatctcgaacaaccggtgggaacacacctgtcttattttctggtgctatgcctgatgttgttggggggagagagaatggttctttgaatgcactgggcaatctgttaaaggaatttgagcagcggaaacaaaattttgatgccgatgcaaaatctttaattgacatcagagtgccacagcaagcttctaatatgaatcctgatgatgaacttcggacattaagactccggttcgagacatggaagaaagattataagctgagattaaaggcagccaaggcaagactacataagcgtggccaccccgaatcagacaaagctcgaagaaaatggtgggggaagctaggttcaagagcgtgatagaattcccaggttgaaagcaatacgctgaactgctgccaaaaagaaccgcccctcttccattctcaggtacagtttctttacatttatggtaacagatacatattataatgtgcataagacaaatagggattttgttgaattgagactgtttttttgctttgaatagttttgtcatagttttcttttttgtgtataattctgtgtttgttagtgatgtaaggatctaaacttttgtaatttctttgtaattcagatgaaatcagaaatgtttatatgcctttccttaacttttttgtatggaaaagtgcaattttagtttgtcc

SEQ ID NO: 14437 - DNA, 700 bp, Gossypium hirsutum
  Clone ID: GOSHI-09MAY01-C70595_1
gccacgcgtccgcccacgcgtccgctttttttttaattttttttttttggctcttttggttctcattttctcagctcttcccccggtggttgggggaaaccaaagcactaccgacctccgggaaagaaaaaggaaggaaatgctgcgagatatgtgacgaggtcacaagctattaaaatccttcaagttagcctttcggggtgcgggggagtttcgcttcctcaaaggagtatttccgagagagccaaagaagaaagtgaaaggaaatcatcccacttactatcacttgaaggatgtcatgtacattcttcatgatccactacttgagaagtttagagaaataagggcatatcaaaggaagataaagaaagctaaggctaaaaagaatgatgagttagcaaagcttcttctatctcgtgcaccttcttacagacttgatatgggcatccgtgatagggatccaacatttattgatgcacttagagatttggatgatcctcttacaatggggcacctgttcccaatgttgcctgccattggataggcttaaaattgaagtgaagcgcattcataacttggcgaagggtgggtccatgaatgggcaagcctacttttctcgcacacataaattgcggaaggcttttgtggctgtaaaaggtatatattaccaggctgaggttgatggtcaaaaaatcacatg

SEQ ID NO: 14438 - DNA, 524 bp, Gossypium hirsutum
  Clone ID: LIB3582-005-P1-K1-F7
ctaaaatttccccctaaaatcggtgtcctcaaaacacctaattcttactgagcaagccaaaatgggagttcacggtctatgggaactgctagatcccgtcggcagccgcgtgtccgtcgaaaccctagccggaaagaaactcgccatcggtgaactctgaagtgggcctattctcgttgagaaaaacaaaaagccttgtttgttaaacagagaataaaaagtgagagagacgaagtttggttagtcccacatcacaaatttctcaaacaaagctataatgggacaatctaccatctggtgaagtcacccccctattggctcaccattcagcatgtactgacctccgggaaaaaaaaaggaaggaaatgctgcgagatatgtgacgaggtcacaagctattaaaatccttcaagttagcctttcggattttaggttcatctcttctttctcacttttattaatttttattattatttaagcttcctttatttgccttcttttatcatttttttcatgttgtttta

SEQ ID NO: 14439 - DNA, 931 bp, Gossypium hirsutum
  Clone ID: GOSHI-09MAY01-C70785_2
ccgcagaattttttttttttttttttttttttttacttttttttttttttttttttttttttttttttttttcgaacaaacataaaccccgggatcgacataaattttacatacaaaaaaggaaaggcttggaaaaaagcttttggtccacttcttatctatcttaattctgcttctccggataaagattgccgcaaaaaactctggaatgactctaaaaaacagttgattgaaaaaatccaaagctggccatacaatttcacccgatcaaaaaatcttcctcacgctggaaatcaaagaaaaatttgcggtcaattactattacaaaacagatgcttggatgaagaattaatgcaggcgcaatccccctttgtggggttggcaatgcctgaaaattttggatcatggcaaaccgaaggaaagggctatcaattttggaccgaaacaaacaacactggccgtttcaatattaaaaatgtcccgcgaggggagtttaatttgtacgcatgggtccatggtttcattggagaactacaaatcggatctctgcatccccattcaacctgggaaaccatggccaactcgggtacccccatttatgatcctccaagatacggccctacattgtgggctatcgggattcctcaccggacggtggctgagttcttcctaccggagccccacccaccatttgttatccccttccgcctcgatgccgccgacagattcagacagtacggattgggggatcgctactcagatatttatggtcatggtgatgtcgtctacactgtgggtgtgagccatcatcctcgggactgggtctgtgctcatgttctcagaaatacagggaatattaccgactggccaacaaccacatggcagatgaaatgcactctgcatgatgtgaacgagaaaggaacctacactg

SEQ ID NO: 14440 - DNA, 757 bp, Gossypium hirsutum
  Clone ID: GOSHI-09MAY01-C70785_1
gtaacatacaagaaaggagaggcttggagaaaagcttttggtccagttcttatctatcttaattctgcttcttcggatgatgattgccgcaaaaaactctggaatgacgctaaaagacagttgagtgaagaaatcgaaagctggccatacaatttcacccgatcagaagatcttcctcacgctggagatcgaggagaagtttgcggtcaattactagtacgagacagatgcgtggatgaggaattaatgcaggcgcaatccgcctttgtggggttggcagtgcctggaaatgtaggatcatggcaaacggaaggaaagggctatcaattttggaccgaaacagacaacactggccgtttcaatattaaaaatgtccggcgaggggagtataatttgtacgcatgggtccatggtttcattggagactacaaattggatctcagcatcaccattcaacctggtaaagttaatctctaaataaatctacttcttgtcggcttaaactattgggcttcctttctggcccctcaaactagctcttgttggattttcatggacaagtctatgctgattatcctctatactaatgaaatttttattattttatttttaatttgtataaataaatttattttaaattttaaatcataaatactaaatcctaaaatatttcatacaaacccaaatgcaaaacactaaaaccctaaactataacctttaaattctaaatgttcaactttaaatattaaattttaaa

SEQ ID NO: 14441 - DNA, 667 bp, Gossypium hirsutum
  Clone ID: GOSHI-09MAY01-C70185_1
caccactttagaacggtgccggactgtgtcccgtcagtccaccatactacccaagcccaccaaaaccagtataccaaccactgcgcatctccgatccagtatgagcaaacgagaatcgcgccaccgtcggagcagttagaccatcatactcacggttgaaccggtagaagcaccgttacgctagatggccataataaccgtaaatttggcactgtatacgaggacgaaagccacgcccgcgcaaacgaccaccgcgcacatcactcaaactagagtcagtctctagaggagtttcgaccagattgacatagatcagtatgtcaggcaccgtctgtgtttgggggctttcgatctctaacaggaacgttgacaagcttttggaacggaagagcctccggtgagaatgataccggggttaccatagcatcaaactctgatggtataccggcaacaaataaattctacttttttggtctccgaaacactagatctagaggcctaaagcagagcacagagattctgaatgttggcaaggtattctttaatagagagctcacatttttttacggatacaattcatgcctaacacgagacaccttagcaccaatagatgccacaacagtcgattcacagtgttccagacatcgcaagctgacttcgcgtttgt

SEQ ID NO: 14442 - DNA, 615 bp, Gossypium hirsutum
  Clone ID: GOSHI-09MAY01-C70005_2
cccatgcttccgcccacgcgtccgggtaagaccacgctgtggcactttgtcgtccaagaaattatacgtacagaaggtttaagagctgcccgtgctacaagagaaaacaaaagttctcttcttgaggatgtttcccccgatatggaagagcactaccataaccttggtcttgaggtggtttcacatctaagtagtgaactcgaaaatgtcaagaaagcagcatctatcgatgcagaaaccttaacaggaacggttgctaaacttggccatggactcctaaaagcacgagatttcttgaagtcggagatgaaaaatacgaacgaacaaagtggtttccatgaagcattaaagagttttgtgcagaatgcagaagttgatgtcacgtcattgctcgaggaagagaagagaataatggcattagtaaagagcactggtgattattttcatggtaacgcacataaagacgagggcctacgcttgttcgtcatagtacgcgactttttgataattttagacaaggtttgcaaagaagttagaaatgccccaaggaaaccggttaaaacacataaaaaacatgcttccaatgcatcatcttcttcttccgagtcttgtctt

SEQ ID NO: 14443 - DNA, 632 bp, Gossypium hirsutum
  unsure (1)..(632): unsure at all n locations
  Clone ID: LIB3584-008-P1-K1-A2
ccggaaccgaaaccccccgggttcgacccacgccgttttttcgcacataaagacgagggcctacgcttgttcgtcatagtacgcgactttttgataattttagacaaggtttgcaaagaagttagaaatgccccaaggaaaccggttaaaacacataaaaaacatgcttccaatgcatcatcttcttcttccgagtcttgtcttgcaccaacttctcctgatcctcatcagaagctttttaatgcaattgctgaacgaaggatggaaaattttagttctagttctgatgacgaaagttgatacttgatagtgttccttttaaacaagttgatgaaaaccggaatcgattgaagcatttgtgccgggattgttcgataaaggggatacatttgaagtgccagaagaaaaggggttcaaattcaatgataaagtctcatgaagctaacatcaaaaactgcagccgagaccattggtattagattttatagttgattttccccttttcagctcatcttgttgtgtattagtagttggattattaaagattctttcattttttttcttaaaatttataatccttctgntaattctctgttaataatttttctttgaaaaaatacattttattcatc

SEQ ID NO: 14444 - DNA, 585 bp, Gossypium hirsutum
  Clone ID: GOSHI-09MAY01-C70385_1
tgccgttatcgctgaaggtttcaagtgcttgaaggttctcaagttgcaaaattgtaaagggttgtaagatgtttgtttttggttctggtttgatgggtgtttctctattttgagtctttttatatatgtatttcaattccttacatacctgttctttattaagttatcctatattacagtctgagattggggcaatttggcttgcgtcctctatgtatgacagctattacagatagaggattggctttgattggtgggggtcttccttccctacaatctttggatgcatcatattgccgaaagctgacagacaagggattgtcagctgttgctgacggctgccatgacctgaggagcctgcatcttgctggctgcagatttgtcactgatggattgttgttttctctctctaggaattgtaagaatctagtggagttaggcttgcagggatgcaccaacataagtgactctggactagcagatcttgtaaatggttgtcaacacattaggtttttagacattaataagtgcagcaatgttggggatgttgggatttccaaggttgctgaggtttgttcatcttct

SEQ ID NO: 14445 - DNA, 769 bp, Gossypium hirsutum
  Clone ID: GOSHI-09MAY01-C70315_1
cccacgcgtccggcattagctagttggaggagcctcgaggctctagacttgtcacataatgcactcactggtagcttaccctccggtttatttcagcttcaaaatctaacaaagcttctcttaatttctaatgacatttcgggcacaatccctccggagattggcaattgcagttcccttattagagtccggcttgttaataacagaatcagcggaatgatcccgaaagagattgggctcctagacaaccttagcttccttgacctgtctgaaaaccatcttggtggctcagtgccagatgagataggtaactgcactcagttgcaaatgttgaaccttagcaacaacaccattgaaggttcttttcctagctctctatcttctcttacgagacttcaggtattggatgtttctgttaatcagtttaagggccaaattccagagagttttggccaactaacttcactcaatagacttatacttagcagaaactctctttctggagcaatcccttcctctcttggtcattgtttaaatcttcaattgcttgaccttagcagcaatgcactatctggcacgataccagaggaactgttcgacatccaagctctagatattgctctaaatctaagttggaatgcactatctggggtaatcccacctcaagtttctgcactgaacaagttatcaatattggacctttcacacaacaagcttgaaggtgacttggtagcaatttctgggcttgacaaccttgtttctctgaaca

SEQ ID NO: 14446 - DNA, 771 bp, Gossypium hirsutum
  Clone ID: GOSHI-09MAY01-C70305_1
ctctttggcattgcttgctaagtagctattgtccttcgcatttcctaattcgtacgcaacgcatcccgtttttcagtttggggcttcgctcactcactctctgctttattgaaagctcacaaatctttcttgcgctcaccctcttaagctcaaatcacccacgaatctgatggccatgcaggaaggaagtcctgctgacactcatactcccagtgctcaagttgttggaaatgcttttgtggagcagtattaccatattcttcaccaatcacccaatctggtgcacagattttatcaagattcaagttgtttaagtcggccagatatggtcggcaacatggctacagtaacaacaatgcaagcaattaatgagaaggtactatcgctgaattaccaggactatacagcagagataaaaactgcagatgctcaggactcttttgagaaaggggtcattgtagtggtaactggatgcttaacagggaaagataatattagaaggaagttcactcaaaccttcttcctagctccccaagacaaaggctactttgtcttaaatgatgttttcaggtacgttgaagacaacgagttgcagaactctgttccggctaatggcatcagtgaacaggcttccatatctgccttgacaccagaaccagagctcactgatgaccaacttgctaaggaaccgttgacttactcagaagaggaagatattaataatggtactgaagtttgtgatcccttggataagaggaaggatcagtagtt

SEQ ID NO: 14447 - DNA, 414 bp, Gossypium hirsutum
  unsure (1)..(414): unsure at all n locations
  Clone ID: LIB3493-037-P1-M1-E4
ctgctttctttcaaagctcacggattttctctctttggctcgagagctcaaatagctggcgaatcanatggccatgcaggaaggaaatcctgcgggtactcccagtgctcaagttgttggaaatgcttttgtggagcagtattaccatattcttcaccaatcaccgaacctcgtgcatagattttatcaagattcgagttgtttaagtcggccagatatgtatggcaacatgacaactgtgacaaccatgcaggcaatcaatgagaaggtactatcgctgaattatgaggactatacagcagagataaaaactgcagatgctcaagactcttttgagaaaggggtcattgtactggtaactggatgcttaaccggaaaagacaatgtgagaaggaaattcacacaaaccttttt

SEQ ID NO: 14448 - DNA, 672 bp, Gossypium hirsutum
  Clone ID: GOSHI-09MAY01-C71855_1
ggcgaagcaaaaacttggagcggaggaggaaagcaagtagtttgagagagccatctctctcctatacacattctatctctagtatggcgccaattcggatgatagatatcgccgtcaacttcacagatggcatgtttaaaggcatttataacggcaagcaacatcacgtttctgatattgctactgttctgagtcgagcttggaacgctggcgtcgatcgaattatcgttacgggtggttcccttgaggagtcaaaggaagctcttgctattgcagaaactgatgggaggcttttctgcacagttggagtgcacccaactagatgcaaggagtttgaagagagtggggatcctgaaaaacattttcaaggacttttggcattggctaaggagggaattcaaaaagggaaggtggttgcaattggtgaatgtggattggattatgacaggcttcacttttgcccaccagaagttcaaaagaagtattttgagaagcagtttgaattagcatatgccacaaagctgcctatgtttctgcatatgcgtgcagctgcagaagatttctgtgaaattatggaacgaaatattaacaagttcactggtggggttactcattcatttactggtagtgctgaagaccgtgataagcttctctcatttcataacatgtata

SEQ ID NO: 14449 - DNA, 885 bp, Gossypium hirsutum
  Clone ID: GOSHI-09MAY01-C71785_1
cacaaatcccataaactctaggttaaactagatttcttattttaataccaaaaatctcagagcaaaattttaaaaataatcctgttttttgttcttattccagtatcatccttgttctctaagtaattcaaagacaaccttaatttttcacttgtttttcaagcagttgtcagaaccataaaaagaaacccggaaaaagatcaattttgtctcttgttttgtaattttattgtctgggtattatgcatagatctggaacaactatggcttggaacgtgttcaagttttgtacggtcctgaaaggccttggctcgatcatgatcctgttggttttagggtcgtcggtgtcacttattacgccgtcgttttcaccaattacggacctgctttgttcgatggtggccttcactcgttcattgctgttgttgtattgatcttatttcatttcttgttggttatgctgttatggagttacctcactgtcgttttgactgattccggtactgtgccgcctaactggaaaccggcttcggatgaggaaagaggggaggttgacccattgaatgagtcggagtttgacggtttgcagccggacctgtcaagtcaaaggattcgatattgttggaagtgcaaccagtttaaaccacctcgttgccatcattgttctgtttgtacgttcgagatttatcggttccatttctttttatatctgcttatgaaatcgttgttcatgatgatcggttttaggtgggcggtgtgtgctaaagatggaccatcattgtgtatgggttgtcaattgtgttggtgcattgaattacaagtatttccttctgttcttggtctacacattcctcgagacaagtcttgtgacgttggccttattct

SEQ ID NO: 14450 - DNA, 879 bp, Gossypium hirsutum
  Clone ID: GOSHI-09MAY01-C71665_1
cggacgcgtgggttcaaatctaatgggaagattacggccctaaaactcgatatattagttgatgcagggatgtcagccgacataagtccagttatgccgcataacataattggttcacttaaaaaatacgactggggtgccttagcttttgatataaaggtatgcaaaacaaaccttgcaagtagatcagcaatgagggcccctggggaggtacaagcatcatttattgctgaagctatagtagaacatgtggcatcctcccttgccctggaagttgattctgtccgaaatattaatctccacaagtttgaaacgcttaaattatttttcaagacctgtgctggtgaaccattggaatatactttaccttctatatgggataagttagccatttcttcaaacttttaccataggactgaaatgttaaaagagtttaataggtgtaataaatggcggaaaaggggaatttctcgaatacctattgtgcacccagtaatcttaagagcaaccccagggaaagtaagcattctacgtgatggatctattgttgttgaagttggaggaattgagctcggtcagggtctttggacaaaggtaaaacagatgactgcatatgctctcagcttgatccaatgtgctggaaatgaagaacttttagagaaggtgagggtcatacaagctgataccttgagtttaattcaaggcggttttacttctggcagcacgacatctgaatcaagctgtgaagctgttggactttgctgcaatatcttggttgagagacttactgctcaaaggaaaaattggaggagcaaatgggacctgtaaaatgggagacactgattcttcaggcatatatgatttccgtgaacttgtctt

SEQ ID NO: 14451 - DNA, 1103 bp, Gossypium hirsutum
  Clone ID: GOSHI-09MAY01-C71165_1
gggtcttcgaacagagaaagagagaaatggaaggaggaggagctcagtataatcctcgcacagttgaagaagtttttagggatttcaaaggacgaagagctggcatgatcaaagctctcaccacagatgttgaagaattttatcagcagtgtgatcctgagaaagagaacctgtgttcgcgtggccgcccaagtgaacaatgggaagtcaatttacctgctggagaggtccctccagaactaccagagcctgccttgggtattaactttgcaagagatggcatgcaagaaaaggattggctatctttagttgccgtccacagcgacgcatggctactttctgttgccttctattttggtgcaagatttggatttgataaagctgacaggaaacggcttttcaacatgattaatgatcttccaacaatatttgaagttgtaaccggtggtgttgccaagaaacaaacaaaagagaagtcattggtttcaaatcatagttgcaacaaatcaaaatccaactcaaaagcgcgggaatctcaggcgaagcattcaaaagcatcacagccgaaagacgaagagcaagggttggacgaggaagacgaagacgaccatggagagaccttgtgtggggcttgtggtgagaactatgcctcggatgagttctggatttgttgtgatgcatgtgagaagtggttccatgggaagtgtgtgaagatcactcctgctagagccgagcacattaagcagtacaaatgcccgtcgtgcagcaacaagagagctcgcccttgatgatgtcgtaaaaatgtactctctctctctctctatttgtacttttagtcttggtgtagtctgctaactgtggtattagtttgtgtcttgtatgaattagaatagtgcagcatatgaatcggtggctgtggttggtggtaggaaatctgtgttttcaaatgctatttattgtagttcagtgtatgattaaattcccttgtgaagcattgggaaatatctttattttgagtagggaattgaattgaaaccgtgttatgtttttaaggttttcatcttttccaagctgacctgtatgttagcttcattatttatctg

SEQ ID NO: 14452 - DNA, 575 bp, Gossypium hirsutum
  Clone ID: LIB3583-024-P1-K1-D8
aagaaactttcttttttcttttttgggtcttcgaacggagaaagagagaaatggaaggaggaggagctcagtataatcctcgcacagttgaagaagtttttagggatttcaaaggacgaagagctggcatgatcaaagctctcaccacagatgttgaagaattttatcagcagtgtgatcctgagaaagagaacctgtgtttgtatggcttcccaagtgaacaatgggaagtcaatttacctgctgaagaggtccctccagaactaccagagcctgccttgggtattaactttgcaagagatggcatgcaagaaaaggattggctatctttagttgctgtccacagcgacgcatggctactttctgccgccttctatcttggcgcacgatttggatatgattaagctgacaggaatgttaactgatgcctatttttcactctggcatgttcttacttgaagaaaaggctatgttataatttaccaatttcctttttaatattccctttttctttgtttccggttactttcgcggtttttttttttttttcccccccccccctccccccttccccc

SEQ ID NO: 14453 - DNA, 804 bp, Gossypium hirsutum
  Clone ID: GOSHI-09MAY01-C71055_1
gaggaaaataaagagagagagatctgaattataatctctcttttcttcctttctccaccaaagaaaatctgattttaattttaatccattaatggctgatgaaccttctctcactcgatggtcttttctggattttaaactattttatgatgccaagtttgggaggaagagattgcctgagccgcaaaatggtcaaactgctgatgagctcgactccaatggcactaattcgaacgtgacttcaaaagaaaaccaccctgtcaggaacacttctgatatggctatctacgagcagtaccggaaccagggtacacactcggtgcactcaaatggcgcggtgtctaatggatttgattcgagaccgcaaaggtctctgcttcctgcttttgaatctgcagaaatgcgtgcattaggagagagtttaagtagggacatcgttcgagggaatccagatgctaagtgggaaagcatcaagggattagaggatgccaaacgcttacttaaagaggcagttgttatgcctataaaatatcccaagtactttactggtcttctttcaccatggaagggtattctcctttttggccccccagggacaggaaagaccatgctggcaaaggctgtagcaacagaatgcaagaccacattcttcaatatttcagcatcatctgttgtcagcaaatggcgtgcagattctgagaagttaataaaagtactatttgacctagcaagacaccatgcaccgtctaccatttttcttgatgaaattgatgccattataagtccagcgtggtggtgaaggac

SEQ ID NO: 14454 - DNA, 493 bp, Gossypium hirsutum
  unsure (1)..(493): unsure at all n locations
  Clone ID: LIB3583-019-P1-K1-B4
cttttctgttcatttcaactaacatagagtgaggaatctgaattataatctctcttttcttcctttctccaccaaagaaaatctgatttaaattttaatccattaatggctgatgaaccttctctcactcgatggtcttttctgtttgggaggaagagattgcctgagccgcaaaatggtcaaactgctgatgagctcgactccaatggcactaattcgaacgtgacttcaaaagaaaaccaccctgtcaggaacacttctgatatggctatctacgagcagtaccggaaccagngtacacactcggtgcactcaaatggcgtggtgtctaatggatttgattcgagaccgcaaaggtctctgcttcctgcttttgaatctgcagaaatgcgtgcattaggagagagtttaagtagggacatcgttcgagggaatccagatgttaagtgggaaagcatcaagggattagaggatgccaaacgcttacttaaag

SEQ ID NO: 14455 - DNA, 566 bp, Gossypium hirsutum
  Clone ID: GOSHI-09MAY01-C71075_2
aaaggaagaacaagtttaagaaaaaaaatataaaaagagcagaagcctgttggtgttatgattttcagaatctgtattgtaaggccttgaatttgcaaagaactctctcccccttatcttctttctcatatacaaacatgtatatttttatcatcattatcgtaactcactatatactctcaaaatgtctttgttaagaagctctaatatgacatccctttatgaacttatccgagaaatcgatgtacttagcccacaatggtcggagttgagggaaggctatgtcgagccaaggctttgctctgccattgaaatggatgaccccagctgtttcagcatcagctaatgttgtattatcttggtaccccaatcccaacatgtgccaaaatggatcaatcacatgaacatgcccatagaatgctattaaaccagggggtaatgttcctagttgccacaaactgaggtctgatttgaaattctcttcaagccagtgatagtatgtgaggctaatatttgtcttcctccaggcctcgagatcgaaaatgttcatgccatatgcccatgca

SEQ ID NO: 14456 - DNA, 591 bp, Gossypium hirsutum
  Clone ID: LIB3583-019-P1-K1-D2
cccacgcgtccgaaaagagagatcatcataagggaagaacagtttgagaaaaaaaatataaaaagagcagaagcctgttggtgttatgattttcagaatctgtattgtaaggccttgaatttgcaaagaactctctcccccttatcttctttctcatatacaaacatgtatatttttatcatcattatcgtaactcactatatactctcaaaatgtctttgttaagaagctctaatatgacatccctttatgaacttatccgagaaatcgatgtacttagcccacaatggtcggagttgagggaaggctatgtcgagccaaggctttgctctgccattgaaatggatgaccccagctgtttcagcatcagctaatgttgtattatcttggtaccccaatcccaacatgtgccaaaatggatcaatcacatgaacatgcccatagaatgctattaaaccagggggtaatgttcctagttgccacaaactgaggtctgatttgaaattctgcaagcctcgagatccaaattgttcatgccatatgcccatgcacattcgttagggtcaaaattcttgcaataaaggatgggag

SEQ ID NO: 14457 - DNA, 636 bp, Gossypium hirsutum
  Clone ID: GOSHI-09MAY01-C71315_1
ctgtcgcgtgggttgcgggaaaaaaaaatgggttcttttctttcaagcttgttaggctcttccggttcaccatcagaggattcaccatcttcatctgagtcttcaagggtctcaaccttccattcagctccaagatggcaacttcacttcaattctgtcaaagagagcccagagcttatggttatagatttctcagcttcctggtgtggaccatgcaagttcatggaacctgttctgaatgaaatggctgctaaattcactgatgttgactttgtaaaacttgatgttgatgagctgcctgatgtggcacaggaatttggagtgcaggcaatgccaacatttgtgttggtgaagcaagggaaggaagttgatagggttgttggagctcaaaagaatgagcttgagaagaaggttgagaagaatagatgctaaaaagactatatacgatatctgcaatttgaaatttcagtttgaatacttaaattaataaatatgtcaaatggagtttcttgagtatgataatgctaaataatgcttttaactctttattgtggaataatgatggttttatgtatgtaaatttgataatcctatggtcataagcttttaattcccaaaaaactaggacagcaatat

SEQ ID NO: 14458 - DNA, 556 bp, Gossypium hirsutum
  Clone ID: GOSHI-09MAY01-C71265_1
ggaatattgcaggagacgacacacaataatgtctctatgtggcagcctgacaaacaaagttctattccaactgtgcttgaccaagagatccctgataacacaaaggggcccatacccctgcttaccagcgctagcaaaccagcaatttctttccaaaattcaagtccctactgtggctttttccaaggctttctgtgccgttaaaattctaaatcttcagtcattctagcccaacaatctgcaaatacctggtgaagaagttgtcccccttaccctcttttcccacccggtcttattcctggaatggttagaaaaatgcaaattgggagtggggtgccgtactctcccttgagtcctttggatataccaacagttatacctccatccaatgtttcaccatcagaaattcttgagagagtatcaaagtttttcaaagagattggagaggttaacccttctgaaggatccttgaaatctaattcaagagatgaagataatggagtttgagatagaaccttccattcgttagggaggagcttgcattccttcttcccca

SEQ ID NO: 14459 - DNA, 871 bp, Gossypium hirsutum
  Clone ID: GOSHI-09MAY01-C72875_1
gttttgtaagcatgagacactttgaaggaaaggtgaccctaaggttaaagaattattcaatgatattgaaaagttaagagtggaatttgaagctattgaaaggccgacattggaaattgagactccgaagattgatactcctaacgaggatatgcagatggttccggaatcgacacaacctaaacctgataatacaaaggcaaagactgaagcacaaccattgctggatcctgcagcagaattagcaaagctggagtcagaatttgggaagtgtagccaagactacttcgactgaggagataggtgattgggagtttgatgaacttgaaagggaactgagagctggtgatactgcgccaggcaaataggtcagggggcctccactgcttttcaacggaacctagtgggatgggagagattgagaaatttcccaccccccctatttcttccaaaaggttcttttctagcaactgtgctgttttctgttttttactctgctttttgctggggccagtgttggccggataactggcaaacgatgcccctcttccggtcccctttgaaggaaaaaaaaaaggtttaaaagccgaatatattatgtcaaacgcatatccatatccaggaactcagataataggatacgaaattgtttttaacttttggtttatgggtgctttatttaggtctagtaaccccttgccttgttaaagacccaaggtgttgagcaaggtcgggttttatcataattatgccccgtttcatcttagcagttcccttcttgttgcttgttgtggacacccgttgtttcttttcccccgtaggggctgaaattgttcggggtacaatggtttctttccttgcgtattccttg

SEQ ID NO: 14460 - DNA, 373 bp, Gossypium hirsutum
  Clone ID: GOSHI-09MAY01-C72475_1
ggggaacaagataggctatgtggtctctacccttttaaaattgaattgaaagataacccattggattacattcgtgatgccaaagcaaaaattgatagaaaaaaagctactcttgaagctaaattcagactttttctggctaaggtttttgtgaggttttatcctaccaaactggccaagttcccatcaacaactatgtggttttccaatgtggcggggcctcaggagccaattagcattcttgggaatcaagtggccttcatcgctccatcgatatatggtcaaccagtggcgctcacaattcatgtcgttagctatgtgaacaagatgagtatggtgctatcagttgatgaggacattattgccgatccct

SEQ ID NO: 14461 - DNA, 553 bp, Gossypium hirsutum
  Clone ID: GOSHI-09MAY01-C72115_1
aaagcctccacctctcctgctcctgcctcctcctcctcctccttcctttgctgttcctaaagtttcgttctctcttagctgcctgaccgtcctattttttccctctctcgtgactcgttcatcaggaaaaacttgtttgagtgagcatcaatggatccacaacctgaacctgttacctatatctgtggagactgtgggcaagagaacacattgaagcatggagatgtgatacaatgccgggaatgtggttatcgcattctttacaagaagcgaacccgaagaattgttcagtatgaagctcgctgaaagtggtgtttggagaaggggagggtatgagcaaacaatctcttagtcaggagttatgcgttttggatattggctgattatattaagtgtggttagtgaggatttgaagtaacactaagttctgtccatggatgctttgcctagtaactaagtgatgtcttgttttagaacatcaaaaacaaattcatacttttaaaagactatgttatgtttcttatacttttaagtaatttctggttcaatggtg

SEQ ID NO: 14462 - DNA, 591 bp, Gossypium hirsutum
  Clone ID: GOSHI-09MAY01-C72355_1
ttctctcgcgtccgcaaacatccatggcctgctggggtctatattctattctctccgccgttttcctctatttcgttttcattacctcgaggaagcgccgccgtctgcctctccctcctggtcctaaaccatggcccatcattggcaacttgccacatatgagccctgtgcctcaccaaggtttagccgccatggccaaagtctacggccctctcatgcacctcaggttggggttcgtggatgttgtggtggcagcgcccgcctccatggcggctcaattcttgaaagttcatgactctaacttctccagccgcccaccgaatgccggcgccaagtatgtggcttacaactatcaggaccttgtgtctgcgccgtacggaccgaggtggcggctgctacgtaaaatgagctcccttcatctcttctccggcaaggctttggacgactttagacagattcgcgaggaggagataagagtgttggtacgagctttggcaagcgctaaaacaaaggtgaatttagggcaacttttgaacgtatgcacagtgaatgccctggggcaagtgatgatggggaaaagggtgttcggag

SEQ ID NO: 14463 - DNA, 524 bp, Gossypium hirsutum
  Clone ID: GOSHI-09MAY01-C72365_1
ttttggtggtttttcgaccttaacattccagtacgcgggattccacgccacttagcaaggcgaattccaccgtcgccaaatgatcgcctacaaccgtacgatcaggggcgtcatgtctgatcgcgatcggtgctcgattcctcttcttgggctttcctctctcctcaatgttgccccctttctcttcctcttccataagctttctccgagacctccttgggggccctcgctcctctccattctgccacatacacgcgcctcaccgtctgcattgataccgcgtcgcagtcacaagctttaaattcgggaaatccaatattgaagacgtacgacattgttgccgttaggccgttgaaccaaaaatgcatttgatcatgcttgcgaaaaagccgaggtggatataatttcaattgatttctcagagaagttgccgtttcgattgaaattgcctatagttaaagctgctattaagcgtgggatatattttgaaataacatattctgatcttattgtggatgttcatc

SEQ ID NO: 14464 - DNA, 592 bp, Gossypium hirsutum
  Clone ID: GOSHI-09MAY01-C72315_1
gacccacgcgtccgcagaaagagatttgagggagaagacatgccaactaatagtgcaaacggttctaccagtatatcgaagctatatgcaaacttatgggccactggtagagaaagatgcaagttccagtaagtatgcaaagtacacagtgcagggattggaacaaatgctcctttctctttttctaccgaggcgggaaaggtacggcagtttcaaaggcaggccaacaggcagcaaaattgataatggggtagatcttcgccggactgcatctgctgttgcatgattgtccaatctatttctgtcgcggtggttaaactgtacgtgttttataactattcttcatcatatattcatcctttgcccatcaaagttaaaactgtgttgggttggtagataaagataatgatacattcaggtataccatttcatgttataatttcatattaagtttatttaatttagttgctagcttggttggcataaaagctatgtaatttagtgaatttcatgtataaatattgaggcataaaagtggaaactgaagcgttagctttgattgattaatttatttagtgggcaatattccctt

SEQ ID NO: 14465 - DNA, 357 bp, Gossypium hirsutum
  Clone ID: LIB3493-054-P1-M1-A2
tgcaaagtacacagtgcaggggttggaacaaatgctcctttctctttttctaccgaggcgggaaaggtacggcagtttcaaaggtaggccaacaggcagcaaaattgataatggggtagatcttcgccggactgcatcagctgttgcgtgattgtccaatctatttatgtcgcgggggttaaaatgttcatgttttagaggtttaatcttatatcttgtacatatcagcgttcttagggcggaggtggaactattctctatcattcatactttgcccttggacagcacatgctttggacatttgacatttcattactcaaggagtcgcccgaaattgatgtgtgaagcaaattttgc

SEQ ID NO: 14466 - DNA, 621 bp, Gossypium hirsutum
  Clone ID: GOSHI-09MAY01-C72245_1
gtttcctaaatcctttcctcacaaaaatcccctttgttaatccaaacaaaacgcccttttgctttctttttttttttttttttgctctttttgacctttttagcttgttagattcccaagaatccaactttctgtccaagttttaaaaaaaagaagatggatgtaaagaaaagcaaagcaacagtggcactgatgatgatgttcatgatgttgtttcttgtaaattttccagggtgtttctcggctgccagtcagcaacccatcaataaaaagtcaacccatcttaagcctcataatgggtttcattcatcttttctttttcctgtcactgggaatgtttatcctcttgggtactattctatatcactgtccataggcaatccacccaaggttttcgagttcgatattgatactggcagtgacctcacatgggtccaatgcgatgcgccttgcactggttgcaccaagccaatcgatcatctttacaagccccaaaaacacatccttgtaagctgtgagcatccttcctgcggcgtggttcacttccctgaaagtcctcactgcgagaaaccggatgaccaatgtgactttgagattgactaccttgatcatggttcagtt

SEQ ID NO: 14467 - DNA, 440 bp, Gossypium hirsutum
  Clone ID: GOSHI-09MAY01-C72265_1
caatgtcaaacctcaactcttaaaattaagtttgtttttctttttaccgtcgccaccattgaaatccttcttcttcgtcttgttcttcctcttctcctccttattcgcttcttctttgtctttgcccaacgccctttcatttgttctctcttccttcaaactctgtttttacttttaatgtacaaattatgaaattagtattaccactatctgcaaacactaattcagtttagtttcttacaacaccaaggccaatgtttcaaatgatcaaacatcacccatatttccaccatattaaaagctcggtctttggctttatgtttttgttacccacttcactttttgctctttcccttcttcttttagctcgcaatggcttctctgttttctatatgtatctccctggttatatcaaatctttaccgggacccatcaaattg

SEQ ID NO: 14468 - DNA, 651 bp, Gossypium hirsutum
  Clone ID: GOSHI-09MAY01-C72215_1
agtacgggagagcaaagaaagatctcttgatcgagagccacgacgccgtttacctggtgaaagcaggggagatgttgtacggctaccaaccttttgcaacaaaagacccgaaaatattcgagaatccggaggaatttgtcccagacaggttcatgggtgacgatggagggaggctgttaaagcacgtgctttggtcgaatggacccgagactgaagatccaacgacggcgaacaaacagtgtgccggcaaggatttcgtggtgctggtgtctcggcttttcgtagtggaactgttcagacgttacgattcgttcgagatcgaagttggtaagtcgccattgggagctgcagttacagtaacctcattgaagagggcaagcttttagggttaaattaaatttctggatttgttaagggtaaatttggccccaaaaaaagaatccgtttatgcgcatatttttggatatattgcaagagaagtggatttaatatacgtggagatttgaataataacgatgacctaactacttcatctaaattttataaactttcattctagagattgaaaataaaaaattgtaatttaagcactgttattatatatttttatcattttaatcagtgttattatatacttttattattttaatc

SEQ ID NO: 14469 - DNA, 557 bp, Gossypium hirsutum
  unsure (1)..(557): unsure at all n locations
  Clone ID: LIB3582-020-P1-K1-C12
gggtcctgaacccctcatcgccgccctcagtggtttgtcacaccaccattacaatcagtggccgacgacaagtgaaataggctacttagcctctgttcgtggtgcctttgaaggtcccaaatccctcggtcgagtgcccgaaaataaagggacttcccaacctcccctttggggctcaactccaatggagaaagaagtctccgacgaccgaccatgggggttttccgatgacgcgtggagggcgactgatggagcagcgtacgagcagacgaaaaggcgcggggcggtggctaaacgttcctagggttctgctgatattttttgcattagattgatagtttgggctgtatttgttgttggggtgattgtggttttaaggtttgggctaaaatttgagtttggggttttttattgggctgtttattttggtttgaaaatttggtttttatttatttttgtttttggctttgagtcatgggcatcgggcaaatttaggcccgtacagctgtccctctttgctcattttcgtgtaacgagaatatagcanagccttcaaa

SEQ ID NO: 14470 - DNA, 393 bp, Gossypium hirsutum
  unsure (1)..(393): unsure at all n locations
  Clone ID: LIB3828-017-Q1-K6-G12
aaaacaagataaagagacataaattttntcacacaaaataaaaaatcacctttaaaacgagtattctgttttttgattagtttttgcttgtaaaatgtacgtaaaaaaaattacaagagagtagatccgggcttttaaagccatttacaatcgattcctttttagtttttttgttttttgctctttatttctctgcgctcgcatgcttttttctttgctattgtgcttgtttcagatgtcagacgacgcgtggagggcgactgatggagcagcgtgcgagcagacgaagaggcgcggggcggtggctgaacgttcctagggttctgctgattttttttgcattagattgatagtttgggctgtatttgttattgggctgattgtggtttaaag

SEQ ID NO: 14471 - DNA, 546 bp, Gossypium hirsutum
  Clone ID: GOSHI-09MAY01-C73715_1
cccacgcgtccggcaacatattccttttggtgcatcaccacaggatgtctggtctgaattagggcgtccttgcggaatccatcaaaagcaggttgaccagatggttattcactctgcttctgatcctcggccgaggacaactctttgtgctgagtatttctgcaaccatgttactcgtggtttggacatcttatttgatggccagactcataaagtctagatgttcggtttacacacgaactatcctgggcatgcagatttcaattcatacataaagtgcaactttgttatcctagttggaggatcattcccggatgttaacaactacaaaaatcgaattactccaagcaccaaatgggagcaggtcagggaaatccttggtgactgtggccgagcggctcttcaaacacaaggttgctaccagcaatccttttggctctacttttggtcatggctatcagaatgctgcattcgaggttatgaagaacggctatattgcaactgtgacactcttccagtcctgataataagcaatctcttgtccga

SEQ ID NO: 14472 - DNA, 865 bp, Gossypium hirsutum
  Clone ID: GOSHI-09MAY01-C68585_1
gcaggttcaaatgctatttgcttccaagtacgggaaggaatttgtatcagctgcatctgagctgaggccagattgtggtgttaatcgtcagttgatagaattgttatctatacgtgttccttcacctgaagtaaaattgaagattctgaaagaaattgctgaagagcatgagttggaatgggatccagctgctactgagtctgagtttttcaaaccacatgaagatttattgaatggcccaacaaatcttgagactgggtctaagttaccccctcctgtggagaaacatgatgaagcattcacttctgccgctaatcgtgcccaaaccgagcagcctgattctgattcggactttgacccattagattttcctcaagttcctaatgtgtcattgaagccaagcactaatgctgcatcagcaccggtaactaacccactgtcatcagctgctccagaacctgaaattgatcattcatctagacattctggagcttcaagacatgtgttacaaatgtcccctttggagcctttggagcccgatatgacgcaagaacattcattaaccaaagaaagtacaatgcccaacgatccagctggagccaaagaaaataaacaatttctgccattcatttcttctccacccgtatctgcttcaccaatttctgaaagaccaagtgatccaacacctgcgattttgaaaacaaatagcgaggccaacatagatctggaggatgttttagccgctgctcagtcagctgctgaaactgctgagcgcgctgcagctgcagctcgggcggcagcaagtcttgcacacgtcagaattgccgttcttacacagaaatggaatggccaggtcaatgagggt

SEQ ID NO: 14473 - DNA, 824 bp, Gossypium hirsutum
  Clone ID: GOSHI-09MAY01-C68635_1
tgcaatagatcccggaaacaaggagggacttaggcaagaggtgattgttgatttggtggagcagtgccggacttacaaacaaagagttggacaccttgttaattcaacatcggatgagtcacttttatgtcaaggtttagcattgaatgatgatttgcaacgcgtactagcaaggcatgaagcaatagcttcaggaactccttctcaagcaaacaaacctaagcctgaacctgcaaaagaacttgtgaatgtcggtagtccactaattgatactggagacagtagcaagcagtctgaggggagatccacttcaagcactgttacaagttcaccatttaatcagttactggcttcctgctcctcctgcaactaatggttcaactcctccaccagctgccaatcccaaaatggacttgcttaggggggatgacttcaattcacctaaggcagataattcactggcccttgtttctttgggtgaaccacaacaagcacctcctgcatcacagcagaatgccctcgttctctttgatatgttctctgatggtagcaacacctccaattctgtcaacacccagtcttcaggtttggctggacaaaccaaccctttgactcctcaaattcagcagcagcaccagcagcagcacaattttcatgcaaatggaactgcaccaaacatgggagcacctcctcaatatgagcagccatatgctcaaggcaccgttcctgcctggaatggtcagctggttcagcagcaacagccgccctcacctgtcaatggtgctgagagcagtggctcactaccaccaccaccctgggaagca

SEQ ID NO: 14474 - DNA, 725 bp, Gossypium hirsutum
  Clone ID: GOSHI-09MAY01-C68185_1
gtctctctctctctctctctctctctcaaagggtatcatttttcaagctctcaattttctctggattcaaatcctctattttaggttgggtttttctggtgttatcaatgttactgcccttgttcatgtttggctgtagtttgaatttggttgattgatgaaacttagtggatactgttttgcttggaattgaatcatgaagatttttatgaggtttaccagtggttttgtggattgattggtgtatgaatatacgatttggctggaattttccatttgatttgtgaagatgtcaatagagagcttttgttgattggtaggggtgtttcaaattatatataaaagtgaaagaaaaaaaaaaggaggaaatagttaaaagagcaagagaaaaagaatgggggaagctattctcactactttgtcaatggaaactgatcacccatctacacttttgtctatggattccggttcttttctaccaaatgaattggagagagagatgaaccgatctatgctgttgtctcggccacctgatatcaatctcccgttatcatccgaaccgagccccccacctttggcttggaatgattcatgtgaaatcttacatgtcagccttgccccccacatttacgacgcggtcgtcagtgtcccgaaagtggctaagatgtgtatcaagcctcttgattatgtatggggtgcttggtttttctttactttctactccc

SEQ ID NO: 14475 - DNA, 658 bp, Gossypium hirsutum
  Clone ID: GOSHI-09MAY01-C68385_1
gattaaaggagctggcaagaacgggcgggttctccatagcttggaaatgaaattcttctatataatttcaatttccaatactgaaatatatgtgttcatttttttgagttatttttgaggaagaagatgaagttcggtaaggaatttgcagcacaaatggtgcaagaatggcggggagcatacatgcattacagtaaactgaagtcaatattgaaagatatcttaagattcaaacaaaaaaacaaggaaccattgacaatggctacaacaacaacaacaacaacaaaaggggcattgaatcgaagagcatcactttatagggcatttagtggacttacaaatcggtataaaccagtttctgcaatgaagaacaatgaagatgaagttatattagtgagtgcagttcaagaaggaggggttggaggggattaccaaacaatgtttcttatgccaggtgaagaaggaggtgcgttcgagttgcctttctttaggagacttgatgatgaattcaacaaagttcttagattttacaagaaaaaagttgaagaagtaatgttggaagctgatgaattgagtaagcaaatgaatgctttaactgctcttaggattaaggttgataatccagttgttaaaggaactgatatgggtaatcttgctg

SEQ ID NO: 14476 - DNA, 1216 bp, Gossypium hirsutum
  Clone ID: GOSHI-09MAY01-C69815_1
cggccgcgtgggttttttttttggggggcggggggctttctctccttccccttttctcccccagttctctctttgaccggcctttggctcgccggtggttcaccgtgcccacaccatgaccggtggtcggaaccgcgaggattcgggtaagtttcctcttctctttctttgggggggggggaaaagtagatttaaactatatatatattttttaagggaagaaaacataacacaaaaatgaaatagtggagaaaactctcgtcttcgtcgcttccccgaccctcgtcggaacccgagtgggttttgtgacgtttgggtcaccgcagattcacaaccacgaaggagcacgaaccacggtaagatttaattactatttatgctttatttcaaacaaaaatgaagaaaaataaaataaaagaggcacctttgagatcttggttcctgattttttccttttttattcaagagtctctgtaaaaatacattgtgaatttctgactttcttatagcgcgaaaaccaaggcttttttgctatctgctactattttgctttgtttttgctactgttatcttctctgtttgcagattcgagcggcgtgcacgctggtggcaacagggaggcacatgggtggtacggcgcaaagcagatagggctaggatgaccacggggaccaactacttcattgaacacataggaaaccaatgaaattgactggtagagccggtggagcatttggcacgcctcgtatatttgcttcataaggaagagggtccaaacaagaagaacgaaccacccaattgccgggacaataaccaataccagtacaacggcgacaaggcttccgctaaggagactgattttggtaactatgatacggtgaattgatgagttattgttgctggtttgaagatgatattcgatttgccaagctgcagcgtaaacaagtgtgacgatgataaccatcaacatgagcgcattgtaggtctcaaatggtgccatggactgatacttcactggcatgagagccaggaatactcctactgcaaaggccaagccagcatgccaattgttgttggttgtcgtaccattgctacactcgaggaaaaaaacacatatgttattcgtgctcaacaatcattccttaaaaaggattaaatacattatatcccgatattcaattcaataattaatgcataattgtttctttcttgtcac

SEQ ID NO: 14477 - DNA, 906 bp, Gossypium hirsutum
  Clone ID: GOSHI-09MAY01-C69525_1
gcattttgttggctgtgtggtggtgctactggacgggaccatacttggtcaagaattgctggtcacagctgtggtcgctacatagaagatcgtgagaaaaagactgaacgagcaaaacgagatctttatcggtatatgcactatcataaccgttataaagctcatacagattcctttaagcttgagagtaaactcaaggagactatactggagaaggtatcaatttcggaagaaagggaatccagacttagagatttcagctgggtaactaatggactctgtagacttttcagatcaaggcgtgttctttcatattcatacccatttgccttctacatgtttggagaagaactattcaaggatgagatgacaaatgaggaaagggaaataaaacagcatctattcgaggatcagcagcagcaacttgaggcaaatgttgagaaactttctaagtttttggaagagccctttgatcaatatactgatgataaagttatggagatacgaatgcaagtaatcaatctttctgtgatcattgattccctttgtaagaaaatgtatgagtgcattgagaatgattggctgggttctctccaacgaaatacccataatatcgctccatacaaatccaagggcattgagaaagcatcagagccttgctgtctgtgtggagtggtaaagccagtactacctccggtaaatgccttccttccgattgtggcactagcggcaaacgtgaccgatctttcagctttgggacttcggacgacaaaggttgcccgtcaccaaagcaacctaagaggaaagttatggaggtggtttctttgatctcaacttgccagcagaagttcttgacaggaattgatctctaagaggctttttttttagataagacatatgtacata

SEQ ID NO: 14478 - DNA, 641 bp, Gossypium hirsutum
  Clone ID: GOSHI-09MAY01-C69705_1
ggacaaagtaccatttaggttatccttataatctggacttcgattacggtgcattagcacagttgctacatttctcaatcaacaatcttggagatccattcattgaaagcaactatggagttcattcaaggcagtttgaagttggtgtgctagattggtttgcccgtttgtgggaaatagaaaaggatgaatactggggttacattacaaattgtggtacagaaggcaatcttcatggaattttagttgggagggaagtgtttcccgatggaattttgtatgcttcacgagagtctcattactctgtctttaaagctgcacgaatgtatcgtatggagtgtgtgaaggttgacactttggtctcgggtgagattgattgcagtgatttgagaccgaagttgcttgctaataaagacaaaccggctatactcaacgttaacataggaacaactgtaaaaggagcagtagatgatcttgatgttgtgatacaaacccttgaagaatgtggattttcacatgatcgattctacattcattgtgatggagctttatttggactcatgatgccttttgtcaaacgggcaccgaaggttagtttcaagaagccaattggaagtgtgagtgtttctggccataagttt

SEQ ID NO: 14479 - DNA, 631 bp, Gossypium hirsutum
  Clone ID: GOSHI-09MAY01-C69105_1
ctggactctgttctttctcaattgtcagttccagtatctgtaactggtcatttatcaggagtacctagtggtgttggtggtcaattgcctgctcatgcggccaatatgaatgtggcaccttccactgctgcattcacggggcagatccaaacaatgccttttggtgctggtgctcctgcatttgcaccagttggcaatttctcaacattgcctcctacaggtcctctggtagctgcttctggactaacgcatacagtgcctggcagcagtggcagttcccagattggtgttaataatgctgggcaatggcctaatatgcagcaccaacagactcattttttctccacagctggcggtcagactagccaacaacttaacggagcctcgccaagtcagccatggaattttgctccttccccgcatatgcaggggcctcaagctgtctcaaaacctttccaggatgtcacttctgccgttgcatcacagcaaccacctacagaaacaaaagcaagtggaagacaagaactacctgcggatctatttactgcaacctattctacctatcctgcacctacaccaggatggcaaatggccccttcttgtggcatggggttcacatgcaatatatact

SEQ ID NO: 14480 - DNA, 501 bp, Gossypium hirsutum
  Clone ID: GOSHI-09MAY01-C69305_1
tttattttcaactttctaatctacctctcagttgaaacaccaccgcccatcatctttggttttctttcgaaggaaatttttttttttctttctttctaacttattaaacaaacatgggatctgagacaaatgcatcagtgaagacatctgttggcaggtcttgtgttccgaagacgaagggaaaggttcctaaaagagttcacaaagctgagagggagaagctcaagcgtgagcatttgaatgagctcttccttgacctggcaaatgctctcgatcccaatcagcccaacaatgggaaggcctctattctttgggaagcaactcgactattaaaggaattgttcggtcaaatcgagtccctcaaaaaggaaaacgcttctttggtatctgaatctcactatgtgaacgtcgagaagaatgagctgcacgaggagaattccaccctggaaactcaaatacgggagctgaatagtgagatcggaacaaggctgtctcaatcta

SEQ ID NO: 14481 - DNA, 652 bp, Gossypium hirsutum
  Clone ID: GOSHI-09MAY01-C64915_1
ggctcctctgtctttcctcctctttaactctacgtgataaactctttcccctccgaaatctcaaaccctaaaataaaaaaaatctcaatttccccatagggatttcacatttcttaaatatttaatcacatattctttccttttttttattctattgttttctgggaaattgtaattagtttttgatttgggatggcgatgctggtggaagatattttacaatcggtggagatctggttgaagctgataaagaaacccccaccttacgccgacccgaatttggacccggttttattagttccgggtatcgccggctcgattttgactgccgtggatgatcagaatggtaaagaagaacgggtatgggttcggattctcggtgccaattacaagttccggaccaagctctggtctcgttttgatccttctactggtagaactgaatctttagatccaaatacaactattaaagtccctggaggaagatatggcctgggcgccattgatgtattggaccctgatatgatcgtgggacgtgactgtgtttgttattttcacgatatgattgttgaaatgctcaaagggggtttccaagaagggaaaacactctttgggtttggttatgattttcgccaaagtaataggttgcaag

SEQ ID NO: 14482 - DNA, 587 bp, Gossypium hirsutum
  Clone ID: GOSHI-09MAY01-C64585_1
ctcaaacattttcttactttccaagacaccccacttcaagttttttagatcaagaaagcagtgccttttgctgggtttctttctttcttttttttaattctaaagaaagagaaaattatggggaattgtatgatgaagacattgggatcaaggccgcatctggaagaagaagaagaagaagaagagattggtgaagcagcttcaactgattataagaaggaaaatgaagggaagaaaagcagcataaaggtgaagatagttcttacaaaagaggaactagacttgttattagtgaagctgaagaacaagggtaatggtgggaagagcttagaggaaattttgggtgaaatagagaaagccagatctgagaaacttgactcttcatggaaaccttcgttggagagtatcatggaagacgacgatgtcattaattcatgaaactttcaatcccttttctgtaaattaccctctctcttttttttttttttttacgttcatatactattatacttgcgtaactcgatgacaaagtatttaccagacctctccccaccctttttattttctctggaaccttggcattgagc

SEQ ID NO: 14483 - DNA, 505 bp, Gossypium hirsutum
  Clone ID: GOSHI-09MAY01-C64535_1
tttatcaatagtgtttcaaactccagtttgcttctccttttgctcataatttcatctgtgatctcttctttttctttgctcttttagccctattttcctaccctcaaattgttgcagtctcgtccatctgaaacaatttgctaaatattattatcaatatgccccttctctgaatggagaaacaattactaccctttttcggtgtctctctagttcgagtgtttcttgctttcaatctctttgttattctattcagctatctggtatggaagccatgcacaatcttgcattgcatcattgcttgagctatcatcgtcacccatatacctgaagttcgaaaagaaggctttgaaactgttctccctccttaattatctatctaggttctgtgaggtaatcctgatcgggttatttagaaaaaacaagtgacaccctacaagattgaggacatcatctgctaatatattggacttggttcttcccacaaagcaatccaaattaactt

SEQ ID NO: 14484 - DNA, 908 bp, Gossypium hirsutum
  Clone ID: GOSHI-09MAY01-C64795_2
ctcaattccctttcacttaaaaccaacatcaactcttcttcttcttatgctttcaagactctcagtttctccagtaacctctctcacaatctcttctccaaagggaatctgtcttttagtacagtgactccgaaaccaatacccgatggtgctgatgcagttgtccaagttgaggacactgaacaggttaaagctccttctgaaacaaagtatgtaaagatattggtgcaaactagtaaaggtgttgatattcgtcaagtgggatgtgacattcagaaagatgcagtagttctaaaatctggagaaagattagctgcttcagaagtgggactacttgctacagttggtgttactatggtgaaggtgctgccttccccaccgtttgctgtttaatgacctcaaaagcttgttcagcttcctaaaacaaaatttgtgtaaggttaaattctctaattaggcttgaaggttcttcctgaagcacctcccttcctaaagacggatccagttcggccagaattttatcgtgctactatcagatgggaggctaatgatggatcggggagtgccgggtaaatttagagttatagtttccttgatcataggtctcctcagtttttcgatttgttgttcagttagatccttcttggacctaatttatctgcaagtgtcatggtttttgctattttattctacttgtaatgctattataattgtgttaagaagcaatttgtttctttcggattttagaattgtcgctgagagcactggtcaccaatgagtagtcggcttctgagtatgaagtcagctaatgctttgaattatgttggtcataatcgtaaagaactttcttgctaatgaggaaagtatgaaagcaggtattttatttcgctgctatgaagtggattgct

SEQ ID NO: 14485 - DNA, 669 bp, Gossypium hirsutum
  Clone ID: GOSHI-09MAY01-C64795_1
ttcacgcgtccgatccctcgcgtccgcccacgcgtccgggaagaaactgagaaagcaaaaatggcgactgcacttaactgttgcttgtcttcttcatgcttctctcttcaatctaagctcaattccctttcacttaaaaccaacatcaactcttcttcttcttatgctttcaagactctcagtttctccagtaacctctctcacaatctcttctccaaagggaatctgtcttttagtacagtgactccgaaaccaattcatcgttcttttgttgtttgtgaggctgcaccaaagaagaaggctgattcagctgctaagagggctcgacaagccgagaaaaggcgggtttaccacaaagcgaagaaatccgaagtcaacacccgaatgaggaaggttttggaggcattggatgtgctgaggaagaagcctgatgcagcagcccgaagaaatcttcccgattgagaagctgattgccgaggcttattcggtgatcgataaagcagtgaaggtgggatcactgcataggaacactggagctcgtagaaagtcgcggcttgctcggagaaagaagccatagagatccaccatggatggtatgcccctgctccagcagaaaatgcagcctagaagaaaaatatcatcgttttgagcctttcgagtttgtatctt

SEQ ID NO: 14486 - DNA, 474 bp, Gossypium hirsutum
  Clone ID: uC-gsflmaxxa058b04b1
ccctcgcgtccgcccacgcgtccgcccacgcgtccgcagtcgacgaagctcttcagattgtgctcagcgttgcccagaaactgccacctgtcaccgtcccacttcaccaagctcttggaaaagttttggctcaagatatcgttcctcctgaccctttgcctccttatccagcctcaatcaaggatggttatgctgtgattgcttcggatggtcctggtgagtatcctgtaatagttgaatcaagagctggaaatgatgggcttggtgtcacagtgactcctggaactgttgcatatgtcacaactggaggaccaatacccgatggtgctgatgcagttgtccaagttgaggacactgaacaggttaaagctccttctgaaacaaagtatgtaaagatatttggtgcaactagtaaggtgttgatattcgtcaagtgggatgtgacattcagaaagatgcagtagttctaaaatc

SEQ ID NO: 14487 - DNA, 305 bp, Gossypium hirsutum
  unsure (1)..(305): unsure at all n locations
  Clone ID: LIB3585-065-P1-K2-G10
atcaggagaaagattagctgcttcagaagtgggactacttgctacagttggtgttactatnatgaaggttaaattctctaattaggcttgaaggttctttctgaagcacctcccttcctaaagacggatccaattcggccagaattttatcatgctactatcagatgggaggctaatgatggatcggggagtgcaagatttgtcgttgagagcactgatcaccaaatgagtagtccgcttctgagtatgaagtcagctaatgctttgaagttatcttctgtcataatctctaaagaaactttctt

SEQ ID NO: 14488 - DNA, 583 bp, Gossypium hirsutum
  Clone ID: GOSHI-09MAY01-C64685_1
gcttgtgtctatatatatatatagatatggagtgaccatggtctaaccaaattcctcgacttctcttctgcttattagctctagtctacgccaagaggttcaaagattttatggctgtttccaagtcttcctcgggcaagcaacaaaacgaccgtgatcaagaatatcacaagaaatcggagccgttgattccagggctacccgacgagatcgcagagctttgtcttcttcatcttccatatccataccaatcgttggcacgttcagtatgttgctcatggaacaggaccataaccgaccctggcttccttctctccaggagatccttatcgctttctctgccttatctgttcgttttcgcttttcataactcaacggccaggatacaatggcaagcttttgacccgcgatcaggccgttggtttatattacctcccatgccttgtcccaagtctgtgttcccaccagggtttgcttgtacttcgattccacgtcaaggccagctctacgttttaggtggtatgcgttcagacacacaaacttcatcaacacaacggtcgtctacactacatcacaaatcaat

SEQ ID NO: 14489 - DNA, 1084 bp, Gossypium hirsutum
  Clone ID: GOSHI-09MAY01-C64165_1
tggcgatggattatttccattcagtcacagcaattccaactgttgcggtcattgcctttccactactgcggcttttctctttgccatggatctcaagaagaaacacaaactcgaagaaaacagcaccagaagctggtggagcatggcctattattggtcatctccgcctcttaggagggccacaaccacctcacataagcttggctaacatggctgacaaatatggaagaatcttcgctatcaagttgggtgtgcatagagctttggtggtgagcgattgggagattgctaaagaatgtctcaccacaaatgataaagcgttcgcctctcgtccaatgcttgcatgctcggaacttttggcttacaacggtgccatgtttggctttgcgccgtatggaccttattggcgtcatgtgcgcaaggttgccactattgagctcctctcaaatcaccgactcgaattgcttaaacctctgagggaatccgaggtgaagacatctctgcaacagttgtaccagctgggggaccaggaagagaagggcttactttccgttaaagtattggtggagatgaagggatggttcaaggaagttactctgaacgtgattatgaggatgattgtagggaagcgacttccaaattccagtgaaggaggtgaaaacttgaaagggaggaattcgttggatgacttctttgtcctgagtggaaagttcctaatatcagatgcgttgccggttctgagatgcctggacataggtggagacatcaagtgcttgaagaagacagcgaaagaatggaccaagttctgcagggatggctacgagagcacaagcagaagagagctgaaaataagcaaacggtgaggaagatttatgggagtgatgctgtctattctcagtgaggcgaggaacaccatgctgatacaataaacaaaatcaattgtctaggacttatcttagcgccgaggataccacatcatcacattgacatgggcctatcttgctactcaaatatcgtgacaaattgagtaaagtccaacaagaactagatggtcacattgtaaggatagactacttttgccgaa

SEQ ID NO: 14490 - DNA, 364 bp, Gossypium hirsutum
  Clone ID: uC-gsronu33B132a06b1
gcgttgaaaacttgaaatggaagaaatatatggatgacttctttgaactgagtggaaagttcctaatatcagatgcgttgccgtttttgagatggttggacataggtggagatatgaagtacatgaaaaagacagcgaaagaattggaccaagttgtggagggatggctacgagagcacaagcagaagagagctgaaaataaggcaaatagtgaggaagatttcatgggagtgatactgtctattctcagtgatgcggaggaactccatgctgatacaatcaacaaagccacttgtctcggtatcgtcttggcggcggaggatcaacgtcagttactctgacatgggctttgtctttgttactc

SEQ ID NO: 14491 - DNA, 654 bp, Gossypium hirsutum
  Clone ID: GOSHI-09MAY01-C64365_1
ctcggagccaactctaaactacctttttcctttgtcttcatcaaacacaaatgatactaaatattgagtttgggttttagaagtcggtatcaaacaatgattataatattgttttaatgcgtcatacatgttttccttgtttttaccgaagacccagattaaatgagggtcaatacgagcttgggagctccattttagagttggagttttacaagtcagtaccaacgaaggcaataaagtgaaggaaatggagtcaccattcagagcaaatatactgaaacgcaaagtagctttggtaacaggaggaggctcaggaattggattcgagatctcagtgcagctggggaaacatggagcctcagttgccatcatggggcggcgcaaacatgttctcgactctgctgttgatgttcttcgttcccatggcatccctgccataggacttgagggagatgttagaagagaagatgatgcagctagaactgtggaatcaacttttaagcattttggcaggcttgacatccttgtcaatgccgcagctggcaatttccttgtgcctgctcaggatttatctcccaatggctttcgaacagtcattgatatagattctattggaacttttataatgtcccatgaggctcccaaatatcttaa

SEQ ID NO: 14492 - DNA, 582 bp, Gossypium hirsutum
  Clone ID: GOSHI-09MAY01-C64215_1
atttaataattagcttaatccccactcatgattttctccctatatatttgctccattgccaatttcaattccactatagttttctcaaataataaatagtcaatctttgtggtgggtttttattggacttaaaattttctgggttcaagagcaatggcgacaacagtgtttctacagcagtctgctttattttctttctcttcatttactcacaacagccgccctttaactaaacttttcgatagtagtaccgcaacaattgtccctttctctaaccggcgtcgtttcagagttgtttctgactctgtttctgtatctgctctgcccactgttcgtgggaaactcaaggttcatcagttggttcaattaacgagttgattgagtgtttgattaatcgagttgatttaacggagtccgaggctgaggcatctcttgagtttttgttaaccgaagctaatgaggctttgatcagtgcttttcttgttttgttgagggctaaaggcgagactttttgagaagttgtgggattggcgagggcaatgttaaagcatgcttggaaggtagaagggttaaatgatgctg

SEQ ID NO: 14493 - DNA, 687 bp, Gossypium hirsutum
  Clone ID: GOSHI-09MAY01-C64235_2
tatttcaaatttgaaaacttgtgttggctcgaactcaaatcttagtctgaacaacatggccaaaacacccatcaaatactatctggttgatgcattcaccgactcagccttcaagggaaacccagcagcggtttgtttgttggaggaagaaagagacgagaaatggatgcaagcagtggggggggagattaactcccattactggacttgactcggatccccaagccacctctccaaacaccacccctcctcttagatggtttacccctgttaccgaggttaagctatgtggtcatgcaaccttagcatctgctcatactctctttacaactggcttggtaaattcaaacattatcgaatttgatacagtatctggaatcctaactgctacaagagttccagatgttagtccaaccaatgtctccgaggttcagaacggtggagtgaccgactgctttctgatcgaattgaattttccttccgttccagctactgacttcaattctgctgaggcttcacttgtatcgaaagccttgaacgatgctccacctattgatgttaagaggacgactcccgcagatgatatctttgttgtgctcccatctggaaaatctgttaccgaaatggagccacggttcgacgacatactgaaatgttctggactaggcttaattgttacaggagctg

SEQ ID NO: 14494 - DNA, 602 bp, Gossypium hirsutum
  Clone ID: GOSHI-09MAY01-C64235_1
cttcactccaaagttgagaattctcaaactcagatcttactctgaacaacatggccaaaacacccatcaaatactatgtggttgatgcattcaccaactccgccttcaagggaaacccagctgcggtttgtttgttggaggaagaaagagatgagaaatggatgcaatcagtggctgctgagtttaatatctccgagacttgttacttgactcggatcaccaattccacctctccaaacaccaggtttcgtcttagatggtttacccccgttgccgaggtaaatctatgttggtcatgcaaccttagcatctgctcatactctctttacaactggtttggtaaattcaaacattattgaatttgatacattatctggaatcctaactgccacaaaggtcccagaggtttgtccaaccaatgtctctgaggttcagaacggcggagtgagcgactgctctctgatcgacctgaattttctacattcagcaccgatttaattctgtgagcttactatatcaaagcttgacgatgctcactatgatgttagaaacgatacgaaatgaatctggtgggctccattggaatctgaattaagggaccc

SEQ ID NO: 14495 - DNA, 1143 bp, Gossypium hirsutum
  Clone ID: GOSHI-09MAY01-C65895_1
aaccctaaatttgatttctctctccgggaagcgtggtgaccggggcgacccaaacccggccccgccacaaactccgtggggtgaattagacgaagacgacggcgaggatttggatttcttgttgccgccaaagcaagtaatcggacccgacgagaacgggatcaagaaagtgatagagtacaagttcaacgatgagggaaacaaggtcaaaattacgacgacgacccgggtccgaaaactcgctaatgcccggctcagtaaacaggcggtggagcgaaggtcttggcccaagtttggggatgctgtaagggaagatgttggtagccgactcactatggtttccactgaagaaatcctccttgaacgacctagagctcctggtagcaaagcagaagaaccgaaggctgccggagattccttggctcaactaggaaaaggaggtgctgtccttatggtgtgtaggacttgtggtaagaagggtgatcactggacatctcggtgcccatacaaggacctcgctctgccggctgagtcattcgtcgataagcctgcagtacctgaaactgcaactgctgctgctggatcagggaagaatacttatgttcctccaggtatgagagccggagctgatagaagcggaactgatatgagacgcagaaacgacgagaactctgtccgggtcactaatctttcggaggacacccgggaagctgacttgcacgagcttttccggccatttggtgcagtaagtcgagtttatgttgccattgaccagaagactggcatgagtcggggttttggtttcgttaattttgtgaacaaggatgatgcccagagagctataaacaaactcaatggctatggttatgataatctcatcctgagagttgaatgggctacaccaagaacaaactagattgtgtgttttagtttagggtttattacttaaataaaaggtttaggcccaccttttaaatgcttatatatgtatgtgtatatatccatggctgatgagattttgtcttctatttagttgactcttaaatagtatctgacttgtgtgtattcttctttgtcatatgtaatatgggtagcatttagtattttgcattgatttgggtattgcagttggtttttcatttc

SEQ ID NO: 14496 - DNA, 653 bp, Gossypium hirsutum
  Clone ID: GOSHI-09MAY01-C65825_1
cttttctctctctctttctcctttcttcacacccgacaatctaaactacatacaagaaagtgtgtttggcaaaagagaaaaaaaaaaaaaaatcaaagatggcggaaaaagaagatctgggtttgagtctgagcttgagtttccctcagaatcaccactctttacagcgaaatcttaggccttcgcttgttccttcctctgctaattcttgctcttctctttctactttaacccttaacaaacactcatggaatgattcttctcctccttcagatcataactcggaatcattccgggcggagatggggtcaatttttagaggaatcgacatgaacatattgccatcgactgtagattgtgaagaagaagctggggtttcatctccgaacagcacgatatcgagcgtgagtggaaaaaggagcgaaagagaaggcaacggagacgagcttgagatcgaaaaatcctcatctcgtggaatcagcgacgaagaagatggcgacacttcgagaaaaaagcttagactttctaaagatcagtctgctattctcgaggaaaactttaaagaacacaacactctcaaccccaaacaaaagttagcattggctaagcagctgggattacgacccagacaagtcgaagtgtggtttcaaaac

SEQ ID NO: 14497 - DNA, 520 bp, Gossypium hirsutum
  unsure (1)..(520): unsure at all n locations
  Clone ID: LIB3829-003-Q6-K6-E1
tttttgcacgcagnacataacttggaatcattccgggcggagatggggtcaatttttagaggaatcgacatgaacatattgccatcgacggcagattgtgaagaagaagctggggtttcatctccgaacagcacgatatcgagcgtgagtggaaaaaggagcgaaagagaaggcaacggagacgagcttgagatcgaaaaatcgtcatctcgtggaatcagcgacgaagaagatggcgacacttcgagaaaaaagcttagactttctaaagatcagtctgctattctcgaggaaaactttaaagaacacaacactctcaaccccgtaagtaaattcaaatagaaacttttcatatgaaaactactgtttggctgctaagaaaagtatacgagaagttaaaaatggaaaatttagtctctaatgggttgttgaattttactatcttttgcagaaacaaaagttagcattggctaagcagctgggattacgacccagacaagtcgaagtgtggtttcaaaac

SEQ ID NO: 14498 - DNA, 468 bp, Gossypium hirsutum
  Clone ID: GOSHI-09MAY01-C65505_1
atttatttgcaggagtaaggaaaaggtacaagtcaagaaaatggatatggacttatctcccaagtttccggcgacgttcgtggagacagaagatggcggatactataattgggcagctgccgattctccggtgctccgcgaggccaaagttgcagctggtaagcttgtgttgaagcctcgaggctttgctcttccacactatgcggattgctccaaagtaggttatgttcttgaaggtaaatgtggagttggattgacaacaccagcttccaacacaaaagaaaaaagggcattcataggtattaaaaaaggggacataataccagtcccttgtgcatcagtttcatggtggtacaattatggtgattcagacgtggtcatagtgttcttggccgatgcaaccaatgcctatgttgctggcgaaatcacctatttcttgttaacaggacctttggggcatttacatgc

SEQ ID NO: 14499 - DNA, 295 bp, Gossypium hirsutum
  Clone ID: LIB3272-019-P1-K1-E12
aaaaagggggggcgccgcgcgtaatatttccaggagagaagggctcagtaagaaaatggaatgggggggctccaagtttcggcgacgttcgggagacagaagatggcggatactataattgggcagctgcgattctgcggtgctccgcgaggccaaagctgcgctggtaagcttgtgttgaagcctcgaggctttgctcttccacactatgcgggtgctccaaagaggttatgttctagaaggtaaatgtggagtcggaatacaacaccagctttcaacacaaaagaaaaagtgg

SEQ ID NO: 14500 - DNA, 592 bp, Gossypium hirsutum
  Clone ID: GOSHI-09MAY01-C65415_1
ccaaaaacaataacaaaagagagcaaaacaaaaaaaatggagcttaaacctggcttatcagctctggtcactggcggtgcttccgggattggtaaagctttgtgcttagctctggctgcgaaagggatatttgtgacaattgtagatttctcggaagagaaagggaaggaagttgcttctttagttgagatagagaattccaaattccatcaaaatttaggctttccttctgctatttttgttaaatgcgacgttactagcttaagagatttaaatttagcatttgagaagcatgtctcaacatatggaggactggatatatgcatcaataatgctggcattgcttatacagcacttttctggaaggatcaaactgatggcactaagacatgggaaacatactattaatgtcaatcttgttgcagttattgattgtactcgcctcgcgattaagagtatgcaagctctgcaaaagcctggggtgataatcaatatggggtcctctgcaggtctttacccaatgtacattgatcccatctactctgccacaaaaggcggtgttgtcatgtttactagatcactagctccctac

SEQ ID NO: 14501 - DNA, 861 bp, Gossypium hirsutum
  Clone ID: GOSHI-09MAY01-C65115_1
cccacgcgtccgccgtctattacgcagttttaggctgagattttcgtaatattagcatttaattaaaaagtaaatttaaaaaaaaaaaaagaggtcaaacaggcatttgctttgcttgctttatctatccttgcttgctcatcattttctctcatgccctcgcgcacgttttttcttctcttttgcctttgccttcgcatttgctttttctaaattccagcaatctctttactctttgctttcattttcccttaattcagtcacaaaagcatcatcattattatcattgtttaaccactctctttctttttcactcaattctactactaaaattctgggttttgttttctgattcttgattctcagttttcactttgattatcgatctgggtttgtgttttttttttggtcatggaaaaagacaaagcttttatgtctgaagagctgaagaacagaacaacaacacgacaacaacaaccagcttggaacccttgtggttttatgacagaaatgtcaacaaatgagctgaattgtggaacagaacaaggtgggaactattttttcaatccaaattgggataattcaatggatcagagcgatccctttgaatcagcattaagttccatggtgtcttctccagctgcttccaatgttggttccggtgaaaatgtaatgatgcgggaattaattggaagatttgggaatatatgccattctaaagatatcatcaccaacagtactaatgcttcatggtatagtacgccattgaattcacctccattttcaactgaccctgggatttgctgaagagctgctagattttcttggtttggtggcctaaatgatccattagggattcct

SEQ ID NO: 14502 - DNA, 791 bp, Gossypium hirsutum
  Clone ID: GOSHI-09MAY01-C65305_1
aaaaatattatctacatctatcttggccgattgctctttgtgctctcatatggctatggaggatgctgagcaaccgcttctttcccctcggctagtcggcgaggacagccgccaccaggagcagttactttctagaccatcaaacaccaccttcacgcccggcatcgatgacatcccaccgatcaacggcgtccgtgacttcttcagagaatacctgatagagtccaagaagctctggttccttgctggccccgccatcttcacatctctttgccgatactccctcggcgctatcactcaagtcttttccggccaagttggcactctagctcttgccgccgtctccgtggagaattcattcatcgccgggttctccttcggcgtcatgcttgggatgggaagtgcactcgaaactttatgcggccaagcatttggagcagggcaggttggtatgttaggggcgtacatgcaaagatcatgggtcatcctcaactcaacggctttgatgttaagcttgttatacatattcgcggcaaaatttttgagggtaataggccaaacagaaagcatatcgaaggcggcccgaatgttcgcaatgtggatgttgcctcaactgtttgcttacgcgttcaactgtccgatggcgaagttcttacaggcgcagagcagatcatggtgatggcggtgatagcagagtggtgttggttctgcacactgtattaagctggctcttgatgctaaagctgggatggggccctacggtgcagccgtgttttaatatgtcgtggatt

SEQ ID NO: 14503 - DNA, 476 bp, Gossypium hirsutum
  unsure (1)..(476): unsure at all n locations
  Clone ID: LIB3825-006-Q1-K6-A9
gngggagctgagcaaccgcttctttcctctcggctagttggcggggatgaacagttactttctagaccatcaaacatcaccttcaccgccggcaccgatgacatcccaccaatcaacagcgtccgtgacttcttcagagaatacctgattgagtccaagaagctgtggttcctggctggccccgccatcttcaccagcgtctgtcaatactccctcggcgctatcactcaagtattttccggccaagttggcactctggccctcgctgccgtctccgtggagaattcggtcattgccggtttctgcttcggcatcatgcttgggatgggaagtgcacttgaaactttatgcggccaagcatatggagcagggcaacttgatatgctaggggtatacatgcaaagatcatgtgtcatcctcaccgcaacggctttgaatgtaagcttggtatacatatttcgcgtccaacttttgac

SEQ ID NO: 14504 - DNA, 595 bp, Gossypium hirsutum
  Clone ID: GOSHI-09MAY01-C66985_1
gttgagtgtagctaaacttcccagcactccattgtttctatgtcttgttcttcccctgtttacccttatgatttggcttaagttacaaacaaatggccgaaaaagacttaagttgccgccatcaccccccaaactcccattcatcggcaacattcatcaactcggcaagcttccccaccgctccctccgagatctctccaggaaatatggctcactcttgctacttcaattgggccataaccagacgctggtggtttcatcagccgacatggttaaagaaattgtcaaaaatcatgatgttgctttctcagatagaccaagtaccactgccgctaacatcttgttttacgggcgcaccgatgtggctttcgcaccgtatggcgagtactggagacaagctaggaaggtgtgtggcactgagcttttgactcttcgaagagttaactcgtttcagttcttgagagatgatgaagttgcagtcaccattgataaactccgccgagcttctttcaagggagaggctgttaacctgacggaggtgctgatggttgcttcgaataaccagatttcgagaagtgctctgggtcgaaaattc

SEQ ID NO: 14505 - DNA, 635 bp, Gossypium hirsutum
  Clone ID: GOSHI-09MAY01-C66505_1
aatcatatcatcctttttttattccaaataaaaagctgcccactatgctcctatcttcgggtcccctccatctctctctctctatattatgggagtcttatattctccactaaatcaaaccccccattttcatttcttgctaatcaatactccatttccctttttgtttttattttcaatgtgtttctttgtagatgatccagggctaattttaagccatttcctttacaaaacagctgtttttttagcagttttaagatgggttttgtcttggcttcttaatcttagattcaaagacataaactctttcttcttcactcctaaattttcatcaaattctcatcaaatttcttcagacatgatcagagacaacttggttttaacaacctatggggatgctaaacaaaggatgccttgggtttctgacacgtgtgctgtttgcttgtgtgagctcaaagaaggtgatgatgtaagggaattgaggaactgttgccacgtattccatcaagattgcattgatagatgggcaagctatgacatgactgacatgagatgaatgatacatagactgtcattgtaggcacttgctctgtctaaactggttcctatatgacaagttgcgttatgtacttccc

SEQ ID NO: 14506 - DNA, 643 bp, Gossypium hirsutum
  Clone ID: GOSHI-09MAY01-C66715_1
acacactctctttccgacaagcttccatacacgcctctcagaactgagaatctactggtttttttatttgtttcatttgactatggattccccacaatcagttgtgtcgccattgaagaacacggttatagctgaatctggtgagaaacaaaaatccaacacaaaagaagctgttttgtccaagaaagacgacaacatcctaggtgttcttgaagtttatgttcatcaagcaagggacattaataatatctgcatttatcacaaacaagatgtgtatgctaagctttgtctcaccactgatcctcaaaccactgtttccaccaagatcatcaatgggggtggaaggaatccgggtgttcaacgacaacctccgtctcgatgttgggaacatcgtttcgggtcttaaaatcgagatattcatgatgagtagagtgaagaattatcttgaagatcagttattggggtttgcattggtaccatttgtctgaagttatagtcaagaatggaaatggaaaagagtctcttttcttgacgattgttcattcgcgctgttcgtcaatgcgctcatattcgatatttccgtgatgctttcctaagtgttgagaacctaggtttgaacaacactcaagatgttccgttcaaa

SEQ ID NO: 14507 - DNA, 445 bp, Gossypium hirsutum
  Clone ID: uC-gsflnu33B028b05b1
ctttatgttgggaacatcgattcgtgtcttaaaatcgagatattcatgatgagtagagtgaagaattatcttgaagatcagttattggggtttgcattgataccactgtctgaagtaatactcaagaatgggaaattggagaaagagttcttcctttcttcgacggatttgattcattcgccggctggtttcgttcaattgtcgctcgagtatatcggatcatctcccgatgtaatgactattcctaatgtttgatgctgatgaaaccgataaggattcggaaacggaggagctcgaaaagatcgagttcccgtgatccgaaaatcgttaacgagaaccaaatgatggcgtccgagtactttgggatctcgtgtgcgaatttggactccaagaattctgaaatgggtgttaatgcattggattcaatccaagtccctgagcttga

SEQ ID NO: 14508 - DNA, 608 bp, Gossypium hirsutum
  Clone ID: GOSHI-09MAY01-C66145_1
gcccggaaccccgggcgacgacccacgcgtccttattgtattacctgttttgagggtttattcatttgcagccatgaaattcagaagcttttgtttttgcatcccaggatcaaagcaagaagattcagacagttcttctaacaaagcaaaatcccataaaaagtctgacaaaagtgggaaaaaggaagggaatgtggatgatgctgattatcagggtgccactactactactacgacagccagcagtgatgctggaatggctgctgctgtagcagtgggtgccactacagcacatgcctccgctgtggaatgaagtggttgcgatggttgtcatgcaggtggtggtgttggcggctgatagccggacactatttcaaaaaagctggttcagtttttggcctttggcattcttcatcatattgatttcagaatctttctttcatcttgcatgaaaggtgcttggttttttcatctttatatttttggtgttcttttttttttccccgagtctaagttgtgcattgggattactggtttttatttccagttgaaccggtaatcattcttgtttcccgatttatttgaagatcatttgaaaaaaaaaaata

SEQ ID NO: 14509 - DNA, 845 bp, Gossypium hirsutum
  Clone ID: GOSHI-09MAY01-C66115_1
ttatcggccatgtcgccggacctataaagtttatcccgattttagcctttctctgtctaaaaacccctctgcaccatttctctttctctctttggcgattttttttaaaaaattaataaaattgggtttagcttaaacattttagcacttcagctccatctctctgaaataataaagaagaaaatagagagaatcctagatttttgggcctagggccatttgcgtcatttcgcgagaacggaagcgattattatcatcgacaaataaaggagggatagataaaaagggaagatgtacagaggagagagagcggccggtggctctaagggagaggtggggtcggtggatcggaagcgtatcaacgagacgcttgataagcaactggtgcgatcatcgccgtccactttgagagcgatcaacggcaaagataagtctgcaaacgcccatctcatggggaagcatccacctgatcatcatcgcgactctcgctccgcttctctacctaaagcaaaggcctccgaagatgaatctgaaacagacagtgaagaatcagatgtcagtggttctgatggggatgacacatcttggatttcgtggttttgcaacctacgtggaaatgaattcttttgtgaagtcgatgatgactacattcaagatgactttaacctttgtgggctaagcagtcaagttccttattatgattatgcacttgatttgattttggacgttgaatcccatgaagagcaaaatgaattagttgaatctgcggcagagatgctttatggtttgattcatgctcgatacatattgacaagcaaaggaatggcagctatgctagacaagta

SEQ ID NO: 14510 - DNA, 536 bp, Gossypium hirsutum
  Clone ID: LIB3582-004-P1-K1-A6
aaaagaaattgaagataagaggatacagcttgaagacggatggtcttgatgagattctctcattcgtcaatcgcttccaagatgctgaagatgaggctattgatctcctcctcgactagctcgatcaccaatcctgtaattttctttatttatgcttttctagggttttccttttttttttaatattctattagtattttttttaattgtaagcagtgaattcttccataatcgacaaggaggcggtgcaccaagtagtcagtcttctattggatgctaaagcagctgagaaggagatctgtttgaatatgcggatgtaattcttgcaaaaatctccttgttgaaaatctagagacttaattcgttacagaacactttgataattagtaaaagcaagtaaggagggaaagactgatgctggctttttttgtttctgaccatctaaaatttcatccatgatcctcagtcaacgtttggttctatgtctatacaccactgtgttacaagctccttggatagtattatttttctaaaaa

SEQ ID NO: 14511 - DNA, 429 bp, Gossypium hirsutum
  Clone ID: LIB3272-027-P1-K1-G2
caaaatcgatccccccagaaatggcgcctgaaatttcttcttcttttttccccattttattttttcccaaaccatattgttgcaaactcgtaagaagattcaaaagaaattgaagataagaggatacagcttgaagacggatggtcttgatgagatctctcattcgtcagtcgcttccaagatgctgaagatgaagctattgatctcctcctcgactagctcgatcaccaatccttgaattcttccataatcgacaaggaggcggtgcaccaagtagtcaatcttctattggatgttggagcagctgaggaggagatctgtttgaatatgcggatgtaattcttgcaaaaatctccttgttggaaatccagagacttaattcgttacggaatactttgataattagtaaaaaccctgtttttgatatat

SEQ ID NO: 14512 - DNA, 569 bp, Gossypium hirsutum
  Clone ID: GOSHI-09MAY01-C66305_1
ttatttaagctgttgaatctttgataacttcactttggagcctaaattagggtttccacggacaatatattatggcaactgctaaagtttccaaggcttccaaatggttctctaacaagagccttaggttaagccttcaacgtcgtggatcaaagtctagatcaacatccttaagctcttctcctggaccatcatcaacaccaatatctcctcgcacaattcctaatatgagaaccaaaaggcctgaagaagacgagatgaagcaagtctttggctatttcgacggggatggtgatggcaaaatctctgctcttgaacttagggcgtactttgggtccatcggggagtacatgtcacatgaagatgctcaaggggtgatcaacgatcttgactcggacggggatagcatgctgcactatcaggatttcttgaagctaatgaaaagagaacccagcaaggatgatgagggagatgattatgatgatctgaagaaagcgttagagatgtttgaactggagaaaggttcggtgtgcataacacccaaagggctgcaaggatgttgaatcgac

SEQ ID NO: 14513 - DNA, 573 bp, Gossypium hirsutum
  Clone ID: GOSHI-09MAY01-C66245_1
gtgctttaaagtgtatggatacataagtatgaaacaagggattacctttttgcaagacttcaaactcggtcactacatgaagattcctcctagatccatgttcatagctcaggttggtggtacaataatagctgcattagcgcatttgacaacagcgtggtggcttatggttacagttccagacatatgcgacagagaaatgcttccaacggacagcccctggacttgtcctggtgatcatgtgttttacgatgcctctgttatctggggtctgattggacctcgaagaatctttggtgatcttggctactactctgccataaactggtttttcttagttggggccatagctcctgtccttgtttggcttgcatctaaggccttcccaaacaagccatggataaaacttattactatgcctgtgctttttggtgcaacagtcaacatgccaccagctactgctgtcaactacaccagttgggttcttattgcctttgcatctggttttgttgcttatagatattatcgtggctggtggagcccccataattatgtgctctctggggcacttga

SEQ ID NO: 14514 - DNA, 522 bp, Gossypium hirsutum
  Clone ID: GOSHI-09MAY01-C66265_1
acccacgacgcgcggccattttatgcttccatctacaagtactcaatcaggggaatcctcaatgactactatctattgtgattggctaacatcccaaatgtcttcttcgacattaaccgtactcttcgtcctccttggaactctctgttcctttatctacttcttcagctcaccaaaccgcaacaacaatggccggaaacttccacccggtcctgcccctcttcccgtcgtaggtaacatccacatgctaggcaacctcccacaccaaagtcttcactatctcgccaaaaaatatggacccatcatgtcgataatgctaggcaaagtaccaaccatcgtggtatcatcacccgaagccgctgaactgttcctcaaggtccatgacgtcgtttttgcttccaggcctaacgtccaatccgcgaaatacttcgcatatggcggccaggccgtggcttttacccagtacggttcttactggcgaactgtacggatatggtgtatcttgcatttcctcagtgcttc

SEQ ID NO: 14515 - DNA, 359 bp, Gossypium hirsutum
  unsure (1)..(359): unsure at all n locations
  Clone ID: uC-gsflmaxxa045f03b1
atctacaagtactcaatcaatcaatccccaatgactaccagctcttgtgattggcttccctcccaaatgtctacttcaacattaaccttactcttcgtcctccttggaactctctgttcctttatctacttcttcagctgaccaaaccgctacacaaatggccggaaacttccacccgatcctgcccctctacccatcataggtcacacccacatgctacggaacctgacacaccatattattaactatcttggcgaaaaatatggacccactatgtctacaatgctcagtaccgntactaccattcaggattcacaaccctaaagcgttaaactgactctcacggtccattacgtcac

SEQ ID NO: 14516 - DNA, 614 bp, Gossypium hirsutum
  Clone ID: GOSHI-09MAY01-C66235_1
gagaagacgacctggaatcggagggctccaaacagctgcagctgctagggatcaatatcgagcgttgggagaaaatgtagccaagttaagaaccgacctcatgaaagagcagcttgctacttttcgttctcaactcgaagaattcgctcgaaaacacaagaatgatattcgtaaaaatccgtcttttaggtctcaatttcacgaaatgtgtgcaaaagtaggagtggatcctttggcttcaaataagggattttgggctgagcttttaggaatcggtgatttctattacgaacttggagttcaaattgttgagatttgcttggcaactaggcctcttaatggaggtttgattgacctgcaggaactctgcaaattgcttcgtcagaaacgaaaacatgatcgcgaagctgtatccgaagatgattgtttgcgtgctataagtaagctgaagacattacgtagtggatttgaggtgatttctgctggaaagaaaaagcttgttcggtctgttccaactgaattgaataaagatcataatcaaattctggagctggcacaggctcaaggctatgtgaccgttgatgaggtataaaggcggctttcatggacacatg

SEQ ID NO: 14517 - DNA, 581 bp, Gossypium hirsutum
  Clone ID: GOSHI-09MAY01-C66225_1
caaatttctctccttcttttattttattttcctctttatttttcgttctcaattatattaagtctctcagttctctccatctcccgttgtttattttccctaattttgcttcgattcgttcaaggtcgctttactcattctgggctgtgattttttggttcatgattataagctgcaacaaattacaacaacaatttattgaagcagcatgggccaaaggaatatgcgaagccctattgatttagaaatcgatcaacaagcccaggaatacctccagcatgaaccttgcgtctatttgggtgggacgacgaactacccatcacctgatatcccaatgaccgtcacagctccagggaacacaactaaccttgatgcgcatcccttacctgagcattatgacaacagtatgttttatgggatccccatgtaccctggtgttcagcatcctcatcattccccaaatcttgatcttggtatcgggagtgcctcgaacttttatgttccctatgtgcctaccccttcatccagtgttcctataaatcatggaatcccagaccagatgccatcatccagcaactatc

SEQ ID NO: 14518 - DNA, 844 bp, Gossypium hirsutum
  Clone ID: GOSHI-09MAY01-C67915_1
aaaatatttagcaaaggataatataaataataattaatgtccgtttttctgaatcgtttgtctcgtctcctccgtccgcaatgcatccctaatctgagcaaaagtatttacgcgttttgcgttgcttaattccttattatccattcccttttctccttttctttccttatttatatttccttttctcactattttcctctccaattttccttctttcatttctctccaaattttcccaacaatggagtccgtcgatcttcacgaaaccaccaatgccaaccacgttgaccacggctggcaaaaggtctcttatcccaaacgtcaacgcaagaccaagcccaacgccgatcccaacctcccccgtcctaacggaaccctaactaatggctccgccagcgttttccattccctcgagcaacagtccgaggatcgccgtcgtcggattgttgaagctcaaagagcttacgctgctgctgccattgatgccgatgccaagcctaagcctaaaagatcggtcatcgatgattccgacgatgacgatggcagtgatctggatggccttaaacctaacgggaagccagcagatgaggagaagaaggcgaagcaaaagaagccgaagaagcctaaggttacggttgtagaagccgctgcgaagatcgatcccactgatctctctgcttatctcgctgaatggaatggcgaacagcaagaaattcaaatgcagaagtttgcggattactatggtaaggcatttcagctagtggttgcggggcagtttccttggttgaagcttttcagggagaagtaccgttgccaagcctgctgatataccactttcacatat

SEQ ID NO: 14519 - DNA, 490 bp, Gossypium hirsutum
  unsure (1)..(490): unsure at all n locations
  Clone ID: uC-gsflnu33B108d04b1
tttgatgatggtttatgtcggccaaatttgtatttaagtatatacgatcaacgtggcggccgtgccccgacgacaaactagcagccaagtgggaaactatactgcaattcatttcaccccccactctctgtttatggttttggtcttttgggaggattccggccatggaaggtgactgttgttcttcatcgacgtcgagttcaacgagcggtgagaagccgaaggcggaaaggacacaacaaaaggagaaaccatatagagggataaggatgaaggaagtgggggaaatgnggttggcttgaaataaggggaacctaacaagaggtctaggatttggctcgggtcgtataccacccccgttgccgccgcccgtgcctacgataccgncgtgttctacttacgagggtccgtccgcgaggcttaactntcctgaccttatagaaaaggataataagcttaaggatatctctgccacttccatacggaagaa

SEQ ID NO: 14520 - DNA, 289 bp, Gossypium hirsutum
  Clone ID: LIB3272-045-P1-K1-C6
ggtttatgtcggccaattttgtatttaagtatatacgatcaacgtggcggccgtgcggggacggcaaactagcaggcaagtgggaaactatactgcaattcattttaccctccactctctgtttatgtatatatatatcattgtgaatcccttttttgtagcaagggtggtctttgatatttaaattttaactcttctttctcggacaatagggctttcggttttttttggggggttcctagcgcatggaaagtgactgtaattttttatagacgtctatttcaactag

SEQ ID NO: 14521 - DNA, 801 bp, Gossypium hirsutum
  Clone ID: GOSHI-09MAY01-C67755_1
aaagacctgactctgcgcttcgagctttctttctatttctctctaagccaaagcatggaggactccggaccccccgccccaaacctaaatcagatatcgggttggagcaacgttctgaagagccaaccaccaaaacctcatactcaaagccaaactacggcgacaagccaaatcttcgttgaaagctgcaaatccacgaagggaatagcggtggccgtagtggacgccaacgccgttatcgaaggtggagaaaagctaaacaacaccgctgacaggttcgttaccgtccccgaagttctcgcagaaattcgcgaccccgtttctcgccaccgcttagccttcatccctttctccatcgattcggtggagccctccccagatgccctaaataaagttatcaaatttgcgagggcgactggtgacttgcagactctttctgatgttgatctcaaactgattgccttgacttacacgttagagtctcaaattcatggaacaaatcatcttagggatgcgccgccccctgttcatgttgttaatgtgaagaggctgcctgaaagggacttgcctggatggggctctaatgtccctaatttggaagagtgggaagctctcgaaccggaaactggagatggattcaactctaactcgagaatccttcccttgaaagacttaaatatgaactatgtctcatcagataacaattctgaagatgtattggtggaaacaaagagtgaaacacattctgagaatcgagaagatattgaccagggttttaggaggcctaagcgctatttgccc

SEQ ID NO: 14522 - DNA, 520 bp, Gossypium hirsutum
  Clone ID: GOSHI-09MAY01-C60525_1
atccgggatgtcgagaactgcaagaccacgtttgggcgtggaaatatgaacaggcgctttgagagcagccagaagtacaaagaggggaagtacatcattgaactcaaccacatgatcaaagacaacggctgggactgacccccgctccccgacgcatgtggctccagcccggcctggccgccagggagcgccaccggcttccctccgcccaaagggagctctggaccctcagggcccccgcagaggacggatccagctcctgtacatatattttattgcatgcactgtgaccttggggggagaacagaagggggacgacgcccccgcacctcctgcgatctggctggcttggatctcgtttttaaccccctccttccccgcttgccctatagatatggcctgtgttctgctctcctggccccagtgcaccgtctgctctgtgaactcctccaccaagcccctctgaccccacgcgtgtctgtccccctcgttctgtagcgtttgtacataataaaacaat

SEQ ID NO: 14523 - DNA, 510 bp, Gossypium hirsutum
  Clone ID: GOSHI-09MAY01-C60475_1
aaacaatacaataataaaataaacaaaccaaatcctatttattatatgaattctataatttgaattttcaaaataggattttagaaatagagatagggataggattctttttagaaatattagaaataaggaataaagaaatcatggataaatccaagcgactctttcttaaatccaagcgatcttttcgtaggcgtttgcccccgatccaatcgggggatcgaattgattatagaaacatgagtttaattagtcgatttattagtgaacaaggaaaaatattatctaggcgagtaaatagattgaccttaaaacaacaacgattaattactattgctataaaacaagctcgtattttatcttcgttaccctttcttaataatgagaggcagtttgaaagaagcgagtcgaccactagaactactgctcttagaaccagaaataaataggcttaccccttcaaaagaatcccatccggttgggttaagaaatgaaatccgaaagcgtggg

SEQ ID NO: 14524 - DNA, 408 bp, Gossypium hirsutum
  Clone ID: GOSHI-09MAY01-C60665_1
aactcggaaaatggacccaactgcaccctccgcgtcggtcgtcggcggcggctgtggcggcggcggaggagggccggcacctttccttatgaaaacattcgacatggtggacgactcatcgaccgacgacatcgtttcatggagctctaacaaaaagagctttgtggtttggaaccctcctgattttgctcgccttttgcttcccacttatttcaagcacaataatttctccagcttcatcaggcagcttaatacctatgggttccggaagattgatcccgaacgatgggaatttgccaatgaagatttcgtgaaagatcaaaggcatcttcttaagaatattcatcgaagaaaacctattcacagccatagtaatccacagggttctttgatagatcatgaaagagc

SEQ ID NO: 14525 - DNA, 434 bp, Gossypium hirsutum
  Clone ID: GOSHI-09MAY01-C60625_1
atgaaaagatggcggctgccgcacaatcccgggttgtccgggtcctgccaatgtcacgttctgccattactgcaatagccacatcagtgtgtcatggcccgccctgtcgccagcttcatcatgccgtcatacctcatgggaaaggtggacgttcctcagtcagtgggatcgtggccactgtgtttggagcaacaggattcctggggcgatacgttgtcaaccaccttggacgcatagggtcacaggtaatcataccccatcggtgtgatatatatgacaccatgcaccttcgtcccatgggtgacctgggccagcttctgtttctggaatgggacgcgagagataaagattctatccgacgagcagtggaacacagcaatgtggtcatcaatcttattggacgagactgggaaaccaaaaacttcgattttgat

SEQ ID NO: 14526 - DNA, 688 bp, Gossypium hirsutum
  Clone ID: GOSHI-09MAY01-C60095_1
actgaaagtattggctccatttagggtgccaaggatatgcattagctttagtattagtgtttctgcaaaaatgttggcggttttcgagaaagcaataggaaatccaccggaggagctcaggcttccttcagttggattggattcagacggtaagaaaactcgagaagaaatcttgcagactttcaggttgttgtggccagagtcgaccttttaccacctttcaaatgggaatttcatgacactgtcacacggagcacaaggtcctttgcatccaaggtccatggttgtcatggatgacatcttctgcatctttattgggactcttgtgaacatttgcgaactcaggcgacattacggcttgtccagacaagcaacagaagccatgcttgtggttgatgcttacaaggttcttcgagaccgagctccatatccacccgatcaagtcattaaagatcttgaaggaaaatttgctttcattcttttcgatgctaaatctagtactctctttgtggccagagaccgtgaaggaagcattcaacttaaatggggaatggctggagatggctccctggtattatcagatgatccaaacaccatagaaaaggcttgtggaaaatcctctgcttcgtttcctccaggctgcattttcatgaatggcaatggccttataagcattgatcatccactc

SEQ ID NO: 14527 - DNA, 370 bp, Gossypium hirsutum
  Clone ID: LIB3196-021-P1-M1-H5
ttgacgcgtgggcggcaagcattggccttgggaatcttgggtttttctgcaaaaatgttggcggtttttgagaaagcaacaggaaatccaccggaggagctcaggcttccttcaattggattggattctgacggtaagggaactcgagaagaaatcttgcagactttcaggttgctgtggccagagtcgaccttttaccacctttcaaatggaaatttcatgacactgtcacatggagctcagagtcctttgcatccaaggtccatggttgtcatggatgacatcttctgcatctttattgggactcttgtgaacatttgcgaactcaggcgacattacggcttgtccagacaagcaacagaagccatgc

SEQ ID NO: 14528 - DNA, 738 bp, Gossypium hirsutum
  Clone ID: GOSHI-09MAY01-C60355_1
acaagaacaaagaagggtttgattttgatttgagagagaatcgaagaaggaatggagaagcctaggcaaatctcagcaatggaggcattcgagaaattggagaaggtgggagagggaacctacggaaaggtatacagagcaagagagagagcgacggggaagatcgtagccttaaagaagactcgtctccacgaggacgatgaaggcgttcctcccaccactctccgcgaggtctccatcttgcgcatgctctctcgggatcctcatgtcgtcagattgatggatgttaaacaaggacaaaacaaagaaggaaagacggttctttacttggtttttgagtacatggatactgatctcaagaaatacatccgctcctttcgccaaactggggagaacattcccgttaacattgtcaagagcttgatgtaccaactgtgcaaaggtgttgccttctgccacggtcatggggttttacacagagaccttaagcctcacaatctcctcatggatagaaagaccatgacccttaaaatagctgatctcggcctagctcgagcttttactcttcccattaagaagtacactcatgagatattaacactatggtatagagcacctgaagtccttttgggggctactcattactcaactgccgtggatatgtggtctgtggcctgcatctttgccgagctggtcaccaaacaggctctattccctggagattctgagctgcagcag

SEQ ID NO: 14529 - DNA, 350 bp, Gossypium hirsutum
  Clone ID: GOSHI-09MAY01-C60365_1
cccacgcgtccgcttatccattatggtatgaattgtttcatatctgcaaaaataaaatatagcattgatggtaaccatctctggaaggattcatatgttgcctggtactatgagttgaggttctaagccattgagtgcttggtggtgattggtaaaacccctttgctttcgaacctcttggcctctgtctctatggttttctgatttcagccctttattcttaaaaatcaaatctctaatttggttaaattatattgattgcggaaatttgtgttattaccattgaaaaaacaatatgtgtagttatttacacaatgtataaccatgattatagtgaatttgttattttt

SEQ ID NO: 14530 - DNA, 410 bp, Gossypium hirsutum
  Clone ID: GOSHI-09MAY01-C60315_1
atgcagaagccatagttcataatggtagggatacagggtccttcgtaacattatcagtgtggcctatgttggaaagtctggtgacctctgattttgtcttgcttctgggtctttgactttggcactctttgccatattagagttcctgggcctagggctgagcaggattcataggtgcagctgcttttgctggaggtagactgcatccaagaaaggaagtgtgctgggtgagttctgggagtagagattctgactggggtcaccgctgggctggccaccggtcttccttctgacccagggttaaactgtggcttgggactgactcaggtcctctcttggggtcggtctgcacataaaaggactcctatccttggcagttctgaagcaacaccaccacaatgcttaaagtg

SEQ ID NO: 14531 - DNA, 376 bp, Gossypium hirsutum
  Clone ID: GOSHI-09MAY01-C60245_1
atgccggcgccttcaaccactcggacctggacgcggagctgaggcggctctttcgcgagcgctacggctgcaccccaagtttgtggcggccgtgcactacgagcagcccaccatccagatcgagctgcggctgaacacgtcgcataaggccgcaggtgacgtggacatcggtgatgcagcctactactgcgagagggacgtcaagggcgagtctctattccagggccgcggcggcctggacttgcgcgtgcgcggtgaagcccctgcaggtggagctgcacgctcatctattacctggacgagattcccccgaagttcttcatgatgcgccttaccggcgggcttatcggcgtcatcgtggtggtggtggtggccc

SEQ ID NO: 14532 - DNA, 658 bp, Gossypium hirsutum
  Clone ID: GOSHI-09MAY01-C61915_1
attactgctcaaaaacctgagcagcgatacgaagacagtgacagtgaacatgacagcctggaccatcgtctacaatggcacacttgtacatgaagtgtggaaggactctgccaccatgtccctggaccctgaggaagaggcagagcatcctgtaaagatctcgtacgctcagtatgaaaagtacctgaagtccgacaacatgatccggatcacagccgtgtgcaaggtcccagatgaacctggggtggtggtggagcgggacatcatcctggacaaccccaccttgactctggaggtgctggatgaggctcgtgtgcggaagcctgtgaacgtgcagatgctcttctccaatccactggatgagccagtgagggactgtgtgctgatggtggagggaagcggcctgctgttgggtaacctgaagatcgagtgagtcctgggcctgagtggccggtgcgggagggtgggagggggcgggggggggccctacagatcctctgggtgggacagacagagctccctctgaccttaagttctttactcttttgggggccttggaactctagaatctgcatttgcatttggtttgggggttcaccaaacttgaactcttgagaagtccaggtcatcagagctaagagctggtcttcagggctta

SEQ ID NO: 14533 - DNA, 350 bp, Gossypium hirsutum
  Clone ID: GOSHI-09MAY01-C61865_1
ttaaaaagatcgtagtttaaaatcttttcaaattctcgacactaagacatcaaacaatcaatttggtaccgattttgggcgttacgagggtgctaacccttcctcgtgcgtgaccgactcccgaacccgttttctcaaaattcgtagacctaaaatcgtttccaaggtgagccgatcacaccccaataaaagatcagttgcgactccaatttttgttttaaaaaatggtttcgattggtatgaaggaccctttcgagttgtgaagagagtaggaagggtggcctacaaacttgagttattagcaaagctcaaagtccacccagtgtttcacgtgagcatgcttaagtcat

SEQ ID NO: 14534 - DNA, 639 bp, Gossypium hirsutum
  Clone ID: GOSHI-09MAY01-C61825_1
tcggccactcgtggggccacgcgtcgggattcatcatcacatttgtcatcgagcaaaggccacaagggaacacagagggtgaaagaaagagagcaatggaaagaatacggcataagatggtgaatgtcaatggtatatcgatgcatgtagctgaaaaaggagaagggccggttatcctcttccttcatggcttcccggaactatggtacacttggaggcatcaaattattgcactaagctcactcggctaccacgctgttgccccagatcttcgtggctatggtgataccgaagctcccactgctatcagtagctactcttgcatgcagatcgttggtgacctcgttgcactcattgactctcttggtgtagagcaggtctttctggttgctcatgattggggtgccattattggatggtacctttgcttgtttcgtcccgatagagtcaaagcttttgtgtgcctcagcgttccgttcatgccaagaaaaccacagatgaagcctgttgagagcatgagacttttctttggagatgattactatatttgcagattccaggaacctggaaagattgaagcaaagatagctcgttatggagcttcaaatgttctaaagaaaatcatttcgagtcgaaaag

SEQ ID NO: 14535 - DNA, 624 bp, Gossypium hirsutum
  Clone ID: GOSHI-09MAY01-C61795_1
tccgcattcccggtcgacccagcgttcggttaatacttcgggttcctctttaaagcctcaacctcatgattcacaaatgaggccaactgcacatcaaagcatgggatcaaatcctgctgtaggaggatcaacccaggcaatgaacatgatgagtgggcctaagcttgagaggcaaaactctagtaatgacccaaatagattgcagggcacatcactttctcacttttctagtggttcagttccttggcaagcctctccgagtaaggagctgaatcctggccctttttcatcagcgacatatgtgaaacaggaatctgctgatcaaggtgctgaccagcacagatctcatttgcctgcaacccagggagtctcgactacactagctgaacaagggaaggcagttacaactactgcaaaggatgagcctggagagaagcagtcttctagagttgccttcacaacaacaccctccatcacagcacaattggattctaatgtcctgttgggctctaggaatccatctgtgcctgctccaactgggatgaatgcaagaactcctcaaaaaaagccttctattggccagaagaaaccactggaagctcttggttcatcaccaccaccatc

SEQ ID NO: 14536 - DNA, 310 bp, Gossypium hirsutum
  Clone ID: GOSHI-09MAY01-C61765_1
cccacgcgtccgaaataaactaagatccattgagtcataaaatgtaaattactggattgaaaatacaaaaatatgtgctgaagataactaaaaggggacaatttaacccataagtagggagaaaacatatgttctttctaggactatcacaccccctaacttgagttgggtcttggcctcaagtaaaacaaaaactggcaacgctatacaagaattcactaaggtaaatgatcattctagcaactttaatcacctaaaattccaatgaattattcacattcagatgacagaatattgcatcgacaatgca

SEQ ID NO: 14537 - DNA, 656 bp, Gossypium hirsutum
  Clone ID: GOSHI-09MAY01-C61125_1
gttagaatttgtataaggcaaagaccagtgcaatatacttccctggttagacgcttggagaaggcattcagcataggttgtagtccaactttggaaacccagggtggaatctttggtcaaagatatatgcagtacaacttccattgctctccctttagcttggtggattttggctatacatagtggcggaacttggctggaaaaagtgaacctccacctccaattttaagtcctcctcctgtcagtgtcagcaccaataaaactgttgaagcacctaagtcaaatgggaccgtttcaacaccttcattagctatcaccagaccgctatcttcttcagggagaattgaatcattccttgataaagctgcagatgaaggtttggtgattcttcagtctccaaaggtaggtttcttcatgagatcacgaaccattaaggtgaagcatgctccaccatcgtgtaaagagaagcaaatagtaaaggaaggcaaggtgctttgctacatcgaacaactaggctgtgaaattccgattgcggtataaatctcaacttaacaggaattacgatgtggcttctgcatgttaacaaatggaaatgatttcacggttcaccctacttgtctttcgagttacttttcttggatgcttatggttatatg

SEQ ID NO: 14538 - DNA, 471 bp, Gossypium hirsutum
  Clone ID: GOSHI-09MAY01-C61245_1
tatttaggtgacactatataacaagtttgtacaaaaaagcacgctggtgccggtcccggaatggcgacatcaaagagccagctggcccgcgatctatgggggcatagacgggggcggcacacggtccaaagtccttttagtctcggaggatgggaagatcctggcagaagcagatggactgagcacaaaccactggctgatcgggactgacaagcgtgtggagaggatcaatgagacggtgaacagggccaaacggaaagcaggggtggatcctctggtaccgctgcgaagcttgggcctatctctgagtggtggggatcaggaggacgcggggaggatcctgatcgaggagctgacggaccgatttccctacctgagtgaaagctacttaatcaccaccgatgccgccggctccatcgccacagctacaccggatggtggagttgtgctcatagctggaacaggctccaa

SEQ ID NO: 14539 - DNA, 359 bp, Gossypium hirsutum
  Clone ID: GOSHI-09MAY01-C62925_1
acgcggacgcgtacgcgtaggcgggcgcgtgggcggacgcgtcggatctccagctagatccacgagaacgcggactggcttgcacggttggattggaatctgtcgcagacacaatgaagaaaaaaaaaagcccctgtgatgagaggatgagctgaacttggcaaggcgtaagctaatgatgtggaacatgatcccggttgtggtgtagcgaaaccacaccacctcgtgttcttgggcgagtctattctatgcaaaggtaaatataggagctcatctttttttttctttaatgtagatggacagagagaaacaaaatgctttgattaaagggagggggagaaccaattaaaaggagtggg

SEQ ID NO: 14540 - DNA, 537 bp, Gossypium hirsutum
  Clone ID: GOSHI-09MAY01-C62525_1
aaaaaaaaaaaagagagagagctctaaaattctctcagagctccggccagtggccgtcctggctcgtctcggagcaccaccgccttcggccatacgcgcttcacgcgccaccgtctgaaccaccgtgcccggcggttagggctttaaaattttctttttctctcacgaatcaacaggtttatacacgatgattgcgacggaggtgagggcatgctgattcaggcctttgattgcggcgcaacatgaggttgatgtcggctggaagcttacggcgcgaaccctagctagggtttctcagaagctgaaactccttaagttagttgggcctgctgggctgtgtttgtttgttggatcaaaagggtattttgggctgattcgggttgtgaatttaggtatgggtgtaatgcgtattcggggagaatttttagggttaatttgtgggttttaatttttgggctgtggttagtgggtttgtattttgggttctgtaaaaggactttaaatggattgtttaattttatttctttgtttaatttt

SEQ ID NO: 14541 - DNA, 367 bp, Gossypium hirsutum
  Clone ID: LIB3196-040-P1-M1-D3
actttcgctccttacaactacggctcaggctcacacacacattgactgaatgggtcgcgctatccgggctgaacgtaggggcgctggatctgacatgactgccgacacgaagggactcatgtgtcctgcgctttcatttagtctgaaaagcgttgagagcatgggttttgattaaaagggggtcagcaattgaggaggaaatgaaaattgggcaaaacattccttttggaagtttggatggtaaagggaagcttttgttgaagggaataacaagatctttatgtttggcttatttactggtctatggggatgaggtgggaaatgaaaaattttattcagttattgccctaataaccctgcccttttt

SEQ ID NO: 14542 - DNA, 364 bp, Gossypium hirsutum
  Clone ID: LIB3196-040-P1-M1-D2
atgatgctcacactttggattggcaggaaaggggctgtggcggaaacaaaaggagatgagggcaggggcacttttaggaaggactgaggctactggcgatgtcacatgactgttgagaagaagggaatttgttagcaagtggttacatttagtaggaaaagtgttgagagcatggatttggattaaaagggggtaagcaattgaggaggaaatgaaaattgggcaaaacattccttttggaagtttggatggtaaagggaagttgttgttgaagggaataacaggatctttatgtttggcttatttactggtctatggggaggaggtgggagaggaaaaagttagatacaggacctgggcaaac

SEQ ID NO: 14543 - DNA, 579 bp, Gossypium hirsutum
  Clone ID: LIB3828-019-Q1-K6-G7
ccccgcgtccgcaaaataacgaatctgtttagtcgttccttggctaaagacccaggtaagccattcccatatattctggtgattacgattaagtacctatgagagctttaaatgattccaaacctctcttgtcataggacactgctgaaaaatatgataactatcttcctcattttgtcggcattgagggcaaagggcgttagctactgctttcttctacttaaggttgactaatgaaggaatgaaatttcaagatattctccatactgttaatgtaacttttgaagggatgtgtagcttccacaattttctgtaaaagttattagtctcggtctgtaaattaatattactaggatctttgctagtctcttgtaatagtttataggcactccttaccgataattcccttgacatcccccctccaaacttggaagtcctcgtgtgctagctctgcgagtggaatttgcaaaattttcctcgcaatttctggttgaaaggtagcaattgcaacatctgtattccaacttctattgttagtttctactaaatttgatactaacttgatattttcttgatttc

SEQ ID NO: 14544 - DNA, 366 bp, Gossypium hirsutum
  Clone ID: LIB3196-045-P1-M1-A6
ccgcagcaaaaataacgaatttgttcagtcgttcctttgctaaagacctaggacactgctgaaaatatgataactatcttcctcgttttgtcgacatcgagggcaaagggcattagctactgctttcttctgcttgaggttgactaatgaaggaatgaaattccaagatattctccatattgttaatgtaacctttgaagggatgtgtagcttccacaattttctgtaaaagttattagtttcggtctgtaaattaatattgctaggatcttcgctagtctcttgtaatagtttataggcactccttaccgagaattcccctgacatctccctcctccaaacttggaagtcctcgtgtgctagctc

SEQ ID NO: 14545 - DNA, 563 bp, Gossypium hirsutum
  Clone ID: AW187443.2
tttttttttttttttttttgcatccaagtaataggacaatgtcttggaattataaagagttgttttgatggagagaggaagcgttataagtaagtgaatgatatgtactggaagaaggcaaataagaagatcggagcaaatttggttgtaagtacccaaatttacccgggcccattaatacccaacttaccccagcccaaaccaccagcagaaaaaaacaagcagcaaaccctaggtgcctccacttgcaccgcctctcctccacctggtcccatcacctccttgaagacctttttgaggtcggggaagggaacctacccgcggtttcggccatcggagaccctttcaacggcatggatttggaccaagggacgcctctcgtctcctttgttcccgagccatgagccacgataggtggaggcgcatgggacgccgatgaaacccatgatcggccaaggagagaagcaaaagggacgattgaatgaggagcccttttttttggttcagccgaatgagaaaggaaggaagttttgttttgttttgatttttttttaagtgtcgac

SEQ ID NO: 14546 - DNA, 383 bp, Gossypium hirsutum
  Clone ID: LIB3196-036-P1-M1-E6
cccacgcgtccgacgatttgtattttgaaaggggggattttggaaataaaaaaaccattgtataaaacacaaaagagcaatcgaaaagggagaaatcaaggtgttccttcattctgtttttttgttatttcctttgtaagttcatttctgaatatagtgcatacatatagatattaaaagaaaacacacacaaaaaaagagaaagcttacctttttgaggtcggggaagggaacctacccgcggtttcagccatcggagaccctttcaacggcatggatttggaccaatggacgcctcccgtctcctttgttcccgagccatgagccacgataggtggaggcgcatgggacgccgatgaaacccatgatcggccaagcagaga

SEQ ID NO: 14547 - DNA, 580 bp, Gossypium hirsutum
  Clone ID: GOSHI-09MAY01-C62345_1
aatactatgaagccttgcaactgaaagtaagagaaccgaatcttgggccaaagttgttcttgggtggtgttggtgttcaaaagactgggacggagatagctacagccctgaataatatagatctgagcagtgagtatgtcctgaaactaaaacacgaaattgaagagcagtgtgcggaggtctttcctgcgccaactgaaagggaaaaggtaaaatcttgtttgtccgagttggctgacttgagcaacactttcaagcaagcccagaatgcttgtatggagcaactagcagcaactgtgacacctcaaatccgtccagtactagacagtgtagcaaccatcagctatgaactatcagagtctgaatatgccgagaacgaggtgaatgatccttgggtacagagacttcttcatgctgttgaaatcaatgtggcttggctccaacccctgatgactactaacaactacgattcatttgtacatttggtaatcgacttcattgtgaagaggttggaagtgattatgatgcagaaacggcttagtcaactcggtggccttcagcttgacagagatacccgagc

SEQ ID NO: 14548 - DNA, 366 bp, Gossypium hirsutum
  Clone ID: GOSHI-09MAY01-C63495_1
cccattcttgaattcggggccaaaggataaggcacttcctacgtccttgatccaaccattctgcgcgccctgtggcatcacagacaaaaaggtgcagtgcttccaatgaattaaggatgctgaagcatatacactggttctagttaaccgagccgaaccagtgaagaccttctgcctccaacgctgacaggaatgcttccctagcttcatgactgagcgtgcctgcaaaggagcacaaaggttttctccatatgtgcatgaccacaaacaaatgcaccatacagtttgggaactctaattagatggcttaaccagagcttaagacaaacggttcttacggtctatcacagaatttgggaacagagg

SEQ ID NO: 14549 - DNA, 403 bp, Gossypium hirsutum
  Clone ID: GOSHI-09MAY01-C63665_1
atgttgggcccggcgcgatccgaaggagcctagagagcgcgggactagggtgcagagctcgggacgtggatcggagccggcgcgatgggcggagagcaggaggaggagcggttcgacggcatgttgctggccatggctcagcagcacgagggcggcgtgcaggagcttgtgaacaccttcttcagcttccttcgacgcaaaacagactttttcattggaggagaagaggggatggcagagaagcttatcacccagactttcagccaccacaatcagctggcacagaagacccggcgggagaagagagcccggcaggaggccgagcggcgggagaaggcagagcgggcggccaggctggccaaggaagccaagtcagagacctcatggccccagatcaaggagc

SEQ ID NO: 14550 - DNA, 376 bp, Gossypium hirsutum
  Clone ID: GOSHI-09MAY01-C63615_1
agctgagctcctcccctgcacggtccggtatcgccatttcgacccacgcctcccgaagattccttatgtgcttatgcaagtcaagctgaaaaggaggaagtggattcccgctcgatttatgttggtaatgtgaggtttatcaaccctttcctctgcctgatatatgtttattcaggcaaattggctcatttaccttacttgtggtccaattactatcttaatgttaaaaatttacttgtaagttagctgaaagtatgattgtgcttttgtttggccagtaagggtatcggaaagcttttcatttccaaatttatgtcagtgcatatcatgttgtgtgaaatgcgtttttatgtgcatgtaatcgcatgaaaaatca

SEQ ID NO: 14551 - DNA, 821 bp, Gossypium hirsutum
  Clone ID: GOSHI-09MAY01-C63195_1
gctttccatcatgatttttatcaagttcttgaaaatttgagccatctttgccatgcatacacatcagttcactgccggccatatgtctctctttcacttgacctttacatttgaccaacaaaggaaggacagcttcataactcacagagcgttttgcgatgcattggctgaagaaagtgcaagactctctgccaaccaacttgccgccgccgcaaatccagctctcaacccatcttcgcttttccctttccaaaacccatgggaccctattcaaacctctaaccctaaccctaatggcccacttcaagtcaagcccgagtctcaccatctcacgccatacttccaagaactgccactcccgcctccaaaggccctgttcacctcacctttccaaagcctccacgtcagcaacaatcctccctccaatgctgctgccacgtcggccactcctcagttgtcagccactgcactccttcaaaaggctaccaccgctggtgccaccgccacgcagataaagaacaacaattattactacagcatggcgactcatttatacccagatttctcgggtttcacggctgcagacctggccacgtggcaaaagagcagcgaccgtttcaccagggactttctaggattgaccagggacaatcaaggtggcaatgggaacgttaaccttagcatgaacccgagagatgtattaagctacaccgggggagtggagttgcagcactttgagagaggccaacccctgttgaggccccaaggttttggattccctgagccctacgccgctacttcggaaacctggggtgattgtt

SEQ ID NO: 14552 - DNA, 408 bp, Gossypium hirsutum
  Clone ID: GOSHI-09MAY01-C63145_1
atcgcgcagttcggcagcagcagccgcggagctgtagccgccgtgggagggagccatgaagcactaccaggtggagattctggatgcaaagacaagggagaagctgtgtttcctggacaaggtggagccccacgccaccattgcggagatcaagaacctcttcaccaagacccatccgcaatggtaccccgcccgccagtccctccgcctggaccccaagggcaagtccctgaaggatgaggatattctacagaagctgcccgtgggcaccacggccacgctctacttccgggacctgggggcccagatcagctgggtgacggtcttcctaacagagtacgcagggccccttttcatctacctgctcttctacttccgagtgcccttcatctatggccacaaattcga

SEQ ID NO: 14553 - DNA, 407 bp, Gossypium hirsutum
  Clone ID: GOSHI-09MAY01-C63315_1
atcatgccctcagtttcacagttaccttaaataaaaatgtgaaaaaaattttttttcaagttggactacatagtcaagtccacaaaccatcaagcactcctccttaattatggcactagataaaataaacttcaaattaggaagtgtttcctaggaggaaaattccattagagagtgccaataggatgaggtttcttcagggtaaactagcaacgcctgagcctgaatcttaatttggggtctcagttaaatctcctgtggagtcaaggattcttctattctagtttgtgtttagtgatagatgtaatcttgacgaatattgcttactgggaagggtgaggaatatcacactcactttttcctttaccagtgtggttttgacttaagaaagccaaactttctaaagt

SEQ ID NO: 14554 - DNA, 947 bp, Gossypium hirsutum
  Clone ID: GOSHI-09MAY01-C18945_1
cccacgcgtccgaattaatctcggccgttcatttttgccacgcgcgtggcgtttaccaccgtgacctgaaggctggagaatctacttctcgatgaaaatggggatttgaaagtctctgatttcgggttgagtgctgtatcggatcagatccggcaagacggtttgtttcacacgttttgtggaaccccggcttttgttgcgccggaagttttggcgaggaaaggatacgatgcggcgaaagtagatatctggtcttgtggagtgattttatttgttctaatggcagggtatttaccatttcaagatcagaacattatggctatgtacaagaagatttacaagggtgagtttcggtgtccgagatggttttcacccgagttaattcggttactcaccaaactcctagacaccaacccggaaacaagaattacgattccagaaatcatggagaaacgctggttcaaaaaggggtttaaacatattaagttctacatcgaagatgataagttatgcagtgtcgaagacgatgataatgatgttgggccatgttcagaccaatcatcaatgtctgagtcagaaacagagttggaaacgaggaaacgagttggcacattgccaaggccagctagtttaaacgcgttcgaccttatatctttctccccagggttcaacctatccgggttgttcgaggaaggagaagaaggttcccggtttgtttcaggggcaccggtttcgacaatcatatcgaaattggaggagatagccaaggttgttagctttactgtgaggaaaaaggattgtagagtgagcttggagggttctagagaaggagctaaaggtccattatcgattgctgctgagatattcgaattaaccccttcattagtcgttgtggaagtgaagaagaaaggaggtgaacgaggagagtatgaggattttttgtaaca

SEQ ID NO: 14555 - DNA, 309 bp, Gossypium hirsutum
  Clone ID: GOSHI-09MAY01-C18875_1
tcgaattaaaagttaaaacccagaaggaaagggagaagacgatcaaatctctggagaaggatttggagattgcgaagatgcagatggttgctgacaaggaagaacttttgagtcttaaggctgaagttgagaagatgaggactgcaaatgaagaaaaactacgtaagatacatgaggagacagataggctcagggtaactgaagaagagcgttccgagtatcttcgcttgcaattggaattgaaggaagaaatagagaaatgcaggcttcgagaagaactactgttgaaagaagctgacgatttgaaac

SEQ ID NO: 14556 - DNA, 411 bp, Gossypium hirsutum
  Clone ID: GOSHI-09MAY01-C18515_1
aaaaaagaatcaccccatgggatcaaagagcaagaatctggttctgggttttgttgtcttagctgtattcttgatttcaggtgtaaaatcttggactggtgagattcacggtagagtagtctgtgatgtttgcgctgattcttccattggtcctgaagatcatattttagaaggtgctgacgttgctgtactttgtattacaaaatctggtgaagtagtaaattaccaggctttcacaaacgccaaggggatatacaccgtggccgaaacaatgcctgagagtgaccgttggaatacatgcttggcacgaccgatcagtagtttccatgatcactgcaaccatcttggggatcgcagcacccgtatcaagttcacctatactcgcccatcagtcatttgcacactgtcaga

SEQ ID NO: 14557 - DNA, 1132 bp, Gossypium hirsutum
  Clone ID: GOSHI-09MAY01-C18495_1
cttttccgtcgcgcgggtctggttacgtaagtggtggaatgtactcacgcaatgggggtaaaaattggataaaggctatgatccttacagcatctctgttcccatttatgtgctttgggattggtttcatcttgaacacaatcgccatattttatggatctctagcagcaattccttttggtacaatggtggttgtttttgtgatttgggctttcatttcattccccttggcccttcttggtacagttgttggaagaaattggagtggtgctccaaataatccatgccgtgtgaagaccattcctcgcccaattccggagaagaaatggtatcttacaccctctgtggtctctttgatgggaggacttctgccatttggcagcatattcattgaaatgtattttgtcttcacatccttctggaattacaaggtttattatgtctatggctttatgctgctggtcttcctgattctcatcattgtaactgtttgtgtgacaattgtggggacatatttcttgctaaatgctgagaattatcactggcagtggacatcgttcttctctgctgcctccacagctgtctatgtgtatttgtactccgtatactattaccacgttaaaaccaagatgtcaggcttctttcaaaccagcttctacttcggatacactttgatgttttgtcttggcttgggaattctctgcggagctgtaggttatcttggttccaatttattcgtacggaggatctatagaaacattaagtgtgactagaacattgctgtcggaaagtagaaccatcagcacttctgcgagaattctagttatcgaggcaataagtgctgagaggaagctcctgatcaggtacaggggaacccaacgaagcctatatattaaatcacggcgtttgacggtaacatgtattcttggtaccatggaacagggaaagccctgagattttggtttgcttctgttataattattattattattttgattcctctcgctgtaacttggagccctgggttggtagatttcagatagtggtgtataattcagaaacttgcttaagtataagacttgtgtcatttttacttggtatagatgtgtccttgacccctctgcttatggat

SEQ ID NO: 14558 - DNA, 418 bp, Gossypium hirsutum
  Clone ID: LIB3120-054-P1-K1-B2
gataaagtcaatgatccttacagcgtgtctgttcccatttatgtgctttggcattggtttcatggtgaatacagtcgctattttctatggatctctagcagctattccttttggaacaatggtggttgttttcgtaatttgggctttcatttcattccccctggcccttcttggtacagttgttggaagaaactggagtggtgctccaaataatccttgccgtgtgaagaccattcctcgcccaattccggagaagaaatggtatttgaccccctctgtggtgtctttgatgggaggacttctgccatttggcagcatattcattgaaatgtattttatcttcacatccttttggaattacaaggtgaagttctttttcctaggttttaatcatttgacgagggacaaaaatacattt

SEQ ID NO: 14559 - DNA, 350 bp, Gossypium hirsutum
  Clone ID: LIB3197-057-Q1-M1-H6
gccccacacatttcctgctaaatgctgagaactaccattggcagtggacattattttcctttgctgcctcaactgcaatctatgtctatttgtactccgtctactactaccatgtgaaaaccaagatgtcaggcttattccagaccagcttctacttcggctatactttgatgttttgtcttgcatcgggaattctctgtggagccgctggatatctcaggtctaatctcgatgtaaggaggatctacagaaacatcacttgctactaaatgcttataatgtttgaaagtataaccatcaccgcttctgtgagcatttttatttgtcgtctgaggcaataaatgatgatg

SEQ ID NO: 14560 - DNA, 1852 bp, Gossypium hirsutum
  Clone ID: GOSHI-09MAY01-C18445_1
gagaaaaaaaaatacggaattcggtctcagaaatgggtgatttagtgcctatttacctcgtcatcctcgcttttttttgtactgctggagccattgcgttggccgttcttcatatctacaggcatcttttgaattacaccgaacctatttttcagagatacatcgtccgcatcatcttcatggttccggtttatgccttgatgtctttcttgtcccttgttctaccacggagtgcaatctatttcaattccatccgggaaggctatgaagcttgggtcatttataattttctttctctctgcttggcatgggttggaggtccaggagcagttgtgctcagcttgagtggtcgagttttaaagccatcttggtatctgatgacatgctgcttgcctcctatgcctttagatgggcgatttatacggagatgcaagcaaggctgtctgcagtttgtcatcctgaagcccattttagtcgctgttacactcgtattatacgccaaaggaaaatataaagatgggaattttagtccaagtcaagcatatctctatcttactatcatctatacaatctcttacaccgtggctctgtatgctttggtgttgttttacatggcatgcagagatctccttcagccattcaatccagttccaaagtttatcatcataaaatctgtggttttcttaacctattggcagggtgttctgttttttcttgccgcaaaatctggatttataaaggatgctgacgaagcagctcaatttcagaacttcattatatgtgttgagatgcttcttgctgctctaggtcatctttatgcatttccatataaggagtatgctggtgcaaatattggtatgtctcgtggttttacacgaagccttgcacatgccttgatgttgaatgacttctatcatgatactgttcaccagtttgcacctacgtatcatgattatgtactgtacaaccataatgatggtgatgagggaacaaggaaataccggtcgaggacttttgtgccaactgggcccgagatggatgctgctagaagaaacaaacacatgattggaaacaagctagaagatattcagctatccagtctcccttcatatggtacaagtgctccccaaaaccctagctctgtaccagattctacaagcggtgatcttacaaaatcatcactgcttgtggaccactcaaattcttattctgcgccatacgatatgtcacttattgacatggatctatccagttacccttcaaaagttcctgcagcgaaagatactgaacctaggtgaccagtgtgtagtagcatccttaagacaggctagaaagaaggctgcatcctcggggacttaggttggagtaggtggagtaagggtggagtcgggagtgtctgacataacattatttctgacattggacagcctcctatgtgaagttgtgtgttggttggtgattggtgtggatttgcttacgacctcagctcccagtattttctcccttttgcctgtgttgatttcagtcactctgtaaattatggtcactttgtagctctcgtagtggagcatctgcctgctggtagttgtctgattttgtcgctatatgctctgtagatgcaaagcactttaggtcatatttgaaggatctgaattggggtcatgaaaatttggtttcaacttttgattcactttcaatcttgattctgtttttgcttgttattcaaatgatgtcaccatttggtatcatagtatctatacttgcctagtatagcatcaagggttcagtagttttattctctccaaattagatgattcatgtattgtggagtcatattattatgataattagg

SEQ ID NO: 14561 - DNA, 592 bp, Gossypium hirsutum
  Clone ID: GOSHI-09MAY01-C18425_1
cccacgcgtccgaaagaaacgggattatgagagattatcacgattgagagaggaggaaaggaaccatttggagaatagaaagaagaaatttttctcagaaatagttaatgcattccgcgacttccaattgcagattcaagctactctaaagcgtcgaaaacaaaggaatgatggtgtccaggcatggcatggaaggcaaaggcaacgtgctacaagagcagagaaattgaggttccaggccctgaaagctgatgatcaagaagcatatatgagattagtaaaggagagcaagaatgaacgattaactatgcttctgtcggaaacaaataagctccttgttaatttaggagctgctgttcagcggcagaaagatgctaaacattcagatggtattgaagatttgaaggatttagattcagattcaccggagctggatgcttcgaaggatggaactcctggagattcacttcctgaagaagatataggtgccactgattctgatcagaatgatgaatccagtgatctacttgaaggtcagcggcagtataacttggctattcactcaattcaagaaaaggtagcagagcaacca

SEQ ID NO: 14562 - DNA, 397 bp, Gossypium hirsutum
  Clone ID: GOSHI-09MAY01-C18705_1
gggccataatgcatgtcataatttatgatgtaaacttaaataacatgagagttacataatgcatgactttattaaatgcagaacacatagtgcatgtcacaattaaaagatgttgattaataatgcaaaacattaattaaagatgcatataataaacaagacataattaaaagctgaaaaattaattaaactaaacaaacaaccacatgcaaaacattgtatggacatgggatgttattttgggtccaataagggttggacatctcatgttcagcccaaacttgctgaattaggcccatcatcgcccctttaaacttctttgatctagcacatgttataaacccgatgagaatttcaattggatcctctcttgaaataggcaacttagaggttagtc

SEQ ID NO: 14563 - DNA, 536 bp, Gossypium hirsutum
  Clone ID: GOSHI-09MAY01-C18725_1
gatcaaaaaaagggttggaacagttgtttgataatgttttcgtgatggttttaatttgatgttgtgtgaattttagaccacaaaggagatcaacgtaatcttgaaccgtagcatcgtatataagtccggggtttaaagctctattggggttaacatgaccagctcccatggctaaaggatcagccggtcggagatttccgcctatatcctttatcggactacctgtgttatcgatttgatcggatgttgtcatcaaagccgatcgaattgccgcagggctccaattaggataaacagcttttaaaagggctgctatacccgaaacatggggacatgccatggatgttcccgacaataagttgaaattggtgaacacaaggtcttgatttacacgagctgctgcaacatttggaggccatgcagcgaggactgagtcaccaggtgccataatatcaggctttaaaaccaggggacaactataggaaggacctcgagacgtatagctagtcacccttggtgatggccggacgcgtaaa

SEQ ID NO: 14564 - DNA, 487 bp, Gossypium hirsutum
  Clone ID: GOSHI-09MAY01-C18675_1
gttctgtttgaaccatttctcttcaagtgtttatgttggaccacctagtggaaacaattggtttgagaagcaaactgatgggacacttgatatagtatgttcatcatggatggattggttccatggtggtttacagttccagattgagcaccatttgtttccaaggttgccaaggtgccatctcaggaaagtttccccattcgttcaggagctgtgcaagaaacacaacttacagtacgataccgcttcgttttggaaggctaatgtaatgacgatcgagacccttcgatcagccgccttgcaggcaaggattctcagcaacccagttccaaagaacttagtgttggaagcagtaaaaactcatggttgagatggaacttcatgtgaatgaatcagcttatgttggtatgacctgtaggtcttaaaaagttgtgtactgattccagtagactgatataaaattttcctccattagtgctcacaggtg

SEQ ID NO: 14565 - DNA, 540 bp, Gossypium hirsutum
  unsure (1)..(540): unsure at all n locations
  Clone ID: LIB3828-024-Q6-N6-C11
gaaaagcacacatcttcaaattccnacattgacttgaaaaaagccagcaaatgttacatccataccaaattctcaaaacattcataaagagaggaccatagcctcaaaacaatattactatccaaacaaaaccactaaagtagagatgcaatattttacatccaactaatgccctcactgcacctgtgagcactaatggaggaaaatttttatatcagtctactggaatcagtacacaacttttaagacctacagtcataacaacataagctgattcattcacatgaagtgccatctcaggaaagtttccccattcgttcaggagctgtgcaagaaacacaacttacagtacgataccgcttcgttttggaaggctaatgtaatgacgatcgagacccttcgatcagccgccttgcaggcaaggattctcagcaacccagttccaaagaacttagtgttggaagcagtaaaaactcatggttgagatggaacttcatgtgaatgaatcagcttatgttgttatgactgtaggtcttaaaa

SEQ ID NO: 14566 - DNA, 443 bp, Gossypium hirsutum
  Clone ID: GOSHI-09MAY01-C18625_1
ggcgaggccacttccagagaaaagaaaagaaaaacccatacgagttttcgtatataaacccgccgagttaacccgcttcattacctgactcagctaccactcagtcccaacgcaaaagaaaagaaaaggaaaaatagaaagaaagatgcaagtcctttcgaacgctcgcaatctcgctagggttttaggatctcgaacaattcttttcaattctaatcaactttacctctcatctttgattcaatctcctagctcttctcttcaatgccaacttcacagtgacgcttcctcagggattaatggaagctgttattatccaatgcctctgcattcaatttatccgatgatttcaaggacatttttttcgacagaagctggaacagttaatagcaatccaactgaggcagttaaggaactctatgatgacatgcttcaatctgtaa

SEQ ID NO: 14567 - DNA, 704 bp, Gossypium hirsutum
  Clone ID: GOSHI-09MAY01-C18145_1
cggacgcgtgggtgacccccctccaaaacgacgccgctctagccaatcggaggccgcatactcgccgtcaatgagctttgatactttcttgattggagctccgatatccgcttttcacaagataatggagcaaaaagcttggctaattttggtgatttttacatgtttaattgcatcttcttgtgggagagaattgaaggtcgaccacaagcataaactccccgtctacaatcatactcttgccaccattttagtagaatacgcttccgcggtgtacatttcggatttgacggaactttttacttggacttgtgaaagatgtaatggtttgaccaagggatttgaagttattgagcttgttgttgatattgagaactgtttacaggcatttgtcggagtggcgaaggatcttaatgccgttgttattgcctttagaggaacgcaggaacacagcatacagaattgggttgaagacttattctggaaacagcttgatttaaattaccctggcatgcctgatgctatggtgcaccatggattttatactgcttaccacaacacaaccatacgccacggaattctgcatgcagttaaagaagcaaaagagttctatggggaccttgacatcatggtgacaggtcattcaatgggaggggctatggcttccttttgtgcacttgatctagtggttaatcatgaagcta

SEQ ID NO: 14568 - DNA, 444 bp, Gossypium hirsutum
  Clone ID: GOSHI-09MAY01-C18105_1
caagaacacactgcaaggctacttttacagtgcatttcaccaaaatgtgaagtcaaggtgttttcagtgtaaaaaactgtgagtatttagcttcaatttattgcttatttatgaatttaaaatgatgaaatcatggtgaaaaatggtatctatggattaaatgatgaaaacccagaatgaacatgtaaatcaccaggtgaataattgtgatgatttgttatcttttgcagcttgaaatatattttgtcctgtgtttttgttctttgtctctgttctttagtggatgaatggactccttttagatgtgatgctgagaaactgttggattgattgattgatgaaaaaaggtataccaaaaaagaggcagacatgagattcccagttccacttttgaacttggtccatttttttagcttttgctttgagttggtggatggtggatcc

SEQ ID NO: 14569 - DNA, 467 bp, Gossypium hirsutum
  Clone ID: GOSHI-09MAY01-C18005_1
gaccaacaccatcatcaacgacaaggacgaccaagaaactgttcccaagatcataactttcttgtcttctttgctgcaaagagtggcagagtcgaatgatcattgccggttgtttcagtcgcagaagatctcagtttttcatggtcttaccagacctactatttccatcaaaagctatctcgagaggatctttaagtatgcaaattgcagcccatcatgtttcgtggttgcctatgtttatctcgatcgcttcgtgcagatgcaaccgtctttgcctatcaattcttacaatgtgcataggttgctaataaccagtgttttggtttctgccaaattcatggatgacatgtattacaacaatgcctactatgccaaagtgggaggaatcagcacggtagagatgaaccttcttgaagtggattttttatttggcttggggttccaattaaatgtggcacctacaactt

SEQ ID NO: 14570 - DNA, 671 bp, Gossypium hirsutum
  Clone ID: GOSHI-09MAY01-C18355_1
aagtgatccacgatgctattaccaagctagaggaggctttgtcgattaaccctaccaagcatgatgcttcatggcgtacgggaaatgctcaaacttattttgcctttttgactagcacggaagatgaggccaggccttacttcgaaaaggcagctcaatatttccagcaagcagctgatgaggatcccagcaatgaaatttacctgaaatctttggaaatatctgctaaggctccagagctacaccacgaaatcattaagcaaggtttaggtcaacagatgcttggtgctggaccctctagttctacttctacctccagctcagcaaagactgctacaaaaaataagaaaagtagtgatctcaaatacgacttattcggatgggtaatccttgctgttggcattgttgcatgggttggatttgcaaaatctcagatgccaccttcacagctgccaccaccaccatgataagcacaggatgcaagcaacgccctgacatctaaatgctgtttgcattgattcaaaaagccttaatttatgttagtttagtttttttgcccttattcgtgctcctcagccaatgcttgaaaactagtcatttacagtacaattgctttattcggagaataggtgagtgattgttaacatgaaaaatccatctgttgattattt

SEQ ID NO: 14571 - DNA, 1000 bp, Gossypium hirsutum
  Clone ID: GOSHI-09MAY01-C18315_1
catcaggggactcaatgtgtatggaggtacaaaagaatcagaagcctcaaatttgtgaaacctgcgaacagtgtgactacgagattgaatatgctgatcgtagctcctccctgggggttcttgcaaaagataagcttcacttggtgactgcaaatggatcaattaccaacttagatgttgttttcgggtgcgcatatgatcaacaaggcatacttttgaacacactatcaaagacagatggaattcttggactaagcaaggctaaagttagcttgccttctcaattggcaagcaaagggattattaacaatgtggttggtcattgccttgcaacagatgtcgcttccggcggatatatgttcttaggtgatgattttgtaccaaaccggggcatgtcatgggttcctatgcttggaagcccttcaatagaattttaccacacacaacttgtgaaaatcaattacggaagtagctccctcagtttaggtgcaaaagacagtgacaaggcaggagttgtgttcgacagtggcagttcttatacgtacttcacaaaacaagcatatgccgaattggtctcttctcttagtgaggtttccgagctaggatttatccaagatgcatcagatccaacacttccaatctgttggcgggctccatttcctatcagaactattatggatgttaaaaagtacttcaagactttaacccttcagtttgggagcaaatggtggattatatccaagaagtttcatattcctccagaagggtacttgatcattagtaagaagggtaatgtatgcttgggcatcctggatggaagcaatgtacatgatggatccacattgatacttggagatatatcactgagggggcaattggtggtctatgataatgagaagcagaagataggctggggtccatcaggttgtgggaagcctagtagattcaagagccttcccttctttgaaggatagctagtgattgtcagctatcattacta

SEQ ID NO: 14572 - DNA, 1423 bp, Gossypium hirsutum
  Clone ID: GOSHI-09MAY01-C18295_1
catgttttactctctcgccccgcgcccgggaggctccgcgcggggccgggggggcccttggtttcattctcttctctcttctattttcgatctgcaggtcctcttccttaaaccatctcctgatctccaacgccgagcgtagaattgacttgagctcccacattgtcaaagttgacgtggcgtgggaagggcgggggggcgggtagtacgcctacttcagaggtgtttctttctttcccacccactcaagttgatcatctcgcagcggttgaagcattagtaactaaaggaaagaggaagaagactacgttagtccgtcttgatgtaaaaccaactgaactgcctgatgcacctaatgacgctaaatattttgcgatttatttggaaaatccattaaagtctggtgaaagcacaaccctagaagtattgtacctgttgacacactcccaagaaccctttccggctgagatagcccaatcagaatctcaattagtatattatcgtgatagtgcgttgatattgtcaccatatcatattaagcaacaagcgacttttattaagacaccaagtactaaagtggaatcattcacaagggtggaacccagtaatcgtgcaggcactgaaataaagtatgggccatatgaggatcatcctccatactctttttctccaattcttatacattttgagaacaatagcccatttgctgttgttgaggagcttgttcgtgaagttgagatatctcattggggcaaccttcaggtcacagagcagtacacattggttcatgccggtgcccggcacaaaggtgtattttcaagggttgattaccaatccaggccaactttgaatggtgcatcctcattgaggtaccttctggcaagactacctcctagggttcattctgtctactaccgggatgaaataggaaacatctcgtcctcacacctgcgtactgattcccgtaagtctgaactggaaattgaaccacggtatcctttatttggaggttggaaagctacttttgtcattggttatgggctaccattacaagacttccttttcgagacatctgatgacaggcgttatctcaactttacttttggatgcccccttcttgagacagtggttgacaagttaaccgtcaaagttgtgttacctgagggttcaaaagacccttctgctgtggttccctttcctgtggagcagcatctggagaccaaatattcttaccttgatgttgggggaaggactggggtggtcatggaaaagaaaaatcttgttcctgcgcacaactctcatttccagggttactacacctctcaagccaatcttcatgcttgccgagcccttgatgttggcgtccgcgttcttcttgtttttcgtggcttgtgtggcttacctgcacatcgatctttccata

SEQ ID NO: 14573 - DNA, 430 bp, Gossypium hirsutum
  unsure (1)..(430): unsure at all n locations
  Clone ID: LIB3197-058-Q1-M1-B2
gtctttgtactgaagtcctccttcgatcttagcctaaagccgaggacagtgttacaagtctctcgtcaacagcaatggaggcttggatcagagctagagtaaccttagctctcactttattcgctcttttattcttcgtctccagatcttctcctccacgtcaatttgtaatctccaacgccgagcgtagaattgacttgagctcccacattattaatgttcacttgactttgaaggtcgagaatactggtactagacctgcttcagaagttgttcttgctttgacccccactgaagttgaccatctagcaatggttgatgcattagcaattaaaggaaagcggaagaagactacttcagttcatcttgagtaaaaccaactgaactgcctgatgcaccacctattgacgcntaaatatttactatttat

SEQ ID NO: 14574 - DNA, 419 bp, Gossypium hirsutum
  Clone ID: LIB3197-055-Q1-M1-C6
ccagtgttttactctctcgtcaacttcaatggaggctccgatcagagccagagaagccctaagtttcattctcttctctcttctattttcgatctgcagatcctcttccttaaaccatctcctgatctccaacgccgagcgtagaattgacttgagctcccacattgtcaaagtttacttgactttgaaggtcgagaatgctggtagtacgcctacttcagaggtgtttctttctttcccacccactcaagttgatcatctcgcaacggttgaagcattagtaactaaaggaaagaggaagaagactacgttagtccgtcttgatgtaaaaccaactgaactgcctgatgcacctaatgacgctaaatattttgcgatttatttggaaaatccattaaagtctggtgaaagcacaaccc

SEQ ID NO: 14575 - DNA, 1213 bp, Gossypium hirsutum
  Clone ID: GOSHI-09MAY01-C18245_1
cttttataagcaatcctttcctttacactctaccctcactatcatccctcctttcttatttttccctttttggttcctctctttctgtccttactttgtgatggaattaggaagtgctcttcagttccttgataacaaatccattctagtcactggtggaactgggtttttggcaaagatatttgtggagaaaatattaagagttcaacccaatgtcaagaaattatatcttctcgtaagagcagccgaccataaatccgccatccatcgtttgcaccatgagatcgtagggaaggatctgttcagaaatctgaaaaagaaatgtgggaccaatttcagctcttttatatcacaaaaaattacagttataccaggtgacttaacccatcaagatttgggtctccatgattctgatttgcttcaactcctttgcaaggaactcgatgttcttcttaaccttgctgcaacaaccaactttgatgaaagatatgatgtggcactaggcctcaacacactgggagctaaatatgttgtggactttgccaagaaatgtgccaaactacaagtgttggttcacgtatccacagcatatgtgtcaggggaaaggtctgggcttatagttgaaaattcatacagaatgggggaaacacttaatggtgtgtcaggcttaaatgttaacattgagaagcaagtggttgaggatcaacttcatcttctccgtctccaaggtgcttctgataaggatatcaccgttgccatgaaagatctgggcattcaaagggcaaggcggtatggatggccaaacacgtatgtgtttaccaaggcaatgggagaaatgatggtgggggaattaaaagacattataccagcagtcatcattcgccctaccatcgtaactagcacttacaaagaacccttccctggttgggtcgaaggaatcagaaccattgatagcctaccagttggttatgcaaaaggcaaattaacattcttcctggagatctggaggcaatagttgatgtgataccagcagacatggtggtgaacgccataattgtaccaatgatagctgaggcaagacatcaacaaccccaaaccatttaccaagtaggttcctcaatcagaaaccccctaaggtattctaatcttcaagactatggcttccgctacttcaccaagaatccatggatcaacaaagatggaaaacctgtga

SEQ ID NO: 14576 - DNA, 946 bp, Gossypium hirsutum
  Clone ID: GOSHI-09MAY01-C18275_1
gttgattgcaacaagtgttgcagctaggggtttagatgtaaaggagcttgaattagtgattaattttgatgtcccaaatcattatgaagattatgttcaccgtgttggtaggactggtagagccgggcggaaaggctgtgctatcacatttatctctgaggatgatgcaagatatgcaccggatctcgtaaaagctttagaactctctgagcaagttgttcctgatgacctgaaagctctcgcagatggctttatggcaaaagtcaatcagggacttgagcaggctcatggaacaggttatggtggaagtggttttaaattcaatgaagaggaggatgaaaagagaaaagcagcaaagaaagcacaagcaaaagaatatgggtttgaggaagacaagtcagactctgaagatgaagatgaaggggtgcggaaggcaggtggtgacatctcacagcagacagcacttgctcagatagctgccatggctgctgcctccaaagctagtactgctttgatgcagaatcctctatcatctggccaactgcttcccaatgctgtattgcctatttctcttcctggtgtacttggtgtctcaatgcctgggactgcagcagttgttcctggtagtgggctgtctggtcttccaaatgaagaggctgctcgaaaagctgcactgcaagctgctctcaatttacagcataacctagcaaagattcaagctgatgttatgcctgaacattatgaagctgagttggagatttatgaattcccacaaaatgctcgatggaagggtacccacaaggaaactttgggcccaatatcggaatggactggagctgcctttactacgaggggccagtttttcccacctggtcggatcccaggaccaggagaacgcaagctttacttgttcattgaaggacctactgagttatctgttaagaga

SEQ ID NO: 14577 - DNA, 726 bp, Gossypium hirsutum
  Clone ID: GOSHI-09MAY01-C18265_1
ctcaaaggtagccgtcaaaaacagggattaccgactaaggagctgacagtgacatgggcccctgatgtttatgatcctctgccaacatccgttttgcacacagttagaggcaaaaaagcagcagaagttgaagaagaacagtgataagaagaaaaaaggaaagaaatggcacaagggaaacaactccttgcgtggtggtggtaaagacaacaaacagtttcacagaggtggtgggagtttggataagtggtataactacaaaccacttgagcttcatggtacggtagtcaacgatgcctcaggcaaccttgatggttttaaggttggcagtacagacccctactgtgggactagttatctgaaaaattcactcactagaatgcactactctgtggcggaggctttatgactaaggctcttccttttaccggttcctgtagataaataagcccttttttctgtcctcccgtatgaatattttgaacatttgcctttaggttgcaatttgctatgctatgatctttttgataatgtgcgggatcggaaggttttgttcagggcgctgtttgtgctgtgtaggaggcagtacttgaacagcttaactgccttcttgctttgtgaaataggaatttttggtttgatcaaatagcagacagtgagattgtattggaatcttatgctcttattttctattattagcttgtgaactaaacatagcatttcatc

SEQ ID NO: 14578 - DNA, 974 bp, Gossypium hirsutum
  Clone ID: GOSHI-09MAY01-C19925_1
caagtttcttatcttcctccatggaaggaattcctaaacatattattacaaaattcaacttcttcacagatagcccgagatcacctcttcaacctcccacatatgggaatttgattactcttcttagcattgatggagggggtatcagagggcttattcctggaactctacttgcttttttagagtctcagcttcagaagctggacggtgagcaagcgagattggctgattattttgatattatttctgggacgagcactggtggcctcgtcactgccatgctaactaccccagatcccaaaaaagagaatcgccctctttttgctgccaaagatatcaatgagttctaccttgaacactgccctaaaatctttccccaagatagttctccttttgcaccagctgcaaatgtggtcaaatcactaatgggaccaaaatatgacggtaaatatcttcatgatattgtgagggaaaagctgggagaaactaaattgcaccagaccctgactaacgttgtgatcccaacttttgacatcaagcaactccagccaagaatattctccacctatgaggtaaaaagccatccttgcaccgatgctttactgtcggatatttgcattgcaacttcagcagctcctacttaccttcctgcccatcattttcaaacccaagattccactggcaaaacaaaagaattcaaccttatcgatggaggggttgctgctaataacccgactttagtggctatgaacgaagtgactaaagaaatacttcgagggaatcccgaattttttccaataaagcccactgactacgctcggttcctggttgtatctttggggactggttcacccaaatcagaagggaagtaccatgctaatatgacagctaaatggggagttttgggatggttgaccagtgagcactctactcctttggtggatattttcatgcaagcaagcagtgacatggtc

SEQ ID NO: 14579 - DNA, 422 bp, Gossypium hirsutum
  Clone ID: LIB3585-050-P1-K1-G5
cttgaacactgccctaaaatctttccccaagatagttctccttttgcaccagctgcaaatgtggtcaaatcactagtggggccaaaatatgacggtaaatatcttcatgatattgtgagggaaaagctgggagaaactaaattgcaccagaccctgactaacgttgtgatcccaacttttgacatcaagcaactccagccaagaatattctccacctatgaggttcactataatatttactacttgtaatggaatagaaacaaatgcaagaaaaagtttcatttttgtataatacattttttagtgttgtctggaatttattattaaatttccatcgtgtaagtaaaaaagccatcctttcacccatgctttactgtcggatatttgcattgcaactttaagagcttctacttacctttctg

SEQ ID NO: 14580 - DNA, 1532 bp, Gossypium hirsutum
  Clone ID: GOSHI-09MAY01-C19825_1
gatcatgctgatcgtcttttcaattgcataagagacacttggttgaggtctgctgggaagggtaatacatcagatgtgaaagaactgattccagaattcttttacatgcctgaatttttggaaaatcgcttcatccttgacttgggggagaagcagtcaggggaaaaggttggagatgtgggcctgcctccttgggccaaaggcagtgctagggagtccatcaggaagcatagagaggccctagaatctgattttgtctcagaaaatctgcaccattggatagacctcatttttggatataaacaaaggggaaaggcggctgaagaagctgttaatgttttctaccattacacatatgaaggaagtgtagacatagactcggttacagatccttcaatgaaagccttcattctagctcagatcaatcattttggacagacacctaagcaactattcctcaaaccccatgtgaaaaggcggtctgacagaaagcttccttctcatccgctgaagcattcagcttttcttgttccacatgaaatacggaaaagctcttcttccatttctcaaattgtcactttcaatgagaaaattcttgttgctggggcaaacacattgcttaaacctagaacatatgccaaatattttgcatggggctttcccgatcgcagccggagatttatgggctatgaccaagatcgcctcctttcaacacatgagaatcttcatggtggtaaccaaattcagtgtgctggtgttagtcatgatggtcatattttggtgactggggccgatgatggtttagtttctgtttggagaatcagtgaggacggcccccgtgcctctagacgactgctgttggaaaaagtgctttgtggtcatacagctaaaatcacatgtcttcgtgtcagtcagccttacatgctggttgtgagtggatcagatgactgcactgttatcatatgggacctaagctcattagtatttgttaggcagcttcctgagttcccagcaccagtttctgcagtttacgtgaatgatttatctggggaaattgtgacagctgctggaattctgcttgctgtttggagcatcaatggggactgtctagcagtaattaatacatcccagctgccatctgattctatactttctgttacaagctgtaccttctctgattggcaggacacaaactggtatgtaacgggtcaccagagtggggctattaaggtctggcatatggttcactgcactgaccaagataagaccaacagcaagtcaaatatgattggaacaggaggattagatttgggcgagtctccagaatacagattggtgctccagaaggtcctgaagttccataaacatccagttactgctcttcacttaacgagtggcctgaagcagttgctgagtggtgattctagtgggcatctgctgtcttggacattaccagatgagagcttgaaatcctctttcaatcaagggtgatgattgtaaagtagcacttgtgtgattttcagctctaggat

SEQ ID NO: 14581 - DNA, 656 bp, Gossypium hirsutum
  Clone ID: GOSHI-09MAY01-C19595_1
accttgcaatacacgcaaacagcaagttttaggagcataaccatagttggggtgtccttgtttcttggtttatccattcctacttatttccaacagtaccaacccgagtcaattttgatgctgccaagttattttgttccgtatgcagctgcatcagatggaccagtccacaccattaatgaacaacttgatttttctataaatgcactcttgtctatgagcatggtggttacactcttggtagcatttgtactcgacaacacagttccaggcagccgggacgaacgaggggtgtacatttggtcatgtgctgaagatgtcgcaactgatccatccttgcaattggattactctctgccaggaaaattttcctcactttgttgtcgttctagctgtttgcgggcataatactcagcagaaggtagcttgttcttcaacttgaagtttctttccgaaaaggtaagttttgttacggaagggcacttcctcaatagtacgcataaccaagctcgaagatggtttggctaagtgagagagatacaagtacatgataattcttttgcaacaatagaattagtaatggcatctttgtaactgattgtttctacttgaaaagaaaggtaatattcttttaatgaaatgttttcctgtaaaaa

SEQ ID NO: 14582 - DNA, 1031 bp, Gossypium hirsutum
  Clone ID: GOSHI-09MAY01-C19575_1
cccacgcgtccgcccacgcgtccggcttagggtgaggccggggacgaggcaggggtcgtggaagaggagctcgaaatgtggaaagagatgctcatcgtgaaatagaaccagaaccctgctcaactcttcagcaaaacaacaaaagtcattcaacctcaggaatggtgatagatgatggttccgagttgaaggaaccggtgaaagagaacacagctgctgaagatgccaatcaagctgttcggaattttgatctgaatgccgaggtagatgagaatgtggatacaaaagcctcagcaactgctgctaaagttgctgcacctgcatcctcagtcggcgttgctagtgccgctgctgcaccagcagcgccagctgcagcagctcagccttctacagcagagcctacaacagaggccaaacatgaagaatacccaggctggtctctttcggatatggacaagatagctatcgatcctcttcaacttgctcggcttggtggaaggttagacgaggatgaagaagattatgatgaggaagggtgagtagctcgaaactggactcctagaagaagtagcggttgagatcagattagcaacccagtaggaaaacccgaaaatagtcgggatgacctcattggagtatggaagtatatcccatgtaggtctctcaagggctcaaatggatttctcttctctatctctttatttatctgtcacggttcgctttctgttatagcatttgctaacataactttaaaatggtagattctcacagccgaaagacactagtccacaaacctacttgttatgccacgagaaatttgcggttccgtagtgtaactatgatcttattgctctttccatttcgatttagctcattaactttagtttcatgattgtcaaatgcattagtcctgtccatttcttcaatttcattaaccaagttaagcaatgggaagaacatgtttgcctgcccatgttgcaaaaaggagcgattcgggatccctccccattgccggaactaaaactgggtag

SEQ ID NO: 14583 - DNA, 556 bp, Gossypium hirsutum
  Clone ID: GOSHI-09MAY01-C19475_1
aattgcacgagcttaaattcgtcaacttttctgtagattttaagcaaagacccatttttcgtcttcatctctcggttttcgcccttcttgtttcagtattgggactaatggcggttggtcgtagggacaaaacggcatcgtttcgtggatcccgaatcgtcgtagccattgtgatcggcgttctcctcggctgtgtcatcgctttccttttcccttacggcctcttcaatcccgccgcctcagttcaaaatcgtcgaatcgggaaaacgaatttccagattggttcttcgtcatgtgaatcctcggagcggagtaagatgctgaagtctgaaatcgtatccctatcagagaagaactccgaattaaagatgcaagtcagggatttgacggaaaggctgcaactggccgaacaaggaaaagatcaagctcagaagcagtttttggtgttgggtgagcagcataaagctggacccttcggtactgtcaaagctttacgaactaacccaactgttgttcccgacgattccgtgaacccaaggttggctaagatcttgga

SEQ ID NO: 14584 - DNA, 640 bp, Gossypium hirsutum
  Clone ID: GOSHI-09MAY01-C19465_1
gttttaatgaggaaaaagagtgcgacgcttaaggttgggaagaaagatatagctgatctgcttgctaatggccttgatatcaatgcttatggcagagttgaaggatatatagctgaattagtgctttcgtcttgctatgattttatagacaagtgttgcgatttcgtgacgaatcatgtttcagtcatgcaaaaactgagtgattgcccagaagattgcagggaagctgtctcatctctaatgtttgcagctgctagattttctgatttgccagagttgcgtgagcttaggcatatatttcatgaaagatatgaaaattcactggacgtattcgccaataaacagcttgttgagaattcagcttcaaatccttccacaatggagaggaaagttatggtaatgcatgatatagcatcagagttttccataaaatgggattcaaaagctttcgagcgaagaatgtctgaacctgttgtgatcccacagccacaggaccgaactaaaaaatacgggtctttccatgtcaatggtgaagataataaatcaaattatggaaaacaggaccgacttaaaaaatacgggtctttccatgtcaatggtgatgataataaatcaaatgatggacaacaggaccgactta

SEQ ID NO: 14585 - DNA, 629 bp, Gossypium hirsutum
  Clone ID: GOSHI-09MAY01-C19725_2
gatttatgggtcatgatatgtgatcccagttgactctccagtaacacttcccataatttatgaaagaggtctgtttggcatatatcatgattggtgtgaatcatttagcacctatccaagatcttacgatcttctccatgccgaccatatattctccagggttataaaagaggtgcaatttcgtggctgtggttgccgaggtggatcgtattttaagaccgggaggaaagcttattgctcgggatgatgtcgaaaccattaccaagctggagaatatggtacggtccatgcattgggaagtccggttgagttactctaaggacaaggaaggcttgctgtgtgtccagaaatccatgtggcgacctacagaggtggagacgctcacatatgccattgcttaggcatgctatctcctatcatcacattctcatttttgccacattttgcaatttttggggattagttctctatgttatagcctttgtaggcttgtttcatgtaggcctttagtggattatgttttattttattttattcctttaaactctgagcttggcgtttccaagttttcctgtaatatcatactggagttcttcaatggaaaataatgttcaagcattatggctgga

SEQ ID NO: 14586 - DNA, 2119 bp, Gossypium hirsutum
  Clone ID: GOSHI-09MAY01-C19725_1
ctcctctgaaactaatggagacaggcggataatcagatagaagagaaggttgatcaaaatgataataaggagttggaaaaaagctctgatgaaccaaaagatgatggtcagtctgaaaaaccagagctcaaatgaagttttcccatctggtgctcaatctgaacttttgaatgaaaccgtgacccaaactggatcgttctctactcaggcgacagaatcaaaggttgaaaaggaaactcagttatcatccaagaagcgccctcgcgtccgcggccgcgccgctgcggggcctgattatatcccatgccttgacaatttggaagcaatcaggcatcttccttctactaaacattatgaacatcgagagaggcactgtccagaagaaccaccaacctgccttgttcctcttcctgaaggatataagcgtccaatcgagtggccaaaaagcagggaaaagatttggtactacaatgttccccataccaaattggcacaaattaaggggcatcagaattgggtgaaagttactggagaatacctcacatttcctggtggtggaacccagtttaagcacggtgcgcttcattatatcgacttcatagaagagtctgtgcctgatgtagcttggggaaaacggtctcgcgtagtattggatgttggatgtggggttgccagctttggaggttttctttttgacagaagtgttgttgccatgtcctttgcaccaaaagatgaacatgaagctcaagtacaatttgcacttgaaaggggaattcctgctgtgtctgctgtgatgggtactaagagacttccctaccctggcagagtatttgatattgttcattgtgcacgatgtagagttccatggcacatagaaggtggtaaactcctcttggagctgaatcgtgtcctgcgacctggtggtctctttgcgtggtctgctactccaatttatcaggacaagactgaaaatgttgaaatctgggaagctatggttgaactaacaaaatcaatgtgctgggagcttgtaaacattactattaaggatgcagtaaatggggtggctgtacacatttaggaagcctacttctaacgactgctacgagcaacggtcaaaacaagagcctccagtctgtcctgagtctgatgatccaaatgcggcatggaatgtgcccctgcaaacttgcatgcacaaagtgccagtagatgcttcagaacgtgggtctcagtggcctgatcgatggccagaaaggttggaaaaagcaccttattggttgagttcccaagttggagtttatggcaaagcagcactagaggattttgctgcagacaatgagcactggaaacgggtggtaactaagtcatacctaaatgggatgggaataagctggtcatctgtcagaaatgtcatggacatgaatgctgtttatggaggatttgctgctgcactaaaagatttgagtttatgggtcatgaatgtggtcccaattgactctccagatacgcttcccataatatatgaaagaggtctatttggcatgtatcatgattggtgtgaatcgtttagcacctatccaaggtcttacgatcttctccatgccgaccatctattctcaaagcttaacaagaggtgtaatttggtggccattgttgcggaggttgacagaatactaagaccagaagggaaacttattgttcgagacaacgttgagaccatgaacgagctagagaatatgttaaagtctatgcagtgggaagtgcgtatgacatactcgaaggacaaggaaggcctgctctgcgtccagaaatccatgtggcgacctaaggaggtagagacgatcaaatatgccattgcttaggcaaatgctatctgttaattgatgatgtttgtcggcacgattagttattctttttgttaaggttttgctaattgaaattcatggtgcttgtatcatgttaaatagggcttttctttagtattgcatacgttgcttcttttgttttttattcctttatcttataagtttggtgtccaaatcttcatgtaatgtactgtagacttttaatttaattccttttggactcatttaaaactcgacgccgccgcctgttcaacttg

SEQ ID NO: 14587 - DNA, 490 bp, Gossypium hirsutum
  Clone ID: GOSHI-09MAY01-C19675_2
gtaaagaaacaacttgagacttctaggtccaagggcatcaccgttagggccttggttgtaataaatgctggcaacccaacaggacaggttcttgctgaggaaaaccagaaggcaattgtggagttctgcaaacgggaaggtcttgttctgctggcagatgaggtttatcaggaaaatgtctatgtacctgaaaagaaattccattcttttaagaaggtttcccggtccatgggttatggtgagaaggatatagccttagtatcttttcagtcagtctccaaaggttactacggagagtgtggaaaaaggggaggttatatggaggtaactgggtttggagctgatgtcagggagcaaatatacaaagtggcatctgtgaatctgtgttccaacatctcgggtcaaattcttgccagtcttgtcatgagtccaccaaaggttggagatgaatcctatgaatcatacagtgctgaaagagatggaatcctct

SEQ ID NO: 14588 - DNA, 1013 bp, Gossypium hirsutum
  Clone ID: GOSHI-09MAY01-C19675_1
ggttctgcaaacaaaaagtcttgttctgctggcagagaggtttatcagaaaagtctatgtacctgaaaagaaattccattcttttaagaaggtttcccggtccatgggttatggtgagaaggatatagccttagtatcttttcagtcagtctccaaaggtaaaattctgttttgtcttacttctattatcgcagttacagaaggtaagagagcatatgcaaaatttggacttttgagataatgaatatacaattttttactgccttcaggttactacggagagtgtgcccacgcggccggttatatggaggtaactgggtttggagctgatgtcagggagcaaatatacaaagtggcatctgtgaatctgtgttccaacatctcgggtcaaattcttgccagtcttgtcatgagtccaccaaaggttggagatgaatcctatgaatcatacagtgctgaaagagatggaatcctctcatctttagccaggcgtgcaaagacactggaagatgcattcaacaaattggaaggtgtaacatgcaacaaggcagaaggtgcaatgtatctgttccccagaattgaccttcctgaaaaggcaatcaaagctgctgaagctgcaaaaaaagcacctgatgcatactactgtcaacgcctccttgctgctactggaattgttttggttcctggttctggctttgggcaggttcctggcacttggcattttaggtgcacaatactcccacaagaagaaaagattccagcaatcgtcacccgtctaacagatttccataaaagtttcatggatgaattcagaggctgagtctaagggaaagaattcagctgaatcagacgtgtctcttttccttttcatacagaataaatcgaccctgtgttaatgcttgtacacccgtcttcaactgtagctggaactgttgttgctatctaggggtcaatatgtcaaaatatgctatttgttgctgctcatgctgacagtagaagttctaatttaatgc

SEQ ID NO: 14589 - DNA, 586 bp, Gossypium hirsutum
  Clone ID: GOSHI-09MAY01-C19615_1
cagcagtcctacaaagtaagtgaatcttttcccttgagggggataaacaagaccgggaaagaggggtttcatgtaacatcaatgacaactgctgcgagtcgctggggtgtagtgatgtcgaggaacgccggattctctgaccaggttgtggagcttgattttttgtatccaagcgaaggaatacatcggcgatgggaaagtggttaccggataacatctatggctgcgaccgtagatcaagctgccttcatactgagcattccaaaacgaaaaacgatggatgaaactcaggaaactcttcgcacatctgcctttccaagcacccatgtaaaggaaaaatgggcaaaaaatctctacattgcatcgatttgttacgggcggacggtctgctaactccggactgtaaattacgagagtccaaaaatgttaaaaatctgaagctgttgaggtacatttggtgttgagacaatgggggctggggggtaattcagctatagaaacctctcatatgtaaaaagggagaaagaaaagagagaacaaatacaatttgagaacctcagaaagtaatggcagctgtttgttgaat

SEQ ID NO: 14590 - DNA, 1152 bp, Gossypium hirsutum
  Clone ID: GOSHI-09MAY01-C19605_2
cgcagctttgacaaaccaaaggaaccaacaaaatgttcataatatttcaaagggaacttagtaaaactccaccgagaaggaatcaataatgccaccaattccgtgaccgtggtagctgttctatttgcaactgttgcttttgcggctatatttaccgtgcctggaggagatcaagatagtggagttgccgtggtggtaaaatcaagttcttttaaaatcttcttcatcttcaatgctattgctctcttcacctctttggctgttgtcgttgttcaaattacgttggtccggggtgaaaccaaagctgagaagcaggtagtggaagtgattaacaagttgatgtggttggcttctgtgtgtacttcagttgcctttatggcctcctcgtatatagtggttggccggaaacataagtgggctgctattttggttaccgttgtagggggtctgattatggctggggttcttggcaccatgacttattatgtggtgagatcgaagaggactagaaggaagaggggaaagaattcaaggaggagcggatccaactcgttgcttcattccgacttcactaactcggaagttgaagtcgataggatttatgccctctaatctctgaatcgctagcttctgttaatggaaaaatgggaagtatctgatagaaatgagacccaatatggcaaatgcggaagataagattaaataaggataataactttcagcatctgcctgtgagttagtatatgcacccggcacaccctgcattcatggccatggatcacgaggtatgagcaattcggacaactaatcctggacttcttagttaagaagtaaggaagaaaatatggttttttgttgtatgtcctgtcaagtttgttgaaaccgtatgttagttctgtggtggctaatggaatgagtttccgtccatcgttctcacttgcatacgatatcagagcttgaatatgactcgacgtttcttggagtcaagtctggtaaacactgaatcaattgtcagattcaagccattcatatgtttccaactcttcgaaagtgtcaatatctattaaaaccctggccttgaaatgtatgaatgattaacttttgctgtgattaaactgtatttttattgcaatacatgctggtttttggttt

SEQ ID NO: 14591 - DNA, 715 bp, Gossypium hirsutum
  unsure (1)..(715): unsure at all n locations
  Clone ID: AI055008.1
acgagcgacaagttcgggaaaaactgcactgcatgtcgccactaggaaaaagagagcagagatcgtacatgagttgttgtcccttcctgatacaaatgtcaatgcactcaccagagaccataaaacagcccttgacttagctgaagggcttcccctctctgcagagtccacagaaataaagagctgcctttctcgctgcggtgctctcagagctaatgaactgaatcaaccgagagacgagttgaggcagactgtgacacaaattaagaaagatgtccatacgcagcttgagcaaaccaaaagaaccaacaaaaatgttcataatatttcaaaggaacttagaaaactccaccgagaaggaatcaataatgccaccatntcgtgactggggnncgctgttctattgcaactgttgcttttgcactattttaccgtgctggaagagatcagatagtgnagtgccggggtggtaaaatcaaggtcttttaaaatcttcttatcttcatgctatgctctcttacctcttggctgggtgnntgtcaattacgtggtcgaggtgagacaagccgaaagcggttatgaaggatacaagtgatgtgtggctttgtgggactattgcttatggctctcgntattatgtgccggaactaatgggctgctttgggtacgttaagggctgttatgtggtttgacctgactatttggggaacaagag

SEQ ID NO: 14592 - DNA, 391 bp, Gossypium hirsutum
  Clone ID: GOSHI-09MAY01-C19095_3
ggccagaaaggcttgacatccatattattattatactttcctaggactacaagataattcacataaaccaagaaataaaatttggatggaagaaaaggcaaaaactgctactgcttagtgtatgcttgtctttccatattgcttatgcttcgggttttcaattttttcgggtggaacggaccaataaggcctttgatgttgctgccattcaaggattcatgaacttataaagggggggggtgaaaaaaagagagagattcggaagggaatttatctttgtttgatataccctgttggaagggttaaaacatattcttttttgttgatgggatacccttggattttgaaccatttggaatttgaattcttgggggttttttttttcaaaaag

SEQ ID NO: 14593 - DNA, 653 bp, Gossypium hirsutum
  Clone ID: GOSHI-09MAY01-C19095_2
tcgtttcacgcgtccgcccacgcgtccgcccacgcgtgcgagatattcctgagacaacggtccatcctgtgccgccagtgcctagcaagacggtaagattttcgactgtaaatatcgaagagatgggtgcaacgaatgagaaatatcagtcgcctaggattcctgaaatagagatctcaactccacctccaaataatggaatggacaaggaaccaatgcatagcaggaagaaatggaacaacgaggagagccctcctaaagcagccaaagggtttagaaagcttcttttctttggaagaaaaagcataaaactatgcttctgcttagtgtatgcttgtctttccatattgcttatgtttcgggttttcagttttttcgggtggaacgtaccaataaggcctttgatgttgctgccattcaaggattcatgaacttattaagaaaaatggggaaaataagagagagattcataatgtaaatttatctttgtttgatatatcatgctggaaggggttaaacacattcttttttggttgactgtatacctttgtattttgaatcatttgtaatttgaattatttgtctatctctctctctctctctctctctctctctctctctctctctctctctctctctctctactctctctc

SEQ ID NO: 14594 - DNA, 1714 bp, Gossypium hirsutum
  Clone ID: GOSHI-09MAY01-C19095_1
ctttcatgattcaaggtccatcagtgggagaatatcaatcagatcagttaaggatcggtataggcatggttcctgatctcgatgctactcaacaagaacatagcaggtcgggatatgtatcgaaggctgctccagtttcgtatgaaccagatgacctttacatggtgattgggcgtggttcagcagaagagactgccatgacatcttggactccagagattgactacgaaatgaacgcgttatctgctgaagccaccagcaggcatgctgatgttgaaataaccggtgccaatgataaggggcctgatgctaaaaaacttgggaaatctgaggggaaacttccgaataaagaagttcgttctagagtttcaaatggacctcttgccaagagcaagtctgatgtagtatcaaagagcaggaaaccaccagcaggaagcaaaaccatgatacggagaactaagtccgatcaggaagaggagaacagaaagaaaatggaggagttacggatccagcgccagaagaggatagctgagaggagtgctgccggtggtcttaatccggttacttcccggaggagctccgccgaaagtaaaacttcagcagcttcaacgaagagccagccatcaactcaagacactaagaaatcgccgaagccagtccttagaagttccaccatagaacgccttgcaaccgcacggaatacttcaaaggtctcttcggctgaattgaaatcgagccagccgaaaaagccaacattgaaggaaatcagttcttcaacaactcagaaggctgctcctgctaaggataagaaatcaagcacaaacaaagccaaagcttcagatataaaaagtggtacaaataaagaacttccaagtggcgataatgcacaaggaaaaagggagtccaatgaggtcacagtagcattgccaatggaaccagcaccatccaaagcaactcaacctactgacattgttgatgatttcaaggacattcaagaattgcagactaccccaatcgaaaagaccgaaggaaatgcaactttgaaaccaaacccgtcgggggaagaccaaagctcaaatgccaaaatggttaccgtaaataagccaatgcaattagatcatgtaaaaggtgatgaagaatttataatgccaactaaagttgtttctgaagataacatagcaccagaaggatttggtaaagatattcctgagacaacggtccatcctgtgccgccagtgcctagcaagacggtaagattttcgactgtaaatatcgaagagatgggtgcaacgaatgagaaatatcagtcgcctaggattcctgaaatagagatctcaactccacctccaaatgatggaatggacaaggaaccaatgcatagcaggaagaaatggaacaacgaggagagccctcctaaagcagccaaagggtttagaaagcttcttttctttggaagaaaaggcaaaaactatgctactgcttagtgtatgcttgtctttccatattgcttatgcttcgggttttcaattttttcgggtggaacgtaccaataaggcctttgatgttgctgccattcaaggattcatgaacttataaagtaaaattggtgaaaaaaagagagagattcgtaatggaatttatccttgttgatatatatggttgaggttaaaccatttctttttgtgatggtacccttgatttgaatattgaaatt

SEQ ID NO: 14595 - DNA, 458 bp, Gossypium hirsutum
  Clone ID: GOSHI-09MAY01-C19015_1
atccatgaaactcatccacatcacatagctttctccactgctgttctcgccgggaaccaaccaaccaagaaacaccattttttccccttcccaggtgctctccaattccttcactttttctatcaaaccatccaatcatccttctttttcgatctccccatttttgggttattattttttttcataatatttttggtcgtttgtttttgtcatccggagaaggaaaataaatgagaacaggaaagcaaagtcaagaggaggaagagtacgaggaagaagagtttggttccaaaaaaacaaggcccatcttctaatcaaattatgtccggaaacgccattaacaactccaacaaaggtgggaagaacagtgataaggctaacgctataagatcgaaacactcggttaccgagcagaggaggaggagcaagattaatgaaaggtttcaagtattgagaga

SEQ ID NO: 14596 - DNA, 840 bp, Gossypium hirsutum
  Clone ID: GOSHI-09MAY01-C19005_1
ctgtaactggctctcgcattaaacacctaggtgaggaaaattccagatcgcgatctccccactttcactatcaatggcgaagccaaggctttcgcgcgttccggcccggaaatcttcatcgtcaaccatgtttctaactctgctcatcatgttcaccttcctggttttgattcttttggcgctcgggatcctttcaattcccagcagtaactcccgcagttcgcacaaacccaacgatttgagctcgattgtgcataacgtcgtcgacaaaaacgattatgatgagggggtaggagagcaatgggttgaagtcatctcctgggagcctagagcttttatctatcacaatttcttgtccaaggaggaatgtgaatacctaattgaccttgccaagcctcatatggaaaaatcaaccgttgttgatactgaaactggcaagagtaaagatagcagggtgcggacaagttctggaacatttctgcctagaggacgtgacaagattgtggggaacattgagcagagaattgcagattttaccttcatacctgtagagcacggggaaggacttcaagttctccactatgaagtaggccaaaaatatgagcctcactttgactacttcatggacgagttcaatactaagaatgggggccaacgcatagctacagtccttatgtacctctcagatgttgaagaagggggagagacggtgtttccttctgcaaaggggaacattagtgccgtgccatggtggaatgaattatctgaatgcggaaaaggggggctttctgtcaaaccaaagatgggtgatgcattacttttctggagcatgaagcctga

SEQ ID NO: 14597 - DNA, 343 bp, Gossypium hirsutum
  Clone ID: LIB3493-046-P1-M1-C6
ccagtttcactatcaatggcgaagccaaggctttcgcgcgttccggcccggagggctgcatcgtcaaccatgggggtaactctgctcatcatgttcaccttctggttttaattcttttggcgctcgggatcctttcaattcccaccagtaactcccgggggggcacaaacccaacgattgagcttccattgcccataccgtagaccataatactacatcatgccgggtgggaagaacccattctaccattgaacattcttataagctgtattccagcagctgtaaaaagacggtgttaaagaagttgcccttctataagttgatattaatggtctggcttttg

SEQ ID NO: 14598 - DNA, 866 bp, Gossypium hirsutum
  Clone ID: GOSHI-09MAY01-C19325_1
ccagaattcaggaacttctttaaaaccttttgatctaacggtggagaaaaacagcttcttttgcaaagtttggtggataaaaagtaggtctaggtgttgggagggcaaatgcggttgattttctctatctagtctgctttttttcttgtttggctaccgagaaaaattttgttcttgtttctgtttctgggtcttttggttttagtgaaggagaagtagagggaataaaaaaaaacaaaaacagagaagagatctttttggtggtttcttaatttgggttgaagaaaagatgcaacaaaatcagttgaagaaggagctaaaagagatggactttttcaccgaatatggggatgcaaacaggtacaagattcttgaagtcattggtaagggaagctatggagtagtttgtgcagcgcttgacacacatacgggtgagaaagttgcaataaagaaaatacaagatgtatttgagcatatgtccgatgcaattaggattttacgtgaagtcaagctacttaggcttcttagacatcccgacatagttgaaattaaacgtataatgttgccaccatcaaagagggagttcaaagacttatttgttgttttcgagctcatggaatcggatcttcaccaagtcatcaaagctaatgatgacttaacacgagagcatcaccagtttttcctgtaccaaatgcttcgtgcaatgaaatatatgcatacagccaatgtgtaccatcgtgaccttaaaccgaagaatatactggcaaatgcaaattgcaagcttaaagtttgtgattttgggctagcaagagttgcatttaatgataccccaacgacagtcttctggacggattatgttgctacac

SEQ ID NO: 14599 - DNA, 430 bp, Gossypium hirsutum
  Clone ID: GOSHI-09MAY01-C19255_1
cgggatgggtttttcttgtttggtacttgtctttgttgtccaacaattgtttggtcaaagttctgcatatttgttgattcatggtgagcctaccaactacgtttctgccgttggggaccctggaatgacgaacccaaacgtcagagttgctttggaagcttggaatttctgcaacgaagttggctttgaagttcctaacgtgggcagcccccgctgggctgattgtactgatctttactgctcttctgactccgtttatctgggtggcggccttgttaataatggcagtcagtgcagagtacttcacaaagtgaatgagactgacaacaggttaggagctggtgataaatgtcctataatgggctttgagtcttatgctgaccctgacctgtttgcaaaggagaaagagctgtatctcggttctttatgt

SEQ ID NO: 14600 - DNA, 595 bp, Gossypium hirsutum
  Clone ID: GOSHI-09MAY01-C14915_1
attggcagtaatgaggaacataaagtcagaagttgatgcaggaagcataagaccttactgttttgtggaggttaatggtctaaagttggctgcaccagagaatatttacacagtcatatatgaagccttaactggacatagggttagttggaaaaaggctctgcaattactgaatgaacggttttcagatggaaagaaaattgctaagggggatgaccgaccttgtattctacttattgatgaactcgatcttcttgtaaccagaaaccaatcggtactatacaacattcttgactggcctactaagcctcattccaagttaattgtggtccgcccacccgtcccaatggatcttccagagaagttacttcctcgcatttcaagccgaatgggtattcaaagactctggtttggtccctacaattatcagcagctacaggaaattatatcaagtcgtttgaaaggaatcgatgcgtttgaaaagcaagcagtagaatttgcttcaagaaaggtagcagccatttcaggggatgcacgccgtgccctagagatatgcagcgtgcagctgaaattgcagattataatatgaagaatc

SEQ ID NO: 14601 - DNA, 358 bp, Gossypium hirsutum
  Clone ID: LIB3189-047-P1-K1-H6
tcacgcgaaaataataagtttattaagccttaactggacatatgattaagttctgaaaaaggctctgcacatactgaatgaacggtgtggagaggggatcaaaacttctttgggggaagacctaccctacattctacttattgacgaacttgatctttttgtcaccagaaaccaatctgatctatacaacattattgactactctactaagccccattccaagataattgtgacaggaatagcaaatacaatggatcttccagagaagttacttcctctcatttcaagccgtatgggtattcaaagactctgttttggtccctacaattatcagcatctacatgaaattatatcaaag

SEQ ID NO: 14602 - DNA, 464 bp, Gossypium hirsutum
  Clone ID: LIB3189-047-P1-K1-E3
attttgcttcagaccactacaaggctagctcctaccctctctcttatttgatcattcactttacagagaggaacaataagtcctggggagagcgacatcaagaagatcgagaacgcttcaaacaggcaagtcacttattcaaaacgaaggaacggtttattcaagaaagcccaagagctcactgttctttgtgacgccaaggtttcattgatcatgttctccagcactggcaaattccatgagttccttagccccaacatctcgacaaaagggtttttcgatctttaccaaaagaccacagggattgatctatggaactcccattatgagagaatggaagaaaattacaggagcttgaaggagataaacaagaagctgagaagggagattaagcaaagaatgggtggagacttgaatgaacttaacattaaagaactgcaagctcttgaagctaaaatggtttc

SEQ ID NO: 14603 - DNA, 323 bp, Gossypium hirsutum
  Clone ID: LIB3145-010-Q1-K1-E6
ggcggtggattgtaattaaacaattcatttaaaaaaaaccaacactgggtcacgggaagatcgacgtctgattatcgagaacgctacaaacaggcaagtcacttattcaaaacgaaggaacggtttattcaagacagcccaagagctcactgttctttgtgacgcccacgcttcattgatcatgtactgcagcactggcaaattccatgagtttcttagccccaacatctctacaaaagggtgtttcgatctttaccaaaagaccacacggatcgatctatggaactcccattatgaaagaatggaataaaactacaggagct

SEQ ID NO: 14604 - DNA, 687 bp, Gossypium hirsutum
  Clone ID: GOSHI-09MAY01-C14845_1
cccacgcgtcgggggagcagtaaaaatatcccctcaccaccgctactattattataccattactctactacagctgctatcattactacatacatgtccacccaaagtcgagcagttggcggcaccgagcacaactggtgccgagcggtggtcgggggaaccgggatagccgtcttggctatcatttcttccaaaaaccccgacgtttcacatcttaaaaatgccctccacaagctccaaatctcccatcccattcttaggtctcgcctccattacagtcctactgccaacagttactccttcgttacctccccctcccctttcattcaaatcaagtactttaaccattctacaacttgtcaaatccttgaaaacaaccaaaacatctcaccccttcatttgattctcgaacacgagcttaaccaaaacgcttgggttagttcttcatgtaccaccaaacacgacgtgtttttcgccagtgtttatgccttgcctggtgcaacaaggtgggtgttggtgctccgcctacatgcggctgcttgtgaccggaccacggcggtgtcgttgctgagagagttgttgacgtcaatggctattgaggaagacgaaacagggtttcagcaaggtcccaaagacatttcgatgagccaaggagacatcggtttggccatggaagatttccccccg

SEQ ID NO: 14605 - DNA, 447 bp, Gossypium hirsutum
  Clone ID: GOSHI-09MAY01-C14865_1
gctcttcactaaacaatccactgcttctcacttgctttcttttcttttcttttgactggacttctcaaagcattccccaatttcctccctggttccagctctagtttccaagcagtttcagaggaaagaaagtaaagcctgtttaccgaagatggaaaaccccatcacttcaaaatgctgcaaccatcagccctggtttgtcttacttgtctttttcgttttctgtattgagctattttcctttgattactctggttttactgctaaaaaatctgccctcgtcactgttttggatgataatcatggaaacgtaatcaatacccaaagttctttacctcatgatttcactgagattaccaatgctagcgtctatccattgcccaaaactgatgaaaagggagatttgaaagtgggaactgagatcgattcttgtgtggggagatatat

SEQ ID NO: 14606 - DNA, 1289 bp, Gossypium hirsutum
  Clone ID: GOSHI-09MAY01-C14835_1
gcggagaatagaatttctaataaaggaccggattccctttccaagcttcagcaagccagatatggctcaaaatatggccaggagaagggttgttttggtgcagattttggcactagccttggccgctgttatgccattgctctcaggaggtgtggatattcaacaagttagggtgctggcagctaaattcaacgtgacttgcgtagtggtattcggagactccagcgtggatccaggcaataacaactatattgctacgccctttaagggtaatttcctaccgtatgggaaagacttcttcagaggccacccgactggacggttcagcaatggaaggctagccactgattttattgctgaagctttgggttacacgaacgaaattcgacctttccttaacaagagattgagaccagttgatatcttgcatggtgttagtttcgcatcagctgcttctggttatgatgagctcactgccaatctctcacatgtcctgccggtttccaagcagctagagtatttcagggaatataagatgcggctgaggcaactggttggagcgaggaaagcagaaaatattataaaaaatgcggtagctgtgatgagtatgggcacaaatgactttcttcaaaactactatttagaacccattcgccccaagcagtatactttggaagagtaccaaaattacttggcttcttgcatgtctgacgatgttaagacgatgcacagtcttgggataacaagattagtggtagttggggtgcctcccctggggtgcatgccccttgtcaagactctaatgaaccaggaaacatgtgtggaaaagtataacaatttctcctcctccttcaattccaagctacaattcaagttggaagtcgccaggacaacattagggatgaaaattggctacgttgatgcttatggcatctttgaggacgctgtcaataactccaaaaaatatggtttcattgaagcttcaaaagggtgttgcgggacggggaccataaattatggagatacatgcagaggcatgagtacatgccctgatgcgtcaaaatatgtattctgggatgctgttcatcccactgaaagaatgtatgaaataatcgctgggcaggccattgattctctccggaaacagctgatggcctagctagaagcctgcaagctgcaactttaggttagatcggtgcgttaattaagtatgccttgttcttagaactctccgactaaaatacacggttttgttgtaattaacccttttgggcttctcccaattgttc

SEQ ID NO: 14607 - DNA, 195 bp, Gossypium hirsutum
  Clone ID: LIB3189-046-P1-K1-F1
gcagactaccatttttaataaaggaccggattccctttccaagtttcagcaagccagatatggctcaaaatatggccagtagaacagtcgttttggctctaaccttaaacctaaaccatccatcatcatcatcatcatcaagctggagaagcgataattaagtgatgggattgtacaaatcttgggtcatccaaa

SEQ ID NO: 14608 - DNA, 905 bp, Gossypium hirsutum
  Clone ID: GOSHI-09MAY01-C14575_1
gagttacttgcttctattggctgccattttcgaattcctttgaaaaccatgtggttatggatatctttggtacttgtgctgcaatatagtaaaactgtgctttcagattccaactatttaattgggatgggaagctacgacattactgggccagcagccgacgttaatatgatgggatatgctaacacagaacaaattgcttcggggattcactttaggctgcgagctcggtcatttatcgtggcagagccacaagggaaacgagtagtttttgttaatctcgatgcttgcatggcttcacaactagtgactataaaggttcttgagagattgaaagcaaggtatgggaacttatatactgaacagaatgttgctatcagtggtattcacacccacgcaggtcctggtggttatctccaatatgtggtgtatattgttacatctcttggatttgttcgtcagtcatttgatgccctggtagatggcatcgagaaaagtattgtacaagctcatgaaaatctccaacctggatcaattttcgtgaacaagggagagctattagatgccggagtaaaccgtagtccgagtgcctatctcaataaccctgcatcagagaggagcaaatataagtacaatgttgataaagaaatgacccttttaaagtttgtagatgaccaatggggcccagtgggtagcttcaactggtttgcaactcatggaacatcaatgagtcgtacaaactctctgatcagtggcgataacaagggtgcagcagcacgatttatggaagattggtttgagcagaacagtgctaaaagtgatgaattggatactgatgaaatacctcgaagagtttcgagcatcatttctagtattcataataatcaccatgagttgctggagct

SEQ ID NO: 14609 - DNA, 478 bp, Gossypium hirsutum
  Clone ID: LIB3189-041-P1-K1-C1
cccacacattcgcttagaaaatataacagcatatataattgtaaatgttgtttgaaggggagaggtttgtagacactttgagagtggagtggcaactattaatcagtctcatgctatattggatctcattgaagctaagtgggcagatttggtggcagaagtgccatttaagatatgttacccggcttttgaaggtcaaaagtgtcagatcatcactggctgtgatccgaagaacacgcctttgtcttaccacattgctggtttctgtcctactttactttggcagctcactttctcattcattaatattaattgaccgggacttgctgcaaaatctgtttcatttgctttgaaacgcatattccaattacatattgcctctagtcttttttttcttaaatggcattgtttattttgataataatttctacctgttccaaaccttggtctattgtcagatttctttttttaaaacttt

SEQ ID NO: 14610 - DNA, 217 bp, Gossypium hirsutum
  unsure (1)..(217): unsure at all n locations
  Clone ID: LIB3189-037-P1-K1-C12
ggagagctacctgattgggaatttacaaccagcacatatggattttcgattcttttctctaggaaatttgtgggccgntgtgagtggtcttgcaacgattgatcagtctcatgctatattggatctcattgaagctaagtgggcagatttggtggcagaaatgccatttaagatatgttacccggctcttgaaggtcaagagtggcagatcatcact

SEQ ID NO: 14611 - DNA, 1162 bp, Gossypium hirsutum
  Clone ID: GOSHI-09MAY01-C14535_3
cggacgcgtgggaaaaagtttaattgagttctccgatcatggccctctctgctcgtatcctctcaaaatctcgccagctttgtggtagtcaatctattctacaaaaggagaataccattcctgttcgtttttatgccaaagaggctgctgctcccattgctaataagggagatgagatattgaaaaatatctttttggaggttaaggcaaaatatgaggcggcattgggaatatttaggaaggagaagatcaccattgacccagatgaccctgctgctgtttctcagtatgcaaaggttatgaagacagttaggcagaaggctgacttgttttcagaatctcagcgcatccagtacaccatccaaacacgaactcaggacattccagatgctcgaacatatttattgatcctgaaggatataaggatcaagagaggactcactgatgacctttgtgctgaggctatgatgatgagtgcgttggataaagtcgaaaaagaaatcaagaagcctcttttgagggatgacaagaaatcaatggctcttcttactgctgagtttgataagatcaataagaagcttgggatccggaaggaagacctgcccaagtatgaagaacaactggagctaaaaattgccaaggcgcaattggaggagctgaagaaggatgctcttgaagcaatggaaacacaaaagaagcgggaggaattcaaggatgaggcaatgcctgatgtgaagtcattggacatccggaacttcatctgaaactcgaaattcgcctttggtggttccagtttgagggtgaacaagtataactgttcaacaattgcttaaaacctttctttttcattttgctacaataatatgataaataataataatggaaaagtgaaaccggtgattgaaagtgcacaaccgtcagatctgaacaacttaaattgttgtttttgtttgtgtttattattctcaagtttttgggatgaacttcggctccttattgttatgatttggttggttgtatgaaagcaaacatcgatccgtctttgaggtagataaaccgcatccataataattagctttttatgatggaaaaattatgtggatattttttattagcttggacaaatttatcaataaaaagatttatatttttccttgccttt

SEQ ID NO: 14612 - DNA, 1000 bp, Gossypium hirsutum
  Clone ID: GOSHI-09MAY01-C14535_1
tttacggtgaaaatcgaacacaaagcagctcgcgactccatcagcatatcagactgcaagcggttttccaaaacaaatactagaaaccctactcccaaatagaagtttgattgagctctctcatggcgttttctactcgtctcctctacaaatctcgccagctttatggtagtcaagctgttctgcggcaggaggttgccattcctgtccggttttactctaaagaggcttctccccctggtttaaaaggagatgagatattgaaaaatatctttgtggaggttaagaacaaattcgagacagcattgggaatatttaggaaggagaaaatcaccattgacccagatgacccagctgctgtctctcagtatgcaaatgttatgaagactgttagagaaaaggctggcttgttttcagagtctcaacggatcaaatacaccatcgaaacacgaactcagggcattccagatgtccgaacatatttattgacactgaaggaaataagatccaagagaggactcactgatgaacttggtgctgaggctatgatgatgggtgcgttggataaagttgaaaaagaaatcaagaagcctcttatgagggatgacaagaaatcaatggctcttcttactgctgagtttgataagatcaataagaagcttgggatccggaaggaagatctgcccaagtatgaagaacagttagaactaaaaattgccaacgcacaattggaggagctgaagaaggatgcttttgaagcaatggaaacacaaaagaagcgggaggaattcaaggatgaggcaatgcctgatgtgaagtcattggacatacgaaacttcctataattctctaattcactttcggttttccagtgactttggaggtcaactctctgaattggggacttcctttgtcatttttttgcttttaataaaaaaaaaaggaaaggcacctggtcagttgaaaatgcaaaaatattatctcatcttgcatgagttat

SEQ ID NO: 14613 - DNA, 638 bp, Gossypium hirsutum
  unsure (1)..(638): unsure at all n locations
  Clone ID: LIB3543-055-Q1-K6-B9
gntcctggttgtgcctcaatgcaacagcagntgcataagcaactacaaattcagattccgacctgtgacacattttatcaatgttccagcagcacagcacacttttctggtaggaaagtacccggtttgtgtaatgggctctcagcattctcctctaacagagttcatgatgatgctcgtgctaccaaaaacggaacttctttgtccagaccaaatggcagtcacagatgcatggtttttggagtaaatttatttaatggctcacccgagctcccttcaccacaagttctcacttctagtgaggttcaatgtctttgttcgactcctctcacttctcagtcgagtgtttccattgcttccaagggtatatctagcaagcaatgcaacaactgttgctccatcggcgatcaaacttgcaccaaagtgctcaagtatggaactaatcttggaagatcggttgatctctatcgattcaatggatacaaaggcctcatccttgagcttgatcatatgtttgatttcaatggaaagttgatcgatggaagcagcggctggcacataacctataccgatgaagatggggatatgatgctgattggagatccttatccatggcagaaatttcagcatgaagtccg

SEQ ID NO: 14614 - DNA, 436 bp, Gossypium hirsutum
  Clone ID: LIB3149-022-Q1-K1-B1
agcaatgcaacaactgttgctccatcggcgatcaaacttgcaccaaagtgctcaagtatgaagaacaactggagctaaaaattgccaaggcgcaattggaggagctgaagaaggatgctcttgaagcaatggaaacacaaaagaagcgggaggaattcaaggatgaggcaatgcctgatgtgaagtcattggacatccggaacttcatctgaaactcgaaattcgcctttggtggttccagtttgagggtgaacaagtataactgttcaacaattgcttaaaacctttctttttcattttgctacaataatatgataaataataataatggaaaagtgaaaccggtgattgaaagtgcacaaccgtcagatctgaacaacttaaattggtggttttggttgtggttattattctcaagtttttgggatgaacttcg

SEQ ID NO: 14615 - DNA, 449 bp, Gossypium hirsutum
  Clone ID: uC-gsronu33B116h02b1
cgcctgggggtaccggaccgccggttccgcctacgcgtacgcccacgcgtatttcaacacatactagaaaccctactggcaaagggaactttgatagagctctctgatggcgtaaactactcgtctcctctacaaatgtcgccagctttatggtaatcaagctgctctgcgggaggaggttgccattcctgtccggttttactctaaagaggcttctccccctggtttcaaaggcgatgagatattgaaaaatatctgtgaggaggtcaagaacaaactcgagacagcattgggaatatttaggaaggagaaaatcaccattgacccagatgacccagctgctgtctctcagtatgcaaatgttatgaagactgctcgagaaaaggctggcttgttttcagagtcttaacggattaaatacaccattcgaacacgaactcagggcattc

SEQ ID NO: 14616 - DNA, 444 bp, Gossypium hirsutum
  Clone ID: LIB3189-030-P1-K1-A3
gcaaaacaccctttaggtttttgattgagcaagcagattcccaaaacaaatactagaaaccctactcccaaatagaagtttgattgagctctctcatggcgttttctacccgtctcctttacaaatctcgccaggtctttcgtcttcactcccaaagctaaagccaacggtttttttttcagttccacaaacaattagacaatcaacttcttttcttctctgtttcaattttttttggcgttttggaggttgagttttttttttgagttgaagttcttggactcggtaactctacgagtccgagtcattgcgtacgagttttgattctggtgatgttattatctccaccgtcgattactcagtgagctgttgcaattatcaaataagtttgttactcgtattcggttttttgtttttgggcttacttggaaacttgtgatctcg

SEQ ID NO: 14617 - DNA, 287 bp, Gossypium hirsutum
  Clone ID: uC-gsronu33B116h07b1
cccacgcgttcttatacaaatacgagaacccctactgccaaatggaagattgatagagctctctcatggcgttttctactcgtctcctctacaaatctcgccggcttgacggtaatcaagctcatctgcaccaggaggttgcacactactgtccggctttactctagagaggcctctacccctggcactggcggagatgagacatcgaaaaatctgtgaaaacccggtcagaacccaacctagacagcattgggaatattcacgatggagcaaatcgccattgaccc

SEQ ID NO: 14618 - DNA, 365 bp, Gossypium hirsutum
  Clone ID: GOSHI-09MAY01-C14525_1
ctctctctctctcttagggattgaagaacagtagcttagcagccacacatttcccctcttttgaaccttccccctcctaaagaaaaatggattaataattcaaaatctccactggattagtcgtattaggtcagtttatcactccatttccctttgaatcaagtcagtttttatgccatggaagatacaaagtcagttgcaacactcataggctcgacagcctccaagatacagcagcttcaaaaagcatttgctgaacctgaaagtcagcgtgctctaacacttaatctaagatggaaagaacttgaggaacatttcagtggtcttgagaagtccttgaagagacgctttcatgagttggaaga

SEQ ID NO: 14619 - DNA, 503 bp, Gossypium hirsutum
  Clone ID: GOSHI-09MAY01-C14495_3
gttatttgcagctgatgaacacatcagaaacatatgaaagaaacaaatcattttctctatatccaacccgtcactccgtattcttgtctttcaagtaaattaagatcgcaaccatttattttggcttttactgggtgaagtcgcgctcttgtacaacacgccccttggcaaaaagcttattagattgtgaagtgattgcagaataagctctatgtatatacacaaatacgtattcctgcatgatatacagaaaaccgaagaagcaatggaaatccgtagaagctgcgcattgagacaatgtacccagtccatgcgcaaagtgttctgttgtttaggataagcagggaagcctctggcttctggtagtaaatgagtggattgtcttgtagtcttatatatttgaacaatctgggaagcaatcttatcattgctttgtttctggaagataataaaatcatgtctttcatcaaaaaaaaaaaaaaaaaaaagggcggcccgctcgc

SEQ ID NO: 14620 - DNA, 590 bp, Gossypium hirsutum
  Clone ID: GOSHI-09MAY01-C14495_2
gcgaaggaagctgtcacgctcaccactcttatgatgcttttactaggctttgtgttggacagatcttctgcacagtgactgtagcacccgaaatgtttggaggagacccgtgtcctaatgtgatgaagaaactctctgtggaggtcatttgcagctgatgaacacatcagaaacatatgaaagaaacaaatcattttctctatatccaacccgtcactccgtattcttgtctttcaagtaaattaagatcgcaaccatttattttggcttttactgggggaagttgtacaattatacaacacgccccttggcaaaaagcttattagatggtgaagtgattgcagaataagctctatgtatatacccaaatacgtattcctgcatgatatatagaacacccacaaagcaatggaaatccgtagaagctgcgcatggacaagcccgagtctgccaaggtcctggtgttagataacatgaacgtctggttctggataatagggattgcttgaagtctattattgaacaattggaacatctatatgtttgtctgaagatataatctgtcttcttagaaaaaaaaaaaaaaaata

SEQ ID NO: 14621 - DNA, 1776 bp, Gossypium hirsutum
  Clone ID: GOSHI-09MAY01-C14495_1
cataaattattatatgtatcaaggaggaacaaattttggccgaactgctgggggtccattcattgctaccagctatgattatgatgctcctcttgatgaatatggactaaagaggcaaccaaagtggggccatttgaaagatttgcatagggctataaagctctgtgaaccagctttagtaaatggagatcccactgtgattcgacttggaaactatgaggaggctcatgtatttaattacaaaactggaggttgtgcggccttccttgcgaattacaacccaaattcttacgcaaaagttgccttcaggaacatgcactacaacctacctccttggtccatcagcattcttcccgactgcaagaatactgtgtataacactgcaaggattggagcccaaattgctcggaagaaaatggttcctgttcccatgcatggaggactctcgtggcaggcatacaatgaagagactgcttcagttgctgacagttcattcacaatggtcgggttgttggagcagataaatacaaccagagatgcaactgactatttgtggtacacaacagacgttaagattgacccccatgaaggattcttgaggaatggaaaatctcctgttcttactgtcttatcagctggccatgctttgcatgtttttgtcaatggtcaactatcaggaagttcctatggaagtctagaattccccaaactaacattcagccaacgcgttaatctgagagctggtatcaatacaatttcgcttctgagcattgctgttggtctccccaatgttggtccacactttgagacatggaatgccggtgttcttggcccagttacactgaatggtctcaatgagggaaggagagatctctcatggcagaaatggtcttacaagattggccttaagggagaagccttgaatcttctttcgctaagtggtagttcatccgtggagtgggcacagaggtcttttgtctcacaaagacaaccactgacatggtacaaaacaactttcaatgctccagctggaaattctccattggctttagatatgggtagtatgggcaaaggccagatttggataaatggaaagagcattggacgccactggcctgcatataaagcatctggaaattgtggtatctgtagttatgccggaacatttaacgagaagaaatgtggaactaattgtggaggggcctctcaaagatggtaccacgttcctcgttcatggctcaacccaacagggaatttgttggttgtgtttgaggaatggggtggagatccgaatggaattactttggtacgccgagaaactgacagtgtctgtgctgatatctacgagtggcaaccgaacctaatgaattacctgatgaaagcctctggtaaagtcaacaaacccctaaggccaaaagtgcatttagagtgcgatgctgggcaaaaaatctcagcagttaagtttgccagttttggaacaccaggaggagtctgtggaagctaccgcgaaggaagctgtcacgctcaccactcttatgatgcttttactaggctttgtgttggacagaacttctgctcagtgactgtttcacccgaaatgttttggaggagacccgtgtcctattgtgttgaagaaacttttgggaggtcatttgagctgttgaacctttgaatctttgatagaactaataatttctttattcctacctattctccgatactgtgtttaagtcattagatgctatcatttattgctttactggtgaatagaccaat

SEQ ID NO: 14622 - DNA, 388 bp, Gossypium hirsutum
  Clone ID: LIB3048-019-Q1-L1-H2
gctttaaaaactgggggttcccccggcttgaagaaattcgcaccaggttataccctaacatttaacgagaataaatgtggaactaagtgtctatggacacaatctgaggtggtaccacattcctcgttcatggctcaacccatcagggaatttgttggttgtgtttgatgaaatccgtggagatcctaatggaattactttggtactcctagaaactgacagtgtctgtgctgatatctacgagtggcatccgaacctcatgaattacctgatgaaagcctctggttaattcaacacacccttatagctcaaatttcatttatagtgcgatgctgggcaaaaaatctcatcacctaaatttgccatttttggaacaccattaagagtc

SEQ ID NO: 14623 - DNA, 374 bp, Gossypium hirsutum
  Clone ID: LIB3147-040-Q1-K1-H4
cccacgcgtccgcccacgcgtccgaataggctgtgtgttggacaaaacttctgctcagtgacggtagcacccgaaatgttcggaggagacccgtgtcctaatgtaatgaagaaactctctgtagaggtcatttgcagctgatggaacacatcagaagtacatgaaacaaacatggtctatcatttctctcaaatccagcatgtcattcacctcttctcttttttgggttcacaagcatttctttcagcttttccagggtgaagttgtacaaatacacagcacgccacttggaaaaagctcggtttagatcgcaaaaattgattgcagataagctctatgtatatatatacaatgtttattcctgcatgatatac

SEQ ID NO: 14624 - DNA, 1353 bp, Gossypium hirsutum
  Clone ID: GOSHI-09MAY01-C14405_1
gaaaagttcttctttcttcagcattttctgagttcttttcggataatgggccagttgatatgatggatgaagatgccatatcgaacctttctgtacgagtcaaattaagtttgacagtttgggactttattattccaacaactccctcactacctgctgtctttggtatatctgatactgtaattgaggatcgctttggtgtcggacatgggagcagtgagtggtatgatgcactggagcaccatttcaagtggcttcttcagtacagaatcagcccatacttttgtagatggggtgatagcatgcgtgttttaacttacacatctccctggccagcggatcatccaaaatcagatgaatatttttcagacccacgactagcagcatatgctgttccacatagtccagtggtctcttgtaatgatgcagcaaaggattacttgcagaaagaagttgagatattaaggacaaaaagtcattggaagaaagcttacttttatctgtgggatgagccactgaacatggaacaatacgagtctctttgtaacatggcaagtgaggttcatgcttatgctcctgatgctcgtgttttaaccacttactattgtggaccaagcgatgctcctcttgcaccaactccttttgaggcttttctaaaagtgccaaagtttctacgccctcatactcaaatctattgtacaagtgagtgggtatttggtaaccgagaggatcttgttaaggatgttatttctgaattgcatccagaaaatggagaggaatggtggacatatgtctgcatgggtccatccgatcctcatccaaactggcatctgggaatgcgaggaacacagcatcgtgctgttatgtggcgtgtgtggaaggaaggtggaactggttttctgtattggggtgccaactgctacgagaaggcaacagttcccagtgccgagataagatttaggcgaggcctccccccaggtgatggtgttttgtactacccaggtgaggtgttctcgtcttcaaagaaacctgttgcttcccttagactagagcgcattctcagcggcttgcaggagactttgaatacctgaagctttatgcctcaagatatgggaaagaagaagcacttacacttttagagaagacgggtgtttatttaggtccagagcggtacacccatgaacatatggccattgatataatgcggggtgagattttcagcagttgcagatcatgttcctgaattatttatgctatttctttatttttgtcattctattttcgttgatatatagacactctttattttactcgtaaattatatgcaatggaaggaggacaaactttatagcc

SEQ ID NO: 14625 - DNA, 545 bp, Gossypium hirsutum
  Clone ID: GOSHI-09MAY01-C14425_3
gcaaacgctacaatgatttagggcatttttttttttggtgtgttgttctcagttacccgacccgagattcaccagtattgtattttaatctcgatttctaatttcctaaagagtggggtcatccattccaattctggggctttccatcaacgaacagagagttggctcgtcgagaagaaaaggttgtaaaagacggaaattttcgatttaagatatggcggcgatggagaagcttaagatattcgtagtgcaagagccagttgtagctgcctcttgcctcatcgctggttttggtctcttcctaccagctgttgtaaggcccattttagattccatggattcatcaaagcaagtccctcaacctgctttaagagacgcggtttcaggtgtgaccgggaaaaaacggggtcgctatgatctatggatccaaaagaggcaaaaatttacgtgtagcttggaatcaccgacgaaataagtccaacttttttaatttgaggaactttctaaagtgcccttcaaccccaatgttagcatgagaatatgag

SEQ ID NO: 14626 - DNA, 574 bp, Gossypium hirsutum
  Clone ID: GOSHI-09MAY01-C14425_1
atcgaagaacagtcacaaagttgcttttcgaaaaggagtgaaagcaggaaaaaaatcgattaagagatagaaagatggcggtgatgcagaagctgaaaatattcgtggtgcaagagccagttgtcgcagcttcttgcctcatcgctggttttggtctctttctaccagctgttgtaaggcccattctagattccttagaatcatcgaagcaagtccctcagcctgctttaagagatgtggttgctggtgtgactggtaaaaagcagggctgatgtgatttatgagttgggaagaagcagaaactcaaatgtagctagtaatcagcaacaaaataaacttgattttaaagttgaactcttgcgccttcaacttcatctttagcatgagaatttgagtgttaatttgttttgattttcagtggtggaggattactcaaaaatcatggataattcatatcagactggaatttgatatcatctacttaatttgtttccctacaactcaaatgccacctaaaggtaactggaaaagcttacattacattgaaaactaaaggcttgataaatataaaccg

SEQ ID NO: 14627 - DNA, 469 bp, Gossypium hirsutum
  unsure (1)..(469): unsure at all n locations
  Clone ID: uC-gsflnu33B080c11b1
aaaaangcaagggcttctttgacgtagggcctcttttttttggtatgtttttctcagttacccgacccgagattcaccaatattgattttaatcttgatttctaatttcctaaagagtgggatcatccatttcaattttgggggttttcatcaaagaacagagagttggctagtcgagaagcttaagatattcgtagtgcaagagccagttgtagctgcctcttgcctcatcgctggttttggtctcttcctaccagctgttgtaaggcccattttagattccatggattcatcaaagcaagtcccacaacctgctttaagagacgtggtttcaggtgtgattgggaaaaaacagggttgatatgatttatggatcgaaaagaggcaaaaatttatgtgtagctcgtaatcactgacgaaataagtccaacttttttaatttatggaactctctaaagtgcctttcaac

SEQ ID NO: 14628 - DNA, 292 bp, Gossypium hirsutum
  Clone ID: uC-gsflnu33B062e06b1
tcgtccacgcgtccgcccacgcgtccggcagtttgagggacttgctttgatgacgtggattcaggtgtgactggtaaaaaacggggttgttatgatttatggatcgaaaagaggcaaaaatttacgtgtagcttgtaatcaccgacgaaataagtccaacttttttaatttgaggaactttctaaagtgcctttcaacctcatgtttagtatgagaatatgagtgttacttatattttgattttcatggttaaaatccattgttctttttatttgctcaaaaaaaaggaaaa

SEQ ID NO: 14629 - DNA, 548 bp, Gossypium hirsutum
  Clone ID: GOSHI-09MAY01-C14695_2
cggacgcgtgggcggacgcgtgggtgaaagggaaatgtgtaccaggacggtctattgtacaaatattgacaagaaggtttctcaaactgaaatgaagagtttctttgaatcaacctgtggtgaggtctctcgcttgaggcttttaggggatcatgtccattcaacccgtattgcttttgttgaatttgccatggcggaaagtgccatagtcgcactgaattgtagtggcttggtgctaggaacccagcctatcagggtaagtccttcgaagacacccgtgaggccgcgagttgcccgtccgacattgcgttaaccgatcaaccaagtctttttgagatccatggatggaactgggtgacttccctttgctgggttttgcgtttgcgacaaaaaactttcccttcttttatcatttccatctttttccattcgcgactgttgcatttttgtttttgacagaatatattgtgattatgcttcggtttccagcctgaccttgagaattttcttactttaatcttattccatcgttttgtattgacaacgtc

SEQ ID NO: 14630 - DNA, 1406 bp, Gossypium hirsutum
  Clone ID: GOSHI-09MAY01-C14695_1
gtttgatcatggatatcatttccaccatttccaccaaaaaccctaattttttgtccctttctctcgattttttttttaatttgaaatatttatcaatttaattaaatcacaaaaaaaagaaaaaaatctgcattttctctctttatttacatttctagtccaatgggtatctattattaggcatcaaccatcttaattgttattctctaaagctctcaacttctttttgctctgtagtaagaaaggaggaagatataaagggaataactttacaaaatcaaattgccattttcctctgattgttttcttttttatttttccttgtggggttggggttttcattctatggctgcagttgctgacaagtcaggtgaggcagcgctagtagccgcagctgctaatgacaagaacggtttggtggtggaaacacccaaatcagaatcaaagaaattcaatgtccaaaccctcgcgggggtgttcacaaagttgaatcctttggccaaagaatttttcccatcttcttatcaacaaaatcagaccaaaaatgatggcaaatttaatcaggtgcctgttggtaacaaatcagtgggaaatgagaatttctccaacagagggaggagaaataactccaaccaaggtaggagaaggcttaatggtaaagcttttcgagctcaacgagatgatagtattaggcaaacagtatatgtttctgatattgatcagaatgttactgatgagcgtcttgctcgcttttttagtaattccccgcgtccggttgattgccgagtttgtggtgatccacattcagttcttcggtttgcatttgtggaattcgcagatgaagaaggtgcacgagctgctttgaacctcaatgggataatgctagggttttatccagttagggtcttgccttcgaaaactgccatccttcccgtgaaccccacatttctacctaggtcagaagatgaaagggaaatgtgtaccaggacggtttattgtacaaatattgacaagaaggtttcccaagctgaagtgaagaatttcttcgaatcagcctgtggtgaggtaactcgattgaggcttttaggtgataatgttcattcaacccgaattgcttttgttgaatttgccatgaataaccagcatgaaatggtatatttgtgccgccatatttacatatatggtgcttggaacccggttctaatatttgtttcccaattaataacttcttggcattatgatttgcgatttatccgagactgattaattttccgctcttacgaataggcggaaagtgccatagtcgcactgaattgtagtggaatggtgctaggaacccagcctatcagggtaagtccttcgaagacacccgtgaggccgcgagttgcccgtccgacattggttta

SEQ ID NO: 14631 - DNA, 1205 bp, Gossypium hirsutum
  Clone ID: GOSHI-09MAY01-C14615_1
cccacttgtcctcccacccactccgttcgattacggaaacttcaataatatatagattcccattctttcatgtccctcgctgagaaagagccttgcgagtttccgtcacaaacgcccgcccaaccccagcccaacccacaccctgtcgccaagaaacgcacccgccaagacaaccactccccgtttcgcggggtacgtaagaggaggtgggggcgttacgtctccgagatacggtttccgggtcaaaagacacggatatggctggggtcgtttgggtcaccggagatggcagctcgggcatatgactcggcagctttcttcttgaaaggcgactctgctatcctcaacttcccggagttagtggggtcacttccccggccagggtcttgctcgaggagggatatacaatccgcggcggccaaagcggctttggaggaaccggtgggcagggtaaaagatgaggagggtccggaaagcatcgggtggtgggatgatgtggggatggcggcgtttgaggaagtgaaagcaagtccgttgaggtttgattcaatggagggagagctgttgtctttcatggaggatgatcatcatttcttcactccctgctttgagttgtaaatatatataagaatgattttctattctatatattatttgatatcttcttaccttaggcttagggtctttgcttgttagcctgcatggaccatggtttagcttactttattcaactttttattaaatccctatgtttgcaaggcataattagcgatgttaggagaagttgatcttcattaataaactgatttgaggatggaaacgtctttagccaatcctttaaattcaataattgaaaaatacccaaagaagaagaagctctcaatagggaatagtcctccacccaatggtggtagagccaccaagaaagtgcaattcagggaaaaagatggggtgatgaaggtggaaattctaagatgcatcaaactgagaagcctttttctttttgggacaagctgatggatgcaaatttgggcaatgaaaccgtagagaaggatgttattgagattatggaggtggataatgacattagaagttctctgcttagacttaaaattgaactcgattgttgtttgggttgagcttttgacaaagatttttagcttcaaccccattctctctctatattttaattattgttaaattat

SEQ ID NO: 14632 - DNA, 638 bp, Gossypium hirsutum
  Clone ID: GOSHI-09MAY01-C14625_1
aaaaggttttcctctccttctctgattttctctgcatttttcttcgcccgatttcctatttctttttctttgaaatggataccaagattggatcacttgacaactgcaagcctgcttccaacgacgtttgctctccggtaaacggcaccgtttccaccattcaaggttccgtttaccccgccgttgtcaactgctctgaagccacactgggccgccacctggctaggcggcttgttcagatcggagtgaacgatgttttctctgttcccggggatttcaacttgactttgcttgaccatttgattgccgagcctgggcttaacctcatcggctgctgtaacgaactcaacgctgggtacgcggctgatggttatgctcgatcacgtggcgttggtgcctgcgttgtcacattcacccgtggtgggctcagcgttttgaatgccatcgccggtgcttacagtgagagtctccctcttatctgcattgtgggtggacccaactccaatgactatggaactaaccggattcttcaccacactgttggcttgccggattttagtcaagagctcagatgtttccagactgttacttgctatcaggctgtggttaataacttggaggatgctcatgacatgatc

SEQ ID NO: 14633 - DNA, 406 bp, Gossypium hirsutum
  unsure (1)..(406): unsure at all n locations
  Clone ID: LIB3083-060-Q1-L1-E2
gacaactgcaagcctgcttccaacgacgtttgctctccggtaaacgggaccgtttccaccattcaaggttccgtttcccccgccgttgtcaactgctctgaagccactctaggccgccacctggctaggcggcttgttcagatcggagtgaacgatgttttctctgttcccggngatttcaacttgactttgcttgaccatttgattgccgagcctgggcttaacctcatcggctgctgtaatgaactcaacgcttggtccccccttaatggttttcctcaaccacttgccgttgttccctgcgtggccccattaacggttgtgggcttaaccttttgaaatgcattggccgtgcctaccaggagaagcttccttttaatctgcttggtggaagaccccactttta

SEQ ID NO: 14634 - DNA, 873 bp, Gossypium hirsutum
  Clone ID: GOSHI-09MAY01-C14195_1
cccacgcgtctttttccttctcgctctctagggttttcgtggtcaagtaaaaaaaatgaaggtggtagctgcctacttgcttgccgtcttgggagggaacctttccccttctgccgatgatttgaaggatattctcggatctgttggagctgaggctgatgatgataggatagagttgctattgtccgaagtcaaaggcaaagatatcaccgagctaattgcatctggaagggagaagttggcttcagtcccttcaggtgggggtgctgttgctgctgctcctaccgcaggtggcggtggtgccagtgctgcaccagctgctgaggccaagaaagaggagaaggtcgaagagaaggaagagtccgatgatgatatgggtttcagcctcttcgattaagccaagtaatgcagatgtcaaggtttttcttatgcggttagtgcttttatttcaagcggtatatgattttgtatgtttgttactctctggtcgaaagttgtttctttatcaacctttaggttcgagttttctttggaaaatgtagttaaagataatccattcaagttgtaactttaattttggattaaaacaaattattatctatgttttatgtgtttggaaaacaaaaaaacaaactcatattaccacgacaatagtaaagaccaggtggccagtaaacgtatcaaataagcactaacaaaaacgaatcacaatcattgaaagataaaaatagaggggcgccccttttaggggcccagaattaccttccggctgatgtccctgaaaactcttttgtttagggcccccaaaattgaatctgctgccgcgggtatcacaaattcagacttggaaaaacccgggtgcctcccacttaa

SEQ ID NO: 14635 - DNA, 347 bp, Gossypium hirsutum
  Clone ID: uC-gsflnu33B022a06b1
gcaaagatatcaccgagctaattgcatctggatgggaagagttggcttcagtcccttcaggtgggggtgctgttgctgctgctcctaccgcaggtggcggtggtgccagtgctgtaccagctgctgaggccatgaaagaggagaaggtcgatgagaagtaagagtccgatgattatatgggtttcaatctttttcttttatcctctttctgctcatcttatcggtctctctattcgcagatatgcaatatataatcatgtattttttgattaatttatattatttttcatcttcctaatttcatcttttttattttattctttcctatttctctttttctattctta

SEQ ID NO: 14636 - DNA, 1266 bp, Gossypium hirsutum
  Clone ID: GOSHI-09MAY01-C14185_1
gagatggctattctgcccggccctgcgaaggcagtgaaaacaatgaagaaaggggagaaagtcctgttgactgtgaagccacaatatggatttggtgaggatggcaggcctgctacaggcggtgaatgtgctgttcctccaaatgctaccctccatataactctcgagttggtttcttggaagagtgtttctgatatcacaaaagacaaaaaggtctcgaaaaagattgtgaaagagggagagggttacgaacgaccaaatgatggaacagtggttcaagtgaaattaataggaaagctaccggatgggacgatcttcataaagaagggttacgatgaggagccgtttgagttcaagattgatgaagaacaagtaattgatggtcttgataaagctgtaaagaccatgaagaaaggagaaaacgcacttatcaccattcccccgcgtccggctttcggttcatccgaatcgcatcaagagttggctgtagttcctgcaaattcaactgtttattatgaggttgagatggtctcgtttgtgaaggagaaagaatcatgggaaatggatacaccgcaaaagatcgaagctgctgggaagaagaaagaagaagggaacgcactattcaaggctggtaaatttgagagagcatcaaaacgatatgagaaggctgttagcttcatagagtatgactcttctttcaacgatgaggagaagaaacaagcaaagttgctaaaagtaaattgtaaccttaacaatgcagcttccaaattgaagcacaaagattacaagcaggctgcaaaactgtgtactaaggtattggagcttgatagcgggaatgtgaaagcactctacaggagggctcaagcgtatattcaacttgttgacttggatttggcggaggctgatatcaaaaaggccttggagatcgaccctgataacagggatgtgaaattggagtaccgagtcttaaaagagaaaatcaaggagtacaacaagagggatgcgctattttacgtgcaacatattcgcagaaatgatcaagtcagcaggtaaacaagtagcagcacccatggccattgtcatcaaggcataacaatatgaaattgtcaccgcaatcctctattatcacgtatccatccttgatctgcttctatgacgatgctattaagaattgtgtaaggtcgggcctccatgatataatcataagatcatgcaatgcttctaataaacactcatatatacattgtctttatacttcacagaaaa

SEQ ID NO: 14637 - DNA, 475 bp, Gossypium hirsutum
  Clone ID: GOSHI-09MAY01-C14115_1
aaaacgcaagaaaaaaaaaagagaaataaagggaaacccccctttctctgctagggttccaagattgaaaccccgccgccgctatgcctccgtcgtccgatgatcggagccgtgcgaggacgccccccaacggcgccttgaagtgcgctcataagtcgaggccgcgaacaccgagacgagggggaagagaagagcttcggcccctccttgaacccacatccggcgacgatgaagttccatcggcggtgggcctaagggccgactcaggtggtctgatgcacgaccgacatgcgaggccggtgattggagagcaacggcggtggcgtgagcaggaggcgtgcggcgctggaagcctgggcgtgcggcgcttaggcctaaggtttctgtctggtccctaatctgctgggttaggggtttttttttaaaaatttgggcctggtgagtattttgggccacttattagtggacccttttt

SEQ ID NO: 14638 - DNA, 467 bp, Gossypium hirsutum
  Clone ID: LIB3189-025-P1-K1-F8
aaaaaagagaaataaagggaaacccccctttctctgctagggttccaagattgaaaccccgccgccgctatgcctccgtcgtccgatgatcggagccgtgcgaggacgccccccaacggcgccttgaagtgcgctcataagtcgaggccgcgaacaccgagacgagggggaagagaagagcttcggcccctccttgaacccacatccggcgacgatgaagttccatcggcggtgggcctaagggccgactcaggtggtctgatgcacgaccgacatgcgaggccggtgattggagagcaacggcggtggcgtgagcaggaggcgtgcggcgctggaagcctgggcgtgcggcgcttaggcctagggtttctgtcttgtccctaatctgctggcgtagggtttttttttaatacttttgattttgtttttattattctatttttatatttctttttttgttatatttt

SEQ ID NO: 14639 - DNA, 440 bp, Gossypium hirsutum
  Clone ID: LIB3145-035-Q1-K1-A3
ataaagggaaacccccctttctctgctagggttccaagattgaaaccccgccgccgctatgcctccgtcgtccgatgatcggagccgtgcgaggacgccccccaacggcgccttgaagtgcgctcataagtcgaggccgcgaacaccgagacgagggggaagagaagagcttcggcccctccttgaacccacatccggcgacgatgaagttccatcggcggtgggcctaagggccgactcaggtagtcttcttcttccctttaatcatattttgattattttttaaatcaatttgtagaaaagaaaaaaaaagaaaaagaaaagtaaataaaatagataaatatgcaaaagaaaaatccagagaaagcaattcaaatccacccttttttttaaatctgggttttctgcttttttaattctaatctctgggggtgtcgtac

SEQ ID NO: 14640 - DNA, 1365 bp, Gossypium hirsutum
  Clone ID: GOSHI-09MAY01-C14095_1
cccacgcgtcccccccgcccggagaattctacagaaggtgaaaaagaaagcgtttttttttctctgtaatttatgcaaacgggaaatctgccacaatctctctcgatgaattcgccttttggaggaccgagcgcgtcgaatccaactgctgccggagctccggcgaataaggatcggaaaatggcaacggctgagcatttagttctcgatctcagcaaccctgatctccgagaaaacgctcttctggaactatcgaagaagagagaattatttcaagatttggctccattgttgtggaattcttttggtactattgctgcacttttacaggagatagtttcaatttatcctgttctctcacctccaaatctgactccagctcaatcaaatcgagtttgtaatgctcttgctctgcttcagtgtgtagcttctcatccagacacaaggatgttattcctgaatgctcatatacccttgtatctgtatcctttccttaatacgaccagtaagtcaaggccgtttgagtatttgaggcttactagcttaggtgtcattggtgccttggtgaaggttgatgatactgaagttatcagcttcctcctgtccactgagataatcccattatgtctgcgcacaatggagatgggcagtgaactgtcgaaaacagttgctacttttatagttcagaagattctactagatgatgttggcttggactatatttgcaccactgcagagcggttttttgcagttggtcgagttctgggtaatatggttgcagcacttgctgagcagccctcttcgcgactactgaaacatattattcgatgttatcttcgtttgtcagataacccaagggcttgtgatgcattaagaagttgccttccggatatgctacgagatgccacctttagcagttgtcttcgtgaggatcaaaccactaggagatggctgcagcagttgcttcacaatgttggagtgaatcgagtgccaacgcttcaggccggtgcaggattcgatcacatgctggttaactgaatatcgtttgattttctttcgttcattcaaaactggtttcatctggcatggccatggagaaattcttcatggttttcatctaaactattattatcttttggtattttaatttaattagtagttgtaattagtgatttgctgtttgcccatagtagtacaggatagacttaagcctaaggactaagttcaaggatctcagtgttgttttatacatttatttagctggtttttaaatgcctaattaaatattaatgaggctgttcatctccccttatttgtcttggtgatctattatttgggttaattttttcgttgcccttctaagtg

SEQ ID NO: 14641 - DNA, 612 bp, Gossypium hirsutum
  Clone ID: AI726350.1
aaaagaattgaaatactctgttactctaagaccaaagactctcacgcgctgtgaaattcagtcggacagaagagcttctctcccattcgaaacaagaaaatagaaatctatacaaaagaaaactgcaattgatttttattggaataaattttcctatttctttaaatgaagcaaatgatgaatatgcctcaaaatctatcgatgaacgcgccttttgggctgcccagcacctcgaatccaacttccgccggagtgccggcgactaaggatcggaagatggcatcggcggagcatttggttctcgacctgagcaatcctgatctccgagaaagcgctcttctcgaactatcgaagaagagggaactatttcaagatttggctccgttgttgtggaattcttttggtactattgctgcactgctacaggagatagtttgtatttaccctgttctctcccctccaaatctaactcctgttcaatcaaatcgagtttgtaatgcccttgctctacttcagtgtgtagcttctcacccagacacaaggatgttattcctaaatgctcatatacccctgtatttgtatcctttccttaatacaacaagtaaatcgaag

SEQ ID NO: 14642 - DNA, 668 bp, Gossypium hirsutum
  unsure (1)..(668): unsure at all n locations
  Clone ID: LIB3543-065-Q6-K6-A11
ccccgcgtccgcccagcgtggtcccgctcggggcgtcgtacagnnaaagtgaaaaagaaagcgttttttttttctctgtaatttatgcaaacgggaaatctgccaccatatctctctcgagtgagattcgcccctttttgggagggacccgagccgccgtcgnaatccccaactgnnttgccggnagcctcccggcgggggggaggagtgcggaaaatggcaacggcagagcatttagttctcgatctcagcaaccctgatctccgagaaaacgcacttctggaactatcgaagaagagagaattatttcaagatttggctccattgttgtggaattcttttggtactattgctgcacttttacaggagatagtttcaatttatcctgttctctcacctccaaatctgactccagctcaatcaaatcgagtttgtaatgctcttgctctgcttcagtgtgtagcttctcatccagacacaaggatgttattcctgaatgctcatatacccttgtatctgtatcctttccttaatacgaccagtaagtcaaggccgtttgagtatttgaggcttactagcttangtgtcattggtgccttggtgaaggttgatgatactgaagttatcagcttcctcctgtccactgagataatcccattatgtctgcg

SEQ ID NO: 14643 - DNA, 630 bp, Gossypium hirsutum
  Clone ID: AI055623.1
gctggtctctcattcgaaacgagaaaacagaaatctgtacaaaagaaaaccgcaattgattttttttggaataaatttttcctatttctttaaatgaagcaaatgatgaatatgcctcaaaatctatcgatgaacgcgccttttgggctgcccagcacctcgaatccaacttccgccggagtgccggtgactaaggatcggaagatggcatcggcggagcatttggttctcgacctgagcaatcctgatctccgagaaaacgctcttctcgaactatcgaagaagagggaactatttcaagatttggctccgttgttgtggaattcttttggtactattgctgcacttttacaggagaatgttttttatttaccctggttcttttcccttccaaacttaattcccacatattcaaatggggtttgaaatgcccctgctttactttagagtgtgggtttttcacccggacacaaggatgtaattcctatatgctaatatacccgtgtatcttaatccttttcttaatacaacaggttaatcaggccattttgagattgaggcttactacttaaggtcattagggcttgggaagttgtggaactaagtataagtatctctttaactgaaaag

SEQ ID NO: 14644 - DNA, 473 bp, Gossypium hirsutum
  Clone ID: LIB3582-010-P1-K1-G7
cccacgcgtccgcggacgcgtgggccggagctccggcgaataaggatcggaaaatggcaacggcagagcatttagttctggatctcagcaaccctgatctccgagaaaacgcacttctggaactatcgaagaagagagaattatttcaagatttggctccattgttgtggaattcttttggtactattgctgcacttttacaggagatagtttcaatttatcctgttctctcacctccaaatctgactccagctcaatcaaatcgagtttgtaatgctcttgctctgcttcaggtgatatctttttgcccttttcctctgcttctcagattgaatttcacttgtctaatgttaactcattaatcataaacctaacgttgtcttgagtttgttttcatttttttctcttgttgaagggggaaaagatagtttttgtttattgttgtattggtcaattagaaggcattgctagtc

SEQ ID NO: 14645 - DNA, 746 bp, Gossypium hirsutum
  Clone ID: GOSHI-09MAY01-C14045_1
tgctaattcaactttgagtgcgcccacgcgtccgtgaaaatcaagaaggaaaaaaaacccttaaaatcaaaaccctaatcctatttttttttcctttttgattgtagaaaacaaagcaagccctcaactggacaacatggggtctgaacagaatcaaggaaccagctttcccccgtcggagccgaagctttgcgctaacggttgcgggtttttcggaacggcggcgaacatgaacctctgctccaagtgttaccgggacctccgtgctggggaggagcaagcggcgaaggcgaaagctgccatggagaaatcccttagcgtcaaaccgaaagaagatgttgttgtggagacgtttaagcccgttgagaagctgcctcatgcgggttcatcatcagcggcggttgagcaaccggcggtggctctctccggtgatgaacagcccgagccaaaattgtcgagcaggtgctttatctgcagaaagaagattggattgactgggtttaagtgccgatgcgggagtacgttctgtggggagcaccggtacccagaaaaacacgagtgctccttcgatttcaagggtactggacgcgatgcgattgccagtgcaaatcccgtcatcaaagctgacaaattggagaggttttgaaaggtggggagcttggagtcagtttgcctgaatcgtgttcttcaatgggtttgccttcttttttgccctctcaactttttgagagttatattaggtttta

SEQ ID NO: 14646 - DNA, 564 bp, Gossypium hirsutum
  Clone ID: GOSHI-09MAY01-C14075_1
cgctttttaagaaactgacctaaaacctcaccgtctattgagagtctgcacgcttcgacccttccgctttcaaaaaattttcaacacacaaaattggttttaacaattaaacacaatctaaagcgagtgttggttgcagccgctgcacggtttcgtggctgatcctctcttctctcaaatctttgttgctgtggttgattgcccttctatcaggatggctggacctgcaccattcgttgatctggggaaaaaagccaaagacctcctgacaaaagattacaactttgaccagaagtttactctttcaatgctgagcaccacgggaatgggacttacagccacaggactcaagaaggaccaaaatttttttggtgacataaatactgtgttttagagtggaagttcttctgtggatatgtaagttggtacctattcttatgtgtctcctaaagtgactgtcaatgatgtctggccatgttccaaagctgctctaagtttcaggatacctgatcacaagtctggcaagttggatgtccaatatcttcatcctcatgctgccattgg

SEQ ID NO: 14647 - DNA, 764 bp, Gossypium hirsutum
  Clone ID: GOSHI-09MAY01-C14015_1
ttcacgcgtccgctagaaatccacctccagcctctccctccctaacatcaaactgatctctgcgagcgaagtcacctccagcctctccctcctcaaaacacgcttttaagtttctctcttccgccaccgtcttcttcatcatcttcccctctttctttattttttttaatttcaacacctaacatacatgtttcatttcgcagaagccatctttatctgtttctcatgtgactctgaagcctcattctttccttcaacgtacccaagacaatactgctgatgttttggaatttaagttgaaggagctctcagccgtccattcgaaatccccttccgttcatcaattctctgtcgccttcaccaagacactgacccctctctttcaaattctaaagtgaaccgccaccgtgcaacgggttgtatgctttgtttcagcaaggtcctgccccgagatcccaacgacacttacgctagtaatgagttattggaggaatttttgaagttccttttggttgcagctactgcagctaatacaaccgcatgattagagcttgccaaatcatttacgagataagctcttttaaattctggctatattctttaaaatctgttttagcgatttgatttttaggaattatagatagtgctatattgcttgtatttcgattaatgaggtactaatactttcgtttaatggattttaagcagcatattgctgtatctcgatctcattattggagcagttttatcaactgatgccacta

SEQ ID NO: 14648 - DNA, 269 bp, Gossypium hirsutum
  Clone ID: LIB3189-023-P1-K1-F9
cggacgcgtgggtttttttttaatttcaacacctaacatacatgtttcatttcacaaaagccatgtttttctgtttctcatgtgactctgaagcctccttctttccttcaacgtacgcaagctgaaggagctctcagccgtccgttcgaaatccccttccattcatcaattctctgtcgccttcaccaagacactgacccctctctttcaaattctaaagcgaactgccaccgttgaacggtttgtgcgctttgtttcagcaaggtcct

SEQ ID NO: 14649 - DNA, 639 bp, Gossypium hirsutum
  Clone ID: GOSHI-09MAY01-C14395_1
ctttcagctcagctttttcagacttttgatttcccctggctgctaaagctttttcaagaagtataactcctttggtgcttttgttcatatttttaagctttgcacaaggtaaagaaatcatggttggtggcaaaacaggcgcttggaagataccttcttctgaatcagattctctcaacaaatgggctgaaaaagctcgtttccaaatcggcgactctctcgtgtggaaatatgatggtggtaaagactcggtgctccaagtgagtaaggaggattatacaagttgcaatacgtcgaacccgattgccgagtacaaagatgggaacaccaaggtgaagcttgaaaagtcaggaccatatttcttcatgagtggagcaaagggccactgcgagcaaggccagaagatgattgtggttgtgatgtctcaaaagcataggtacattggaatctctccagcaccttcgccggttgattttgaaggtccggccgttgctccaacaagcggagttgcagggttgaaggctggtttgttggtgacagtgggggttttggggttgttttgagtttgatatccattagattattttatatgtagttgagttgctatagaaatagcaaattcatttttatttattggtt

SEQ ID NO: 14650 - DNA, 657 bp, Gossypium hirsutum
  Clone ID: GOSHI-09MAY01-C14385_1
ctcttccagacccccccccccccggcccaaaagataaaaaaaacaaaaacaaaaatctctttgccttttttgatgaatttctcgattgatgatcattagcagaaggtaatcctttcatgaatttttcttctttttcttcaatacgatgatcaaaatcatttgttcaagtttttgcagctttcccattattcttctttagattgtcaaacagtacaataaaagttgaaaatttccctttttagatcttgttgaggattttaattgattttatgggccttcgctgaatttcggtcgtgattagatatgggattctagagctttggaggattcttgggatatttatatgataataggtcataaatttttagtccaccccagtttctcggtactttttccgtttggtttgtaagaagaaggtaggtgttaaaacttatagctttttagggtttttttcctgggtgatctaagagagaaacttggtttgattgaccgcaactaattgaatcgggtctgtgaggttgggtttctgttttattgaatattccagcaatagataaacaatggaactttaagctttttcctgcaaggaaacgataagttgggtgtttggatttcggcgtagatggatgattcgggtttggaatgcggatttttatc

SEQ ID NO: 14651 - DNA, 567 bp, Gossypium hirsutum
  Clone ID: GOSHI-09MAY01-C14345_3
cccacgcgtacggccacgcgtccgaccacgttttcgtacatattaaatcgagaggagaaccaatgcgttgcttgcccgtcaacaaaacggattactcggttggagccaagaattgtcagccgaagaaggtgaattgtaggccgaatggtttcagcttctacaagctagaaggagttgaccatttcatgagccagtacaacgaaggagaagggataaaggagagtgattgtgggaggaaatgcacctctgattgcacgtgcttggggtacttttaccacagggaaacatccaaatgttggatcgctaatgagttgaaaacccttgctagaacctctaactcttcccatgttggttacataaaggcacccaacaagtgacgggaatcctattaaggatttgcaccttttcctctgcattttccagcttcttttttgtctgctaataagtagttgtgagtttgagttacatattaaaagtaattaaagtttgtttacaattatctattaatgtatatgtagtcaataaactgaatttaaaatatatttcctggattcagttcaagttttc

SEQ ID NO: 14652 - DNA, 1476 bp, Gossypium hirsutum
  Clone ID: GOSHI-09MAY01-C14345_1
ccccaacaatgtctcttcactcttctctcaccatgtcattgctgtctttctccttcttgttgctgtttacttttagtgccaaagctgttgttcctccatctgaaacttttaggtttgtcaacgacggagaatttgggccgtttgttgttgaatatgatgcaaattaccgtgtcataagcatagctaatgcccccttccagcttgcgttttataacaccacccctaatgccttcacccttgcgttacgcatggctacaacgcgttccgagtcgctcttccgatgggtttgggaggccaacagggggaaccctgttcgcgagaacgccacgttctctctcgggactgacgggaaccttgtcttggctgatgccgatggtcggattgcttggcaaagtaacactgccaacaaaggtgtggtagggttccaattgttgcctaatggtaacatggtgttacacgattccaatggcaagttcatttggcaaagttttgatcatccaactgatacactcttggtgggtcagtcgcttagaatcggaggggcgacgaagcttgtgagccgggcttctgctcaaaacaatgttgacggagcctatagcttggtgatggagcctaaacagttggttttgcagtacaagggaatgaaccctcctctgccacttgtctacttcaaatcatctgtttggccaagtacacaagatggtactttacaaactgtgacactaaatgttgaggaaacaaatgatggctttgcttattacgttttgttagactacacagtggctaactcgtccatcgggaccggaaatctcatcttgacaaggccgaaatacaacagcacattgtcgattcttcgactcgggatcgatggaaacctgagggtttttacctactatgacaaggttgattcacaggcatgggaagagactttcactctcttctctagggactcaatatggggcactgaatgcgaactgccggagaggtgtgggaactttggactctgtgaggagaaccaatgcgttgcttgcccgtcaacaaacggattactcggttggagccagaattgtcagccgaagaaggtgaattgtaggccgaatggtttcagctactacaagctagaaggagttgaccatttcatgagccagtacaacgaaggagaagggataaaggagagtgattgtgggaggaaatgcacctctgattgcaagtgtttggggtacttttaccacagggaaacatccaaatgttggatcgctaatgagttgaaaacccttgctaaaacctctaactcttcccatgttggttatataaaggcacccaacaagtgacgggaatcctattaagtatttgtactttttcctctgtattttccagtttctttattgtaagctaataagtatttgtaagtttgaattacaaattaaagttttatttaaaaaaaaaaaaaaaaaaaaaagaaaaaaaagggggggg

SEQ ID NO: 14653 - DNA, 631 bp, Gossypium hirsutum
  unsure (1)..(631): unsure at all n locations
  Clone ID: AI054542.1
cataagcatagctaatgcccccttccagcttgcgttttataacaccacccctaatgccttcacccttgcgttacgcatggctacaacgcgttcggagtcgctcttccgatgggtttgggaggccaacagggggaaccctgttcgcgagaacgccacgttctctctcgggactgacgggaaccttgtcttggctgatgccgatggtcggattgcttggcaaagtaacactgccaacaaaggtgtggtagggttccaattgttgcctaatggtaacatggtgttacacgattccaatggcaagttcatttggcaaagttntgatcatccaactgatacactcttggtgggtcaatccgttaaagaccgaagggccaacaaacttggaaagtcgggcttttgctcaaaccattgtcaacgaagcctatacttggtgatggagcctaaacgttgttttgcagtacaggggatgaactctcctaaccacttgtctatntcaaatatccgtttggccaagtcacagatgtacttacaactggacactaatgtcgaggaacnatgatggttgttatacgtntgtagactccagcgctactcncatcggaccgaattatttgtaggcgaattacaccat

SEQ ID NO: 14654 - DNA, 279 bp, Gossypium hirsutum
  Clone ID: LIB3272-046-P1-K1-F7
acgcggacacgtggtctcaaaacaatgttgacggatcctatatcttaatgggtggacctaaacagttggttttgcagtacaaggtaatcaactctactaaaccacttgtctatttcaaatcatctgtttggccaaatacacaagatggtactttacaaactgtgacactaaattttgacgaaacaaataatggctttgcttataacgatgtgttagactacacacgggctaactctttcatttttactccaaactttatcttgacaaggccgaaataca

SEQ ID NO: 14655 - DNA, 466 bp, Gossypium hirsutum
  Clone ID: GOSHI-09MAY01-C14305_1
cacgcgtccgcccacgcgtccgctctttatggctgacatggatggttcttctgttgattctaaagaggaatccagtgaagattccaagcttgacttctcagaagatgaggaaaccctcattattagaatgttcaatttggttggagaaaggtggtctttgatagcagggagaatccctggaagaacagctgaggagattcagaagtattgggcttctagattctcttacaataatccaatgcccaatctgagttaggattacatccaagtgtttgggttttgcattgggtgattgtttcagttttggtttgcagcgtatatatatatataaaagcaaatgcctgggttttgtacaatgcctcatgggtgctaattgctttagtatgataattccgaggttgatttctctttttctttttgaaattatcttcacttttggtgttaatattatgaatttcttgattgc

SEQ ID NO: 14656 - DNA, 600 bp, Gossypium hirsutum
  Clone ID: GOSHI-09MAY01-C14335_1
cccggttcgacccagcgttcgtacaactctcctagttctccctcaggaccactagctcgaggaacaagacaagcaagtccagatcgatcgaagttcttatttaacgaagtacatggttgagttaggcattcaaatcccaactacttttgatccttttgcggaggccgaggaattcggaagaacaggaaccaaagactatgttcatatccgaatccaacagagaaatggcaggaaaagcttgacaactgttgaaggtctgaaacaagaactgagttccgataagatccttaagtctcttaaaaaggagttctgctgtaacgggaatgttgtgcacgacaaagagctgggcaaaatcattcaattacaaggtgatcagcggaagaaagtagcacacttccttgttaatgctggaatagtgaagaaagagcaaatcaagattcatggtttttgagtggttttagggatgtcatgtcttttgattttaatacctctggtctgtgggaagaaccctaatggaatatgatgttggagtttcagtttcatttataataaataatggatcatttatttgctttcaaaaaaaaaaaaaaaagggcggcc

SEQ ID NO: 14657 - DNA, 536 bp, Gossypium hirsutum
  Clone ID: LIB3825-028-Q6-K6-F6
ccggattcggtcgcccacgtccacacttctattctttcagacactgtcgagacagacagcagtcaatgacgagttcttattacgaatacatggttgagttaggcttcaaatcacacttttgtccttttgggagccgggaattcggagaacagaccaagacttgttcatatccgatccaacagagaaaggcaggaaaagcttgacaactgttgaaggtctgaaacaagaactgagttccgataagatccttaagtctcttaaaaaggagttctgctgtaacgggaatgttgtgcacgacaaagagctgggcaaaatcattcaattacaaggtgatcagcggaagaaagtagcacacttccttgttaatgctggaatagtgaagaaagagcaaatcaagattcatggtttttgagtggttttagggatgtcatgtcttttgattttaatacctctggtctgtgggaagaaccctaatggaatatgatgttggagtttcagtttcatttataataaataatggtcatttatttgcttta

SEQ ID NO: 14658 - DNA, 445 bp, Gossypium hirsutum
  unsure (1)..(445): unsure at all n locations
  Clone ID: LIB3189-034-P1-K1-E4
ngnncaantnnnttttcactacattactatttatattccaatttcttctcaagtactttattaactaaaggacgggggtgtgagtttggcaattcaagatcctcaaccaaccttttgatctctttttgcggaaggccgagggaattctgtgaagaacacggaacccaaaagactattgttcatatctcgaatccaaccagagaaatggcgaggaaaaggcttgacaacctgttgaaaggtctgaaactaagaactgaagttccgataatgatccttaagtcttcttaaaaaggagtntctgctgtaacgggaatgttgtgcacgacaaagagctgggcaaaatcattcaattacaaggtgatcagcggaagaaagtagcacaccttcttgttaatgctggaatagtgaagaaagagcaaatcaagattcatggtgtttgagtggt

SEQ ID NO: 14659 - DNA, 589 bp, Gossypium hirsutum
  Clone ID: GOSHI-09MAY01-C14285_1
gtgaagggaaaagccctagccagctctgaagttaaatggaagccttagctgctgaacatttagagagaatctgtattgtttcgtcctgtatttagctaaaagggatagtattcttagcagttcgggttttgaagtattcatagcgttttagctttgcaatttctgaaaatggttggaaatacattagtccagattccagcatgcccgtctttgtcatcttcaactttgaccaccctcccgcattcttctccaaaagttttgccatgtcttccgcctaaactaagaatgaggttggcaaaagttagagctatgtctgctagtactgagcataacccacaaccccggtcttcggagcaaaagaatccgcttgctgttgttttagatattcctcggaatatttggagacaaacattacgtccattgagtgattttgggtttggtcgtaaaacatttgggaaggtggggttgggttgtttcttgtgtcaggtactgtgctgcttgcacttattctggcttggttgaaaaggtttcaaattcgttctaaattccggaagtacgtacggtgtttgaatttgctcaggcatctggt

SEQ ID NO: 14660 - DNA, 897 bp, Gossypium hirsutum
  Clone ID: GOSHI-09MAY01-C14245_1
gatcaatgctactaatggaactgctggtgcatttgatgtcacaaccaagggaattcttcattcagctctggaaagatgtgagtattggagattatcggataagaaggggaagcctcctggggttgttggatggtggccatctcgtgctgttacctttatagagaatcatgacactggttctacccagggtcattggaggttcccaggtggaaaggaaatggaaggatatgcttatatcttgactcacccaggaacgccggctgtgttctacgatcatattttctctcatcatcgatctgagattgccagccttatctctgtcagaaacagaaacggaatccattgccggagtttagttaaaatcgtcaaggcagagagggatgtgtatgctgcaattattgatgaaaaggttgcgatgaagatcggaccaggttattacgagcctcctagtggttcccaaagatggtccttggcccttgaagggagggattacaaggtatgggaaacatcttaaatgtaaaaccattgatattatttatgtttccaaatgtgtatatcctatacggatgccaaccatcaagttgaagaatgtcgaaccagtgtcttgtttgttggggatagcaggaagggtgtaggccctcactgataatactgtttgccagtgccattgttgtaccattttttactcagaaatacataggagtgattgattaagggcaaggctagaccaggtgattattggagccagttagctaatgtcgaaggaaaggtatcctttccatactatagtttatgtgtaaatgctttacgagtgtggagattaaacactggaaggccgatttcttgccttctacaaataggatacatatattgtattcttattggttttttctgttc

SEQ ID NO: 14661 - DNA, 798 bp, Gossypium hirsutum
  Clone ID: GOSHI-09MAY01-C14275_1
cccacgcgtccgcccacgcgtccgcggccgcgaaagttccaaagcttccaaatggttctcaagcaagacccttaggttaagccttcaccgccgtcgatccaagtcttctagctcctccaccctcacctctcctgcttcatcaccatcctctcctcgtgaaagacccaaaaggcctcaccaagtggacgagatgaaacaagtgtttcgctatttcgatggcgatgatgatgggaaaatctcggctctcgaacttagggcatacttcggctccatcggggagtacatgtcacatgaagatgctcaaatggtgatcaacgaactagattccgacggggatagcatgttggactatgaagatttcttgaagctaatgaaaatagaaaagcgggatgatgatgatgatgatgatgacctgaagaaagcgttcgagatgttcgagttggagaaaggttcgggttgcataactcccaaagggttgcaaaagatgttgaatcgccttggggatgcaaagtcttatgatgaatgtgtcgctatgattcaggtttatgatattgatggtaatggggtgcttgattttcatgagttccaccaaatgatggcttaatttgataggacactcgtacctttaatttgtgcttaagcaaatatcaatattaagggactcccccccttagttattattaacagctatgaatgtaccaactacttaatttagtggcaaaaatactaagttgcgaagcatgaggttcaattctaaacaatttcatctattattatttgaaaaaatgtcgaatttat

SEQ ID NO: 14662 - DNA, 434 bp, Gossypium hirsutum
  Clone ID: LIB3148-018-Q1-K1-A2
ccggaccggaagggccgagccgagcgacccgtccgactgtgaacgtaacgcatactatggctccatcggggagtacatgtcacatgaaaatgcgtgaggggtgatcaacggactagattgccacagggatagcatgttggactatgaagatttcttgaagctaatgaaaatagaaaagcgggatgatgatgatgatgatgatgacctgaagaaagcgttcgagatgttcgagttggagaaaggctcgggttgcataactcccaaagggttgcaaaagatgttgaatcgccttggggatgcaaagtcttatgatgaatgtgtcgctatgattcaggtttatgatattgatggtaatggggtgcttgattttcatgagttccaccaaatgatggcttaatttgataggacactcgtacctttaatttgtgcttaag

SEQ ID NO: 14663 - DNA, 342 bp, Gossypium hirsutum
  unsure (1)..(342): unsure at all n locations
  Clone ID: LIB3189-032-P1-K1-H6
agccgtcaggaaggaggcagcggatcaacctccgaagcctccccatgaaaagacaatggagagcactaatggtggcacagcttgcaaatagtaatcaagcgagaccattaggttgagcgtctaccgccgaagatccaagtcttgtagatgctccacccttagagctnctgattcatcaccatgctgtgctcgtgaaagacccaaaacgcctcaccgagtggacgagatgaaacaagtgcctcgctatttcgatggcgacgatgatgggaaaatctcggctctcgaacttagggcatacttcggctccatcggggagtacatgtcacatgaagatgctaaaat

SEQ ID NO: 14664 - DNA, 629 bp, Gossypium hirsutum
  Clone ID: GOSHI-09MAY01-C14235_1
caaaagcaaagatgaggcctctagacgagaaagaaaccaccgccgttttcgaaaaaatctttaaattcaccgggaacaacctgaagaacatagtcgagaacccatctcatgaaggacccgacaaggaacccggtcgctattgtttcaggctacacaaaaacaaggtctactacgtcagcgactccctcgtcaaacgagccactaacgtcgccagaaccaagctggcttccattggaacctgcgtaggtaggttcacccacggtggcaacttccatctgaccatcgaatgcttaaacctcttggctgctaacgccaagcgcaaggtttggctgaaacccacgtcggagatgtcgtttctttacgcgaatcacgttttgaaaggtgggctagggaggataacggagagcatcgcgcctggtgatggggttgtggttttttccatgtcggatttgcctttggggtttggggttgcggcgaaaattacacaggattgtagaaattaaatcctaatgccattgtcgtgcttcatcaggctgatattggggagtatttgaggatggagaatcagcatgagcaaataattgaagattaaatcgggtacggggatacgagcgtcatcaaactcagtc

SEQ ID NO: 14665 - DNA, 482 bp, Gossypium hirsutum
  Clone ID: GOSHI-09MAY01-C15945_1
atggcccgggcggcgggcgcaggcccctgcggcggcggcggcgggatgtttgtgcaggaggagaagatcttcgcgggcaaggtgctgcggctgcacatctgcgcgtccgacggcgccgagtggctggaggaggccaccgaggacacctcggtggagaagctcaaggagcgctgcctcaagcactgtgctcatgggagcttagaagatcccaaaagtataacccatcataaattaatccacgctgcctcagagagggtgctgagtgatgccaggaccatcctggaagagaacatccaggaccaagacgtcctattattgataaaaaagcgtgctccatcaccacttcccaagatggctgaggtctcagcagaagaaaagaaaaaacaagaccagaaagctccagataaagaggccatactccgggccaccgcaacctgcccttctacaacatggaccgggccgcggtccataccaacatgaga

SEQ ID NO: 14666 - DNA, 615 bp, Gossypium hirsutum
  Clone ID: GOSHI-09MAY01-C15965_1
cttttctttataccagtccctacttgggccaacgcccgcaacatttggagagatgcgtcaggtccctcacaaaacctaccattattatcacccagagtcaaagggtctagattttgcagcaatgatagatgacattaagaatgctccaaatggctcattctttctacttcatgcatgtgctcataaccccactggcgtggatccttcagaggagcagtggagagaaatctcacaccacatcaaggcgaaaggtcattttgccttctttgacatggcgtatcaaggctttgctagcggtgacccagagaaagatgcaaacgccatcaggatttttcttgaggatggtcatcacataggaattgcacaatcatatgcaaaaaacatgggactctatggccagagggtaggatgcctcagtgtgctttgtgaagatgaaaaacaagcagtagctgtaaaaagtcaactgcaacagcttgcgagacctatgtacagcaacccacctgttcatggtgctctcatagtttcaaccattcttagtgatccagacttgaagaaacaatggctgaaagaagtaaggtcatggctgatcgcataaattgaatgcgaactgcttta

SEQ ID NO: 14667 - DNA, 1045 bp, Gossypium hirsutum
  Clone ID: GOSHI-09MAY01-C15895_1
ttcttttttcaatctctcgcaatcccttaccctaagatacacaccctaatgcgaatggcgacccgaattcgatttttctcatacaatcatattatgtgtgtcaatcaaatctcacactctcttcttacattctgcaaagagaaaaaagagagagctaatggggttcaattttgagagagaaaaacatttaatgtcaacgaatatctgctaagaaacaaattatgctcaatctttatcaggtcgcgagaggttttagcgagggaagctataaaccactcttttaaggcgctaaagacgcggcttttaattgaagaaggagctcatgctcctgcttatattgctctttacaggcctatcatctcccagggttcggaatggaaagagaaagcagaaaacttggaaatggtacttcaacaatgttacaaagcacagtctagattgtccgagcaactagtggttgaagtagctgaatctcgagctttaaaagcttctctacaagagaaagaaatggctattgccgaattggagaaggaattgaaccaaaccagggatgagtgctctcagctaaagacagatttagaagaaaaaattcgagctttggaattgttgatggtcgagcatcaagaactgaaagctcaattagaacaaatggctattaaagctaaaaacgcagaggctgaaataagatgttagttgatcgttggatgcttcaaaatgcaggatgctgaacggcttaacgaggcaaatgcgcttacgaagatatgattgagcggctaaggcgcatggtttagaaaaacttgcccgagaacaagtggatggtattgtccgtagaagcgaagacggtgctgagttctttgcggaatcaaccgttccttctgtttgctcacacaagatcaatgcacatgataggtgtggtgcttccatactgtttgagtacaatttccgccaaattgatcagtgggacagggatcatcagtcaaatgtgggattccggtaccggatctttacccataaactttcggttgctttgtaatccctgactgca

SEQ ID NO: 14668 - DNA, 635 bp, Gossypium hirsutum
  unsure (1)..(635): unsure at all n locations
  Clone ID: AI054527.1
gaagctataaaccacgcttttaaggcgctaaagaaacggcatttaattgaagaaggagctcatgctcctgcttatattgctctttccaggcctatcatctcccagggttcggaatggaaagagaaagcagaaaacttggaaatggaacttcaacaatgttacaaagcacagtctagattgtccgagcaactagtggttgaagtatctgaatctcgagctttaaaagcttctctacaagagaaagaaatggctattgccgaattggagaaggaattgaaccaaaccagggatgagtgctctcagctaaagacagatttagaagaaaaaattcgagctttggaattgttgatggtcgagcttcaagaactgaaagctcatttagaacaaatggctattaaagcctaaaacgcanaggctgaaaataagatgttagttgaacggtggatgcttcaaaaaatgcaggatgctgaacggtttaacaagcaatgccctttacgagaattaatggacggttaaggcatngtttaaaaacttggcgagacaagggagggtttcccttaacaaaaaggttaagttttggataacggcctttgtgtacaaggaaagccatagggtgggtcaaacgtggcaatccc

SEQ ID NO: 14669 - DNA, 779 bp, Gossypium hirsutum
  Clone ID: GOSHI-09MAY01-C15885_1
gataagttgactctctccttcttattccttctgaagtaatgagatgtgcaaccttattagcatccctatttgtgaaaaggaaaacacaagtctggaaacccagacttagttttttagaatcatgtatatacacagcaacctctgatctatcctcatgctccatctgcggcttacgaattaccgtccgggagtcaccctcgatctccacctctttcaagccaagatgtaaaccaagttgcagcgcataaagacacgccaccgcttctgcagcaaaggcggatgttgtttgttgaaagcggcatcgaaattaattttttgtctcgatccaaccggaccaacccaacttcctacacagagacgttcaacaggacattcgtagaacaagtgttccctcgattccacaccgttttggcaccaactacagtagcagatcctctcaatctccgatattgtaggttactgaaagcagggaagaaattacgtgaaacacgccaaactgtaatctttattttagagggtagatctaagttccatagctttttgtaaaattgtttgtaatttgtctgtaagtcattctgatcattgtataagagaagtttatgcctactctgcaccgaatattctccagtcggctcaccccgccaaataacaaagtcctcatgctcatacaaagacaaaggaatgcatagaatttgctccacttcctgctccgagaagggatccaagcgtcttcccaaatagagacatgcttgccatttctaatcccccagcccaaacct

SEQ ID NO: 14670 - DNA, 559 bp, Gossypium hirsutum
  unsure (1)..(559): unsure at all n locations
  Clone ID: LIB3582-029-P1-K1-E5
cccagacttagttttttagaatcatttatatacacagcaacctctgatctatcctcatgctccatttgcagcttacgaattaccgtccgggagtcaccctcgatctccacctctttcaagccaagatgtaaaccaagttgcagcgcataaagacacgccaccgcttctgcagcaaaggcggatgttgtttgttgaaagcggcatcgaaattaattttttgtctcgatccaaccggaccaacccaacttcctacacagagacgttcaacaggacattcgtagaacaagtgttccctcgattccacaccgttttggcaccaactacagtagcagatcctctcaatctccgatattgtaggttactgaaagcagggaagaaattacgtgaaacacgccaaactgtaatctttattttagaggtcggctcaccccgccaaataacaaagtcctcatgctcatacaaagacaaaggaatgcatagaanttgctccacttnctgctccgagaagggatccaagcgtcttcccaaatagagacatgctngccattactaatccccc

SEQ ID NO: 14671 - DNA, 363 bp, Gossypium hirsutum
  Clone ID: LIB3135-034-Q1-K1-B2
agaagcacatcccctcagtcgccgatattgtaggttactgaaagtaggaagaaaattgcgtgaaacacgccaagctgtaatctttattttagagggtagatctaagttccatagctttttgtaaaattgtttgtaatttgtctttaagtcattttgatcattgtgtaagagaagtttatggtcactccgcaccgaatattcctcagtcggcttaccccgtcagataataaggtcatcattctcgtacaacgacagaggtatgcatagaattcgcttctgcttctgctctgaaaagatgtatgctgaacttgggaattctcattcccaaggatccatgcgtcttttcaaaatggagacatgttt

SEQ ID NO: 14672 - DNA, 580 bp, Gossypium hirsutum
  Clone ID: GOSHI-09MAY01-C15865_3
tccgccacgctttatgtctcttcggcggacacttcttcggccccggtggcggttgtacaagggggggtcacatcggcactctaatggctgaaaacaagtataacctcaagaatccggcggcgaagaggatcttacaagaggtcaaggagttgcaatccagtccctccgatgatttcacgagcctccctctcgaggagaatatatttgaatggcaattcgcacttaggggtcccagggattctgaatttgagggagggatttatcatggaaggatccaattacctgctgagtatccatttaagcccccttcatttatgttgctgactccaaatgggcgttttgaaacccagacgaaaatttgcttaagtatatcgaatcaccacccggagcattggcagccatcttggaatgtgcggaccgttctagtggcactgatagctttcatgcccccaacccaagggggctttaggttctctagtatttagaaggggaaaacctccgtttttttcccaaaaacaattttgggaattcttcaccccaagattgggggaacctcttaagcccccaaaaaatttttttt

SEQ ID NO: 14673 - DNA, 576 bp, Gossypium hirsutum
  Clone ID: GOSHI-09MAY01-C15865_2
caaattccgtcccctttttatagagagacactcgaaacaaaattatacgtatttatatacggaggtgatagcggcggcgctggtggcggttgtacaatcggaattcagatcggcaatctaatggctgaagacaagtataacctcaagaatccggcggtgaagaggatcttacaagaggttaaggaattgcaatccaatccttccgatgatttcatgagcctaccactcgaggagaatatatttgaatggcaattcgcaattaggggtccaagggattctgaatttgaaggagggatttatcatggaaggattcaattgcctgctgagtatccatttaagcccccttcatttatgttgctcaccccaaatggacgtttcgaaacgcagactaagatttgcttgagtatatcgaatcaccacccggagcattggcaaccatcttggactgtgcggactgctctagtggcattgattgcattcatgcccaccagcccaaacggtgccttaggttctctagattatactaaggaagagcggcgtacccttgctgtcaaatctcgtgaatcaccacctaac

SEQ ID NO: 14674 - DNA, 1164 bp, Gossypium hirsutum
  Clone ID: GOSHI-09MAY01-C15865_1
ctctctctctctctctctggtgaaacactcgaaaatacgtatttaaatacgtacggacgggttactcagcagatcgtaacggaggtggtagcggcggcggcggttggatatttgatcagatcgtgatccaaatggctgaggacaagtataacctcaagaatccggcggtgaagaggatattacaagaggtcaaggagatgcaatccaatccctctgatgatttcacgagcctccctcttgaggagaatatatttgaatggcaatttgcaattaggggtcccagggattctgaatttgagggagggatttatcatggaaggatccaattacctgctgagtatccatttaagcccccttcatttatgttgctgactccaaatgggcgttttgaaacccagacgaaaatttgcttaagtatatcgaatcaccacccggagcattggcagccatcttggagtgtgcggaccgctctagtggcactgatagctttcatgcccaccaacccaaatggtgctttaggttctctagattatacgaaggaagagcggcgtgcccttgccgtcaaatctcgtgaatctccacccaaatacgggaatcctgaacgccagaaacttatcgatgagatacatgaatatatgttaagcaagactcccagtgttcctcaacatagtccttcaaaatcctcagaagaacaccctaccgaagccaaaactgaagccgaggcagaggccaatcagcaagattccgttactgtgggtgccgggaatcccggaatccctaatccaacattaaatgaaagggttgtcgaagaaccacctgtggctcccgccaatgcttatccatatcctgttgccatgaggctagtgagagagatccctggtgagggaccaagtaaccaaccactacgaaggccggagataagggttcaacgatccgttgttgatgaccgcttatttacgtgggctgccgtcggacttaccattgctattttggttcttttgttcaagaaatacatcaaatctagtggacatggtgctgttttcatggatgggtcatagttctagcaacatcagctcatttgggaagaaagaattccatcagtatatgtgtttaaatcttagcatgggattaatttgaaagtataatattcagctttttgtaatt

SEQ ID NO: 14675 - DNA, 598 bp, Gossypium hirsutum
  Clone ID: GOSHI-09MAY01-C15805_1
ggaatggtgatccatgtgctcctactgattgggatgcttgggaaggagttacatgtcatactaacaagaatggaactggccttgtcattactcaaatagaacttggaagtcaaggcctgaagggttatatcagtgagcagattagtctcctgtcaaacttgattaatctgaacttgagtactaattctttggatggcacgctaccaattgggcttggacgagaaatcccttgcacgactggatttgtccgataatcaattctctggctccataccggaaagtttaacatcttcaaatctgcagcttgtgaggcttaacaataacttattggaagggagaagttccggaagaactttactctgttggtgtgcacggagggactattgatctttctggtaacaaagggcttgtgtggagttccccctttaccggattgtccccttttttgggagaatggtcgcttgtcgaaaggtggtaaaattgcaataggcctatcatgcttcctttttgttgctgtgctgctgctggtgatctacatattctgtatcagcgggtagaaatgattatgattttggtttaccttcagatttaatatcac

SEQ ID NO: 14676 - DNA, 860 bp, Gossypium hirsutum
  Clone ID: GOSHI-09MAY01-C15835_1
ttatttatttattttaaaattggcggactgttatgttgctgccctattaaaactggagtgtgggttggtgcaaagagagacggggtactgaaagaatgagcccttcaatgaaggaaacatcattagaaacaatggagaaaaagggagaggatgttaatgggataatgaagaaggagcaagataagttgttcgatccaagtgaagcccctcctttccgtattaatgatatccgagctgctattccaaagcactgctgggtcaagaacccttggaggtctatgagttatgttttcagggacgccattgtcatctctgcactcttagcagctgcactttatttccgtagctggttcttttggcctttctactgggttgcccaagggaccatgttttgggctctctttgtccttggacatgattgtggacatggaagcttctctgataatcccatacttaataacgtgatgggacatatcttacattctaccatccttgttccttaccatggatggagaataagccatagaactcaccatcaaaaccatggaaatgtggagaaggatgagtcttgggttccgatgtccgaagatctttataatagtttgagcagcaggaccaagtttctgagattcaaaatcccattccccctatttgcataccctgtctatttgtggcacagaagtccaggaaagacaggatctcccttcaacccatacagcaacttgtttgctccccaagaacggaaacatataatgacatcaacaacctgttggatagcaatggtggttttccttgtgtatttatcctttgtaatcgggccatccatgacattcaagctctacggcgttccctacttgatt

SEQ ID NO: 14677 - DNA, 385 bp, Gossypium hirsutum
  Clone ID: LIB3197-029-Q1-M1-E4
gaaagaatgagcccttcaatgaaggaaacatcggtgagaaacaatggagaaaaagggtgaggatgttaatgggataatgaagaaggagcaagataagttgttcgatccaagtgaagccactcctttccggattaatgatatccgagctgctattaaaaagcattgttgggtcaagaacctttggaggactatgagttatgattttaggaactccattgtcttttctggactcttaggagcttcactttatttacgtatcttgatattattgtctaaatatttgggtgccgaagggaccatgttttggcctgtctttgtccttggacatgattgtgagatgaagcttctttgattatcccatacttaataaacgtgatgggacata

SEQ ID NO: 14678 - DNA, 456 bp, Gossypium hirsutum
  Clone ID: GOSHI-09MAY01-C15595_4
cggacgcgtgggcaaccgcccgcgtggggtaaattcaaacaaaggtaaattaaacccaaaactttcataaaatcaaacccttcagctaacaagagacgaagaagatctaaagctactgccgggatgagaattactgtaatgactgcagatgaacagatccttagcttggatgttgatcctcatgaaactgttgaaaatttgaaagctttgctagaagttgagactatggtgccattgcagcagcagcaactgttgtttaatggaagggaaatgaacaactctgagaaattgagtgctttgggtgttaaggatgatgacctagttatgatggtctctggtgttgcttcaagtggcagtgcatctaggaatgacttgagcttgaatcctgatggatctgccgtgaatcctgcagctttccaacaacagattcgacaggattctaatctaatgggacaa

SEQ ID NO: 14679 - DNA, 629 bp, Gossypium hirsutum
  Clone ID: GOSHI-09MAY01-C15595_2
tcaagattggggagatattttatccttgctccttcttggttttggactctccctcttgggcgcgccgctttggattggatgtgctccgtgaacaccagtgtattattgacttgaaggataatgttcttagggttggaggaggagaagtttcagtaccatttttgcaagaaaaggacatcccttctcgcttccttgatgaagaatggctcttaaaacaagcatcaagctcaggagctgctgtgacaactggaacaacaaagaaggctaatgtgccatctggaggccagtcttccggaggtgcacgaggtgttgcaacacataaacctgaatttgaagccaaagttgcaaagcttattgagttggggtttgcaagagaaatggcgatagaagctcttaaattatgtgatggtaatgaagaacaagctgctgggattctctttggaggctgaaaattacttccaattttctttcttttctttttagaaactaatgttctggtttcagtcacccaattacaaacttttaacgcattgaaatttatgtactttgattatctatttcattcgaactgttcatacacaattgccaaagtgttgtaattcaaaagaaagctgaaattactctttaaa

SEQ ID NO: 14680 - DNA, 1523 bp, Gossypium hirsutum
  Clone ID: GOSHI-09MAY01-C15595_1
cggacgcgtggggtaaattgaaacaaaggtaaattaaagtcctttcttttcttatatttatatattactaattatttgttaaccccaaaactttcattaaatcaaagatctaaagcttctgccaggatgagaattactgtaatgactgcagatgaacagatccttagcttggatgttgatcctcatgaaactgttgaaaatttgaaagctttgcttgaagttgagactatggtgccattgcagcagcagcaactgttgtttaatggaagggaaatgaacaactctgagaaattgagtgctttgggtgttaaggatgatgacctagtcatgatggtctctggtgttgcttcaagtggcagtgcatctaggaatgacttgaacttgaatcctgatggatctgccgtgaatcctgcagctttccaacaacagattcgacaggattctaatctaattggacaattatttcagaccgatcctgagcttgctcaagccgttgtcggaaacgatctcaacaaactgcaggagattctccgagctcgtcatcaacgaagatctgacttgcgacggcaagaggaggaggagcttgctcttcttcaagctgatccttttgatgttgaagcacaaaagaaaattgaggctgccattcggcagaaagggattgatgagaactgggctgctgccttagaatataatcctgaaggctttgcgggtggttatgctgtacgtggacatggaggttaatggtgtcccattggggcggggggtgtatttttttttaatcaacaattatttctaaaagctgtgctgagcgatgtggattgctgaggcttatggatcaaaggtataaaggtattgctcatggagttggccaatccgagatactaggacgaattcatgttgctccaatcaagattggggagatattttatccttgctccttcttggttttggactctcccaatatggagttcctctttggattggatatgctccgtaaacaccataggataatgttcttagggttggaggaggagaagtttcagtcccatttttgcaagaaaaggacatcccttactcccttccttgatgaagaagggcacttaaaacaagcatcaagctcaggagctgctgtgacaactggaacaacaaagaaggctaatgtgccatctggaggccagtcttccggaggtgcacgaggcgttgcaacacataaacctgaatttgaagccaaagttgccaagcttattgagttggggtttgcaagagaaatggcgatagaagctcttaaattatgtgatggtaatgaagaacaagctgctgggattctctttggaggctgaaaatcacttccaattttctttcttttctttttagaaactaatgttctggtttcccccccccaattacaaacttttaacgcattgagatttatgtacttcgattatctatttcattcgaactgttcatacacaattgccaaagtgttgcaattcaaaagaaagctgaaattaccctttttaaaa

SEQ ID NO: 14681 - DNA, 520 bp, Gossypium hirsutum
  Clone ID: uC-gsflnu33B024h10b1
cagatctcaaaaagtgtgagatggcagcaccatccacagctaccttcttgtcgttccgaagccagtgcatctaggaatgacttgaacttgaatcctgatggatctgccgtgaatcctgcagctttccaacaacagattcgacaggattctaatctaattggacaattatttcagaccgatcctgagcttgctcaagccgttgtcggaaacgatctcaacaaactgcaggagattctccgagctcgtcatcaacgaagatctgacttgcgacggcaagaggaggaggagcttgctcttcttcaagctgatccttttgatgttgaagcacaaaagaaaattgaggctgccattcggcagaaagggattgatgagaactgggctgctgccttagaatataatcctgaaggctttgcaagggtggttatgctgtacgtggacatggaggttaatggtgtcccattgaaggcatttgttgatagtggtgcccagtcaacaattatttctaaagctgtgctgagcg

SEQ ID NO: 14682 - DNA, 965 bp, Gossypium hirsutum
  Clone ID: GOSHI-09MAY01-C15585_1
taatttttctttttcttttattttcttctctgtcccatccctcccccttctagaaaacagaaaagtaaatcaatcactccaaaatttatctcatctgcaggtactgttatatgatgctgtgggaggcagggtaccgaatgctgtagagtaataaagaagttgctatttcttctaggaaataattgcaaggaaagaaaatgaagagtaacatgtccaagattaatatgtgcaacatcaacatgtaccaacatggatatgttgcaacattgaacatgtacaaggattgacacttaactgcagttctagggatctcaacttttaggagactgttcctgtagttcgggagaaggttagactttctattcgtttttacggcagaactattggttttaaacctgttgatagggattgatctaggcagaaatggaagcaccgaacgccatgctattggatagtaagcctttggttctacatggcatgaagaggaagcgggaaacacagcatacatcatattttcctggggcctcgcatgtgataccaccactgtttccagcttgtgtttagctttccagaaacatgacaagcgcaggagattggaggattggaagcagattgtgagttgtggttatacttaaaagatctttgtactttgctattcaattttaagaaaacaggcattccaagcgcatatgttctatgagaaagggtgatggactgattttcaaacgatcttattgcctcaatcggaaagatctcgtcacagaagccagctatgagggtgagatagacagtcaatcttttgtgctagatttcttgcatatgttcgattgagctgaaactgcatgagactccaatgctggattgttaaccaagtgtgtctttcctgattttactgtaagataccatccggctgaaaatatggcaatacaaatcatgtatgattagcctcttgacactctttgaag

SEQ ID NO: 14683 - DNA, 682 bp, Gossypium hirsutum
  Clone ID: GOSHI-09MAY01-C15415_2
cgacctttttgtgagcttccatagtaaactctttaaccccttcttctatttcttatttctttagttgccttagctttctggttaagcagagacttgtttaatacttggacgtaataatataaaagaaaggattatctgttttctcaactttgattctcttctacatatctgatggctgaggagagtattggttcaccggtgacactagatatttctgggtcagacgggggcaatttgagaaaaaactccttggcagtagcagattcggtgagcagcagagaaaaaactcttcctcgttatttgagagcttctaccggctcctgtcatgatttctgcaaatatggaaagaagcatgaatctgaagagatcgctagacatcctttccggaagaggattgtggaaaagctgtgtgatgagccaaatttatttcggagcttagacttagtgcagaggaagcagacatccacaagtgaatccaaatcttttcccaattcccgatctcatacccctgatatgcctgacaccatcgagcttcagttgcccacttgctctcccggtggaaataattctacgatacatggtgtgcagttgaagaaagagaagacatcagctgccaagcttatgtccgaacatccacccaattctcgtagtcgtcacaaaagctctgatgttgtcacgcctg

SEQ ID NO: 14684 - DNA, 629 bp, Gossypium hirsutum
  unsure (1)..(629): unsure at all n locations
  Clone ID: AW187233.1
atacttgatgctttgttttttttttcagaaattttccattttgattgtacattaaacaaaaagaaatttaaaaaacactacttggctgtttattgtattgatcgaaaaatgctttaattgttacggttgaatcaaactggatatgccaaatgattctttattttttttatgacatttctagaacaagaatgtatgatgaaatcaaactcaattgtttatatatgaaatggttgtatttatctcttccttttttttgtccttgttcttgtattctttctagttcatgccgatttttgtctctcgaagtttacttcgagattaattcgatcataggaactagctcctagtggcctttaatcttttatgtcttgttctccgggtagacagattttggtaatcgcttgagcctaatgatattcagtataatagcagaatagagctagattggttcttttatatgcttcattcatctagcagtccttttaatgtatttaatctagttgaaaacggactaatatagttttgtttggttttcaggattatctgttttctcaactttgattctcttctacatatctgatggctgaagagagtattggtncaccggtgacactagaatattctgggtc

SEQ ID NO: 14685 - DNA, 596 bp, Gossypium hirsutum
  Clone ID: GOSHI-09MAY01-C15435_1
aaaaaaaaaaaaaaagagctaatcagattttctcgccggaatattccttttctattttcaggtgagtgaaacaaaagaagggttaaattctaatacaaaccatcgtttgtgtttgtctgttgtcatgcacctcattcgtgagaatctatttattggaaacataggggatgctgcacaagttcttcaaaatggtagctcggagatcacgcacattctatcagttttgagctctgcgtcaatatcgtttttctctgaatggcgtagtggtatcacaatcccagccgaggaaatcaaaaaggtttttgtaggtgggtctggtgatgctgctgcagctcctgagggtcattccgatgatggttctaagagttgtttgtcaccccagaagctgttgtacttgttggaatatgctgggaaggatttaaagctggtgagaatggcggtgccgattagagatatggagagcgagaatttgttggattacctagatgcgtgtattgatttcattgatcgaagcaaaaaagagggatctgttttggtgcattgctttgctggagtgtcaagaagtgcggctataattatggcatatttgatgagaa

SEQ ID NO: 14686 - DNA, 510 bp, Gossypium hirsutum
  Clone ID: GOSHI-09MAY01-C15755_4
tcataagtctatctgtgagctagtatactgctatttgtggatggaccttgcgaaccacgggtatgggtagtttgtgcgcgtagccgaacggatgagaatgatgacgctatgatggccgcacctgaagctcctctccgctgtgttggcatccctcgccaatctgctgcggttcgcctcatgcagcatatgggatgggaagaacgtgaagggcttgggaaagataaacaagggatccaaagttacgttagaattaaaaacaaacaggacacaattggggttggattggaaaagcccgatccgtgggctttcgatacagctcagtttgatagtattctcaagagattgaaagtgcaagcagcacaaatcaatgatgaagtgaagggcaagttgtcaaggctacccgaccacagggaagatataagaaaagagagagagggaaaattgtgcaggcatattcttcagaggatcttgaaggaattctggccaaaagggttgaggagtcatcaccag

SEQ ID NO: 14687 - DNA, 1049 bp, Gossypium hirsutum
  Clone ID: GOSHI-09MAY01-C15755_2
accgaaagtcaggatgttcctactggaggagacacatctgaaagcgttcctccagaatggtggggccataagtatggatttatttctggaggttttctaggagaatctaccaggaggaaatctatcaaaactggagaggctaaaatttcgaccgggagaactgtttgtttcgaagatgaccaagagaatctctacaaacttgtgcaagataatgccacaactggaaagcaaggtctgggcattaaagaccgaccaaagaaagtagctggagttcactttcaggggaaaaagacatcattcagcgatagtggtggtgaggattctgatgatgttggtcctccagcaaaacgaatgcgtgaaaatgcattagaaacagagaaagctgatgagccaaaactaaggttgaaaaagctgtgtaaacggcttctttgtcaggtacctggagattccttaaagctgaaacagctgaaaattcttattgatgaacagtcaacttcggttttttccagcttttctacaaagaaagatgctattgcctacttaaagcgaaagcttgaaggtagtagcaagttttctgttgagggaaagcgagtgagtcttacatctagaagctggtaatcaacttatgatacgattttgataaaatttcaacagccactatacgctgtgaagactaaattagtgcatttatattataatattgtgttaatgtcaattttgtaggtaggtttgtgtaaaacagtcatgtcaaacaaaattaagttctgcctaaagcctgaaactggtaaactgtttttaagttgtattattagttgcaaagagatcaatagcagtgatagacccagtgctagaagtggcaaaatctacaaggagaaatatatcggcattcgattagtaataatcggcttgggtttaatctatagatcaagtcgagtgtggccaatctgcccttaaggtacctttggatttcatctcacagtttccagaactgggctggacagggatccggcttgcgttttgtcttgagtatgtggttggatcagttcgat

SEQ ID NO: 14688 - DNA, 1022 bp, Gossypium hirsutum
  Clone ID: GOSHI-09MAY01-C15755_1
atatttcctcgcttccgcctaggttttccttcgcagaactctctctctaagcttcttttctgcttctcgagtctcgaccttcccacgcgcccctctgcatcgtcggcggcgtagcagaaaggaagagaaagaagaagctatgatggccgcacctgaagctcctctccgctatgttggcatccctcgccaatctgctgcttttcgcctcatgaagcaaatgggatgggaagaaggagaaggtcttgggaaagataaacaagggatcaaaggtcacgttagagttaaaaacaagcaggatactaccggtattggattagataagccaaatccgtgggcttttgatacagctcagtttgatagtattctcaaaggattgaaagtgaagcaagcagtgcaaaccaacgatgaagctgaaaagaatgaaaatcaagtggaaacaaagagggatgagcctaatgacactgaagaacaagttgttaaggctacccggccgcagggaagatataagaaaagagaaagagggaagcttgtacatgcatattcttcgaaggatcttgaaggaattcttgccaaaaaggttgaggagtcaccacaggtaaatcctgacgtggttgctgaaatggaggtcatagagacaactgaaacaaatgatttttccactgaaggaaataaagttgaaagtgtttctccagaatggtggggctttaaatatggatttgtttctggaggttttctgggagaaactacccgaaggaaatcaataaaaactggagaggctaaaaattctactgagagaactgtattttatgaagatgaccaagagaatctctacaaacttgtgcagataagcacaactggaaagcaggtctggcattaagaccgacccaagaagtactgagtcacttcacgggaaaagactcttccccgattaggggggtggatcctagaagtgctcagcaaacatgctgaatgctttaacgagaagtgtgacccaactaggtgaaaactgtacggtttttcgt

SEQ ID NO: 14689 - DNA, 437 bp, Gossypium hirsutum
  Clone ID: LIB3147-007-Q1-K1-C5
ataaaatttcaacagccactatacgctgtgagactaaattagtgcatttatattataatattgtgttaatgtcaattttgtaggtaggtttgtgtaaaacagtcatgtcaaacaaaattaagttctgcctaaagcctgaaactggtaaaactgtttttaagttgtattattagttgcaaagagatcaatagcagtgatagacccagtgctagaagtggcaaaatctggaaggagaaatatatcggcattcaataaaaggtcttgattacaaagaagcatccaagtaataatcggcttgggtttaatctatagatcaagtcgagtgtggccaatctgcccttaaagtacctttggatttcatgtcacagtttccagaactgggctggacagggaacctgcttgggtattgtcttgaatatgtggttggattatttgat

SEQ ID NO: 14690 - DNA, 336 bp, Gossypium hirsutum
  Clone ID: LIB3135-029-Q1-K1-F12
tcttaactctgtgtttaagcttgatttctgttatttaaagctgagccaaccgtaccacgggtctgcatcgttagtcctcgtagcgcaacggactataatgataaccctattatggccgcacctgaagctcctattcaatatgttagcatacctctccaatatagtgctttttgccttatgcaacaaatgggatgggaagaccgtgaatggctttgtaaagataaacaaggcatcaaaagttacgttagaattaaaaacaaacacgacacaattggggttggattggaaaagccgtatccaggggctttcgatacagctcattttgatagtattctc

SEQ ID NO: 14691 - DNA, 636 bp, Gossypium hirsutum
  Clone ID: GOSHI-09MAY01-C15775_1
atacaaacaacctgtctttgtgtacattcccatgatgggtgagctccgtggtggggcatgggtatttgtggacagccggatcaattcagatcatattgaaatgtatgctgaacgcactgctaagggtaatgtacttgagccagaaggaatgattgaaatctagtttaggacaaaggagctactggagtgcatgggcaggcttgaccaacagcttataaacatgaaggcaaaacttcaggaagcaaagagcaatggagcccatgcacagatggattctctgcagcagcaaataagatcacgtgagaaacagcttttaccagtatacacccagatagccactaaatttgccgagcttcatgatacttctctgaggatggcagcgaaaggggtaataaaagaagtagttgactgggatcgctcacgatctttcttctatagaagattgcgccggagaattgctgagagttctctggtcaaaattgtaaaagatgctgctggtgatcaactgtcgcataaatctgcaatggacttgatcaagaaatggtttttggattccagtgttgcaaagggaagagaagatgcttgggttaatgatgaagctttcttttcatgggaggatgatctgggaaattatag

SEQ ID NO: 14692 - DNA, 352 bp, Gossypium hirsutum
  Clone ID: LIB3149-032-Q1-K1-C4
aatggagaacaccttttggacgagagtttttctgttgtgcttattcaggctcgaccaaccggtgagttacatgaaagagaggcgtgcggacacaaacagcaatgggccccatgcacagatggaatctctgtaacaccagatttgatcacgtgagaaacagcttttaccagtatacacccaaatagccactaaatttgccgagcttcatgatactgttatgaagatggcaccgaacggggtaataaaagaagtagttgactgggatcgctcacgatctttcttatatagaagattgcgcccgagaattgctgagagttctctggtcaaaattgtaaaagatgctgctggtgat

SEQ ID NO: 14693 - DNA, 530 bp, Gossypium hirsutum
  Clone ID: GOSHI-09MAY01-C15155_1
cccacgcgtccgcttccctctcatcctttgaaaatggagtccttagctatgggaaaaaagctactaacatctgttctcgtaggactagtagttgcttcagctataacccaaaccgtgttggctcaaaactgtggctgtgcgccaaacttgtgttgcagtcaacatggttattgcggtcagggtaacgattactgtggcactggttgcaaagaaggcccttgtttctccaagtctcccactggtgcttcagttgcctccattgtttcacctcagttcttcaacgggataatcaaccaagctcgtgcggattgtgcaggcaagaaattctatacacgacaagctttcctgactgcacttgattcctttcccgatttcggaaaattgggttctgatgttgaatccaagcgtgagattgctgcattcttcgcccatgctacccatgagactgaattcttttgctatacagaagagcaggataaaagtaatagctactgtgaagccaatccaaagttcccatgtgcaccagggaa

SEQ ID NO: 14694 - DNA, 388 bp, Gossypium hirsutum
  Clone ID: LIB3196-037-P1-M1-C8
atatcgaaagcgccgctgacaccacagctccgacctccctcagcgtggccgggaccctgagcagctgcgcagagccatgcgccccgatgtacttaggtggcacagccctgagacctctggccagcgccaggcgggcgtcggggccggcagaggcctggatctgagtctttgggctctgcctctccctggggacaggagggagcctgggggtgtgggtggggagccggccgaccctgacccagcgcctggctctgcccccaggagtggacagtgcgatgaaggaggaagtgcagaggctgcagtccagggtggacctgctggaggagaagctgcaactggtgctggccccgctgcacaagctggcctcgcaggcactggagcacgggct

SEQ ID NO: 14695 - DNA, 387 bp, Gossypium hirsutum
  Clone ID: LIB3196-002-P1-M1-G2
atgcgccgctgacaccacagctccgacctccctcagcgtggctgggaccctgagcagctgcgcagagccatgcgccccgatgtacttaggtggcacagccctgagacctctggccagcgccaggcaggcgtcggggccggcagaggcctggatctgagtctttgggctctgcctctccctggggacaggagggagcctgggggtgtgggtggggagctggccgaccctgacccagcgcctggctctgcccccaggagtggacagagcgatgaaggcgggagtgcagaggctgcaggccagggtggacctattggaggaggtgaggccaggcttgaggcacgttactctcgacagcagtagcccaggccaggatatagggtgcatagt

SEQ ID NO: 14696 - DNA, 429 bp, Gossypium hirsutum
  Clone ID: GOSHI-09MAY01-C15105_1
cggctttttagaaataataaaaaaagttctcatttctgtttttgcacgctttctctcccttctgcgaaccccataaaaaaatggcgacatcttctagacgaacgagcggtccggttctccgatccctctccccatccggccgtttctgttctcactacgcttctcagtcttcatcttcttcctcttcttttgccttttcgagttcaagcttttcttcacgctcttcaactttctttaatcaacacagatctatctctccgccacgtgtcaatatgtacaaccactcttcatcggcgccatctgtgcgtttctcgctggataaaccgcccgtccccgccgaaccgttcgatagccaccatccgtagaaacaccgacgctgtgcagaatttagagaagcgacagcagaagcggaccttgtatgtgttcccc

SEQ ID NO: 14697 - DNA, 430 bp, Gossypium hirsutum
  Clone ID: LIB3585-052-P1-K1-A12
agtcttattacaaatactaaaaaaagttctcatttcatttttacgcacgcttcctgtgcctgctgtaaaccccttataaaatgaccacatcttatagaccaacgagcggtcctactctccgatccctctccacatcctgccgcttctgatctcactacgcttctcacacatcatcttcttcctatttctctgcttttgcctttaccagttcaagcttttctttacgctcttcaactctctttaatcaacacatatctatctctccgtcacgtgtcaatatgtacaaccactcttcatcgtacccatatcttcacctctacctttataaccgccctatctccccgtactctttctatattcaccatccttataaacaccgatgccgtgcataatctacagaatctacatccgaagctgactttaatgtttt

SEQ ID NO: 14698 - DNA, 286 bp, Gossypium hirsutum
  Clone ID: LIB3585-042-P1-K1-H12
tcttctagaaccatacgtatctggtccggttctcccgatccgctctcgcgggagatcttctcaaaatctgtgtctcactactgcttctcagatcttcatctgtcttcctcttcttttgccttttcgagttcaagcttttcttcacgctcttcaactttctttaatcaacacagatctatctctccgccacgtgtcaatatgtacaaccactctttatcggcgccatttgtgcgtttatcgctttgtaaccgccctatctttctcgaaccgttcagtagccaccatt

SEQ ID NO: 14699 - DNA, 712 bp, Gossypium hirsutum
  Clone ID: GOSHI-09MAY01-C15005_1
atttcagaagttttatatttggagtcatcatccccatctgcatccatcttttccattttcactgaaaattaaaccctagaattttgatttgaatcgctccgagacagccaagggggcagattgatcgcgcttgtttctaaggcaggctcatcttattgcatccgtagtgatataacacggggtagaaccgggcagaatgtggcttttggtgtggtaaacaatgctgaggctcctataatgaaggaaaaatcggtcaatttttcttctttatcatgcaaaaatgccagggtagcgccgttctttcctctagaaactgtgggatttcgaagcaaaagaaggaatggtgtgattgttgcagcaagccctcccacagaggatgctttgattgctacagaaccattgacgaaacaggatcttgttggataccttgcatctggatgtaagtctaaggaaaaatggaggataggtacagagcatgaaaagtttggttttgagatcaaaactctgcggcctatgaaatatgaacaaatagcagaattgcttaatggtatttcagagagatttgattgggagaaagtaatggaaggtgataaaattataggacttaaacaggggaagcaaagcatatcattggaacctggagggcagtttgagctcagtggtgcacctcttgaaactctgcatcaaacatgtgccgaggtcaattcacacc

SEQ ID NO: 14700 - DNA, 415 bp, Gossypium hirsutum
  unsure (1)..(415): unsure at all n locations
  Clone ID: LIB3145-037-Q1-K1-C3
ggaaaagaagccaagaactctcaacacctaatctcccttccccttccccttacccttcccgttcggccatccttgacacctcgatcttctgcttgccgtcaaccaacaatgattctcaacatcagacgccagcgctcatctttaattttcctcatcttcgcctttcgttgtcaaaatggttactccaccaccagtcggcatatagacttggagtcaccctccccatctgcatccatcttttccattacactgaaaattgaaccctagaattttgatttgaatcgctccgagacagccaaggggcagattgatggtcttgagcttatagcctttgagaattttacatcccgtgctgtgatggaggcagtcgggtcatgcgtcacanacaagtattctgaaagactacttggtgcta

SEQ ID NO: 14701 - DNA, 348 bp, Gossypium hirsutum
  Clone ID: LIB3197-044-Q1-M1-D10
attttcagaaacagaagctaagaactctgaacacctgatcttcctttcccctttcccttctcccatccttgacacccagatcttctgcttgtcgtcagccaacaatgattctcaacactagacgtcagtgttcatcgttgattttcctcatcttcacctttcattttcaaaatggttactgcaccaccaatcggcatatatatttggagtcaccctctacatctgcatccatcttttccatttcactgaaaattaaaccctagaattttgatttgaatcgctccgagacagccaaggggcagattgatggtttacatcctgtgctgtgatggaggtagtcgggtcatg

SEQ ID NO: 14702 - DNA, 230 bp, Gossypium hirsutum
  Clone ID: LIB3189-050-P1-K1-B3
tggaggataggtacagagcatgaaaagtttggttttgagataaaaactctgcggcctatgaaatagtgaacaaatagcagaattgcttaatggtatttcagagagatttgattgggagaaagtaatgggaggtgataaaattataggacttaaacaggggaagcaaagtatttgccggagctccaggaggggaaccagatgtcggagaggcaaatgaagcggagcctgct

SEQ ID NO: 14703 - DNA, 456 bp, Gossypium hirsutum
  Clone ID: LIB3197-004-P1-M1-G5
attcgtggtgagaagctgtcaaggagtagaaattggtatgcctagaagcagatgttaaaagcagtttctcttcagaacatcttttttcataccacttgataagcatcttgaaacaccatggctgtagctgcagtaaaatgggtgatgtcaaagagaactatcttgaaacatttatttccaatccaaaatggagctttatattgtgtttgtcataaatctacgtattctcctctaccagatgactataattgcaacgtagagcttgctctgacttctgatggcaggacaatagtatgctaccacccttctgtggacattccatatgaacacacaaaacctgtccctcggccagatcctgtgcataacaatgaagaaacacatgatcaagtgctgaaaaccagattggaagaaaaagttgaacaccttgaggaaggacctatgatagaaaaacttagc

SEQ ID NO: 14704 - DNA, 430 bp, Gossypium hirsutum
  Clone ID: LIB3197-004-P1-M1-G10
tgtactcgtggggttataaccctataacgtgtgtaacatgaacagactctggagagtactatacttaatacatgggcagtacgtacaacgaaacctgatgctacaaaaattgatagagtttcagggctggttactgggctccgagtacttaatgctctatctgactgggcacttgttgagatgcttcctaataaagaggcttttgcctcttgccaaactgaggatagtcaggcaactgctccctcctcgacttttgatggggaagaaatgtctactcaaaactggtttgggaatttataatatgaactgttaattgatcctcgtcattagatcctgtgcataacaatgaagaaacacatgatcaagtgctgaaaaccagattggaagaaaaagttgaacaccttgaggaaggacctatgatagaaaaact

SEQ ID NO: 14705 - DNA, 1527 bp, Gossypium hirsutum
  Clone ID: GOSHI-09MAY01-C15305_1
gcatattcgctgcgtcacatagtactccaataccctggtttacctgaaccggaagtaagatccggttcaatctcatagtaaaaccaaaacttttgttttccttagtattctttctctaaaatcaaaatccaaatggaaaagaaaggcttgacaatattttgatttctgtaaaacgcatagaagagagagtactttatctttaaaaccataccggtaaagagaaagttccgattttttttttttcatttctttcaagctcaaccaaaatatattaaaggaaacctaacttgccggagctctggatacagttaagaatccgatggactccttgggtccgaatcggtttgatatcttcgagatttatcggcgattctgtgaacttagaacaggatatgagcatgtttgtgatggagaaggctaccgacaaggcgaggaatcacaaagagctaagttcactagggacgcattgaaccaactcttaaagatggtggagtcaaggatgcgcgagaggcatatgaatgcaatctttgatgaacttctcaaactcatgttacagctcgacttgatggtagacttttctgtattctcgtgcttctatgattttgttttcttcgtatgccgagaaaatggtcaaaagaatattactgtaagcagggcagttgctgcttggagattagtcttagcaggcaggttccgtttgcttaaccaatggtgtgactttgttgagaaaaatcagcggcacaatatttctgaggatacatggcagcaagttttagcttttagtcggtgtgtgcatgaaaccctagaagggtatgatcctgaaggtgcttggcccgttttaattgatgactttgttgagcatatgtacagaatttcggggtcgaataaagatacaaacggtttctgtagctatggtgattcagggtcccagttgtgtgcatatgatgactctttgcccggtcccggggttgaagaggaagttgcgtgaatgtaacaatgataaaatggagtccttggaaccattattctcgagctctccgaacccgaattgcacatcaaattccaagagaaggtttattttgtgccgatctgatgagagggaagataatcttccccagaattcatgcgatgaaagcatggaaattgttaaacaaagtagtccggtgggttcttccaagtctccatgtgcagttgaaggttgcatgtcaaagggtttagcagggctgttatcgtgttgctcgtattttgcagtttgattgggaaagaggagttttgctataggtagaagctccctatggaggggaaaagaaaatggatacatgctttactacaagtctatgaattagataaattcgtatgttcgcttgtggggggagggttataaacagagtgcctacattttcggatgactgtggggggttgatttcctttgtttcaatgtttgagggggtgctaatatcattggtttgtggatgtttcgatcctgaaattaataattaaattttttgaaaattttagttaaaaaaa

SEQ ID NO: 14706 - DNA, 766 bp, Gossypium hirsutum
  Clone ID: GOSHI-09MAY01-C15245_1
aaggttgcaatgaaatacatcaagctcatgtcttcatcaacgagttttagatagagcactctgcccaaattcacgagcatatgcttcctctcaagggccacaatccagaaagcaaactgggattggataaactttgtttcaaacatctgtcatttattcctcatctgctctcctaacatcaatcattgccatctttattcccttcaccttaacaccagtaatttcatgggaacttcatttgttggtgagaaagacgatatccaaaccacccataatctgcaacttcaattccagtagagtattgaatctgtgtcccgcttgactttcatgcatgttttatggaattgcctatggcaagaactgttgcgcggaagcgtgtgaaagagtaaaattattgtactggaaaatcacactaagttcaattcccaggaaagagaggtggatcacgtggatcgcttacttaccaggtctttcctagccagaatatccctctatcgtaatttaatcgcacaataaatcactacaatcactctcgcaaaatatgcagaacaaacaataaagaacactggaattttaacgaggttcagcaaattttgcctacgtcctcgggcactaccaaatatatttcactccaaaaatacaagtgaaagtttacaaatagggagagaaaataatgccttgaggagagaatgtcaaatgtgggggataatcaaaatgagaaatggttaggcctatttatagttgagatttagggatcaacttgcaa

SEQ ID NO: 14707 - DNA, 427 bp, Gossypium hirsutum
  unsure (1)..(427): unsure at all n locations
  Clone ID: LIB3197-002-P1-M1-F8
tcgcccacgcgtccggccgtatacgtgaatagtaccgtaaacggtcgtattccccaagtacgaacctggctctggtaccaattgttgcgcggaagcgtgtgaaagagtaaaattattgtactgaaaaatcacactaagttcaattcccaggaaagggaggtggatcacgaggatcgcttacataccagatctttcctagccagaatatccctctatcgtaatttaatagcacaataaatcactacaatgacacttgcaaaatatgcagaacaaaaataaagaacacttgaattttaacgaggttcagcaaattttgcctacgtncttaggcactaccaaatatatttcactccaaaaatacaagtgaaagtttacaaatagggagagagaacaattgccttaagtagagaatggcaagtgtgggatg

SEQ ID NO: 14708 - DNA, 470 bp, Gossypium hirsutum
  Clone ID: GOSHI-09MAY01-C16995_2
caagtctctcccacccaaacatatcacaataaattaggtattccaccttttattttttcccccaaacacgcatgcaaatcgtttttccttatctaattcttttctgacacacacacaaatttcgaagctctggattccacctcttcccgtcctcgccgacggtgcttatgccggttggtttccagattgcaccggacttggatttaaagggatttagctttcctttcaagacatggagaaagcctgcttctggtcaaattgcaaccttttccgggtttttttattccaagaagtacttgactggcggtttattgtccatggagattctcttttggtttcttttgtcaattgcacttagtgcccagtctcctcttaatactcaacacggagccgcaatgaattttgttttctaagataggtgctggatctttagcacacttgttgcattgttgatacaacatccagtcatg

SEQ ID NO: 14709 - DNA, 625 bp, Gossypium hirsutum
  Clone ID: GOSHI-09MAY01-C16995_1
ccccgcgtccgccccgcgtccgggcagcgtccgcccacgcgtacggtttttctttttctaattcttttctgacacacacacaaatttcgaagctctggattccacctcttcccgtcctcgccgacggtgcttatgccggttggtttccagattgcaccggacttggatttaaagggatttagctttcctttcaagacatggagaaagcctgcttctggtcaaattgcaaccttttccgggtttttttattccaagaagcacttgactggcggtttattgtccatggagattctcttttggtttcttttgtcaattgcacttagtgcccagcctcctcttaatactcaacacggagccccggtgcattttgttttctaagcatacctcctagatctttagcacacttgttgcattgttgatacaacatgcagtcatcagaaaacaccttccacggcttgtagtaattgagtgaaagttgcttactaagcattagcattagtagttcttagttaatgcttcgctgtttgtcctgatggatactgattaatgagggtatgttggtttgctgagcattctgcaactgcttctatttagtatagatgagttaactgcaattaagctcttg

SEQ ID NO: 14710 - DNA, 274 bp, Gossypium hirsutum
  Clone ID: LIB3189-040-P1-K1-E1
gccgtttttctttttctaattcttttctgacacacacacaaatttcgaagctctggattccacctcttccgcgtcctcgccgacggtgcttatgccggttggtttccagattgcaccggacttggatttaaagggatttagcttttctttcaagacatgtagaaagcctgcttctgttcaaattgttacctttttccgtgatttattattaattgaaacgcttataacgttatatagtatttgtatttattttagttctctgtttatcatctta

SEQ ID NO: 14711 - DNA, 624 bp, Gossypium hirsutum
  Clone ID: GOSHI-09MAY01-C16985_1
gtcttcttcttttttaaatctaatttggtgtgtttctattgatcagacagaaatttgataccttgggtcttttttatttttctcttatagctctgaactgctttttttttttttgtgataaaattaaaaaattgtgatcactgagtagcttatgacattgaaaaccctaatgctagagagacccagatcggtttctttgtacagctatcaatttatgagccacctcgagttgcagttctttctatagtcatcatttactctatctgtggaatactttcccttgttttccaggccatttacatgcaaatttgtgctctacattgtcgatctccgagagtaggcatcgatgtcaatcatatgtggcctcccactccttgaatgtatttactgcctagcttgtgctcgatgggcatggaaccgatgcctgcataccgccggccacgatagtgtaacatggggtcttgcaaccggaagaattcgaacctgttcctcgactttgccgctacattctagctgtttatgaggacaatattcgacatcccctctgggaacccctggaggatatgggatcaaccctgattggttaattctcagaaaaacttacaaagacactagaggacgcac

SEQ ID NO: 14712 - DNA, 1271 bp, Gossypium hirsutum
  Clone ID: GOSHI-09MAY01-C16935_1
cggccgcgtcgacgggtttaaaaggatttatttgcacgaggagggaatcccaggatctcgacgtggctctcttgtacccccgcctgcgaatgatatgcccgcagaaggtgagtttatccaggcagctgcactagtgagccaacctgctctttattccaaggagcttatggatcagcatcctgttggaccagcaatggttcatccagctgaaactgcctcagaaggaccagtttggactgctctccttgacccgggagtcaaacgtgctttattagttgggattgggattcagattcttcagcagttttccggcattaatggagttctctactacactcctcaaattcttgaagaggcaggtgttgaagtgcttctttcaaacttgggccttggttcagattctgcatcatttcttattagtgcatttacaaccttgctgatgctgccctgtataggtgtagccatgaaactcatggatatatcaggcaggaggcggctgctactcaccacgatcccggtgcttatagtgtcactgatcattctagtttttagtgaacttgtggatttgggcacggttgtgaatgctgccatctcaactgcatgtgttattgtttacttctgctgctttgtgatgggctatggaccaataccaaatatcctctgctctgagatctttccaacaagggtccgggggctttgtattgcaatctgtgctttggtttattggatcggagacatcattgttacggacgcgcggccggtcgcgcggggttctataggcctagcgggcatcttcgggatatatgctgttgtatgtctgatatcgtgggtgtttgtgttcttgaaagtaccagagaccaaaggaatgccacttgaagtcattaccgagttcttttctgttggtgcaagacaagctggtgctacaaagaatgagtgaagtcacactgctttcaatggtgtcaaattcttttttcaatttcggccgttaagctttcatcatttttgttccttcttgttgctttgaaaattagggatcctcttattcaaacattaaaattataaaattttcccactagaaattgagtttacgtgtattttacatggtgaaccaccctttttaacttggatttcataaacaataattgcatcaacaaggtatgtggatggatataggtcctgccgactagacgactagggttttcttatgataataaaatccaagacggtcagagagaggcaggactttcaatcccatcgtatctcagttgatg

SEQ ID NO: 14713 - DNA, 222 bp, Gossypium hirsutum
  Clone ID: LIB3197-033-Q1-M1-E6
aatgtcgactcaacgtcccgtatcggaaacatattgtacttacacactggagtgaggctattttatagatagcggcatatttagatatatgctatagatagctgatatatgggtgtttggattatgaagtacaaaaacaaaggaatgccattgaagtattaccgaggtgtttttgttggtgcaagacaagctggtgctacaaagaatgagtgaagtcacact

SEQ ID NO: 14714 - DNA, 1016 bp, Gossypium hirsutum
  Clone ID: GOSHI-09MAY01-C16895_1
cccacccccccgtttcaagtttctcctctacgtaatccatggaagcctgcttcttcgatactctcaaggctcaacctttctgggttattttccttttcactttgggttctttatcactcttgaagttttcatttgtttttctgaaatgggtctggatcaattttcttagacctggtaagaatctcaaaaaatatggctcctggggtcttgttactggaccaactgatggtatcggcaaaggatttgcctttcagctggctaggaaaggccttaatcttgtcttggtgggccgtaatcctgataaactcaaagacgtttccgattcaatcttggccaagtatgccaagattcagatcaggacagttgttgtggacttcactggcgatcttgatgaaggcgtgaagaagataaaagaaactattgaaggactggatgtgggggttttgattaacaatgttgggatttcatatccttatgccaggtacttccacgaggttgatgaggagctgttggtgaatttgattaaggttaatgttgaaggtaccacaaaggtaactcaagctgttttgcctgggatggtgaagagaaagaaaggcgcaattgtgaacattgggtctggtgctgccattgtcatcccttctgatccactttatgctgtttatgctgctactaaggcgtatattgatcaattctctaggtgcctttatgttgaatacaagaacagtgggattgatgttcagtgtcaggttccattgtatgtggcaacaaaaatggcatcaatcaaaagatcatctttctttgttccatcaacagacggatatgctcgtgcagcaatgcggtggataggctatgaacctcgttgcacgccctactggccccattccatcctctggggcttggcttattcactgccagagagtgtgggtgatgcatggcggttgcgcttctgtcttggcattcgggagagggggcaaatggaagattctaggaagaatggatggaaacacattgttgag

SEQ ID NO: 14715 - DNA, 538 bp, Gossypium hirsutum
  unsure (1)..(538): unsure at all n locations
  Clone ID: LIB3583-042-Q6-K7-D8
cccacgcgtccggtggttttcagctcatctacttcacccactattttatttttttcatttatagataatcaatccttccctttttctctttttgaatcccatctgtttctgcctaaccgaactgctaaagattccccttttcgttatcgtgcgctctatttatatcccttagatctgggggggggtgctcacacaagtttcaagtttctcctctacgtaatccatggaagcctgcttcttcgatactttcaaggctcaacctttctgggttattttccttttnattttgggttntttatnantnttgaagttttnatttgnttttnngaggggggtgtngtttttttttttaggtgtgtgtgggttntgtgtttttggtggggggtgggttttttgtgtgtttgttgtggttggtttgtttttgtggggtggtgtgtgggtggggggtgggggggggggggggggtgggggggggggggggggggggggtgggggggggggggggttgttggggttgtggggtgggtngggggggggg

SEQ ID NO: 14716 - DNA, 445 bp, Gossypium hirsutum
  Clone ID: uC-gsflnu33B079d01b1
atacgcgtccgcccacgcgtccgcccacgcgtgcggtttgtgggggttttgattaacaatgctgggatttcatatccttatgccaggtacttccacgaggttgatgaggagctgttggtgaatttgattaaggttaatgttgaaggtaccacaaaggtaactcaagctgttttgcctgggatggtgaagagaaagaaaggcgcaattgtgaacattgggtctggtgctgccattgtcatcccttctgatccactttatgctgtttatgctgctactaaggcgtatattgatcaattctctaggtgcctttatgttgaatacaagaacagtgggattgatgttcagtgtcaggttccattgtctgtggcaacaaaaatggcatcaatcaaaagatcatctttctttgttccatcaacagacggatatgctcgtgcagcaatgcggc

SEQ ID NO: 14717 - DNA, 1310 bp, Gossypium hirsutum
  Clone ID: GOSHI-09MAY01-C16595_1
cttaacatatgagggctactcggtgaggtcttgcgcatcaataatggttctgtggagctggattcatctataatgggtgttcaacaagagggaaaaaagagaaggtcccacttaattcaagtgacaagctgttcaaggagatacgagatctcaattttgaagttgttgtccaggttcttaggcagaaagcaacatccatgaaacaggattacactgagatgactactactaaccaaacagtttctgagctaaaggatttcgtcaagaagctgaactcattacctgaaatgaccagacacataaatcttgcacaacatctgtcaacattcacatcaaagccatcttttcttgcaaaacttgacatggagcacacaattattgagacctcaagctatgacatttgctttgattacattgaagaaatgatccataagcaggagcctcttgtcaacgtcttgcgtcttctcatcctattttctgttacaaattcagggctgcccaaaaagcattttgactatttgaggagggagcttctccacagttatggatttgagcatatggctacattaaataatttagaaaaggctggattgttgaagaagcaggagtcaaaaagcaattggctgacagtcaaacgtgctttgcaacttgtagttgaggatactgacactgcaaatcctaatgacatagcctatgtcttttctggatatgcacctcttagtattcgccttgtgcagcatgcagttcgatctggatggcgtgctatggaagaaattttgaagctgttgcctgggccgcatacagaaacaaaaaggcttggctttgccctccgccccccccctcccgcccggcagggtgcttcaaatggcttagacaaaatagcagacgggaggcgctccctggtacttgttgtctttgttggaggggtaacatttgcagaaattgctgctctcagatttctcagtgcccaggaaggaatggcatatgatctgattattgggacgacaaaaatggtcaatggtcattcattggttgaaacattcttagagacaatcggttaactcgttcgaatgtgtgttggcttttatgaggtttttgtttcccaatatttctctccaacaaccactgaaaatcataattatggcgtactgggcagtgaggctgaaaatgtgaagtgtttggtcagacgaaaattgttgtgcactgccagggtatctatccatctattttggatttatttgattttaacagcctggaccattcaatggagatgattgtttttgtgtcatgagaatgatttggggatagta

SEQ ID NO: 14718 - DNA, 920 bp, Gossypium hirsutum
  Clone ID: GOSHI-09MAY01-C16545_1
ttcttcatcctccagcaatgaatggcgtacaaattgggagattttgatttggatttccctattcgggattctggatacattgtccattgagagtggattctaagcaaagtctcgtctcacattatattcaaagaaaaaaaagttacctcgattcttgttcatccaacagttcgacaacaacagcgacaacgacaaccaaaaagttatggattaaaccaagcactgaactgaattgaattgaattgtgcccgccgcggcggctgaagatggatagaaggagttggctatggagaagaaagtcgacagagaagagtccaggcgaaactgagagttcaggaggttccatttcatctttttctgaaagattctctgatgagcaggctagcgccaccattagttctcaatcactggaagttacatcaaaagctgtacctgttgatgaagaaaacaacaatgtgagatctctaacagagaaattatctactgctcttatgaacatcagtgccaaagaagagttggttaagcagcatgctaaagttgcagaagaagctgtctcaggctgggagaaagctgaaaaggatgtagtagctttgaagcaacagcttgatgctgctatgaagaaaaatgcagcacttgaagatcgagttggtcatctggatggggcactcaaggaatgcgttagacaacttaggcaagcaagggaagagcaagagcggaaaatccatgaagctgtttccaagaaatgtcatgagtgggaatcttccaagtctgagcttgagagtcagcttctgaatctcaaggcccaacttgaaaccgccaaaagtgacgctgctgcctcagttgatcctgaccttcaactgaagcttgatgcatgtgagaaagaaaattcaagccttaaacttcagcttcattctcgagct

SEQ ID NO: 14719 - DNA, 1014 bp, Gossypium hirsutum
  Clone ID: GOSHI-09MAY01-C16525_1
cggaattcaaatacttcagcagttttctggtataaatggagttctatactacactccacaaattctcgagcaggcgggagttggagttcttctttcgaacttggggatcagttcatcttctgcctcattgcttatcagtggtattacaaccttgctgatgcttccaagtatagcggttgctatgcggcttatggatattgctggtacaaggagtttgctactctccacactcccggtcctgataatatcccttctcgtcttagtcatcgggagtgtggtaaaaatggggaatgttgtgcacgcagcgatctcaaccgttagtgttgttctctacttctgtttcttcgtcatgggatttgggccaatcccaaacatactctgtgctgagatcttcccgacacgggttcgtggcatatgcattgctatgtgcgcccttacattctggatttgcgacatcatcgtcacgtattcactcccagtgctgctcaaatcagtcggtttagccggtgttttcgggatgtacgcggtcgtgtgtgttatatcgtgggtgtttgtgttcttaaaagtacccgaaaccaaaggcatgcctctcgaagtcattacggagttcttttctgttggtgcgaagcaagttgcagctgccaagaacaactgagtttggttacatatatttgatggatagtttgaaagttttgacggctgttcaaatttatcttttttttttccttatcattttattgtcaattaggcagttcgatttgtgtagaaagattaaaaaaagaacaaaaaaacaaacatgattttctatttgttacagttttctaaatgacatttaaagttttcttcaaaaaaaaaaaaaaaaaaaaaaaaaaaaaaaaaaaaaaaaaaaaaaaaaaaaaaaaaaaaaaaaaaaaaaaaaaaaaaaaaaaaaaaaaaaaaaaaagggggggccccttttgggggtccaaggtttcctccccgggcttggaaagccaaaatttttttttgggggcc

SEQ ID NO: 14720 - DNA, 540 bp, Gossypium hirsutum
  Clone ID: GOSHI-09MAY01-C16495_3
tctcgcccacgccgtccgtaaataccttaaattgaagtacaagaaaccaagtacaaatactgtcacaggaagcggatttcggacgcgcgggcccccgcccccccggtcgcgtgccaaaaaattgaaattagcttcttctcttttaaatgtatagttttttttattttaaacggtgacttgggagaagagggtggaagcaggttagggtttttgggattgttgagaaggagattagcagcggggtttccaggtgatgggcgatgagaaatcgatgatcgtgatggcgagtagggatagagagagtagagatcgggagcttctgatcccggtcgctgacgccgtccacgatgattcctccaaaccttctccttcctcttcttccagtcacgccggccgcgagaccttttacaaagttttcccgagctgggcttctaaggagttcatgacgggatgtgtcattttgtttcctatggcaatctctttctacataacgtggtgggtcattcactttgtgggtggctttttctctccgatttgtgc

SEQ ID NO: 14721 - DNA, 1219 bp, Gossypium hirsutum
  Clone ID: GOSHI-09MAY01-C16495_2
ggaagcggctttcagactctctttcccacgcgtccccccgtttcgattgccaaaaaattggaattagcttcttctcttttaaatgtatagcttttttattttgttcttcttgatttgattcataaacggtgacttgggagaaagggtggaagcaggttagggtttttgggattgttgagaaggagattagcagcgtggtttccaggtgatgggcgatgagaaatcgatgatcgtgatggcgagtagggatagagagagtagagatcgggagcttctgatcccggtcgctgacgccgtccacgatgattcctccaaaccttctccttcctcttcttcccatcacgccggccgcgagaccttttacaaagttttccggagctgggcttcaaagaagttcatgacgggatgtgtcattttgtttcctatagcaatcactttctacataacgtggtggttcgttcactttgtggatggctttttctctccaatttatgctcaacttggcattgaaatatttggtcttggatttgtaacttctataacattcatcttcttggttggggtattcatgtcatcatggttgggagcatctgtcctaggccttggtgagtggtttatcaagcggatgccatttgttcgtcatatctacaatgcctccaagcagatcagttccgctatatcaccagatcagaacacacaggcattcaaggaagtagccatcataaggcatcctcgaattggtgaatatgcatttgggttcattacttcatctgtttctctacagagctacactggtgaagaagagctatgctgtgtctatgttcccacgaatcatctttacatcggtgatatattcctcatcaatacaaatgatgttatcagaccaaatctatcagtccgtgaaggaatcgaaattgttgtgtccggggggatgtcgatgcctcagatactgtcaacactagattcacgtttgccgctcggtgggtgtagtcctaacaggaagctgatcgttgcttgggtacttagaacagtgttttggtgttgaaatatagattggtggaaactacggggcaggtaggcaggggttttttctttggtgttggattgtgtgtatttgaaccaattagattgacaatgttattgtgtctgaatatatggtctagtctccctatataataatatatgtagcctgatcttcatttctcagcttagctgttat

SEQ ID NO: 14722 - DNA, 686 bp, Gossypium hirsutum
  Clone ID: GOSHI-09MAY01-C16495_1
ccccgcgtccgcggacgcgtgggatttcagactctcttttccctatcccccgtttcgattgccaaaaaattgaaattagcttcttctcttttaaatgtatagttttttttattttaaacggtgacttgggagaagggtggaagcaggttagggtttttgggattgttgagaaggagattagcagcggggtttccaggtgatgggcgatgagaaatcgatgatcgtgatggcgagtagggatagagagagtagagatcgggagcttctgatcccggtcgctgacgccgtccacgatgattcctccaaaccttctccttcctcttcttccagtcacgccggccgcgagaccttttacaaagttttccggagctgggcttcaaagaagttcatgacgggatggtcttggatttgtaacttctataacattcatcttcttggttgggctcctcgcgtccgatcatggttgggagcatctgtcctaggccttggtgagtggtttatcaagcggatgccatttgttcgtcatatctacaatgcctccaagcagatcagttccgctatatcaccagatcagaacacacaggcattcaaggaagtagccatcataaggcatcctcgaattggttaatattctagcttaaaaaaaaaaaaaaaaaaaaaaaaaaaaaaaaaaaaaaaaaaaaaca

SEQ ID NO: 14723 - DNA, 614 bp, Gossypium hirsutum
  Clone ID: AW187079.1
cgtttcgattgccaaaaaattgaaattagcttcttctcttttaaatgtatagttttttttattttaaacggtgacttgggagaaagggtggaagcaggttagggtttttgggattgttgagaaggagattagcagcggggtttccaggtgatgggcgatgagaaatcgatgatcgtgatggcgagtagggatagagagagtagagatcgggagcttctgatcccggtcgctgacgccgtccacgatgattcctccaaaccttctccttcctcttcttccagtcacgccggccgcgaggattcccgcataatttactggagctgttgaaaacttggaaattgttttccctttttcccccatttttccgagatttgtgacaattgttgccttttctcttagaggctttaccttttacaaagttttccggagctgggcttcaaagaagttcatgacgggatgtgtcattttgtttcctatagcaatcactttctacataacgtggtggttcattcactttgtggatggctttttctctccaatttatgctccaattggcattgaactatttggtcttggatttgtcactactatagctttcatcttcttggttgggt

SEQ ID NO: 14724 - DNA, 450 bp, Gossypium hirsutum
  Clone ID: uC-gsronu33B132a02b1
atcagaacacacaagccttcaaggaagtagccattataaggcacccacgtatcggtgaatatgcatttgccttcatcacttcatctgttactctgcagagtgacgctggtgaagaagagctatgctgtgtgtttgttcccacgaatcatctttaccttggtgatatattcctcatcaacaccaaggatgttatcagactgaatctgtcagtccgtgaaggaattgaaattgttatatctgggggaatgtcaatgcctcagatcctatcaacactagatactcagttggaaagaagcagacctgagagaagctgagatataaggtaacagttgtagagttgtcgttgtttatttgattcacttttttagttttggacttcagtcatcggaccgaccatgcaatcaatatgtctcaataatgcaggattcggaattagattataaaaatttg

SEQ ID NO: 14725 - DNA, 412 bp, Gossypium hirsutum
  Clone ID: LIB3083-024-Q1-L1-B1
tttttgtgaaaaatccaaactcaaccctacgggaaccagtgctccaaatctacacttgaaaaaacaaacagtttttacattctatgctcaagtaacaacatttggggggaaagatgaaccccgcaattatcaacaaatcttacactttgaaagcaaacggtttttacatttctatgcaagcaagctaaattacagatgccaccagaaccagacactaccatcacaaatttttataatctaattccgaatccttatatctcagcttctctcatgtctgcttcttttcaactgagtatctaatgttgataggatctgaagcattgacattcccccagatataacaatttcaattcctttacggactgacagattcaatctgattacatccttggtgttgatgaggaatatatca

SEQ ID NO: 14726 - DNA, 396 bp, Gossypium hirsutum
  unsure (1)..(396): unsure at all n locations
  Clone ID: LIB3165-047-Q1-K1-G11
cggacgcgtgggcggacgcgtgggcggtcgcttgggaaaaaattgaaaatatctggtgggggtttaaatgtatagnnccnnnnatgggaaacggtgacnngggagaaagggtggaagcaggttagggtttctgggattgttgagaaggagattagcagcagggtttccaggtgatgggcgatgagaaatcgatgatcgtgatggccagtatggattagagagagtatagatcgggagcttctgatcccggtcgctgacgcccgccacgatgattcctccaaaccttctctattctctgcttccagtcaacgccggccgctagacctattacaaagttttccggagctgagcttcaaagaagttcatgacgggatggtgtactttgtttcctatagc

SEQ ID NO: 14727 - DNA, 1549 bp, Gossypium hirsutum
  Clone ID: GOSHI-09MAY01-C16465_1
ataaagcgaaaatggaaagagcaaccagcgaccgacgttgcgtcgcaccttactactactctgaattatgtccaaattttatatgtcttttcgggcaaggctttctcctccttggcgcttcgaaaggctgagctttgggtttcgaatttctctcaagatctgccttccattatcacacctttgtagcttcgcgttattctgctcacgagcaggtggcgatgatagaatgcagtgtttgccattctaaaatagcaccaccggctagcggggccagggccagtgcttacgacaagcaccgtacctttgtttcttccaaaactcgtttcctcaatgttcatttcggttgctggtgactgccttttggtcggttttcagcccatattggtttatatgtcaaaggtggatgggggcttcaagtatagtcccattagcgttaactttctcattgaggtggccaaagttattttcgccattgttatgctcttgttccagtctcggcataagaaagttggggaaaaatctcttctctcagtttctgcactagttcaggctgctcgaaataatgttcttcttgcagttccagctctactttatgctattaataattacctaaaattcatcatgcagctttatttcaatcctgcgacagtgaagatgcttagcaacctgaaggttttggtaatagctatcttgttaaagatgatcatgaaacggcggttttctatcattcagtgggaggctcttgctttgttgcttattggaattagcataaaccagttgcggtctttaccagagggtactacttcatttggtcttccggttgcaactggcgcatacttgtatacactaattttcgttactgttccatccctagcatctgtctttaatgaatatgctttaaagagtcagtttgagacaagcatttaccatcagaacttgtttctttatggatatggtgccattttcaatttcctagccattcttggaactgcaatttttaaaggtcccaatagcttggatatcctgcagggacattcaaaggctaccgtgctcttaatatgcaacaatgcagcccaagggatcttatcatctttcttcttcaaatatgcagatacaatcttgaaaaagtactcctcaactattgccacaatctttactggcatagcttctgctgtactgtttggtcacaccctgaccataaattttgtgtttaggaatctcagttgtgataatctccatgcatcagttcttttcatcatattcaaaggttaaagatgaacaacgcagtggtaattttaaaatggtggaaagcatagacagccagaggtctagggatgcatccttcccaaatatgactgatgttagtgaaaatgctagccaccatgttaatgaggaaaaaggaccacttcttccagtttaggttcgcatatattcggtatctatgtgcaatattggcttttcttacaagaaaatttatggagtatacattcttttaggttgactcagactcggagtgaagatataatacagatcatccagaataattact

SEQ ID NO: 14728 - DNA, 398 bp, Gossypium hirsutum
  Clone ID: LIB3048-041-Q1-L1-B3
caaggttttggtataagcttcctggtaaaaaagggcctggaaccggcggtttccattctttcatggggaggctctggctttgtgcttaatgggaataagcttaaaccagttgcggtcttccagagggactacttcatttggtcttccggttgcaactggcgcatacttgtatacactaattttcgttactgttccatccctagcatctgtctttaatgaatatgctttaaagagtcagtttgagacaagcatttaccatcagaacttggttctttatggatatggtgccattttcaatttcctagccattcttggaactgcaatttttaaaggtcccaatagcttggatatcctgcagggacattcaaaggctaccgtgctcttaatatgcaacaatg

SEQ ID NO: 14729 - DNA, 362 bp, Gossypium hirsutum
  Clone ID: LIB3048-025-Q1-L1-B9
ataaagcgaaaaaggaaagagcaaccagcgaccgacgttggatggcaccttcctcctactctgaattatttccaaattttttttttcttttcgggcaattctatttccttttaggcttaacaaaattctgatcttagggtttcgaatttctctcaagatctgccttccattatcacacctttttagcttcgcgttattctgctcaggagcaggtggggatgatagaatgcagtgtttgccattctaaaatagcaccaccggctagcaaatccatatccagggcttacgacaagcaccgtacctttgtttcttccaaaactcgtttcctcaatgttattttggttgctggtgactgccttttg

SEQ ID NO: 14730 - DNA, 1532 bp, Gossypium hirsutum
  Clone ID: GOSHI-09MAY01-C16785_1
attgtaatgagaaacttgaatcagatccatgggagctagttccatcaaatcatctcaaaagaacccatttttcacaccaaaaacacccataatttcccaagctccacccacatccatcttcatataatcccaatttccttttctattaaaaacccagtttttttcttcacccaaattaagacacccagatcctcaaaacccaaaaagaaaccatgaaaaaccaatcgaaaatgctcacgatcgggctagtatcagcctggtactcttccaacataggtgtcttgttgttaaacaagtatttactaagcaattacggtttcaaatacccaatcttcttaaccatgtgtcacatgacagcttgttctttgttaagctacatcgcaattgcatggatgaagatggttccaatgcagaccattcgatctagggttcagtttttcaagatctcggctttgagtttagtcttttgcgtgtcggtggtgtttgggaatatttctttgaggtatttgccggttagtttcaatcaggctgtcggtgctacgacgccgtttttcacggcggttttcgcttacttgatgacattgaagagggaggcttggcttacttatcttactcttgtccctgttgttactggggttatcattgccagtgggggtgaaccgagtttccatctattcggttttatcatgtgcgtttcagctacagctgcaagagctctcaagtcagttttacaaggaattttgctttcttccgaaggagagaagctgaattccatgaacctcctcctttacatggctccgatagctgttgtatttctacttcctgcaacactcattatggaagaaaatgtggtgggtattacccttgcccttgcccgagatgacgtcaagatcatttggtatctactattcaattcagcactagcatattttgtgaatttgaccaactttttggtcacgaaacacaccagtgccctgactttgcaggttctaggaaacgcaaaaggagctgtagctgtggtggtttccattttaatttttagaaacccagtctctgttaccggaatgcttggttatacactcacagtctttggcgttatactctacagtgaagccaagaaacgaagcaaatgaggcaacatcccgggaccacaatacatacgtgcaatttttcttattttattgcaaggacaacggtaaagcccaagaagcagttctggctgtgtagaagcctgtggtgccatggatttgcactatagattcaaaattttccctgtaagcctggaaaactaggttttatatatcatatatacatagatatctgtcagaaacatcagctggattataaaaaaaaaaaattagagaactcccataagtgaccgaacggtctctatcattcccagcttggggttttagaggaatatcttctttttcttttaaaaggaaaagtctgtagaattgacacacagtccatttgttatcaacattgctaatattttttattaattaatgaagaaggaaacgcatttgttt

SEQ ID NO: 14731 - DNA, 601 bp, Gossypium hirsutum
  unsure (1)..(601): unsure at all n locations
  Clone ID: AI731735.1
gccttacacttgtgcctgttgttactggtgttatcattgccagtgggggtgaaccgagtttccatctatttggtttcatcatgtgcgttgcagctaccgctgcaagagctctcaagtcggttttacaaggaattttactttcttccgaaggcgagaagctgaattccatgaacctccttctctacatggcaccgatagctgttgtgtttctacttccggcagcgctcattatggaagaaaacgtggtcggtataaccattgcccttgctagagatgacatgaagatcgtttggtatctaatattcaattcagcactcgcttatttcgtgaatttgaccaactttttggtcacaaagcacactagcgccctcactttgcaggttctangaaatgcaaaaggagcagtanctgtggtggtttctattttaatttttagaaacccagtttccgtcaccggaatgctcggttatacactcacagtctttggggttatactctacagtgaagctaagaaacgaaacaaatgagactatcctgggaaaacacggtacgtacgttaccggtcatatatttcatttccttttattgcaaagaacatcgt

SEQ ID NO: 14732 - DNA, 573 bp, Gossypium hirsutum
  unsure (1)..(573): unsure at all n locations
  Clone ID: AI054673.1
cactgatattctaatgagaaacttgaatcagatccatgggagctagttccatcaaatcatctcaaaagaacccatttttcacaccaaaaacacccataatttccctagctccacccagatccatcttcatataatcccaatttccttttctattaaaaacccagtttttttcttcacccaaattaagaacacccagatcctcaaaacccaaaaagaaaccatgaaaaaccaatcgaaaatgtcacgatcgggctagtatagnctggtactcttcattaagtgctnggggtgtaaacaagtatttctaagcattaacggtttcaaatcccaatcttttaccatgtgtcaatgacgctggtcctttgttaagctaatcgcattgctggatgagaaatggtccagtgcacatttaattagggggtcaattttccaagacacgatttgggtttagtctttcggtcgtgtgggtttgggaatattcttaagaattgcgtggagttaataagtgcngggctacacacgttttatggatttcgtactgagactgaaagaagcgctactattacttgtcgg

SEQ ID NO: 14733 - DNA, 410 bp, Gossypium hirsutum
  Clone ID: LIB3197-030-Q1-M1-C10
gcattggttcccagatttcaagttaataccgggttctttctccttttcttaatcccagatacccagatcttcaaaacaccaaagaagaccatgaaaaccaactccaaattgatcacaatcgggctagtaacagcctggtactcctacaacattggtgtattgggtgtaaacaaatatttactaagcaattatggtttcaaataccccatcttcttaaccatgtgtcacatgacagcttgttcattgttaagctacatcgcaattgcatggatgaagatggtccccatgcagaccattcgatctagggtccaattcttcaagatttcggcgttgagttcggtattttgtgtgtcggtggtgtttgggaatattattttgaggttacttccggttagctttaatcaggctgt

SEQ ID NO: 14734 - DNA, 513 bp, Gossypium hirsutum
  Clone ID: LIB3585-051-P1-K1-G11
cccacgcgtccgaaattctaaattttcttgtctttgggagtccttgatcttgtgaggagaggcttgaatcacatccatggaagctaattccaacgaatcatcccaaagctatcctttttttcccaccaaaataacccataattcccccaactgctcccagatccgccttcatataataccaatttcattcatttattcattaccagctcattctttctcaaaataaagatacccagatcttcactaccccaaaaagaaccatgaaaaacacatccaaattgttcacgatcgggctggtagcatcatggtactcgaccaacattggtgtcttgttgctaaacaagtatttactaagcaattacggtttcaaatacccaatcttcttaaccatgtgtcacatgactgcttgttcattgttaagctacatcgcaattgcatggatgaagatggttccaatgcagaccattcgatctagggttcagtttttcaagatcttcgccttggagtttggtc

SEQ ID NO: 14735 - DNA, 269 bp, Gossypium hirsutum
  Clone ID: uC-gsflnu33B050a03b1
ttttacgcgtacgcccacgcgtccgtcgagattcttcacgatcgggctagtaacatcctggtactcgtccaatattggagtgttgttattaaacaagtatttactaagcaattatggcttcaaatacccaattttcttaaccatgtgtcacatgacagcttgttcattgttaagctatatcgcgattgcatggatgaaaatggtaccaatgcaaacgattcgatctagggttcagttcttgaagatctaggctttgagtttagtttttt

SEQ ID NO: 14736 - DNA, 637 bp, Gossypium hirsutum
  Clone ID: GOSHI-09MAY01-C16755_1
cggccgcgtcgactgcgtattctagattcgcttcagttcctcaaattgttgtttggagaataagctttgtgaatcaggtaaagatgatgggcgaggatctgggcgtggaacccaaggaagcggcggttcgtgaggtggcgaagatacttcctcttcctgagctttgacaatccatttctaccatcaaagctgattatattacctcgtcaacaggcaaatgacgcacaacttagtacaatgggtgcagagcaggttgagcaggcccaagcgggactcgaatcgcttaactcatctcagaaaacaataagccagctgcgtgaaaacgttatatctattgaaaacttatgtcgagagtgccaaaacttaattgataatcatgatcagataaagcttcttagcaatgtcaggaacaacttaaatacaacgctcaaggatgttgagggtatgatgtccatttcagttgaagcttctgaggctcgagattctttgagtgatgataaagaacttgtcaatacttatgagaggttaactgcacttgatgggaagcggcgatttgctttagcagctgtggcatctcataaagaggaagtcggcaggtcaaaaaaatattttgaaaacgttgatcgacctgggaaac

SEQ ID NO: 14737 - DNA, 1616 bp, Gossypium hirsutum
  Clone ID: GOSHI-09MAY01-C16775_1
aactcgatgagcttgaagaacagaggaaaagtgttgcatcctacatggaaagtttgaaaaatgcccagatagaagtagagagtgaaagagtgaagcttagggttgtagaggctcgaaacaaggatcttgaacgggatttatctgtagagagggaactaataaaagtcgcgccagaggagctgaagaaagagaaatattcacttcagctggctatccaggatgcctcttttcttcgaaagcagttagggaagaagcatactgaatttgttgaaatgaacaatgttctgcaaaataaagaagtagacctggtggaggctaaactcgaaatccagcatctgaaatctgagagagcttctcttcagcttatattggaggagaaagaccaggaactctctgatgccaaaaagaatttagagcaattaaaccaagagattgcagagctgaagatgcttatgagcagtaaagaaaatcagctcattcaagctactgctttattaaaggagaaagatgaatatgctctgaaagtacaagatgagttgaatgatacaaagatgaagttctctgaagctgaaactgtcatagaacgaattgcagaactcacaaaccgactagttatctcagttaaggatgaagacaataatgtgttgaggcctgttgatgatgtgagcagcgaattaatgcatcagctggtagataggccttctagtgattttggattgcagaaaaagcaacttgaaactgaactcagattcactaaagagagcttaaaagataaagaaatggaagttcttgctgcacagagggctcttgcaataaaagatgaagagctcaaaatggttcttggaaggttggaggcaagagaaaaagaactacaaaggctgaaggaagaaatgattgaagatgctaatgatataaagaagctttatgctttggcacaagagagaattggggagaaaagtataggtgacttggccattgagaagctgcagctcgaggcagctcaactggaagttgaagctgccacgagtgctcttcaaaaactggctgaaatgagccatgaacttttgattaaagctagcactagtattgagtctgattctgataccagtatcttcctgcaaagtggttctgatccaatgattagcatgatgaagaacgatgaaagtttcactgaggttaaaacaggagtagccaagctttcagctttgacagagcagctagtgaaagatgctggaattgttggtgtacacctgcaaagttaaagctcctgacttgatgttgtagataaatatctgactgtttttgctcccagtgaacggccggcattgggtggcgtgttcagctcagcagaattttgggtcgtaggttagttgcctgcttcttgattattaatcatgttctcatcgatcatgcagatgtcaaaacgtataatattctttagtttgatgctgagcaaaactctaccaactatttattccttgctctgaagtagagacttagaccttctgtgtacttgtatcatgttcatgtactttatcatgttacaatctgtgttgaagttattttatatttatataaattatgatattttaataaaaaaaaaaacccacgcgccg

SEQ ID NO: 14738 - DNA, 682 bp, Gossypium hirsutum
  Clone ID: GOSHI-09MAY01-C16715_1
gaaacctgtattacgcaatccatggctaccctttcttcaactcattcttcctcacaaaacatcctcattacgttcaccataatattcctcgcatcatctcttctgccttcctattctgcaatcactgagactgaccaacgccgcccatttaagaagatatacgccttcggcgactccttcaccgacaccggcaacaccgagtccctcaccggccccaatggctttgtccgcgtttccaacccaccttacggcaccaccttctttcaccaccccaccaaccgctactccgatggccgactcgtcatcgacttcgtggctcagtcactgtctctgccgttcttgccgccgtaccgttctcagaaaagccatccagaacttatcgggtttatttcgcggtggttggttcgactgccataaatcttgctttctctgtttagaactacccttcgctcgataccactccctagtcgattcacactcccatgatgtggttcgactactatttggagagtgaatgttgttaagatcctgaatcggatctctgctagtatacgtctgattatgctctgtcctgggttggtgcaatcggcgtctttcattctccttctgctctcggatctaccgtgtcttggcattcctttctatacctgcctttactacttttgcggactttttacggggc

SEQ ID NO: 14739 - DNA, 598 bp, Gossypium hirsutum
  Clone ID: GOSHI-09MAY01-C16695_1
tcttctttccctctttagtttttcacctggggggttttcattcacatagcggaaagtgatttagttcgtactttccattgagatctcgtaagagataaaggagaaaacgagaattctccaccaaatcccaacttcaaacaccttagttgctacgcttttgtttgaagaaagaataattaaggggaaaaatatgcctagattgttatgactttcgttttgttgaaaaatgaccggacatccttggccgcacgatcgagcttccttccgatatcaaccctccatcaatcgtcgtcgcagcagtaaaaatatattacatctgttagggaagagagaagtctctcctagaacaaaatatgtaccaaagaagctgtggggagaagcacctaaacgaaatgtctattcttcaccttggactgaacccattagagatgccagacgtggtattctgtcatgggctgaggaagagtctttgcagcatttatcaggcaaatattgtcctctggttgccttctccaaggtcaacatttgcaccagcttttatttctgatggaagaacacttgcttctacccatggtgatcacactgtggaagatttttg

SEQ ID NO: 14740 - DNA, 859 bp, Gossypium hirsutum
  Clone ID: GOSHI-09MAY01-C16655_1
gagggcgcggggatttaagctgtttagttggcggcgggcaaagtaagggtgaaaaattgaaaagaatgggaaaacgagacaagaaacgaaggcaccaacaaagatcatctcatagaggagcagcctcttattactctgtccaacacgatgatgattatgaagatgagagctccagttttcaacaaccatctcaagattttgaagaagaacaacaagaagaagaaccagaacaagaggaagaagaagatgacccaaacccatcaccggaaatgccatcaaaattcattctttaccaacaatctgtacagtcacccgaaggagatataagctatttgcagaagttctttttgatgtatgtgggtggaaggttgcctctgcatcttcaagaagatttctgtggcactgcacttcttagtacagaatggctccgaagtgatccaaggcggacagcttttggattggatcttgatctcgaggcattgcagtggtgcctggagaacaacatcaacaaagttggggctgatgggtattcgagaatatctctctttcacgggaatgtattaaatccgcatgaggcaaaattagtcagcttcaagcctcaagagctgataaggaacattcagttggaggaaagtgattataattctcagatgactgcaacagaacctaacataaacgagggttctatcactttgtcaaatgaagagtctgttaaggcagattccaaaatatctgcaagagacattatatgtgcttttaattacagctgctgctgtctccataaacgtgcagaactggttttgtatttcaagcatattcttgaagccttgtctaaaaagggtggtatatttgtgatgga

SEQ ID NO: 14741 - DNA, 637 bp, Gossypium hirsutum
  Clone ID: GOSHI-09MAY01-C16645_1
cttttgcgtggggcgaagatcaaggtccaagtcaagatcaccaatcatttataggcgaaagtcaaggtcaaagtcaagatcaccaatcagttataggcgaaggaggaggtctcgctcttattcacctctgccccgtttccaaagggaccgtaggtccagatcacctgtgcgatctcatcatcgttcaagaaatttttgtgcttcgcatatagagatagggatgacaagacaggagtggagacccgactcgcagagatcgcgtgatcgtcatgcatctcgttcgaggagaaataggagtatgagtcctcgaactagaaaatgaactcctgtagattctgactcccctaaacatagtagagaaagttcacctaagcttaggaaatcatcccgtcctgggtcaacatcaccaaggcatcacagaagaaatagggcatccccaaagaatgatgatgaaaagaaattgaaatatagaaagcgctctaggtcaatgtctgttgatttggataacaaaaagaatgagaccccagatggaaaaacaaagcaccgcatgaagaaggcgatcgaggtcattatcttcagaagggagacctcaaagaagaagcaagtcttcttctgcaagttcatatgaaaacaattc

SEQ ID NO: 14742 - DNA, 1224 bp, Gossypium hirsutum
  Clone ID: GOSHI-09MAY01-C16675_2
tctagaactacggatgccccggctgaggagattcgcacgagtgatgccctaactttgggctcagtcctagtgctgattggtctgccggtgttgctgctattacttatctccggtcattgttgcagcaaggcccaaaaggtattcaggaagtggttcaaaacttctagaaggtaatgaaactgtttttccagcacttggatgacccccaccataaagttgcacaggctgccctttcaacccttgctgatattattccatcatgccgaaagccctttgagagttacatggaaaggatcttaccccatgttttctcacgcttaattgatcccaaggagttggttaggcagccttgctcaacgacgttggaaattgtcagcaagacctatagcatagattccctcttacctgctttgctgcgttcactggatgaacagcggtcgccaaaggcaaaattggctgttattgagtttgccattagttccttcaacaagcatgctgtgaatcctgaaggttctggtaacattggcatcctgaagttatggcttgctaagttgacgccattggcccatgataaaaatactaagcttaaggatgcagctattacttgcatcatatctgtatacacgcatttcgatccaaccgctgttctgaattttattcttagtttatcagttgaagaacaaaattccttgagacgggcacttaagcggggcacacctcgtattgaggtggatctaataaactttttgcaaaacaagaaagagagacagcgctctaagtcatcctatgatccctatgatgttgtaggaacatcatctgaagaaagatatattggtgtgcccaaaaagagtgctttccttgggaggtattcttccggttccattgatagtgaaggaggtaggaaatggggtaccacccaggaatcaaccctgatcactggcagtattggccaggcaacatctgatgaaactcgggagaacttatatcagaactttgagaccagtccaaatgcagatgttcttctttctaaaactaatgaatcatcttatatggtttattccatgggtcagaacttgggatctcgaaacttggaaagtaattttaacttggaaggtgtatctactccacaactggaaattaatggtctgagtagatccgactcattaggggctattggtggggttgctcataattatgagacttcatcaggtttagatcttaatc

SEQ ID NO: 14743 - DNA, 834 bp, Gossypium hirsutum
  Clone ID: GOSHI-09MAY01-C16675_1
cggacgcgtgggcggacgcgtgggcggacgcgtgggcggacgcgtggtcggacgcgtgggcggacgcatgggtggggcccccccctccgatcaaccctgatcactggcagtattggccaggcaacatctgatgaaactcgggagaacttatatcagaactttgagaccagtccaaatgcagatgttcttccttctaaaactaatgaatcatcttatctggttcattccatgggtcagaacttgggatctcgaaactgggaaagtaattttaacttggaaggtgtatctactccacaactggaaattaatggtctgagtagatccgactcattaggggctattggtggggttgctcataattatgagacttcatcaggtttagatcttaatcaccttaaaccagcagctgtaaagattaactccatgccagacgctgggcctagcattcctcaaattcttcacatgatctgcaatgggaatgatgagagccctaccgcaagtaagcgcagtgcacttgagcaattaactgaaatttctgcggctaatgatccctcgatttggagcaagtacttcaatcagattttgacagctatacttgaagttttagatgattctgattcttcaatcacagaacttgcgctgtcattgatagttgaaatgcttaaaaaccagaaagatgctatggaagattctgttgaaatagtaatcgagaagctgcttcatgtaacgaaggatattgtttcaaaagtttcaaatgaaactgtgcactgcttgaacactgtgctgtctcagtatgatccattcagatgtttaagtgtgattcgacacttatta

SEQ ID NO: 14744 - DNA, 484 bp, Gossypium hirsutum
  unsure (1)..(484): unsure at all n locations
  Clone ID: LIB3149-015-Q1-K1-E2
ttcccgggntcgaccccacgccccgtccgggaacaatcnnatctgaagaaagggaaatatattggttgtgtctcaagaaagaaagtgcttnntccttgggagggtatgtcgttccgnngttccattgatgagtgaagggagggtaggnaaaatggggtaccanncccaggaatcaacncnnctgatcactgnngcagtattggcccaggcannacatctgatgtaaactcgggagaaacttatatcnagaactttgagaccagtccaaatgcagatgttcttccttctaaaactaatgaatcatcttatatggtttattccatgggtcagaacttgggatctcgaaacttggaaagtaattttaacttggaaggtgtatctactccacaactggaaattaatggtctgagtagatccgactcattaggggctattggtggggttgctcataattatgagactcatcaagtttagatcttaatca

SEQ ID NO: 14745 - DNA, 590 bp, Gossypium hirsutum
  Clone ID: GOSHI-09MAY01-C16195_2
cccacgcgtccgcccacgcgtccgcccgcgcgcccgaattaacaccatggccgtcagtgagggtggtgtaatggctaccggaggtgacaacgggagtttgtggttttgggattggaggagtggtcacaatttccagcaagctcagacgatcgtacaacctggctcgttggatagtgaagccggcatctacgctctctcgtatgatgtaactggtacaagattgatttcctgtgaagcagacaagaccattaaaatgtggaaagaagatgaaaccgcaaccgaacaaactcatcctcttaacttcaaaccacccaaggatatccgccggttctagctgcgcacctcggtttgtccggttttggtgactcgatcttcagctttattacaatgtattttgagataatgtaagattagaactagtttttggttaattatgataaatctttgcttcagagataaaacaatttttgttgattcctagataaagcacctgataaatgatacatttcagtgaccctgttttgatgttcgtgctaagattgttattatattctaaagccattgctggcggtccaagaatgttgaagttt

SEQ ID NO: 14746 - DNA, 1727 bp, Gossypium hirsutum
  Clone ID: GOSHI-09MAY01-C16195_1
cccagcgtccggaagggtttaagcttttccagtttagcttgaatcaaccaaaactcccaaatcttggaaattgggagaagatggcagcaccaacgctggagatggagccagttgagcgacagtcattgaagaagctcagccttaaatccctaaagcgcgctctcgatctctttagccctatccatggccaattctctgctcctgaccccgaaagcaaaaaaattcgcatgagccacaagataaatgttgagtattgtgggattaaaaccgcctcgggtcagacttctaggcaatctaattccggtgcagctgataccgggaatcaaggttctgtgccatcgaatgcccttgctcttgcaggtccagctgattctagggattcacagaagggaggagctcaaaatgctttagttgttggtccatctttgcaaccaaagggacaaaatggtacttcaggcaagagcagtgccattacttctgcttctgcacccttttctgaaaggctgacaacctctgctataatagaaaggatcccaagcaaatggccacgtcccgtgtggcatcgtccatggaagaactacagggtcatcagtggacatttgggatgggtgagatcagtagcccttgatcctagtaacaactggttttgtactggttctgctgaccgtacaatcaagatatgggatgtagcaagtggaaggctaaagctcacactgactggacacattgaacagatacgaggcctcgctgtcagtagcaaacacacatatatgttctctgctggtgatgataagcaagttaaatgctgggaccttgaacagaataaggttatccggtcctatcatggtcacctaagtggtgtttattgcttggctcttcatcctacaattgacattttgctaactgggggacgtgattctgtctgtcgggtatgggatattcgcaccaagatgcaaatttttgcactgtctgggcatgataatactgtttgctcagtttttactcgaccaacggatccgcaaattgttactggttctcatgatacaaccataaaattctgggaccttagatacggaaaaacgatgtcaactctaacacaccataagaagtccgtgcgagcaatggcaccacatcctaaagagcattcttttgcatctgcatcagctgacaacattaagaaattcagtcttccaaagggagaattcttgcacaatatgctctctcagcagaagactataattaacaccatggccgtcaatgaggatggtgtaatggctaccggaggtgacaacgggagtttgtggttttgggattggaggaagcttggtcacaatttccagcaagctcagacgatcgtgcagcccggctcgttggatagtgaagctggtatatacgctctctcatacgatgtaactggtacaagattggttagctgtgaagctgacaagacgattaaaatgtggaaagaagatgaaaccgcaaccgaacaaactcatcctctcaacttcaaaccacccaaagatatccgccggttctagccacgccttcgtttttgctcagttacctatcccgagtcttgtacaatgcttttaagatatgtaaggcaaaaaaattttgttgcttagtctggataccaactataactgaactgagctcaagctcgagttcgattgagttttattttttaaaactcgagatttatttgaggtaaaaaccaaactaatatt

SEQ ID NO: 14747 - DNA, 622 bp, Gossypium hirsutum
  Clone ID: LIB3825-009-Q1-K6-A11
tcgacttttatttatttgtctatttactcaaatttcattaaactctatttgtaaactaaagcttttgtttttcaatggaatgtaccaaaaaattcgcttgagccacaagataaatgttgagtataatggaataaaaactgccccgggtcaacctttgaagcaagttaattccagtgttgccgatgataagtgtcgaggttcggccccttcgaatgcccttgctcttacagattcttgcgattcacaaaaagaagggactcaaaatgctttacttgttggtccatctttgcaaccaaagacgcaaaacaatgttggtacttccggcaaaggcaccgccatggtttcggcttccgcacccttttctgaaaggctaacaacatctgcaataatagaaagaatcccaagcaagtggccacgtcctgtatggcatcgtccttggaagaactacagggttattagtggccatttgggatgggtgagatcggtagcttttgatccaagtaacaactggttttgtactggttctgcagaccgtacaatcaagatatgggatgtagcaagtggaaggctaaagctcacactaaccggacacattgaacagatacgaggcctcgctgtcagt

SEQ ID NO: 14748 - DNA, 632 bp, Gossypium hirsutum
  Clone ID: GOSHI-09MAY01-C16165_1
cccacgcgtccgtgtctttaaacttttgtaaacttagccatttcccttcatcttctccactgctaaccagcgaaaattctaatactcgataatggatgggaatgattctgtagattcaaaacaggacactacggatatggcacttttcgtccagaatctacttcaacagatgcaatcaaggttccaaacaatgtctgattccatcatcacgaagatcgatgagatgggcagcaggatagatgagctagaacaaagcatcaatgatctcaaagcagagatgggtgcagagaactctcctcctccagttcctcctgcggtaaaagatgattccaagtcacccaatgaatcctaatgcgatagcttaaggaaattcggcatctaaagccagtaattcaagcctcctctaattgctattttcatagactacccttatatttgtaactcatccttttgttgaatgttgaaaaccatcagcaacatgcatcttattctttaaacagaactttaaggccatgattaggctttttaatctatgcatatttgaatactgtaatagctatgtctgacatgaatattcacgggtcacggatttctgaagcaatcaatctagatagaaaatagtactagtttgc

SEQ ID NO: 14749 - DNA, 611 bp, Gossypium hirsutum
  Clone ID: GOSHI-09MAY01-C16085_1
cactctgtcaaagtctttagggctccttccaaagacacggagtcttgatttggatacgctctaacatttgtccgtacagataattcatactaaagatttaaccggaaaccaaagccatggaaatgtccaacgatctcgataggttgctctttttcgagcaagctcgtaaaatttccgaggctacttacgcttccaatcctctcgatgccgataatttgaccagatgggccggagctttactggagttgtctcagtttcaaagcgttccagattctcagaaaatgattcaagatgctatttcgaaactagaggaggctttatctattaaccctagaaagcatgatgctttatggtgcttgggaaatgctcagacttcttttgcgtttctgactaacaaggaggacgaggcaaggccttatttcgaaaaggctgctcaatatttccagcaagcagtcgatgaggacccgagcaatgacatttaccttaagtctttagaaatatctgccaaggctccaaaattacaccaggaaatcattaagcatggttcaggttcacagacgcttggggctggaccttctacttctacttcctccaattcaacaaagactgca

SEQ ID NO: 14750 - DNA, 399 bp, Gossypium hirsutum
  Clone ID: uC-gsflmaxxa119h05b1
gactcggagtcttgatttggatacgctctaacaggtgtccgtacagataattcatactaaagatttaaccggaaaccaaagccatggaaatgtccaacgatctcgataggttgctctttttcgagcaagctcgtaaaatttccgaggctacttacgcttccaatcctctcgatgccgataatttgaccagatgggccggagctttactggagttgtatcatctccttatttgtccattttcttatattccgtttcatgtctttatttcttttttctcgcttgttttctatttactttacttcattattttccttttttcttctattcttctttcttctttatttctatatctcttttccttctttctctctttcctacttctctctttcctttatttcc

SEQ ID NO: 14751 - DNA, 564 bp, Gossypium hirsutum
  Clone ID: GOSHI-09MAY01-C16075_1
gagggacgcgtcacgcgtacccgtccgcgtacgcgtacgcctaccgcgtcaagaaaagagagcgataaaaccctttcctttattttgggttctttttccttctaaattttgggtttgtttgttttaaattatgaatccatagcggagagatcatagaaaaaaggcttgacctttgatcgatctcgcaacaaggaagtttacttttttaattggaaaaaatgctttttctttttaagttaaaaagattttaaaagacccaaaaaaagtaaaaaaaaaatgtctgttgcagagctgaaagagaagcacgcggcggcgacggagacagtgaataatctaagagaacgattaaagcaaagacgtcaacagttgctcgacactgatgttgctacatatgcaagatcacaagggaagagtccagttacttttggtcctacggatctggtttgttgcaggaccttgcaaggtcacactggcaaggtttactccttggattggactccggaaaggaaccggattgttagcgcgtctcaggatggacgattaattgtgtggaacgctctaact

SEQ ID NO: 14752 - DNA, 476 bp, Gossypium hirsutum
  Clone ID: LIB3272-041-P1-K1-F2
accgatccggattccgcgctcgagcacgcgtgcgaatcatcaccttcagcataaaaaaccattccctttattgggggttgtttaagcttgtaaatcttatacccggtcgttgttacatggtccaggcctagatgagtaggaagtcgcggagggcgtcacattagatggatcgcgagcccgggcggagcggtcgtcggagcagatcttgggggttgtagcttatagtcaaatgggatctttgagggccgaagaggggaaaggttacatgtgtgctggaactctcaaatgagaaagcccatcctaagcggcgacagtagataatctaacagaacgattaaagcagagacttgaacgggtgctcgacactgatgttgctacatatgcaagatcacaagggaagagtccagttacttttggtcctacggatctggtttgttgcaggaccttgcaaggtcacactggcaaggtttacttct

SEQ ID NO: 14753 - DNA, 538 bp, Gossypium hirsutum
  Clone ID: GOSHI-09MAY01-C16035_1
cccacgcgtccgaagaaaagaaatataagccgtagaagagggctctctcttggttgagcttattccccccattatttgctgtgactactccttttccaaatcttttcagatggatcgttaccagagggtggagaagccgaaagcagagacacccattgacgagaatgagattcggattaccagtcaaggaaggatgcgtagttatatcacttatgccatgactctgctccaggagaagggatcgagtcaagtagtttttaaggcaatgggaagggccattaacaagactgtgaccattgtggagttaattaagagaagaatcgttggtttacatcagattacatcaattggatccatggatataacagatatgtgggagccgctggaggaaggacttcttccattggagaccaccaggcatgtgtcaatgatcactataaccctttcgaaaatagaattgaatacgtcctctgttgggtaccagcccccattaccagctgatcaggtgaaagcatccacagaagtcgatcatgaaaga

SEQ ID NO: 14754 - DNA, 435 bp, Gossypium hirsutum
  Clone ID: LIB3493-011-P1-M1-G9
tataagccgtagaagagggctctctcttggttgagcttattccccccattatttcctttactactccttttccaaatcttttcaggttgtatttttcagatctaatcctattttcccctcgcttttgcttctctttcatcttttctaatttttttttgggcggtggatagatggatcgttaccagagggtggagaagccgaaagcagagacacccattgacgagaatgagattcggattaccagtcaaggaaggatgcgtagttatatcacttatgccatgactctgctccaggagaagggatcgagtcaagtagtttttaaggcaatgggaagggccattaacaagactgtgaccattgtggagttaattaagagaagaatcgttggtttacatcagattacatcaattggatccatggatataacagatatgt

SEQ ID NO: 14755 - DNA, 469 bp, Gossypium hirsutum
  Clone ID: GOSHI-09MAY01-C16375_1
cggacgcgtgggcggacgcgtgggttaagaggagtggaataaccaaagaagaggaggagaaaagagagaaaaaggatttttttttaaagaaaatgaactataaaacctccacttctgtttccactatcatcatttctcatctcagatcttaatttccttcccattttctcatctgggtcatttcctatatggaattctgggttgtcttctgattagggtataaagttttttttcagatgatcctatattggatttgacagatccccatttttcctttgctaggattctatctgttcacaataaaaagataaagatggaatctgatcttggtaaactcttcattggtgggatatcgtgggacaccgatgaggaacgtcttaaggagtatttcggaaagtacggggaagtggtggaggcaatgatcatgagagatcgtgtaacttggcgtgcccgtggctttgggttcgtt

SEQ ID NO: 14756 - DNA, 423 bp, Gossypium hirsutum
  Clone ID: LIB3197-024-Q1-M1-F12
cccacgcgtccgcggacgcgtgggttttttttttaaagaaaatgaactataagacctcctcttctgtttccattatcatcatttctcatctctgatcttggtaaactcttcattggtgggatatcgtgggacaccgatgaggaacgtcttaaggagtatttcggaaagtacggggaagtggtggaggcaatgatcatgagagatcgtgtcactggccgtgcccgtggctttggtttcgttgtctttgccgattctgctgttgctgagagggtaattatggataagcatatgatcgatggtcgcaaggttgaggcaaagaaggctgttcctagggatgatcaaattgttctaaaccggaacgtggttggtgtcactggatctaccggttttggacgaacgaaaaagatttttgttggaggtttg

SEQ ID NO: 14757 - DNA, 989 bp, Gossypium hirsutum
  Clone ID: GOSHI-09MAY01-C16255_1
ctgggacgcagtgagatgtacagatgttaatgagattgctgagacaattaaggatagagggatgaataacatgcttgttctcagcgaattaaggatttcctcactcggcgggtgggagatcatggaagcattgacctggagtggttgagagatgttccgccagacaaagcaaaagagtacctgctaagttttagaggactggggcttaaaagtgtggagtgtgtgcggcttctgacgcttcaccatctcgctttcccaggggacacaaatgttggacgtatagctgtaagattgggatgggtcccccttcagccgctgccagagtcccttcaattgcatctcctagagctgtaccccgtcctggaatccatccagaaatatctatggccccgactgtgcaagctggatcaaagaacattgtatgagctacattatcaggtgatcacatttggaaaggttttctgtacaaaaggcaaaccaaactgcaatgcatgtccaatgagaggagaatgtagacattttgccagtgcattcgcaagtgccaggcttgccctgccggggcctgaggagaaaagcattgtcagtgctactgaaaatggaacatctgatcgaaatccagctgtgatcattgatcaactggctctgcccttaccgcagccaaatgaactatcagacaggaactatcagtctgaagcaaaccaacagttacaagccgcatccactgttaataaatgtgaccctattattgaagagccagcaagtccagaacctgagtgcacacaagtagcagaaaatgacattgaggacatgttctcggaagaccctgatgaaattcctacaatcaagcttaacatggaagagttcactcagactttgcagaactacatgcaaaataacattgaacttcaggaaggggatatgtcaaaggcttagttgctttaacagcaggagctgcatctattcccacaccccgacttaagaatgtgaat

SEQ ID NO: 14758 - DNA, 870 bp, Gossypium hirsutum
  Clone ID: GOSHI-09MAY01-C16215_1
cccacgcgttcgcccacgcgtcgtaaaaatgccaagcaaatcttcacctaacacgcctggacgttatctttcccacaaatttcgatacaggaacttgtcgtgactttccggtcgccaaaacacttttttttttctctattttattttaggtcaagttatacttgttcccattgcacattgacttattagtattatataaacataaaaatattaatcgaaccctaagagatttttagatgatccaaaagaatccaccttttttcttatctcttgttgattcatcaagcaaaatgttgactgatacagacaaggagttcttatctctaactgctactgttacagcggggtatcagttatttttctttttaatcgcggctgttttccagtttgataaactgactgattttgcaggaagcacgaatttcgtgataatcgctttattgactctggttaaaaagggatcatggcatttacgacaggtagtcctgacggcgatgatagtaatatggagcacacgattggcactatatctcttttttagaattttgcgatggggggaggataagcgttatgataggatgcgccataatgtggggaacttagcagttttctttatatttcagggtctttgggtgtggactgtgactttacctgtaacagtggttaatgcaagtgacaaagatccatccattcaggccgaagacatcatagggtggattatgtggtttgtgggtaccattgttgaaattttagctgatcatgacaaattttctttcaagaattctccacaaagcaaaggacagtggtgcgaaatcgtactatggaaatactcttgccacccaaactactgtggtgatatattacttacct

SEQ ID NO: 14759 - DNA, 566 bp, Gossypium hirsutum
  Clone ID: GOSHI-09MAY01-C17955_1
cccacgcgtccggttttatgattttgaatatctgcatttaccttcgcttacttccccttttctactgggaacaagggtggttgaatattcgtgaatcccaagccacctaggtaactaccacctgtcacaaattctggcatcataaccggaaaattcgatgggaaacacttcctccatgctcactcagtatgacatcgaagaagtacaacaacactgtaacaacgccttttcgcagcaggagatcgtctctctatacgaaagattctgtcagttggatcgaaacggcggcggtttcgtctccggcgaggagtttttgtccgtgcctgagttcgctgttaatcctctctctcagagattgttgacgatgctagatggattgaatttcaaggaattcgtagcgtttttgtatgcatttagtcctcgtgctactgtgcaacaaaaaattgaatttatagtcaaggtgtttgattcagatgggaatgggaaagtcacctttaacgacatgttggatgttttgactgatttgactggcccattcatatcttgacatagagggagccagtttt

SEQ ID NO: 14760 - DNA, 643 bp, Gossypium hirsutum
  Clone ID: GOSHI-09MAY01-C17865_1
accaagtcttagggatggtcctggtgttcaaattgctgcccaaacttttagtttccgtgaactcgctgctgcaacaaaaaatttcaggccggaatctttcttaggtgaaggtggattcggacgtgtttacaaagggcggctcgagagtactggtcaggtattgcagtcaaacagttggacagaaatggtctccagggtaacagggaattccttgttgaggttctcatgctcagccttcttcatcaccgtaatctcgtgaacctgatcggttattgtgccgatggggatcaacggcttcttgtatacgaattcatgcccttgggatccttggaagatcatcttcatgatcttccacccggtaaggaaccgttggactggaacacgagaatgaagatagcagccggtgcagccaagggtttggagtacctccatgataaagcaaaccctcctgttatttacagggacttcaagtcctccaacatattactggaagaaggatttcacccgaagttatccgattttgggctcgcgaaacttggtcccgttggagataaatcgcgtgtttccacccaggttatgggcacatatgggtattgtgctctgagtatgccatgactggtccattgacggtgaaatctgatgt

SEQ ID NO: 14761 - DNA, 484 bp, Gossypium hirsutum
  Clone ID: GOSHI-09MAY01-C17595_1
tctaaatccaatgattcttgagactctttatcatcggcgtgtttgtgattttgccatataatctgccttcgcttccatagggtacttaatttagtgctcattgttgtggggatctgtgaaaatgaatggagctgtgcttgtagctcttgcagcacccattggtaatatgttgcaaggatgggataatgccaccattgcacgcgctgttttgtacataaagaatgcgtttaaattgctaagtgcaccaactatagaaggcctgattgtagccatgtctcttatcggagccacctgcattactacatgctcaggaggcatatcggattggctaggtcgtcgccccatgctaataatctcgtccgtcctttattttcttagtggtcttgtgatggtatggtctcctaatgtttatatcttacttttggcaagacttttggatggatttgggatcggtttggccgtaactttggtcccggtttacata

SEQ ID NO: 14762 - DNA, 312 bp, Gossypium hirsutum
  Clone ID: LIB3196-028-P1-M1-B7
cggactcgtgggcggacgcgtggggtaaaggattgggggtttttcttttttgtgcgtgaaaaaagagtggagctgtgcttgtagctgttgcagcaacaattggtaacttgctgcaaggatgggataatgccaccattgcaggcgctgttctatacataaagagagagtttagtttggaaagcgaaccaactatagaaggcctgattgtagccatgtctcttattggagccacctgcattactacctgctcgggaggcatatcggactggctaggccgccggccaatgctaattatctcggctggtctttatt

SEQ ID NO: 14763 - DNA, 876 bp, Gossypium hirsutum
  Clone ID: GOSHI-09MAY01-C17545_1
ttcagatttcatcaaatcctatatgaaagaatactttctgcgaaaacaaactcaacaggtgttgagttaaagcggaaaaactcaaaagaatcgtgttcttcagatttttatgccagatttatgagtgcactgtacagtctacttgatggatcttctgacaatatgaagtttgaagatgaatgtcgggcaataataggaaaccagtcatacgtattattcacattggacaagttaatatataaattggttaagcagcttcaagcttgtgcaacagatgagatggataataagcttcttcaactgtttgagtattgaaaaatcccggaaacatgcaaggacaatggattcagtgtattacgaaaatgcgcgtgtcctccttcatgaggagaatatttatcgattgaaatgctcatcttctccatctcgattatctattcagctgatggacaatgtgattgaaaaacctgaggcttttgctgtttcaatggaacctaatttttcagcttttttgcacaatgattttctatcagtctttcctgggaaaaaggaaccacatggtgttacgctaaagagaaacaagaaaaatatgcaaacctagatgaatttgctgccatttgcatggctatggaaggtgttgaactggttaatggcttagagaacaagatagcttgcaattcatacaagatttcttatgtgttggacaccgaagatttcttctgtcgtaggagaagaaattcgccaccaaaatgcggatcatataatactcaggcaagactacaacggttccataaatttttatcggcttcccaataatatccggcacgaacaacattgcaagctttatactatttgtgcatttcctgtagaaatgccatt

SEQ ID NO: 14764 - DNA, 669 bp, Gossypium hirsutum
  Clone ID: GOSHI-09MAY01-C17455_1
cggccgcgtcgcccttttcttttttttttgaaaaatattcttatcaataaaaaatagtgttgattttcatatccaaacacttcttgttatctagcaatttataaatttccagcgtcataaagaaatcaaaccctacacttagggtttcctctctatccccttctcttagaaaaagagaaaaggaaaaacatttctttttaagtatcataattttttgacaatttcagttatgcaatattgacccactttgttaagattaagaaaaaaaaatcttcttttttgctgttaaacgagattgatcgaaaaggattaagtatttgttttattgggtttttaaaattttttttttactatttttgttgttaaattggagaaatggagaagaaaaaggtgactgtgccattagtgtgccatgggcattcaaggccggtggttgatttgttctacagtcctataactcctgatggattttttcttattagtgccagtaaagactccagtccaatgttaagaaatggggaaactggagattggattggtacatttgaagggcataaaggtgcaatatggagctcctgcctggataccaaagcattacgtgcagcatctgcctcggctgacttttctgcgaaactgtgggatgcattgaccggagatgaattgcactcc

SEQ ID NO: 14765 - DNA, 600 bp, Gossypium hirsutum
  unsure (1)..(600): unsure at all n locations
  Clone ID: LIB3825-026-Q6-K6-F12
tcgcagnactttagctattgtntttgttgtagaaaaactgtgagttattgttgttctgtaacttgaaatggaatagtagtttcggagtaggaaatctgatttgtggttgatcggattgtcaacgggatttgttttaatgtttatcaactctatttctaatgatgcgttggaaattcagactccaggccaatgttaagaaatggggaaactggagattggattggtacatttgaagggcataaaggtgcaatatggagctcctgcctggataccaaagcattacgtgcagcatctgcctcggctgacttttctgcgtatgtaattttattcagctatgaaatcacttttttgggggaatgattttttctgtgcgttcttatacattcccaattactcctctgcatccgtttttgttctccatttggatttattttctatcaagcactcccctggaaaaaatggaccgcatccttgtgggctactggctctttgttcctcattagctcgttctgagaagaagtattgttgatgagactccaaaactattctctagtgggcaagctttaggatggtgtatggtcatgaatcttagcttgggaa

SEQ ID NO: 14766 - DNA, 468 bp, Gossypium hirsutum
  Clone ID: LIB3197-043-Q1-M1-F9
ggtggagatgctgaaatcttaaagctgcaaatagctctggaggatgaggttcatcagaaaaagaagcttgaagaagaaataataatactaagaagtcagatgttacaactgacttttgaagccgaccagatgagaaggtgtcttgcaagaggtggatctggaaatgcttatcccggtttagattctccaatgtctcaagttagggactctttgagtggacataagacaccagtttctgcactatttgatcaagttggagtgcaaaagatattggatttgcttgagtcagaagatgctaatgtacgcattcatgctgtaaaagtagtggcaaacctagctgctgaagaagcaaaccaggaaaggattgttgaagctggtggtcttacttccttgctgatgcttctaagaagttatgaggatgaaactgttcgcagagtagcaaccggtgcaattgctaatcttgcaatg

SEQ ID NO: 14767 - DNA, 432 bp, Gossypium hirsutum
  Clone ID: LIB3145-019-Q1-K1-A7
ggccaagctaatatttccatctctttttgtttgaaaaggcttcttctttaccctgttatagaagttaattgttcaaataaatccagttcctctaatgaggacgaaattgtgctatgtcttggtatgtgagctgaggagcactttccatttaccgagcagaagcaaaccaggaaaggattgttgaagctggtggtcttacttccttgctgatgcttctaagaagttatgaggatgaaactgctcgcagagtagcagccggtgcaattgctaatcttgcaatgaatgaagccaatcaagaactcataatggttcaagggggaatcagtttattgtctactacagcatctgatgctgaggatcctcagactctacgcatggttgctggagctatagctaacctgtgtcggaatgataaactgcaagcaacactga

SEQ ID NO: 14768 - DNA, 329 bp, Gossypium hirsutum
  Clone ID: GOSHI-09MAY01-C17425_1
actcaatagcctggacgccattatcattttcgcctttgcatgtcaaaacatcaagtctgttcaaatgatagcagttcccaaaatatctatttttatttgctaccttttccgtttcatttcaccgtccacatcttcagcccgaattttgtggccatctttcttctggagtagtttcattgcatttcaacgtctctcccaccagagacaagacgttggaatgaagaatcgattttgaagctttaagggttcgaacaactagtcttgaagtccatctggagtttctaatatcaaaagctgcatcgaactgtattgtctgccttatcgacccc

SEQ ID NO: 14769 - DNA, 713 bp, Gossypium hirsutum
  Clone ID: GOSHI-09MAY01-C17785_2
caatgggaaaaccgtcccacctttgggggaagaactgctggacctggcaaccaattttttaattaatcctggccctagtcagcctaatgtttcaggattaatattggctggatcagctgatttcaaaactgagctgagtcaatctgatatgtttgatcagcggcttcaggctaagattctgaatgtggttgatgtctcttatggaggagagaatggtttcaaccaggcaattgagctttcctctgaaatactggcgaatgtgaaattcatacaggagaagcgcttaatagggaaatactttgaggagatcagtcaagatactgggaagtatgttttcggagtggatgacacactgaaggccttggagatgggagccgttgagacacttatagtgtgggaaaatctggacataaatcggtatcagctgaagaatagcactactggtgaaattaccataaaacatttaaacaaggagcaggaagccaatgagagcaacttccgcgatccagtcagctctgcagatctggaggttgttgagaagatgccactgttagagtggttggctaatgaatacaggcagtttggctgtagccttgagttcgtaccaacaatccaggaggttctcagtctgccgtggtttgcggtatggagcatcctcgatccaacttactgcgacattgaggatttctgtgagaagttatgagatctgatac

SEQ ID NO: 14770 - DNA, 1254 bp, Gossypium hirsutum
  Clone ID: GOSHI-09MAY01-C17785_1
gtttggctctcaaccaagcttgcaattttgcagcctcttcttcaacccgttcaagccgattaaccctcagctttctgttttcggaagttactactttacctagtgatggcagacggtcacgagagtgacaagaatattgagatatggaagatcaagaagcttattaaagcacttgaagccgctagaggcaacggcaccagcatgatatctctcataatgcctccacgtgatcagatttcaagggttaccaagatgctgggagatgaatttggaacagcttcaaacatcaaaagcagagtcaaccgtcaatctgtgttaggtgcaatcacatctgctcagcagaggctcaaactttatagtaaggttcctcccaacggacttgtgctctacactggaacaattgtgactgatgatgggaaagaaaagaaagtcacaattgattttgagcctttcaggcctataaatgcttctctttatctctgtgacaacaagtttcacacggaggcactgaatgaacttttggagtcggatgataagtttggctttattgtgatggatggcaatgggactctctgtgggacattaagtggcaacgccagggaggtacttcataagttcagtgttgatcttccaaagaagcatgggagaggtggacaatcagcccttcgttttgctcgacttcgaatggaaaagcgccacaactatgtgaggaagacagctgaacttgctactcaattttttatcaacccttccaccagccagcctaatgtatctggattaatattggctggatcagctgatttcaaaactgagctgagtcaatctgatatgtttgatcagcggcttcaggctaagattctgaatgtggttgatgtctcttatggaggagagaatggtttcaaccaggcaattgagctttcctctgaaatactggcgaatgtgaaattcatacaggagaagcgcttaatagggaaatactttgaggagatcagtcaagatactgggaagtatgttttcggagtggatgacacactgaaggccttggagatgggagccgttgagacacttatagtgtgggaaaatctggacataaatcggtatcagctgaagaatagcactactggtgaaattaccataaaacatttaaacaaggagcaggaagccaatgagagcaacttcgcgatcatcacttgcgattgagttgtgagagatcactgtagtgttgctatgatacagcgttgctgagcttagtcc

SEQ ID NO: 14771 - DNA, 477 bp, Gossypium hirsutum
  Clone ID: LIB3585-009-P1-K1-C9
ctttcagcagaaatcctgtcgaatgtgaaattcatacaggagaagcgtttaatagggaaatactttgaggagattagtcaagataccgggaagtatgttttcggtgtggatgacacactgaaggccttggagatgggagctgttgagatacttatcgtatgggaaaatatggacataaataggtacatgttgaagaacagcgttaccggtgaagttgtcataaaacatttgaacaaggaacaagaagctaatatgaccaacttccaggactcatccaactcagctgatttggaggttcatgaaaagatgccacttttagagtggtttgctagtgaatacaagcgatttggttgtagtctcgagtttgttaccaacaaatcacaagagggttcccagttctgccgagggtttggcgggattgggggcatccttcgataccaacttgacatgagatcatttgatgagttttctgatgat

SEQ ID NO: 14772 - DNA, 343 bp, Gossypium hirsutum
  Clone ID: LIB3197-056-Q1-M1-H7
aaatcggtatcagctgaagaatagcactactggtgaaattaccataaaacatttaaacaaggagcaggaagccaatgagagcaacttccgcgatccagtcagctctgcagatctggaggttgttgagaagatgccactgttagagtggtttgctaatgaatacaggcagtttggctgtagccttgagttcgttaccaacaaatcccaggaaggttctcagttctgccgtgggtttggcggtattggaggcatccttcgataccaactagacatgcgatcatttgatgaattttctgatgaaaaaatgtatgatgattctgaataagcaataatcaaactaacc

SEQ ID NO: 14773 - DNA, 939 bp, Gossypium hirsutum
  Clone ID: GOSHI-09MAY01-C17725_1
tttactagtctacccccccctcctttgacggaagcttatctatatgtatatattaggatgcgcaattgcataggtaacccaaaagtccccacatgctttccaataacacctaagcttaccttaaagcaaatatggtggtgaagagcatcaaagagaaatccagttcctttttcctatatttctgctcaaaagggttcaaaaaaccagcctctccacaacaaggaaccaagggaaatgctgtgtcatcagagcagaaaccgcccggaggatggaaagctatgcctttcattttagggaatgaaacgtttgagagatttgcaacgattgggttgctgtcaaatttcatggtgtatttgatgaaaaagtttaacatggaccaagtttcagcttccaatgtactcaatatctggtctggtgtatctaacttcgcaccactcatcggtgctttcatctctgatgcctacgtcggtagattcgccaccattgctgtcgcatccgtcgcttcatttctgggaatgctgacgataactttgacggcttggatcccacagctccagcctccacaatgcccagctgagcagcaattacatggtcactgcattagtccaagcaaggctcaactgggagtactgctaacagggttaggcctcttatcaattggaactggtgggataagaccctgcagcattccctttgggattgatcagtttgatccaaccactgaagaaggggcgaaagggatcaacagcttcttcaattggtactacaccacattcacattggtcatactgctcactttaacccttgtggtttatattcaagactcagtgagctgggttctaggccttggaatccccactctcctcatggctgcttcaattgttttgtttctcatcggaaccagaattatgtgcatgtgaagccccaaagaagcatttt

SEQ ID NO: 14774 - DNA, 685 bp, Gossypium hirsutum
  Clone ID: GOSHI-09MAY01-C17655_1
cggacgcgtggggccgaaactgtcgtttacatctaacacaaaaatagaaaaaaagttatttcgctttaaaataatataaataaataattgtttttatttttattttttaatttcaccgctactaagaactaatccttttcattctggtttttcgacactccaaattttcagatttcctttcctttctcaccggaaaatgaaaaacatgggcgactttccgacgtttctagtcgtcgcacttttgatcttcagttgtctttcctatgttagatccgacgcttccgatcaccgttacaaggacggtgacgctgtacctctttacgccaataaggttggcccctttcacaaccccagtgaaacctatcgctacttcgatctacccttctgttctccagatcatgtaacggagaagagagaagctttaggtgaggttttgaatggagatcgactcgtgagtgctccttataaattgaattttaaagaggaaaaagattcttctgttgtttgtaagaagcacctttcaaaagatgagggtgcctttttccgaaaggctgtcgacaaggactattatttccaaatgtactatgatgatttgccaatctggggttttatcggaaaagttgataaggaaggaaaaactgatccgagcgagtacaaatatttccttttcaagcatatccagttt

SEQ ID NO: 14775 - DNA, 725 bp, Gossypium hirsutum
  Clone ID: GOSHI-09MAY01-C17665_2
cttatgatggctgtcggccatgacaccgctaaacggaaggggaagaagaaaaaggattctcctaaagatttggctagggaatctcggatcccaccagcagtcttgttccttcaatgctatatatgtcttgctgaaggacttacaatgatgcttgctgctttgaggaatgaaatcccagtcttccacggtccaagcccttttaatactgagcacgagaaatttgttcagcattttgagcttttacaaagagcctgcattcctgatcatgtttcgtacctgtcatacaaagaatcaacaactcatgctcgcttttctacgctagctatgtataattacttcaaggatgctcagaggatcgcaaaggaggtgaagagtagcttctccaacgatccagagaggttagccgaactccgaaaattagagcaggtagcagaacacaacagtgttgctcaaaatgtcatttgtcggttaggagctcttgacccttcacttaaggtgtcatttgagttcagccatcatccattctttgccactgttgttgtcaagagatcttaaaggtgtttgcttcttttgatgatctctaccaattttgaaacacacatacttaggattaagaggcatttgagtcccctggtgtagcaattgtaatattagcatgttttaagtcaatgttcttaatttttactataaagtattatatgaataatacaatgggaaattaaagc

SEQ ID NO: 14776 - DNA, 586 bp, Gossypium hirsutum
  unsure (1)..(586): unsure at all n locations
  Clone ID: LIB3543-036-Q1-K1-A5
ctcaaaagnaattggtttacaattatcttaaacttgtatatataaacagcagatgatgctcatctcatatcaatattttgcttcaatattgtcaactcatgttctctattaatctgttcagtatctttccagatgcttgctgctttgaggaatgaaatcccagtcttccacagtccaagcccttttaataccgagcacgaggtgaagcataaaactccatatttacttacacaaacacatacagccatgcatangtaaaaaaataataagttgtagctactgtgccattacgtgatatttctgttttattttcgatggatgaattgagtaagccatttatttgacaacaagcatttgaattagagtttagctgtattaccttgagcatgctcttagctttaactgcatcatggtatgttcacccttgtttactgctatccagaaatttgttcagcattttgagcttttacaaagagcctgcattcctgatcatgtttcgtacccgtcatacaaagaatcaacaactcatgctcgcttttctgtaagttttgaataagatctttgccttaattgaatgccactctgg

SEQ ID NO: 14777 - DNA, 447 bp, Gossypium hirsutum
  Clone ID: GOSHI-09MAY01-C17615_1
cggacgcgtgggcttctctctttttaagctgatatgcctgtctttcattcaagtcataatcaaatcaaatctttgatgcaaatatagttctttagcgacctttcggtaagacaatcttccaaagatgctcggtgcatcggaatattattcattgggaagaggatctaccattaattactacacgcctcaagctctgcaacaactgagaagattctactctgcaattaaaaaggaatcaccacgagttctacattaaggtggatttgatgattttctttgagttttggtgctaatccatgaagaatttttactggtttaagcaaatctcaaacaatgttaagtcagagaggaggctttctcttggggaatacaaaagagcagtttcttggtctaagtatttggtttcctctggcggtgagataaaaggagaaggagaagaatggagtg

SEQ ID NO: 14778 - DNA, 903 bp, Gossypium hirsutum
  Clone ID: GOSHI-09MAY01-C17005_1
gattttctggagggaggcccacttttctggggggattcggctgataaacaaccttgcattggtaccggtggtatgataccgtggaaacttcaagtgacggggatgctttttcacagtgggttaccacacatggctataaatgcattggagctcggcatggaagcacttaaagaaatccagctacggtcttataaagacttcccaccccatcccgatgagcaagtatctggatgtgcttcaccatcaaccatgaaaccaacgccttgggattccccacgtgcgggaatcaatcaaattccaggagagtgtacaatatcaggagatgtcaggttaactcctttctacaatgtaaaagatgtaatgaataagcttcaagaatacgtagattacataaacgaaaatctaaacaagctagacacacggggtccggtttcaaaatatatcctccatgacgaaaaccttagaggaagccttactttgactttcgacgaggcaatgtccggtgttgcttgtgatctcaattctcgtggattccatgtattgtgcaaggcaactgaagaggctgttggacatgtgaagccttactcaattaccggaagtttgccactcattcgggagctacaagatgaaggttttgatgttcaaactgctggctacggtttaatggccacgtaccacgccaagaacgagtactgccttctttccgatatgtgccaaggttatcacgtatttaccggcatcatcgctcagctagaggattgaaagatgacaatagattagatatgaactttcataatagttttctcatcaataataatgacatttgaactgtttttatgaatatgactatatcattcaggtccctactgcacaaaaaaaaaaaaaaaaaaaaaaaggcggccg

SEQ ID NO: 14779 - DNA, 412 bp, Gossypium hirsutum
  Clone ID: LIB3197-034-Q1-M1-D9
cggacgcgtgggatatctgtagatgtcaggtgaactcctttctacaagtgagtgaccttccaattcgatcacatgttttacacctttcaagttatttaccggtggaagattatcattccatttccgaacaaatttgctagtcccaattttgtatctcagtgtaaaagatgtaatgagtaagcttcaagaatacgtagattacataaacgaaaatctaaacaagctatacacacggagtccggcttcaaaatatatcctccatgacgaaaaccttataggaagccttactttgactttcgacgaggcaacgttcggtgttgcttgtgatctcaattctccgggattccatgtattgtgcaaagcaactgaagaggctgttggacatgtgaaaccttactcaattaccggaagt

SEQ ID NO: 14780 - DNA, 492 bp, Gossypium hirsutum
  Clone ID: GOSHI-09MAY01-C17375_1
tcccacgcgtccgcacgcatctcaaagttctcgacttgaggggatgcaaaagccttggggatgaatcgctggcggcaattggctctctctgtgaattgaagatgttacacttggataattctgatatatccgatgtaggaatagcatacttgcaacatggcattattagctcattggtttcgttatctgttaggggatgcaagaaacttacagataaatgtatctctgttctatttgatggctcttctaaactggagttgcaagagctggacctatctaatcttcctaatctctccgacaatggagttttagctcttgcaaaaagtcggcttccaatttcagaactccgaatgcgacaatgtccactcataggtgacacttccatcatggcactagcctcaatgcaggctgatgacgatagaggacatggcagtaatctgcgattgttggatctttacaattgtggtggcattacacaactttcattccgat

SEQ ID NO: 14781 - DNA, 639 bp, Gossypium hirsutum
  Clone ID: GOSHI-09MAY01-C17365_2
cccacgcgtccggctaaatattaatacagaaaccagagtttggttctgcagaaaggtccgaggagaaaagaaatggcaggaagattgagcaacgtagcgtcacgtataatgggcggaactggcgtcgtatcgcgctccgtcgcctcttctttccgactccgttccggcatgggtctccctgtcggcaaacatatcgttcccgacaagccccttcctgtaaatgacgagctaatttgggacaatggaactgcatttccagaaccttgcattgatcgaatcgctgataccgtcggaaagtatgaggcattagcttggatgtgtggaggcttgagcttctttgcatcgttgggatttttggcttggtggaatgataaggcctccaagattccattcgcaccaaacgtatatccatatgacaacctgcgagtggagcttggtggagaaccgcacgtagatccgtatgcgcagctgtacgcttcttgttgtcacttgtctccccatgtgtttcattttacttctggaactctgaacagttgaataatggattgtgggtttgttgctgaacaaacattttgaacaaatatgcattttacttctggaactctgaacagttgaataatggattgtgggtttgttggg

SEQ ID NO: 14782 - DNA, 725 bp, Gossypium hirsutum
  Clone ID: GOSHI-09MAY01-C17365_1
cccacgcgtccgtccacgcgtgcggaaaaaaaaaatggcaggaagattgagcaatgtagcatcaaagatcatgggcggaaacggcatcgtttcacgctccgctgcctcctctctccgtctccgttccggcatgggtctccctgttggcaaacatattgtgcccgacaagcctcttcctgtaaatgacgagctaatttgggacaatggaactgccttcccagaaccttgcatagatcgaatcgctgatactgtcggaaagtatgaggcattggcttggatgtgtggtggtttgagcttctttgcatcgttgggattcttagcttggtggaatgataaagcctctaagattccatttgcacctaaagtatatccatatgacaacctgcgagtggagcttggtggagaaccataggtagatctgtatgagcaattgtacggttcttgttgtcacttgtctccccatgtgtttcattttacttctggaactctgaacagttgaataatggattgtgggtttgttgctgaagcaaacattttgaacaaatatgcatttcctccttgtcattttaggattggtgctaaatcatgagagaatcagaatatggtgtgtgtgtgattattggtgctaagccatttttatgttcatcaatgaatggcaaacaaagggtgaaattgctttctctgctttcctttttccaatgaaatctgttttccccacatattat

SEQ ID NO: 14783 - DNA, 953 bp, Gossypium hirsutum
  Clone ID: GOSHI-09MAY01-C17315_1
agcacccactgttcccacctactccacacactccctctttttatttttctcggcggattcttcaaagcactttctcatttcctttctagatcctttctatctctccttttttttttttttttgcttctgtaagtctccgattcagatctttcgtcaaatcaaataaacaatgcaaagcgcagcgtattctttgtcttctccctgttcgattccatctctgaagccgcgaaaattctgttcccgcgctggattccaacctattcgcgtttcatcttcttttgccgctcctgaacggcatgaacattccgtttctttgcctaatagatcgtggcggctctcttcctcctcgtccttgccgcttagggcctggaacttagttccttccgattcaaaaccggatcgctttgaagttagagccaaggcggcggagagtgcaggtgaaggcgaaaagtcaggaagcctggtcaagatatcggagcttggtttgttgtttggtttgtggtacctcttcaatatctacttcaatatctacaacaaacaggttcttaaggtcttccattaccctgtaactatcagtgcagttcagttcgctgttgggacgataattgtttccctaatgtggacgtttaacttgtataagaggccgaaagttagtggtgaacagctagtagcaattgtgcctcttgctttggtgcatatcttgggcaacctctttacgaatatgagtctaggaaaagtggctgtttctttcactcacaccattaaagctatggagccattcttctcagttgtgctttctgcaatgtttttaggagaggtgattttcttttcttgtttagttattttttttatcatttttttcattcacattttcataattatagtttatctataatttccttttgagttgcctttattcgggtgttaaatttcgcttttacagctgccaactc

SEQ ID NO: 14784 - DNA, 621 bp, Gossypium hirsutum
  Clone ID: GOSHI-09MAY01-C17305_1
gagttggcaaggatgattctcatgagaattcaagtgactaggatagccacactccttgtgttggtggcattaattttgggtcaaaaaggagctgaggccaggaaaggaaggatattggagtcgtttgagtacatagctatgagttgcagagcgcactctgcatcaataactgattttggaggaattggtgatgggaaaacatcaaatactaaagcatttcaagatggagtaaatcatctgagccagtatgcaaatgatggcggggctcagttatatgttcccgctggacaatggctgactgggagctttagcctctccagccatttcactctctatcttcacaaagatgctgttctccttgcttctcaggatatgagcgaatggcctgttttgaaggctttaccgtcgtatggtcgaggaagggatgcagctggtggaaggtttgccagccttatatttggaactaatctcactgatgtcgttgttacaggggccaatggtacaatcgacggtcaaggtgcattctggtggcaaaatttccacaagggcaaattgaaatacacccgaccttacctaatcgaattcatgtactcggacaatatccaaatttccaacctaacc

SEQ ID NO: 14785 - DNA, 661 bp, Gossypium hirsutum
  unsure (1)..(661): unsure at all n locations
  Clone ID: LIB3543-066-Q6-K6-B10
cgcgtcanaattggcttaaattcacgtggtttggggctgtgtgagtaccatagtaccactcatttgtttatctgctataatggctggaattacggtttcaagactgagggttgcagcatctgatcctttggctgatacctgtttccgcaaaaccaatcccgtgtctgtgttaccctgagggggggaacattgcgtttccggagtatttttccttttgtttcgttaagcccagtgttgagacatcaaccgggtttgctgtctttcagtagcaaggcagataaacctgtggaatctgaagtttcagctgcctctggtggagcgggagtagatgtaagtaacggtggtgttattggcaatgattggattgataaagtcaaagatgcttggcacagtgctgaggatgtactaggttatactggggaaaaggctaaagaagtctctaacaaactgaagccacatgttgaacagttgcttgatacctatccgtatcttaaagatgtggttgctccagttggctttactttgactggcactatattggcttgggtggtcttgcctaggcttttaagaagatttcacaattatgcaattcaaacttcagtcctgccttctggaagcttgcttgggaatcaagttccatatgagaaaagcttttggggag

SEQ ID NO: 14786 - DNA, 392 bp, Gossypium hirsutum
  Clone ID: LIB3197-041-Q1-M1-B6
gtcaaagttggctaaattcactttttgggctatgtgagtaccatagtaccactcatttgtttatctgctataatggctggaattacggtttcaagactgaggtcactttcaaattccttatattcatctttaaaactgtcatcactgccgttatacagatcgtacacgtcgcttacaagaatcgctgatcacagctatgttagagcatcttatgctcatttgaatagtttttatgacaaaagagaaactcagtctgcttcaatgtttatgaatactcctattaggggtggaagcatctgatcctttggctgatacctgtttccgcaaaaccaatcccgtgtctgtgttaccctcaacctcatcaacattgcgtttccggagtatttttcctt

SEQ ID NO: 14787 - DNA, 594 bp, Gossypium hirsutum
  Clone ID: GOSHI-09MAY01-C17245_1
cccatttttccgtccacgcgtccgggaagaaatagaggtaccaaaaccaatattgatgccaatttcaggaaaggagcaaaagtgtgttgggaatatatttagttgcagttttaatgcaagagagaagaaactgatatgtgtgaccagtggcaactcttacttgggttctttcattgtcaaagagctattggctcatggttaccttgttcgagtaaccattcaacacccagctgaatttgaagatgtgaaagacctgctaggggtggaagatttaaacctattggaaagtgtagttgtaaccaagatggaagatttacaaagcctttgtgatgcttttagaggttgccatgctgtttttcatacatcttccttcattgatccacatggtatctctggttattcagaacaaaaggtgtttttggagactgaagtggcaaggactgtcatggaagcttgtgctaaggcagcctatataaagagatgcgtcttcacttcatctctattggcatccatttggaggaatgaaaatatagatggaattattgatgacagctgttggagcagcgaagaattttgcagagaaaataagctatg

SEQ ID NO: 14788 - DNA, 605 bp, Gossypium hirsutum
  Clone ID: GOSHI-09MAY01-C17215_1
atgtggactcccaggaccccagggtcaacctggtgcagcagggatccctggtgacccgggctccccaggaaaggatggagtgcctggcattcgaggaggaaaaggagatgttggcttcatgggtccccggggcctcaagggtgaacggggagtgaagggagcctgtggccttgatggagagaagggagacaagggagaagctggtcccccaggccgccctgggctggcaggacacaaaggagagatgggggagcctggtgtgccgggccagtcgggggcccctggcaaggagggcctgatcggtcccaagggtgaccgaggctttgatgggcagccaggccccaagggtgaccagggcgagaaaggggaacggggaaccccaggaattgggggcttcccaggccccaggggtagtgatggctctgctggttccccggggccacctggcggtgttggtcccagaggccctgaaggacttcagggccagaagggtgagcgaggtccccctggagagagagtggtgggggctcctggggcccctggagcccctggcgagagaggggagcaggggcgccagggcctgcttgcccccgaggcgagaaggg

SEQ ID NO: 14789 - DNA, 918 bp, Gossypium hirsutum
  Clone ID: GOSHI-09MAY01-C10955_1
cgcggacccgtgggattttacttgacccttgtggtgtatactgataactttatgagagtgatatgatctgtttgaagttattttggtttgaataggtctatgatacaatcgaatgaatttgtgtgttcaaagaggattccactttgagcatctgtcaattttgaatatagacgtattctcagttataagggatattcaaatgttcaccggtctaatagtttcagtgatatgtacggttgggaaatcttagttgttagtatcctccatatctgaatagcatcatgttttggctctagaattatctaatatttacaccatttgtctatttgagtatcgttgtgctttgtgacaagagttgtaaggaatatttctgagagagctattagttcattatctatataagttgtgttgggtattgaaatagataatgatttggttggtatactaatggtaatcaaatccttttaggtatttaccaaagtgtaaatattcgttagtgaacattgtctgtgaatatctattttaggataattattgtaagttgtttgaatagaaaataagaggtaatatcatttggtatgatctaaagtcagccaataagtcaagttaataatgattcgttaagaaaagtaagtagcgtctaagtatgtaattacataactgacgacaggaaggaatctgccaaagacaaatatggaaaaatccaaatattcaagatgaagaaatcaataagaaaggttaaaaggtatgttgtgtctaaactcactaatttcctctgaacttacacatattatgtttatgttttaggtgttgctttgtaagtgagttcgccaggagggacaacgccatgaatgagccagagaagcggcgaattaggatactatgcataaagtgaacatttttggaaaactggcgtct

SEQ ID NO: 14790 - DNA, 640 bp, Gossypium hirsutum
  Clone ID: GOSHI-09MAY01-C10945_2
attctcgaatctccgatgttttcgccgttgatatacatccggcagcaaagatcgggaaaggcatcttgttagatcatgccaccggtgtggtgatcggagaaaccgcggttgttggcaacaacgtgtcaattttgcatcacgttaccctcggtgggactgggaaggcatgtggagatcggcatccgaagattggtgatggagttttaatcggagccggtgcaaccatattagggaatgtgaagattggggaaggagcaaagatcggggcagggtcagtagtgctgatcgatgtgccacctcggaccacggctggaggcaaccctgcaaggctcgtcggagggaaggagaaaccgtcaaggcatgaggaatgccccggagagtccatggatcacacttcattcatctctgaatggtcagattatatcatttgattcaggtttcttcgcttattagaattctctagtccaaaagctgttctgtttttgcatgctatacggtggtcaagcctgataaaaattgtagtctctttctatcttttacttagccctatgagtacattccactgtttttctcgtacttaaactcgtgctcgaaaattatatcgaataaaggtgttagacaggtgatagctgttgcctgg

SEQ ID NO: 14791 - DNA, 922 bp, Gossypium hirsutum
  Clone ID: GOSHI-09MAY01-C10945_1
cccacgcgtccggcttcgggcttttataatatcgtgtatcgtcacggtgaaatctccgcccttcaagtcttcacagctaaaagatgccggccggagaactccggtatccttcttcgatctcttgtccgcagatttctcaagcaacggaaacccccatggaggaagacgaggcgtgggtgtgggcgcagattaaagccgaggcacgccgcgacgccgagttggagccggctctagctagctacctctactccacgatcctatctcactcctctctcgagcgctccctcgccttccacctcggcaacaagctctgctcctccacgctcctctctacgcttctctacgaccttttcctcaacactttctcttccgatccttcgcttcgagccgccgccgtcgccgatctccgtgcggctcgcgttcgggatcccgcttgcgtttccttctctcattgcctacttaattataaaggattcttggcatgccaggctcatcgagttgcacacaagttatggactcagtcacgtaggccgctagcattggcattacattctcgaatctccgatgttttcgccgttgatatacatccggcagcaaagatcgggaaagggatcttgttagatcatgccaccggtgtggtgatcggagaaaccgcggttgttggcaacaatgtgtcaattttgcatcacgttaccctcggtgggaccgggaaggcatgtggagatcggcatccgaagattggtgatggagttttaatcggagccggtgcaaccatattagggaatgtgaagattggggaaggagcaaagatcggggcagggtcagtagtgctgatcgatgtgccacctcggaccacagacagcaggtggaagagcctgcattaaggaaccaatgcatggtcgtggtccgaggggaaacaaga

SEQ ID NO: 14792 - DNA, 358 bp, Gossypium hirsutum
  Clone ID: LIB3272-056-P1-N1-D3
ggctaaagtgggaggggattttattccttggaagggtgtggcaaaagtgcccaaaacctgagttcattaaatatcacctccttggagcttaaaacattctgactttaaagggaaaaaaattttttgccgaacaatcccgagaacctgacaaaatgggagcccaagcacatatcatttcattggaggaaataatagaacttccttttttgcagcattgtccattagttttaagctcagtttatttaaaacccagatcaaagaacacaaacttgttccaagcataaaacattcaaccgtcgtttacagttggtaattgagggtgttgtcctggggggcaggtgggaaattccattttttg

SEQ ID NO: 14793 - DNA, 333 bp, Gossypium hirsutum
  Clone ID: LIB3166-031-P1-K1-H11
gactttaaagtgatagttttgttttcccgaaatcacgagataacaagacaaaatggaagcaaaagcagataacattacatctgaggaaataataatatcgtcgttgttgcagtcttgtccatttgcttgaagctagttctattcaaaacccagatcaaagaacacaaacttgttccaagcataaaacattcaaccgtagtttacagttggtaattgagggtgttgtcctggggggcaggtgtgaaattccattttctgagaagaaaactttctttgcccaaacaacctgtatcagaaacctagtggccatgccacggggtgaatttaaaagct

SEQ ID NO: 14794 - DNA, 470 bp, Gossypium hirsutum
  Clone ID: GOSHI-09MAY01-C10925_3
cccacgcgtccgcccacgcgtccgacgacgtttacaggggaaacaaacagaaacgaagaaattccaactctttattctctcaattttttcccacatccaaacagctacattgattgaatttgaaactcaaaagaaaaacaaaatgagtgtaatcgatatattgacaagagtagatgtgatctgcaagaggtacgataaatacgacgtcgaaaagcagcgtgaccaaaatgtctccggcggtgatgcttttgctcgcgcttacgccgcagtcgaagccgacattgaatccgctcttgagaaagtggaacttgcttccaaggagaaaagtaaggcatctgctgttgcagtcaatgctgagattcgtcgaaccaaggctcgattgcttgaggaggtccctacgctgcaaaaattggctgttaagaaagttaaagggatttcaactgaagagatggctactcgtaatgatctgg

SEQ ID NO: 14795 - DNA, 1233 bp, Gossypium hirsutum
  Clone ID: GOSHI-09MAY01-C10925_1
gttccgttaccaatattaacggcgaaagaaaagagatgaaattactttccttctcttttctccctcaatttctttccatccaaacagcttcatttatcggtagactcatcgaagctaattagacaaaagaagaagaagaagaaaatgactgtcattgatatattgaccagagtagatgtgatctgtaagaagtacgacaaatacgacgtcgaaaagcagcgagaccaaaatatctccggcgacgatgcctttgctcgccaatacgctgctattgaagccgacattgaatccgctcttcaaaaagcggagcttgtttccaaggagaaaagtaaggcatctgctgttgcggtgaatgctgagattcgtcgaaccaaggctagattgcttgaggaggtccctaaactgcagaggttggctgttaagaaggttaaagggatttcaaccgaagagatgactgctcgtagtgatctggtcctcgcattgccggataggattcaagctatacctgatggaactgctgctcctaaaactggaggcgggatgtcttcagcaccttcagcttctcgtactgaaattaagttcgactcagatgggcgatttgataatgaatactttcaagaatctgagcagtcaagtcagttcaggcaggagtatgaaatgcgaagaataaagcaggaccaaggtttagatatgatttcagaaggtttggatactttaaagaacatggctcatgatatgaatgaggaattggataggcaagttcctttgatggatgaaattgaaaccaaggtggataaggcagctggtgacctaaagaataccaatgtcagacttaaacacactgtcactcagctgagatccagccgaaatttctgcatcgatattgtcttattatgcatagttttgggaattgctgcctatttatacaatgttttgaagaaatgaagcgataaaaggataagtcgatccgttcccttatgttctgtcatcttttcttgcattgtcttccatcttgagggcttgctaaggtggtcgatctcgtatttgatttgtttcttttgtgggaatcattggtcacactggcataatgtgagtttatctatatattatgtgatttacagagatggattatcacattattttaaaatgatacttctgctttcattgctcttcatccagatatggacattgttatcatactctggaaagatcatatagtgcattgttttgtgt

SEQ ID NO: 14796 - DNA, 484 bp, Gossypium hirsutum
  Clone ID: uC-gsflnu33B088b02b1
ttcatgcgtccgagaagaagaagaaaatgactgtcattgatatattgacccgagtagatgtgatctgtaagaagtacgacaaatacgacgtcgaaaagcagcgagaccaaaatatctccggcgacgatgcctttgctcgccaatacgctgctattgaagccgacattgtatccgctcttcaaaaagcggagcttgtttccaaggagagaagtaaggcatctgctgttgcggtgaatgctgggattcgacgaaccaaggctcgaatgcttgtggaggtacgtaaaatgttgaggtttgaatgtttataagagcaaggagagaggccataaaagatgtgagccgtagaatttgccattgttgatatgagaacattgtttacaacttcgattttcttcgttccataactaggttatttattacagtgttttacaattgtcttggaatatgttctaaaactaactttttgtgaacgaattgtcttctg

SEQ ID NO: 14797 - DNA, 365 bp, Gossypium hirsutum
  Clone ID: LIB3166-032-P1-K1-B2
cccacgcgtccgcccacgcgtccggtttagatatgatttcagaaggtttggatactttaaagaacatggctcatgatatgaatgaggtaaggctgccttgattgtcatttgaaactattcaatatgatgtattgtaacatttatgcttgctacttaagtgttacttgtgatacgtgcaggaattggataggcaagttcctttgatggatgaaattgaaaccaaggtggataaggcagctggtgacctaaagaataccaatgtcagacttaaacacactgtcactcagctgagatccagccgaaatttctgcatcgatattgtcttattatgcatagttttgggaattgctgcctatttatacaat

SEQ ID NO: 14798 - DNA, 360 bp, Gossypium hirsutum
  Clone ID: LIB3048-027-Q1-L1-H2
gttccgttaccaatattaacggcgaaagaaaagaaggcaagggcttttcttttcttttcttttcttttcatccaaacagcttcatttatcggtagactcatcgaagctaattagacaaaagaagaagaagaagaaaatgactgtcattgatatattgaccagagtagatgtgatctgtaagaagtacgacaaatacgacgtcgaaaagcagcgagaccaaaatatctccggcgacgatgcctttgctcgccaatacgctgctattgaagccgacattgaatccgctcttcaaaaagcggagcttgtttccaaggagaaaagtaaggcatctgctgttgcggtgaatgctgagattcgtcg

SEQ ID NO: 14799 - DNA, 506 bp, Gossypium hirsutum
  Clone ID: LIB3582-007-P1-K1-G1
gtccggaaaaaactctctcagcgccgttctgcgttctggaagcgtccgaacgtctccgatctcagcccctactccgatgccgacggagagagccaggatcggcctcaaggtacgggtacggaggctcccgtggcacagtacatgtggggagagaggcgcacgtgaggggagcggctcgaaggcgcggttcgtgcgagggcagagcctgcggcgcctagatcttctggaaaccctagaagttttctgtttctgatttgggttttctggtgttgggccatttgggccgatttggttttgggttagtgtctgggctaggttaattgggtttgggggttattttatttgtaatggactatggattttttgtttactttgggctccgggaaaaatttgggccctacataatctttagtatctatcttcatacagccataaaccaaggtttctgttgtgacaatttgcacaggctttgcctggaagcagccatattttcaagtaaaacttat

SEQ ID NO: 14800 - DNA, 418 bp, Gossypium hirsutum
  Clone ID: LIB3272-053-P1-K1-H7
cggacgcgtgggttcccttagaagttgcgccgtttcagacacagccactcaaaggccccccgatcccacacccgatctctgattacgacgaagaggacgaggattcggcttcacaacaaaggtacgggtacaaaggtgcgcgggtgcgtggcagatgcagagggtacagaggctcacgtgaggggagcggctcgaaggtgcggttcgtgcgagggtagagcctgcggtgcctagatcttctggaaaccctaggagttttccgtttctgatttgggttttctggtgttgggccatttgggccgatttggttttaggtttttattttttctactggtttatttttggattacaggcccgggaaaatattgggccttacaggtataattccagttcctcaattgagttaccatcatgttcc

SEQ ID NO: 14801 - DNA, 327 bp, Gossypium hirsutum
  Clone ID: LIB3166-031-P1-K1-G2
cccacgcgtccgcccacgcgtccggaaataaaaaaaatgaaaaaaatcccctatgtttgctgctattttcttttctggtatttctgctttttccttgctctctctgcttttgcgttcgtttgcttgtcctttgcaggtacgggtacggaggctcccgtggcacagtacatgtggggagagaggcgcacgtgaggggagcggctcgaaggcgcggttcgtgcgagggcagagcctgcggcgcctagatcttctggaaaccctagaagttttctgtttctgatttgggttgtgtggtgttggtccatttgggccgatttggttttgggt

SEQ ID NO: 14802 - DNA, 398 bp, Gossypium hirsutum
  Clone ID: GOSHI-09MAY01-C10885_2
catacaccttgcttttctcttggatatgggtagccctttacaattccatatctgattttaatccttatactttatttttcatgttcatttcgtcagtttcttgcttatattaagtttctgccgacaaaatataagataaaaagggggtttattggcattgctacctattgctatttttttaccacttcaataatatatgggctgaggtgcacatttcatgggaggtgtagaggatgatgaaccagcctcaaaacgcatgaaactatcctctgaagaattgatacatctttcaaacggttcaactgttaaagagtctatagttgggtcttcaagagacttgatggctcggcccctgcagtctgatgggggcgaagaagttgttggttcaaaaggagtta

SEQ ID NO: 14803 - DNA, 638 bp, Gossypium hirsutum
  Clone ID: GOSHI-09MAY01-C10885_1
aagctttaaaatctcgtgctctacccctttgcaaagggcttgctcctagtgattcatagaggcatttacttatccatattggcatttctgttctcacttaatatatgggctgaggtgcacatttcatgggaggtgtagaggatgatgaaccagcctcaaaacgtatgaaactatcctctgaagaattgagacgtctttcaaacggttcaactattaaagagcctgtagctgggtcttcgcgtgacctgatggctcggcccctacagtctgaagggggcgaagaagttgttggttcaaaaggagtaataaataaggtagaatttgtccgaataatagcaaaagcattatactctcttggttatataaagagtggtgctcatctagaggaagagtcagggataccattacattcttctgtggtcaatgtctttatgcggcaaattctcgagggaaattgggatgacagtgttgtcacattgcgtaatattggtctaacagatgaaaggacagtaaaatctgcctcttttctgatattggaacagaagttctttgaacttttggatgaagaaaaactaatggatgctctgaacacattgaggactgagattgcacctcttggtgtcaatgatagtagagta

SEQ ID NO: 14804 - DNA, 647 bp, Gossypium hirsutum
  Clone ID: GOSHI-09MAY01-C10845_1
cccacgcgccgcttactctcaatattgaaatgaaatctctctgagagaggagttgcttaactgaattggttttggttgtaataagcatggtttcgctggaagattcacattctaattccaaccgctttcctttgggtcgtaacttttacacccccagttcagcttccaccaccaaaatccaccgtcatgtcggccgctccatgcgtacgattcgctccaatctttaccaaaacgacaatagtagctgctccttcaccagttccgtccctgagaggtccgcctttgtctccgaaaatctcaccgagtccgttatcgacatgcgtctcggcgaactggctgccaaaagcaacgctaaatctgttacgtctgagtccgaaaacgaggcctttttggagatttctcaagcctttagtgatttctccgcttgtagcagcgatatctccggtgagttgcagcgccttgcgagcttgccctcaccggaaaactctttgatgaatgagagaaataacggagtccagtcagagccggagccggaaccgtgccatggctttttgcagagggagaacttctcgactgaaattattgagagtatctcaccagaggaccttcaaccgacggtcaagatctgcatcgacggcctcgaatca

SEQ ID NO: 14805 - DNA, 770 bp, Gossypium hirsutum
  Clone ID: GOSHI-09MAY01-C10875_1
gtgcttttagcagatctctccgttaccctccttaccttgcttcagttctattggatatctcttgggatattccttgctgtcctgcttattcttcctctatcactgctttctccattccctgctggattgaatgccttgttcagtaaagagcctcgtagagcttcgctggcccgtatatattccctttggaatgctacatctttgtcaaatattgctgtcgctttcatttgtggcattattcattatggattttcctccttcctgccacctgacaagggaaatacttggaatactagaagcgaagacaacaaatggtggcttttgccaaccatccttctgatattcaagtcaatacaagctcgatttgttgattggcacattgcaaacctagaagtccaagatttctccctcttctgtccggatccagatgctttttgggctcatgagcctactgcttgaatttaaagtgaagactgactgcactccatcatcttcttccatggttctagctgtgatgcttagctttccaccatcatcttcttccatggttctggctgtgatgcttagctttccagtgtaaattttgttcaaagtttgtaaaaagcaacatctgagtataggctttttctctcttttgcattggtgcatctgtgtgggtatagtttcaaaaaagggggaaaaaaaaagggatctttgagagctatgtgaattagtgaatagataatgtcttagttaattatttattagaaattcctagttcattatttttc

SEQ ID NO: 14806 - DNA, 440 bp, Gossypium hirsutum
  Clone ID: GOSHI-09MAY01-C10555_1
gaaaatatacactttgatgttcttctcgtttcctttgtatttttttttttttggttttgtgatgattgagaaattaaggggggatttttattgaataatgttaggcggaggagattttcaatgacggaggtttataggagaatgctgagtgatgaagatgaagatacgccggcgaagtgccggcaacgacggcgaagaaggattgagatgaggaggcatgctgctgtctcggcatcgggagcgttacggagtctgggcccaacggaggatcctgcggagagttcagattgcggtcgtgaagggaagcggctacatgtgctggaagccggcgatctggtagtgactaacagtacgcatagttcttctggcgaggaggaatctatggcccgggaggcgagagcggaattgaataacggccggtttacggaactatgtcgatt

SEQ ID NO: 14807 - DNA, 668 bp, Gossypium hirsutum
  Clone ID: GOSHI-09MAY01-C10545_1
cccacgcgtccgccgatgtaaattcttgggttgaaatgccagctggcatgggtgatggttggcctgcaagacaggcaggaacaaaattgagtgttactgtggatggtgagctgtatgcactcgatccatctaattctcctgaaagtgtgaggattaaggtatatgattaccaagatgatgcatggaaagttgtagtgggagaggtccccattcctgactttactgattcagattttccctatttactttctggtgtccggggaaagcttcatgtgatcactaaagatgccaacaacaatatttcagtcttgcaggctgatgtgcaaaaccattttacttccctatcatcagcttcattggatagctcacctggtgcacatcctgagtctgcagaacctgcaacagcatttgaaacggatctttggagggttattgccacaaggacgactggatcttccgaactagtaagttgtcaggcactcaatatctagtgccactgttggactacttagggatctaagtttcaacttttccgaaaattatttggttgcccttatttgtttcactagatctgttgattttacaagcggcacactgaaattgggatttatgtaagttataacctttactcttgtatccttgtataatataaagcaaaggaattctct

SEQ ID NO: 14808 - DNA, 613 bp, Gossypium hirsutum
  Clone ID: GOSHI-09MAY01-C10515_1
gttgtttctgtgggagttctatcatcaagagataagggtataagatatctggcatgagtaccgtaaaaaaagaaaggaatttgacgtggctcgtgagagagttgatacttacatacgatcatcactgcgcgcggcttttgttcagataatggagaagctgaagtccagcaaacgctcttctaataagaaccagcaaaatcagcttcctttcctttccatcctcgcacagggtgtcagtacactggctttcagtgagaaggcaatttttagtccaatattaaagaggtggcatcctctttcggccggtgtggctgtagcaactcttcattcctgctatgggaatgagctgaagcaatttgtttccggcattggtgatttgacaccggatatactacaagtgctgagagctgctgacaaattggagaaagatctggtgcagatcgcggttgaaaactcagtggacagtgaggatggcggaaagtcgatcataagggagatgcctccttacgaggctgaatctgtggtctccaatctggtgaaatcatggataatgactagattagacagactgaaggaatgggttgacaggaatccacaacaagaagtatgggat

SEQ ID NO: 14809 - DNA, 1132 bp, Gossypium hirsutum
  Clone ID: GOSHI-09MAY01-C10525_4
gctttttcccgtccgaaaaaaaaacaggttttcttttaagataacccccaaaaatgtgtggaggtgcaattatttccgattgcggcgcccccaaacatgacccgaaattgaccggcgatgacctttggtctgaacttgacatattctccgacctcctaggtttcgacaacaatggcaaaagctttgtcaatcatcagtttcataacaacaacaacaacaagctcatcaatccaaaagacaatcaacttaacaaagagagaagcgagacgattcagaagacaagccgagtcactaaaaaggttgaaaagactcagcgaactcggaaaaacttttacagaggaataagacaaagaccatggggcaaatgggcagctgagattagagaccctcaaaaaggcgtccgagtttggctcggtacccataacacagccgaagaagcggctcgagcctacgatgaagccgccaagcgtatccgtggtgataaagccaagctcaacttccctcaaacgcccaccaaaaatcaagcagcttcaccagctcttactctgcttcctcctgctaagaaaaggtgcatcgttcccgagttaactcaaccgagtttccagactgactcaccaccttatcctatgggtcttgggtatggaagaagtgaagattataagccgattgaagtggtggagagtgagttggagttgaaagaacaaatctggagcctggaatcattcctgggtttggagactaaccatgagactatgactcagctgagtggtaacggtgggactgactcactggagctttggacacttgatgacctcgtaactcagtataagcaacggcgctaacatgttcattagtgggggcgaaaattaaataatagttagcgttaatcaatgtttttgttttacttagggtttttttatttatgctatcatgcattatatatatatatatgagaataaaggattaacgctttgctcttgcatggattagttagcgttaatcaatatttgtgtgttaattagggttttttattatgttgttatatatgtatatgcttatgactttcatgtttgtatcaatgcattagttgcattatatatataagaataaaggatttaacacgttgcagttt

SEQ ID NO: 14810 - DNA, 655 bp, Gossypium hirsutum
  Clone ID: GOSHI-09MAY01-C10525_3
tcccacgcgtccgcccacgcgtccgcataaatctaagaacccgaaaagtagagctttggttctctgtctgctgcttctttcttctcttggtacttcattatttttcctttcacttcctttttgtgaaaaaacattgaaacccttttcaagacgcaatagaagatgtgtggaggtgcaatcatttccgatttcattgccgtgaaacgcggtcggaagttaaccgccgaggatctttggtctgaacttgacacattctccgacctgttgggtctggattacggaaatggaaaagaccctttcactcagttcgacaacaccaaggccggttccaaagccaagaaccttgaaaaagtgacaaacgagtcgactcagaagacaagccgggggagagagaaagaagggaagactcagcgaactcgaaagaacatttacagaggaatcaggcgaaggccatgggggaaatgggcggctgagataagagatcctcacaaaggtgtccgaatctggctcggtacatacaacacggctgaagaagcggctcgagcctacgatgaagccgccaagcgcatccgcggggacaaagccaagctcaacttccctcaaactccacgcctaactcagcctcctgctaagaaaaggtgtatgatggctcctg

SEQ ID NO: 14811 - DNA, 674 bp, Gossypium hirsutum
  Clone ID: GOSHI-09MAY01-C10525_2
gcttcataaccccagggtcctgtgataaacaagtaaattctttaaaggcccccaaataaaaagttttccagttttatttgttctcccgctaaaaaaagggttgttcctcagtaatcacccggttttcaaatgatttccccctttttctaaggggttgggatataagaaagtgggaattttaaaccccctttaagggtgataaataatttgtaggttttaaaagaacatatctggaccctggaatcattcgggggtttggacactccccatgagactatgcctcagctgagtggtaccggtgggactgactcactggagctttggacacttgatgccctcgtaactcagtataagcaacggcgctaacatgttcattagtgggggcgaaaattaaataatagttagcgttaatcaatgtttttgtgttacttagggtttttttatttatgctatcatgcattatatatatatatatgagaataaaggattaacgctttgctcttgcatggattagttagcgttaatcaatatttgtgtgttaattagggttttttattatgttgttatatatgtatatgcttatgactttcatgtttgtatcaatgcattagttgcattatatatataagaataaaggatttaacacgttgcagtttaaaaaaaaaaaaaaaaaa

SEQ ID NO: 14812 - DNA, 995 bp, Gossypium hirsutum
  Clone ID: GOSHI-09MAY01-C10525_1
gattataaaatatttataaaaacctcaataatataaaagcttaactttgaagctgcattaaatagttccacaactttttcctgtctagcccacgcgtccgtcttctttcactcagttcgacaacaccaaggccggttccaaagccaagaaccttgaaaaagtggcaaacgagacgactcagaagacaagccgagggagagagaaagaagggaagactcagcgaactcgaaagaacatttacagaggaatcaggcaaaggccatgggggaaatgggcggctgagataagagatcctcacaaaggtgtccgagtctggctcggtacatacaacacggctgaagaagcggctcgagcctacgatgaagccgccaagcgcatccgcggggacaaagccaagctcaacttccctcaaactccacgcctaactcagcctcctgctaagaaaaggtgtatgatggctcctgagttgactccaccgagttctgaaaccaagagcccaccaaccccacaaccttttatgggttttggttacgagaatggagtttacaggccgagtgaagcaatggaaagcgagatggagctgaaggagcaaatctcgagtctggagtccttcctgggtttggagcctgatgagatgacaactgagttgagtggaagcgctgagcctgagtcagtgaacctttggatgcttgatcaccttgtgacacatcatcaacaacagcctcagctcttttattagaaattaaaaagtttaaattagggtaatgttatgtttgatatgattatgcttaagactttaatgtttgtattaatgaagggtaaatagttgtgacaataaaaagattggccacccagttttaatttatatttatttctaatttgggtgacatgtaaattggtttcgagaaacattgaagtacccataatgttggttcatgtatcagatatagtaaacactttggattaataaaaaaacctcctaatattttattttc

SEQ ID NO: 14813 - DNA, 490 bp, Gossypium hirsutum
  Clone ID: uC-gsronu33B111f02b1
ttattttaggctgtgttttaagattacccccaaaaatgtgtggaggtgcatttgggtccgatttcgtcgccgcgaaacatgacccgaaattgaccggcgatgacctttggtctgaaattgacatattctccgacctcctaggattcgacaacaatggctaaagctttgtcaatcatcatgtttcatagcaacaacaggatgctgatcaatccaaaagacaatcatcttaacaaagagagaatcgagacgattcataagacatgccgtgtcactaaaaatgttgaaaagactcagcgaactcggaaaaacttttaccgaggaatctagacaacaagggccgggaccagcaaggataaagaataaaggtgtacgaagcatcgacatgtttacagtttcgcacatcacacttagggtaagcaaactgatcatagacaagacctcatccaaatatacaattggcttttgagacagttcaaactcatttacaatt

SEQ ID NO: 14814 - DNA, 378 bp, Gossypium hirsutum
  Clone ID: LIB3166-040-P1-K1-C5
cttctttcttctcttatacttcattttttttcctttttcttcttttttgtgaaggagcattgaaactcttttcaagacgcaatataagatgtgtggaggtgcaatcatttccgatttcattgccgtgaaacgcggtcggaagttaactgccgaggatctttggtctgaacttgacacattctccgacctgttgggtctggattacggaaatggaaaagagtcttctttcactcagttcgacaacaccaaggccggttccaaagccaagaaccttgaaaaaggtatgatttatgcttctggcttttcttcaaagtttgggtgcttttttcttttttctttttgcagaaagccatgcttttccatttgtttcttgcatgt

SEQ ID NO: 14815 - DNA, 864 bp, Gossypium hirsutum
  Clone ID: GOSHI-09MAY01-C10445_1
tcatacagcaagtgattttctaactccttggatcctaattcaagattatgatatggttgattctgggtcggtttctgaaagtggaactgatcgtccggtgaatttttccgatgaatatgtgatgttagcttcgagttatccaaagagcgagctgggaggaagaagttccgggagactcgacacccggtgtaccgtggagttcgccggaggaatcccgggaagtgggtttctgaagtgagggagcctaataagaagtcgaggatttggcttggaactttcccgacggcggatatggcggcgcgtgctcacgacgtggcagctatcgcactgagagggaagtcagcttgtttgaacttcgctgactcagcttggaatcttccggtcccggcttcttcccacccaaaggatattcaaaagacggcggcggaggtggcggagactttcagaacggctgagtggttcgtgcgggaattctagaaacgattcaagaagaagggaaaacccggcagatggagaaagggttttatttggacgaaaaagcgttgtttgggacacaaaaattttgggcaaatatggctgccggtataataatgtcccctcctcgttccggtcatgacggaggatgggaagaacatgaagtagatgattatgtccctttatggagttattctatttaaaagtaattttttcagacattttcaagcattcattggaatttttagttcgtagaaatcgcccccggcaattgccctttatgttttgtacgtacaacggtttttttggattgtacgggtagtgttgtaagtaaaaaaattaatgtgtatatatacgatgtatatatacgtcataacttctcccaccaat

SEQ ID NO: 14816 - DNA, 387 bp, Gossypium hirsutum
  Clone ID: LIB3166-055-P1-K1-A5
gccaaaacaagccgtttataattccgttagttgtcaagtggaagtccaacgatgggtgggggtgaggcatcctaacagaccggcagactttcataacggctgagtgttcgtgcgggaattctagaaacgattcaaagagaagtgaaaacactgagatggagaaagggttttatttggacgaagaagcgttgtttgggacacaaagattttgggcaaatatggctgccggtatgatgatgtcacctcctcgttccggtcatgacggaggatgggaagaacatgaagtagatgattatgtacctttttggagtttattctatctaaaagtaattttttcagacattttcaagcatttcattggaatttttagttcgtataaatcgccac

SEQ ID NO: 14817 - DNA, 329 bp, Gossypium hirsutum
  Clone ID: LIB3166-026-P1-K1-A9
gaaaaaaaggggcgggccacgcgtccggccactcaaactctcacacaaccgtccattctttcaaaccaaaaaaacaagctgggggggagaaattccgggagactcgacacccacagtaccgcggagttcgccggaggaatacccgggaagtggttttattaagtgagggagcctaataacaactctaggatttggcttggaactttcccgacggcggatatggcggcgcgtgctcaccacatggcagctatagcactgagagggaagtcagcttgtttgaacttggctgactcagattggaatcattcggtcccggcttgtttcgaccc

SEQ ID NO: 14818 - DNA, 582 bp, Gossypium hirsutum
  Clone ID: GOSHI-09MAY01-C10465_1
gaagggtcccgatcgctgtctcaactcatccaaaagtttaaagactctagcaccctggggccttttggagtatgactcgcttctgccatgggctcttgatgtggcaaagcagcaagggatttatggagcttctttctttaccaactctgccgctgtgtgtagcatcttttctcgcatccatcatggccggcttgctctgccgctgacccctgaaagcaaacccttaatgttaccaggacttcctccattaaatttccgtgtcctgcccacttttcttcggtttccagatagctgccctgcttacttggccatgaaattgagtcagtattcgaatttgaatgaagctgatcgggttttcgataactcctttgaagacttggaaggaaaggaagcaaaaggcgtgtcagagctctggcaagcgaagttgattgggcctatggtaccatctgcttacctagatgaaaggatcaaaggtgacagaggttacggttcaagtttatggaagccacttagcgaagagtgcatggaatggctagaaacaaagccatctcaatcccgtgtctatatttgatttggaagcat

SEQ ID NO: 14819 - DNA, 592 bp, Gossypium hirsutum
  Clone ID: GOSHI-09MAY01-C10415_1
agacacccgtaggtaattccttgagggatgctaaactttccttcaaagacatagatgaggttatccttgttggtggatcaactcgtattcctgctgttcaggaacttgtgaggaagatgactggcaaggaaccgaatgtgacagtcaacccagatgaagttgttgccttgggggctgcagttcaggctggtgttttatctggagatgtcagtgatattgtgcttttggatgtgagtcctttgtcacttggtctagaaactcttggtggtgttatgaccaaaattatcccaagaaacactacgctgccaacctccaaatcagaagtgttttcaactgctgctgatggtcagacaagtgtcgagattaatgtactccaaggtgaaagagagtttgttagggataataaatctcttggcagcttccgtctcgatggtatcccaccagcaccacgtggggttccacagattgaagtcaaatttgacattgatgccaatggtatcctctctgtcactgctgttgataagggaactgggaagaagcaggacatcactatcactggtgcaagtaccttgccaaacgatgaggttgatcg

SEQ ID NO: 14820 - DNA, 375 bp, Gossypium hirsutum
  unsure (1)..(375): unsure at all n locations
  Clone ID: LIB3135-009-Q1-K1-C3
cgtccggaatatttttgtatattcaataacagggccaaaaatatgtatgtaaaattttacatcaagganaggacgtttacccactcaaatgaatttttttcgaaaatttttctgggtaaaactgctgtttgtaatttaaaaaatagagatcagtttataaatcaaccaagaacacccaaaacgcccaaaatctgataccaaatgatacggggttgcgcgcggaccaagatcgagttgccaagtcacgagaaacttctacgaaaaccctaaacaattagatctgaaacgaaacagaaaattaaaagattagatttttgaattttcagatctgaaataaaatccccacatcagcaaagaatcaaattgagaatataa

SEQ ID NO: 14821 - DNA, 384 bp, Gossypium hirsutum
  unsure (1)..(384): unsure at all n locations
  Clone ID: LIB3166-025-P1-K1-F1
gttgaagttagctttttcgttatttgattaaatgaaaagatttagggtccaacgtggtttgttgacgtataataaacttttaagagcccgtagcaaatatggttccttgcatgaagtacaacagtgccttgctgtatatcaggaaatgcggaaagcggggtatttttagcattttctctgaattccttatctgcatgtgtaggtgtttaattgcagattgccttgttgatacggngttgcgcgcggaccaagatcgagttgccaagtcacgggaaactcctacgaaaaccctaaacaattagatctgaaacgaaacaganaattaaaagattagaattttgaattttcagatctgaaatgaaatccccaaatcagcaaagaatc

SEQ ID NO: 14822 - DNA, 388 bp, Gossypium hirsutum
  unsure (1)..(388): unsure at all n locations
  Clone ID: LIB3146-025-Q1-K2-C2
cccacgcgtccgcccacgcgtccggttaaaagtgcttaaatgtgataagtctgtaatcccatctatatatgacttccgtagcgtctatttttttcacgcttacttgacgttggatgaggctgagaacttaagtgaattagaagaagtcgaggaagttggctttccaatgtcagaggttcctaggaaagcaaaacgaaccaggtctcgaacttccaatggtctactaaaagcaaagaaacaaaagactagtatgggcagcattctctcgcagcggagacaaaacaaagagaaatggaggtataatgaagattttgagccagagccagagtctgacattaagggtttagaggaagatgactngtcagaggatgatttgctcgatgattat

SEQ ID NO: 14823 - DNA, 363 bp, Gossypium hirsutum
  Clone ID: LIB3166-030-P1-K1-C4
attccgtacccttggtggtttcaaccctaacttgccgtgggatgaggctgagaacttaagtgaattaaaagaagtcgaggttattgattttccttcaatgtcggaggttgctaggaaagcaaaacgaaccaggtctcgaacttccaatggtctactaaaagcaaagaaacaaaagactagtatgggcagcattatctcgcagcggagacaaaacaaagagaaattgaggtataatgaaggtatgcctcacctaaattttaattatttggatgtgttatgtatctcacattctaccaggggtgttatacgtttcattgctaatgttttggaatccttgcaaatcttcggtcatttctgtatgtt

SEQ ID NO: 14824 - DNA, 622 bp, Gossypium hirsutum
  Clone ID: GOSHI-09MAY01-C10705_1
gtgaaccaatgtttgtgagcatgaatggtgatatgactgatgtaccggatcaatatgatgggcttatgatcacagagttcctccaaatttttccaattgcccccctgatgatataaatgctcaccctctacaaaatgaaagcattaacagtctgcagactgaggacatcaatcctctgcagaatgagattggcctacataatggagagggaactcttgccgatgacgactcgatatatatgtccattaagctttttgccagcatgggagcaaccaccatcccaggggtatgaaaagccattctgattctacaattgtgcaaaatatgcgaagaaattctgcgtagtatgtttacattagtcactcattgttgtctgttccatcctatggcaagttgcttttgaatttatgcttgtatatctctgctgctgataggaatttacgacatggtgaatgcgtttctttcatttggctgttgcactacatcacaaaaggaaagaaagttcatcatgttcatttctaaagtatatttcttctccttttttgcttggattggattgagatctagaatgatattcaagtaaaaaaaaaaaaaataaaaaaaaaaaaataaaaaataaaaa

SEQ ID NO: 14825 - DNA, 401 bp, Gossypium hirsutum
  Clone ID: LIB3145-057-Q1-K1-C5
cccacgcgtccggaaatactgcttagtatgtttacattagtcactcattgttgtctgttccatcctatggcaagttgcttttgaatttatgcttgtatatctctgctgctgataggaatttacgacatggtgaatgcatttctttcatttggctgttgcactacatcacaaaaggaaagaaagttcatcatgttcatttctaaagtgcacaataataatgcaaacaaaccctatacagcttggagattcgaagcacggaccattgatggtatcacaatctcactgtttgaacatagaatggaaacgataaactaactgagaggttgaaagaaatatggggggggccctttttaagaaaccaattttctttccccgcgcgtggcaagaaaaatctttttttt

SEQ ID NO: 14826 - DNA, 681 bp, Gossypium hirsutum
  Clone ID: GOSHI-09MAY01-C10615_1
tcccttcttaacgacgactcgaattctaaaaaagaaaaaaacctacaacatgaggcccctcttctccgtcccattcttaaccttcctcttcttccatttctactcagtcccgaccctcagttcctacgtatacgacactagcgccaccaccaccaacgtcatcaactctacagatttcattcgtacaagctgctacgccaccttgtatcccgatatttgctatacttccctttatggctatgccaacgccatccaacaagacccagctcgtctagctcgtgccgccattagtgtcagcctctctaaagctcgtaacatggcagtctacgtctctaacctctcccgggaagccgattacggcgccgacccaagagccagcgcagccttgcacgactgtttctcgaacatgggtgatgcagtggatgaaatccgtgggtcgctgaagcaaatgcaacgggtagtggctccaggttcggagtctttcaggttccaaatggggaatgtccagacatggatgagcgcggctttgacggatgaggagacgtgtaccgacgggttcgaggatgtggcgggtgggccaatgaagacggaggtctgcaagagggcggctaaagtgaaagaagtttacgagcaatgctttggcgttggttaatagttacgcagaaaagggcacagtgtaat

SEQ ID NO: 14827 - DNA, 766 bp, Gossypium hirsutum
  Clone ID: GOSHI-09MAY01-C10605_1
cggccgcgtgggtttacgaagactctcgtggactataaaagttcacccagattcccatattcacttctcgaaacagttaattcatcgtttctgtctccgattgatctggtgctcctaccttttagatctctccctgaagcattaaatcttgagaatggatgataatggtgaaaaagaggaaaatatcccacgtgggattgaatgggaagttgtgtccttaactgcatctgcatatgctgccgctcctggtccaaaagaagttgaaacaaaggatgataacaagggtgatccatatgaagtaggggaagcagaaacttctcatgctttattcatgtctggtcactttgtcttcccccctagcgagcatgagaatttgccattggaacccgagaatagtagtgaacgtgtaggcaaggacgtggtccatgaattaggtgttgtagaagaaggtggtagatctaggacaaaggaagaagaagaagattggtctttgagagggttgaatgtgcatgaagaattttcaggtatgcaattttttgataaaaaacatggtacagagtttgatgaaggaacaacactgcaaggactggatttgattgacaagggccagagtttgtatagtgctgcgacatttggttctttccatggtgaggaagcacttggtggaacaaccacctttggtgaagatgccactgtttctgaacttattgaaacttctgagcaagggttaggttttccttcaaaatattccttaacccccaaagcc

SEQ ID NO: 14828 - DNA, 658 bp, Gossypium hirsutum
  Clone ID: AI054595.1
tttctgtctgcgattgatctggtgctcctaccttttagatctctccctgaagcattaaatcttgagaatggatgataatggtgaaaaagaggaaaatatcccacgtgggattgaatgggaagttgtgtccttaactgcatctgcatatgctgccgctcctggtccaaaagaagttgaaacaaaggatgataacaagggtgatccatatgaagtaggggaagcagaaacttctcatgctttattcatgtctggtcactttgtcttcccccctagcgagcatgagaatttgccattggaacccgagaatagtagtgaacgtgtaggcaaggacgtggtccatgaattaggtgttgtagaagaaggtggtagatctaggacaaaggaagaagatgatgattggtctttgagagggttgaatgtgcatgaagattttcaagtatgcaattttttgataaaaaacatggtacagaagttgatgaatgaacaacactgcaagactgtatttgatgacaaaggccaaatttgattatgctgcgacattggttctttcctgtgaggaacacttgtggaacacaccttggtaggagccatgttttgactattgactctgactagttaggttcttaattcttatcccaagctcaaataaagtgacccg

SEQ ID NO: 14829 - DNA, 796 bp, Gossypium hirsutum
  Clone ID: GOSHI-09MAY01-C10635_1
ttttacgcgtccgtatccacatgtgaaggatatatgggtcacttatctgtcgaagtttgtaaagagatatgggaaatcaaaactggaacgagcaagggagctgtttgagcatgctgttgaaacagcacctgctgatttagtaaaacccctgtatcttcaatatgcaaagctggaggaggattacgggctagcaaaacgagctatgaaggtctacgatcaagcgactaaggctgtttcaaatcatgagaagcttggcatgtatgagatttacattgcccgtgcagctgagatctttggtgttccaaaaacaagagaaatttatgagcaggcaatacagtctggccttccagataaagatgtgaagacaatgtgttggaaatatgcagagttagaaaaaagcttaggagaaattgatcgtgctcgagcaatatatgtatttgcatctcagtttgctgatccacgctctgatgcagatttttgggataaatggagggagtttgaggtgcaacatggtaatgaagataccttcagagaaatgttgcgtattaaacggagtgtctctgcaagttatagccagacacacttcattctccctgagtatctgatgcagaaggatcagaacatcgatgaagctaaggacaaaatgaaacaggctggtatctctgaggatgaaatggctgctcttgaaaggcagttactacctgcggctgataatgctattgccaaagacaactctaggaaagtagggtttgtgagtgctgcagttgagtcacaagccgatggtgggttgaaaaca

SEQ ID NO: 14830 - DNA, 1251 bp, Gossypium hirsutum
  Clone ID: GOSHI-09MAY01-C10175_1
atgtgtccaagtcaataaaagtgatgagggggagcgcacgcggttcaggtctgatgtcctctccttccagcagatgtcagagcaattcaaccaagaaattctttgactggaaaaatccttcaggccacttcaattccatgtttgaattctctggttgttggcaaaaagatgcggggtggtgccaagacacttgcttttgatggggttttcatcaccctctactcagttgcactggagaaatctcaaattgtgctacgagatcatgtcaagaaagcagtcccatctacatgggagccagcagcattagcaaggtttattgacacttatggaacccatataattgttggtgtgaagatgggagggaaggatgttatttacataaaacagcagcattcatctactcttcaacctgctgatatccagaaaagattgaaggatatggctgataaaaggtttttagatgccagtggacattataacttggcgcctgagcaagtcttccagagtgacaagtttgaaattagggagcagcggctaaggtttgctagtaacagtccatcaagttcatatgcacagaaagaggacattataagcatttacaaaaggaggggtggaagtgataatagaaacctttcccataatgactggttacagacggttcagtcagagcctgatgtaatctcaatgtcctttatccctattacttctctattgaatggagttcctggtagtggatttctgagccatgccataaacctatatttgcgatataaaccaccagttgaagagctccaccagtttctggaatttcagcttccaagacagtgggccccagttttcagtgaacttcctcttggtccacaacgaaagcggccgcgcgcgccctcgcggcggttcagcttcatggggcccaagctttgggggaatactactccggttgatgtgggtaagaggcctgtgactggcctccgtctatatctagaaggtaaaaggagcaatcgcttggccatccacttgcagcacctttcctcccttccaaaaatattccaacttgtagatgatccaaaagggaacttctgccaagagtctcatgatcgtaaatactatgagagagtttattggaagaactactctcacgtatgcactgctcccattgaatctcaggaggaactttcaattgtaactggagcccagttgcaggttgagaatcatggttttaaaaatattctctttttacggctatgcttctcg

SEQ ID NO: 14831 - DNA, 429 bp, Gossypium hirsutum
  Clone ID: GOSHI-09MAY01-C10135_1
cccacgcgtccgaaaaaaaaaagatagaaaaagaaaatggggatatgggacttgatttcatggtcaaccgactcagtgaagggcttttggcagagctcttgcgatcatggttccacagtgatcacaaagggaaaggaagtatcagttgatgcactgcaaaaggtgaaccatcatggttccgcagccatcagcaagggcaaggaggtgttgtgtactgcactggaaaaggtgaaccatcacctgtctgaccctgaaacccggtcaaagatctccaaggtagctaccgatattgccaagaatgctaccgttgagggccttaaaaccatccctggtgcatatccaacatacaaaattgtatcaaagtcgataagtgatgatgatcagaaattcaaaagtgagaacaagtccaagaaacaggaagaagctttg

SEQ ID NO: 14832 - DNA, 612 bp, Gossypium hirsutum
  Clone ID: GOSHI-09MAY01-C10055_1
cccatcggttcatctcactactgttcaagagaagttacttaaagaaaggaaaaccatggctcctagatcaaaacccagcccgattagcccgaatcccgacccgaattctaaggagatccgctaccgcggcgttaggaagcgcccatggggccgttacgcagccgagatccgagacccgaggaaaaagactcgagtctggctcggcaccttcgacaccgccgaggaagcagcgcgtgcttacgatgcgaaggcgcgagagttccgcggcgctaaggcgaaaacaaatttcgccgacaacaacgccaacgacttcacgcgcagccctagccagagcagcaccgtggagtcttcttctccgccgccacttgaccttactctggccagcccgtgttcttccctccctgtgacggcgcagcgtccggtttacttcttcgatgccttcgctactggcggttcgggttgccccgcatccggattcgctcaaagcgactccgattcgtcgtcgtctgttgtagattttgaaggaggagtgcggcggagagtgtttgatcttgatcttaaccagttgccagctgaaatggattgatttgcctccttttttcaatatgtcgt

SEQ ID NO: 14833 - DNA, 379 bp, Gossypium hirsutum
  Clone ID: LIB3166-052-P1-K1-D10
atcggttcatctcactactgtttttgaaaagttacttaaagaaaggaaaacgcgagggctcctagatcaaaacccagcccgattagcccgaatcccgacccgaattctaaggagatccgctaccgcggcgttaggaagcgcccatggggccgttacgcagccgagatccgagacccgaggaaaaagactcgagtctggctcggcaccttcgacaccgccgaggaagcagcgcgtgcttacgatgcgaaggcgcgagagttccgcggcgctaaggcgaaaacaaatttcgccgacaacaacgccaacgacttcacgcgcagccctagccagagcagcaccgcagcgtccggtttacttcttcgatgccttcgctactggc

SEQ ID NO: 14834 - DNA, 601 bp, Gossypium hirsutum
  Clone ID: GOSHI-09MAY01-C10045_2
gtgcgccctatctacgcaaggtggacttgttattattcaagagttaccaagaactatcgggggcctgtgaggcaaaatgtttagctccttcactattggtaactgtgggggttcacaaggaatgaaagatttcatgaatgaaagcaaattaatagatctcttgaacgggtctgaatatgttcctacttatgaagacaaagatggagattggatgcttgttggtgatgtcccatgggagatgtttgtcgattcatgcaagcgtttacgaatcatgaaaggatcagaagccatcggacttgctccaagagcagtggagaaatgcaaagaacagaagctgatgctagcttcattacaaaacaacaatctgagttgagaatcaagtgttactaagataaaaagaaaagagagcagcaaaccggttcgaaagggatcgagcagggagtttgaatgtgttcatcagcatgaagaaaaaaacgagaagaaattattaagagacaagaaatctatacgaaaaatgtttacgagacttggttttaatttcttctgtgggttgtgtaagaattaataacctaaaaattattaataatgtttttgattagtt

SEQ ID NO: 14835 - DNA, 690 bp, Gossypium hirsutum
  Clone ID: GOSHI-09MAY01-C10045_1
gtcagaagaacagctccgacaacaagggtgagaaaaccggctgtggcaacaccattaacactgccgtacccgcggcgtttgttaaggtcagcatggatggtgcaccctatctacgcaaggtggacttgaaactatacaagagttaccaacaactctctgatgccttgagcaaaatgttcagctccttcactattggtaactgtgggtctcatggaatgaaagatttcatgaatgagagcaaattgatagaccttttgaatggttctgagtatgttcctacttatgaagacaaagatggagattggatgcttgttggagatgttccatgggagatgtttgttgattcgtgcaaacgcttacgaattatgaaaggatctgaggcaattggacttgcaccaagagcagtagagaagtgcaagaacagaagctaaggtaggtttagaaacaacaatcccaattaaaatcaagccagatcaaaatcagattgtatgtgaaaccagttgaatcgagaaccgaggtctgaagaagaagaaatattaataaaagttagtagggatatattttgatatttattaagggacaagaaatcaaataatagaaaattcataaagtttactttcaagggtttgttttaaataatgtccttaaatatgttagtggttttggtttttgagtgggggggggggggag

SEQ ID NO: 14836 - DNA, 458 bp, Gossypium hirsutum
  Clone ID: LIB3135-024-Q1-K1-D3
gcggaaatatgtgggtcacatggaatgaaagatttcatgaacgagagcaaattgatagaccttttgagtggggctgagtatgttcctacttacgaagacagagatggagattggatgcttgttggtgatgttccatgggagatgttcgttgattcatgcaaacgcttacgaattatgaaaggatctgaggcaattggacttgcaccaagagcagtagagaagtgcaagaacagaggctaaggtaggtttaaaaacaacaatcccaattaaaatcaagccagatcaaaatcaaaattgtatgtcaaatcaattaaattgagaaccgagatcaaataaagggtttgaatgtgttgatgatcaagaagaaatattaataaaagttacgagggatatattttgatatttatcaagggacaagaaatcaaataatagaaaagttcataatgtttactttcaat

SEQ ID NO: 14837 - DNA, 862 bp, Gossypium hirsutum
  Clone ID: GOSHI-09MAY01-C10015_1
gtccggaaataccggggcggaccaagccgtccgaataaggaacattctgctgaggtggttaaagaaaagggcaaccaagcatacaaagataagcaatggcagaaggctattgggttttatactgaggctatcaagcttagtggcaataacgcaacatattatagcaacagggccgcagcatatctagaactaggaagtttcctccaagcagaaacagattgtaccaaagctatcagccttgataaaaagaatgtaaaggcatatttacgaagaggcactgctagagagatgcttggttactataaggaggcaattgaggattttagctatgctctggtgcttgaaccaaccaataagagagcagccctttctgcagataggttaaggaaggtatttcagtaagtgaatggaagataaaaatgaaattataagtggattcagtgttgcagaattggttcatgcgagttccaagtcatccttttgattttgttgcatcaatttcaaaggatgaagattttcatgcatctgagatggtcgcaggatgagttggtttttcatactattaatttttatctatcgctttggtctgcatccttatgttattttaaaatcattattatattttggtaggtattcagtccagttttgtttctttataattgttctttgtattattgtataatactaggatcttatcggcttctacacattccttttatatatcgagttttatgccttatgaaaaaaaaaaaaaaaaaaaaaaaaaaaaaaaaaaaaaaaaaaaaaaaaaaaaaaaaaaaaaaaaaaaaaaaaaaaaaaaaaaaaaataaataaaaaaaaaaaaaaaagggcgggtcttttt

SEQ ID NO: 14838 - DNA, 1542 bp, Gossypium hirsutum
  Clone ID: GOSHI-09MAY01-C10035_1
gggggcccaacgcggccgtcccaacacccggtgcacctgaaccggaagggatccggttcattcctcctgttaatttcaccgaaaaaccagtattttcgttttcgtttcctttctttctcttcctgaaaacaaaatccaaaggaaacctgatttttgtaaaatacagaggaagagaggagactacaacttttaaacgacaccgtcaagaccaagttccaatttttattacttctgtgtgtttcctttgaaattcaccctcccaaataaattccccaactcgtccgagctcctgaaacagctgagaatccgatggactctttgggtccgaatcgctttgatatctttgaaatttaccggcaattttgtgaacttagaagaggagatacttatgtttgtggcgaagaaggttaccgacaagatgaggaatcacaaagagctaagtactcgtgggacagattgaatcacctcttaaagatggtggagtcaaggatgcacacaaggactgccatctttgatgaacttcacaagctcatgttacaactagacttgacggtggacttttctgaattctcatgcttctatgattttgttttcttcatgtgccgagaaaatggtcaaaagaatattactataagcagggcagttgctgcatggagattagtgttggctggcagatttcgactacttgacaaatggtgcaactttgttgaggaatatcagcgtcacaatatttcagaggatacatggcagcaagttttagcattcagtaggtgtgtacatgaaaatctggaagggtatgatcctgaaggtgcttggcctgttctgattgatgacttcgttgagcacatgtacagaatttcaggatccaacagagattcaaatgctttctgttgctgtgttgattcggagccccagttgtgtgcatatgaggacactttgcctggattaagagtatttcctgggatgaagaggaaattgctcgaatgtcatgatgacgaaatggagtcctcggattcgcacttgtcggacacaccagacctgaattgctcattgaattctaagagaagtaggttgattgcacacagattggttacccctgatgcatctgatgattgcatggaagttgctaaacacagtagtcctgtgtgttgttcgaagtctccctgtgcaattgaaggttgcctatcaaagggttttgcagggctcttatcgagttactcgtattttgcagtttgatcggtaaagaagacttcaattctctattacataagatagagcttgcaccctccgagttacaattatagaaaaaaatgtatcctttgcaagcctatgatttagatatattcatatctctgcaactcgtatttttcggacgattttgtgggttaatctcctatttttatctatgcacgtttgtgatgtctgatgcaatatccctgtcctctagatctgttgcaactaaaagaaatatatatgatttgctatatctcttcagcttctttttgctgaaggttgagactgaagagtaagtcttgaaaacag

SEQ ID NO: 14839 - DNA, 485 bp, Gossypium hirsutum
  Clone ID: LIB3828-029-Q6-K6-B9
tcggtgctctggaaacagctgagatccgtggactctttgggtccgaatcggtttgatatgcttacgaaatttaccggcaattttgtgaacttagaagaggagatacttatgtttgtggcgaagaagttaccggcaagatgaggaatcacaaacagctaagtactcgagggacagattgaatgacctcttaaaagatggctggaggcaagggatgcacacaagggactgccatcttgtcatgaacttcacaagctcatgttacaactagacttcacggtggacttttgtgaattctgatgctaggtattagttggtttacttaatgtgccacttaaaatggtcatgaagaatattactattaacagtgcacatactgattggagataactgtatgatgctacatttatactactttacatatgtagcatctttgtatgggaatatcaacgacacaatatttgacaggatactttacaggatgcttt

SEQ ID NO: 14840 - DNA, 371 bp, Gossypium hirsutum
  Clone ID: LIB3493-056-P1-M1-F8
cttatgtttgtggcgaagaagggtaccgacaagatgaggaatcacaaagagctaagtactcgagggacagattgaatcagctcttaaagatggtggagtcaaggatgcacacaaggactgccatctttgatgaacttcacaagctcatgttacaactagacttgatggtggacttttctgaattctcatgcttctatgattttgttttcttcatgtgccgagaaaatggtcaaaagaatattagtaagttatctcatgctagttcgttaaatgcaaatgcttgtactgatttatccttggaataacaacgaagttatctaagtgtaaattataaggaatttctttggtgtcgtatttaattctctttcttt

SEQ ID NO: 14841 - DNA, 820 bp, Gossypium hirsutum
  Clone ID: GOSHI-09MAY01-C10025_1
atttttgcatacggggatcattggcggcgtgtactcaaataatctgaaaataaccgatgttttgatggaccagaatcttgtagctaagattagtagttacaacctgcccttattagcagagagtgcaggaaaggtagatcacaggacttctgctctaccaaaagactcgagtagcagaacaagggcaagttatgaagataaggctgatgtctatgatttcggagtgattttactagaaatgattctagggaggccatcaaaagccaagagtgaagtcgaaatccttaaaaatcagttacaagcagttgtagcaactgatgatgcaactagaagaagcatagctgatccagcagttcagacatcttgctcggatcagtcattaaaaacaatgatggaaatttgtgtccgatgtctgctaaaggaccctgcagagagaccctctgttgaggacgtgatgtggaacttgcaatttgctgctcaagttcaggacgcatggcgtggagattcccggagcagttctcctggcggctctccttcccaacctgctatcctccccgttgccttccattagtgataactttcaggatatggcaacacaagtggaacccttggtttgtttgggaggatagagaagacaaagggttggaaaagcgtttaatctgatggttttgtataaaatatgaagtttcagaacttaaccattggaccaaaagtaattttactttgttttatttctattcttcttaccaagcaaagtctcgggaagtttaagcactctattctcttcatgtgagaatcaaaataatgtatagtttcttac

SEQ ID NO: 14842 - DNA, 983 bp, Gossypium hirsutum
  Clone ID: GOSHI-09MAY01-C10345_1
ttcggcaacccttccgccaacccttccctctcgcgtccgcgaaccggaagcgtcgttgagtcgtgtaaatattgaactcgtagactggttgaagtaaaagcgaaaatggaagggattggattggaaggagatgggtcaaacggggaagctcttgggaagtgcttgagtgggttggtggacgatggtagcaccgagagtcatcgatactacctgtcccggagaactgtgctggagatgcttagggacagaggctatgccgtacccaacactgaaatcgacctctctctccatgaatttcgtgccattcacggccaaagccctgattttgatcgtctcaaactctctgttactcataaaactgactcttccaagcggacgctggtagttttctatgggcctggtgtagttaaagtcagtgggattcggctcattgctggtctaattactagcaaagaaactttgacggggttgatattaatcgtgcaaaaccacataacaaaccaagctttgaaagctttagaccttttctcttttaaggtggagatattccagattactgacctacttgttaatatcacaaagcatgtgctgaagccccagcaccgggtactaacagaacatgagaaacaaaggctcttgcagaagtacagcatagaagaaaaacagctccctcgactgttaaaaaaagatgccattgcaagatactatggttttgaaaagggtcaggtgataaaagttacgtatgggggtgaaatcactgagtcacatgttacttatcgatgtgtctggtgatgaaacaaatcaatgctgtcgctgttctttatgtttcttcctgtaggaaaattgcgtttgtagttttctgtccgaagtgttttcccgaacctttctatggggcttccgacctttgtttgctgttttatgaacactaattgagttggattcttctttaattttactttgaaatctataatgtctgttggcct

SEQ ID NO: 14843 - DNA, 447 bp, Gossypium hirsutum
  Clone ID: GOSHI-09MAY01-C10365_1
cccactcgtccgcccacgcgtccggtttacttggttcagagtaaccgaatgccacaggtctcaggttcgagggccgtgagagagagaggtgatcgatcaaagcaatggccactggagcagcaccgaccgagatgatgctccggtgcgtcctggacggaagcctagtgatgcgagaaatcgaggtggagcgccgcccctatcatcgcaactgcagctgcgctttacacagcttaaaaggtagcgtcctctgctcatccgcttgttctcgctcaaggaataatatagcttttcctaagaaaaagacctggaatgttgattgttccttatcaatggctgcgaccgatcctcaatcgatctcttctcggtcttctcttctcggtggattatctgttagaaaacatggattcgaagacatcaatgacgtttgattatgtgctgcagaaagca

SEQ ID NO: 14844 - DNA, 576 bp, Gossypium hirsutum
  Clone ID: GOSHI-09MAY01-C10325_2
attgttgaaaggctttatgctacttccatggttaccaagtgtaaaagctgtgattttggtgagggttcgaatggatatcaacttaataatgaatccaatccccatgaaggaggagaagaaggtgttgaagggtcacctttttcacctcaatctgataatgaaaacgatgattttgacccttatggcggcttatttgatgatgagcaaaaaagggttcttgagattaaagagcgtcttgaactacctgatcagtcagaagatactttagttgatttgcttcaaagtttggcagatatggatataacatttcaagctctcaaggagaccgatattggaagacatgtgaacaaattgaggaagcattcatcaaatgatgttagaagattagtgaaacatcttgtcagaaaatggaaagatattgtagatgaatgggtaagggtgaatcaacccggagaacatgagcctgctgcacttatggatggagattctccgcagcaaaagccgcctcaaaacggtcgtcagcaggttcctgattttgcatactctccgaatccacacaatggcggttctggttcc

SEQ ID NO: 14845 - DNA, 976 bp, Gossypium hirsutum
  Clone ID: GOSHI-09MAY01-C10325_1
atcatatttcatttcaaaaagaaaaaaaaaaggaaaagagttttatctgttcggtcgcgtgggtccaattcccacacaaaaatccaattccattaacaaactcaaaatcatcaagttgttcaaaaaaaaaaaaaaaacccatttcagctttgactttaaggaattgtttttcttttgtcagctgaaaaaaattgtaaatttcaagctttgggcgtttttgttttcaatcagatctgattatgttgaaggtcaaatctttgatttgatacttggaagaaataggcgttggaatttgcaacataatcatcaacttttggttttaattgtaatggatttggatgatttcagatcagttcttgaaactgctggtgttgatgtgtggacttttatagataccgcaatcctggtagcttctttggattatggccaagagtttaagcaaaggagagatgggattgtggagaggctttatgctacttccatggttaccaggtgtaaaagctgtgattttggtgagagatcaaatgtatatcaagttaataaagaagatagcccccatgaaggtaaaggaggaggaaaagggtcaccttttacgcctcaatctgataatgaagacgatgattttgacccttatggcggcttatttgatgatgagcaaaaaagggttcttgagattaaagagcgtcttgaactacctgatcagtcagaagatactttagttgatttgcttcaaagtttggcagatatggatataacatttcaagctctcaaggagactgatattggaagacatgtgaacaaattgaggaagcattcatcaaatgatgttaggagattagtgaaacatcttgtcagaaaatggaaagatattgtagatgaatgggtaagggtgaatcaacctggagaacatgagcctgctgcacttatggatggagattctccgcagcaaaagcagcctcaaaacggtcgtcagcag

SEQ ID NO: 14846 - DNA, 407 bp, Gossypium hirsutum
  Clone ID: LIB3166-024-P1-K1-F6
acccgggggggccaagccttcggtccaccctgaaaaccttaaccctctttacctaatggttggaaatcctccccacgaaaagcttcctaaaaacggtcgtcaccaggttcctgattttgcatactctccgaatccacacaatggcggttctggttccgaaaagaataattcggaacctgaaaggaaaccgaagctgatccctcctcgaaaagatcctccctcaagacctactcacttgactcctccacaaaatgtacagagacaaagagaacaaaaggaaaccaattttgacgccgaaaggctagcttcggcaagaaaaaggcttcaagaaagctacaaagaagctgaaaatgccaaaaagcaaagaacggtacaggttatggacattcatgagctaccgaaaccca

SEQ ID NO: 14847 - DNA, 849 bp, Gossypium hirsutum
  Clone ID: GOSHI-09MAY01-C10295_1
ctaaatactaaaagcgattttggatctggaaaggcgaagctgagggtgaaccatgagcggcgatactagtgattcctccagttactttgatgggcgagagccagatgaactgatcagggccatcgtcgagaaacggccgggtaccgatggtaaaacaacgctcggtttgcactttattgatctggaaagcaataaagtctttattaaggcgatgccacctgctgctccttcatgtcccactgccgtttcctgtggcaaccgcgtttacgttcttgggggaatgcgcgaaaatgatgctaattttcgtggttatgagggagtaaacgatgttttccaattagatttgaaggaccttgaacgtgggtggagaaaaactacttctatgttgttccctcgggcttatccccatgttcttgctgctgaaggaatgatttacgtcttcgaatgtatgggttctgaatcttttggcgaggtttacgatataagtggggatatttgggaaccattgtcgccccctccggaagctatcgatatacgtgtggtatgtgttcctgttctagattcttcccgatctcgaattttggtgcactgcgatgccagtgatactctttacgcttattactacgatcgtaaatcatgggtttgcctcgaacaaaaattttcttactggtctggctcagcggcaatcgtggacgatttgctgtatactttcatttataaatgttctttggaggcgtataatttgcttgataagaaacatttgcccgtcaaatggtcatcagaatttcgagtggctccaccaccggaaagcactctgtatcgtttgggcaatggcaagcttattttggg

SEQ ID NO: 14848 - DNA, 421 bp, Gossypium hirsutum
  Clone ID: GOSHI-09MAY01-C10285_2
cttccaccccttggccgaccccttttctttttcctggcaaaaatggattatttgctccgttggtttttagaaatggcagacctttgctcctttaatggcattatgatcatgtttgttgccgttatgctctcactcaccaccactgcgtcagctcaggacagtgcaatggcgcctgcgccgtcaatggataccggagctgctttctcgccgatggtttccggtgttgcggttatgttccctcttattatttcccttgttgcgcttttgaagcactgagttacgtgcatgtgagtgattgagtattgtatttcatttatagcatattgaacttattatattgggttatatcttctatttgcaattaattggtaacgtatgatatgaattcagtttgttcaatcaaagaacaagtttttggaat

SEQ ID NO: 14849 - DNA, 414 bp, Gossypium hirsutum
  unsure (1)..(414): unsure at all n locations
  Clone ID: uC-gsronu33B137c09b1
tcttttttttgagtaatttctttttcttgcagaaatttgtatatttgctccgtttgttttaagaaatggcagagctttgcttctctaaaggcattatgatcatgtttgttgccgttgtgctctcactcaccaccactgcatcagctcaggacagtgcaatggcgcctgcgccgtcaatggataccggagctgctttctcgccggcggtttccggaattgcggttatgttctctctgattgtttcccttgttgcgcttttgaagcactgaattgagtacatttgagtgattgagtattgtatcatattgagtttattattaattaattactaaataattactgttattggtnaaaaaaagtaatttttaaatatttttaaaacataaaaaaaatttttaaattttattaactttg

SEQ ID NO: 14850 - DNA, 341 bp, Gossypium hirsutum
  unsure (1)..(341): unsure at all n locations
  Clone ID: LIB3083-014-Q1-L1-C7
atttctttttcttgctagttttanaaatggcagagcttggcttctctaaaggcgtgatgatcatgtttgttgccgttgtgctctcactcaccaccactgcatcagctaaggacagtgcaatggcgcctgcgccgtcaatggataccggagctgctttctcgccggcggtttccggaattgcggttatgttctctctgattgtttcccttgttgcgcttttgaagcactgggttgagtacatttgagtgattgagtattgtatcatattgagtttattattaattaattactgtattggctaatatattttttatttataattaataagtactgttattggt

SEQ ID NO: 14851 - DNA, 918 bp, Gossypium hirsutum
  Clone ID: GOSHI-09MAY01-C10215_1
tcattttcaattcccaatggatctccactaatagatgggacaagacaaatgacaccttcccccctccctcataactcaggaaacgacgtcgcttttcttacaagacacaacatttaaccgtccgatcttcagtcctctcatttcacccccgcgtcccctcattatttcctttcttcgagttttctctgtttgcttccgtcacaactccaaaaccgtacacaaaatgggcaaggatctaagcgacgagcaagtctcatcaatgaaggaggctttcactctcttcgacaccgacggtgacggcaagatcgctccatcggagctagggatcctaatgaggtctctcggcggtaaccccacccaagcccaactcaaagctattatcgctgaagagaagctcacggcgccctttgacttccctcgctttttagatctcatgtccaagcatatgaaacctgagcccttcgataggcagctacgcgatgctttcaaggttctggataaggacaatactggctttgtctccgttgcagatctgagacatatactgactagcatcggagagaagctggagccctcggagttcgatgagtggatcagggaagtggatgtcgggccagatgggaagatccgttacgaggaattcattgcccgcgcggccgcccacgcggccggcttattaacgtttgttttccttgcttgttgttttctttttgggggaaccaggctttgatccggcggaggatattgtgttttcaattttttgttctctttggtttgtttctatggaacctttggaactaatggtaacactctttcttagagaatttgattggtggggggtacttatgtattctcatattaattattcttgcgtttggacttatattttgaattatataactttctattatctttctt

SEQ ID NO: 14852 - DNA, 484 bp, Gossypium hirsutum
  Clone ID: GOSHI-09MAY01-C11995_1
ccggttgatgaagaaggagttgaggatgcatttgaactacttcatgaaaccaatgaacgtgtcaggaccggcatttgggttggggactgtttcatttacaacaacacttcttggaggcttaatttctgtgtcggtggagaggtatcgacaaggtggcatttggatcgtccaatgtacttgttgggatatctcgctagccaaagtcgggtatatctgatagacaaagagttcaatgctatgggatacacattacttctcagcctgattgagtacaagactcttgtgatgcgtggagacttggaaatggccaatgaaattttaccttctattcccaaagagcaccataatagtgtggctcatttcctggaatcacgaggcatggttgaggatgcactagtagtatctacagaccctgattacagatttgagcttgccatacagcttggtaaactagagattgctaaggtaattgccgcagaatttc

SEQ ID NO: 14853 - DNA, 796 bp, Gossypium hirsutum
  Clone ID: GOSHI-09MAY01-C11985_1
ccaggagtgttggtggttccatttgttgccgagggcaatagatgcctgccccatctttattatatatgataagatatttggcacaaatcaagtcaaaatgttgcctaggtatgttcccttcctgcatgcatacatttcatgtgacatttacatcaaagggtaaaagtttttgtagctgggttatttacggagggatcttacagaggccatttgttcttgaatgagcacttggatggaggatgaaagaggcgatcacaacagctatcatcttttcttgtaagtttgaagaacactccatgatattccctgttttggttaaaaacatcattggactgggaaatgataaggaaatagaaactggaccgtgaatatctattaacatgttaaaagtaagttgtgtaataatgaatgaggtatttgtttttgtccacaactgctaaagagatagaaagactggtgagtttgtatttaagtggatggagtacatatgaaatttacagctagtctaggagtatttttaggagttttttggtgattgtatgttaatctaacacgggtagattcattcttcttcttcttcttgtttgtatcttttatttagaaggtcgtatcactatacctatgtttaaaaataggttggatgcgaatagcggaaggcatctataaacctagtttctctttcgtttcattaaattcttaggcagtaagtggaggttttgaagtttgtcttgcgcagtttgtttttcagctaagaattacttactgcaacaaaagcccattggcattttcattttgc

SEQ ID NO: 14854 - DNA, 667 bp, Gossypium hirsutum
  Clone ID: GOSHI-09MAY01-C11965_2
tcgccctcgcgtccggttctgcaagattttgcgagcagtggcctctcttttacagtcagctactttattattcatattctccattacattgattcttgtcccaaacagacacgctattcccttcatcgtattgcacggtaatgttcttatctcaatatcttttctttttaattttaattgcctattgggtttgaattaatcaaagtttctcactttcacttgttatgttgggtcaattgttgatttccatggaaatgggaaccatgtttttggagaaaccaatgaaccgcaatgattgtttgcttggtgggggtattgaaacctttccggtcccgtgggccgccgcgtgggattgtagaacatggtgataaacaaaatgattagtgcaagatgtttgttatcgtcttgctggccaattttgttccaatgcaaggatgaaatttattgttctactttggggggcgaaatcacgcctggccaacaatgaaacactcggtgtacctgtattcagttataaggagatggtgaagttaggaagagaaaattgtgctgtccttattgattctcttgatgctagaaaaggttgcagatatgaagtgatcggctgacatgatattgctgccattgtatatacgagtggaaccactagtaacccaaaaggcattat

SEQ ID NO: 14855 - DNA, 1609 bp, Gossypium hirsutum
  Clone ID: GOSHI-09MAY01-C11965_1
acatatatacaatcattcagaaagtgttgggcttgttattgacaatccagaattggtcaggcgtcttgctggcaaattttgttccaatgcaaggatgcggccgcgtgggctactttggggggcgaaatcacgcctggccaacaatgaaacactcggtgtacctgtattcagttacaaggagatcgtgaagttaggaagagaataccgtgctgcccttatcgattctcttgatgctagaaaaggttgcagatatgaagtgatcggctcacatgatattgctgccattgtatatacgagtggaaccactagtaacccaaaaggcattatgctttcacataaaaacttattgcaccagatagaaaatttgggggttcttggacctgctaaagcgggggatagatttctaagtatgcttcctacttggcacacatatgagcgggcttgttagtatttcgtatgtacgcatggaattgagcaagtatatacaactgatgatttgagaaattataagccaaattacatgatttcagtacctttagtgtatgaaacattctatagtggaattcaaaagcagatatcttccagccccaatgctattaaattaatagtattttcattcataaggatcagcttggcatacacggagttgaagataatttgagaatatggtgacttgtctagcagtcggtggaatccggaccaacctgcataatgcatattgtatccatgttcgactacttatggtctaaaactattgctacaatattgtggccattgcatgtcttagcaacaaagtttgtctataaaaaaatcagctctgctatcgggatacaaaagactgccaaaagcggaggtggaagtttgccaacgcatattgaaaagttttatgaggcaattggtctggaagtgcagaatggatatggcttaacagaaacatccccttgcattgctggtcgacgaccctattataatgttcttggttctgttgggcatccaattccactcacagaattcaaagttgtagattccgaaactggtgaaatcctcccacctggctccaagggcattataaaggtcaggggaccgccagtgatgaaaggttactataagaatccattggctacgaggcaagccctagacgaatatggttggctaaatactggtgatataggttggattgctcctcatcattcagtagggcgaagtcgtcgatgtggaggtgtgatagttttcgaaggacgtgccaaggacactattgttctttcttctggtgaaaatgttgaacctttagagatcgaagaagctgccttaaggagtactcttattcaacagatcgttgtcatcggccaggatcaacgacgccttggcgctgtcattgtcccaaacaaagatgaagcactcctggcagcaaaagaggcatctattgtagatgcagatgccgtcgatcttagcaaggacaaaattacaagcatgctatatgaagaattgaggaagtggacctccgagtgttcatttcaaattggaccaattcttgttgtggatgaaccttttacgatcgagagtggcttattgaccccaaccatgaaaatccgaagagaccgagttgtgg

SEQ ID NO: 14856 - DNA, 1263 bp, Gossypium hirsutum
  Clone ID: GOSHI-09MAY01-C11885_1
acccacccagcagacagatctgtacagcaagaggaagatccgaatgttggaacagcagctgcctgaggcttcccaagttaaccttgttgatactgctgtccaagagcaacagtcctcaccccccactaaggatcaaaatgccaatgaaacaattgctgatacaacttcaaccttgcccactgatgttaacatgactgataatcctcctatgccagttaaacctgataacatatcttccaatggtgctaataccgatccttctgatgctcctcctgctgaaccattggagcagaaagtcaatggagatgctactccccttcgctctcttgcgcctgaatctggacctgagaaggtggagaaatcaaagagttggttgcttgatcctgagatgggggaggctgatgaagctggaacaccagaggagcgagcagcattcatgaaggagctggaaagtttctataaggataggtcattggaattcaagccccctaaattttatggagaaccgctaaactgccttaagttgtggagagcagttattaaattgggtggctacgaagtggttactgcatcaaagttatggcggcaagtgggagagtctttccaccccccaaagacctgcacaactgtctcttggacattccgcatattttacgagaaggcactgttagaatatgaaaagtataagagagagaatggtgagattcaacttcctgcttcttcactccctcatgcaagtggtgaaaaggagtcaagtggtttcctagccttggggtcaggtagggcacgcagggatgctgcagctcgtgcaatgcagggttggcatgctcaacgttctgttggatatggtgagattaccgagcccattgtgaaggagaaaatcatgggttctgctccgaaacgtgaaagacatctcaaaagtattggtttgcagaagcagaagatgccaataagcgcagagcttgataaatctgcacatgataagcaactgatcactgaaattgttgatgttggaacccctgctgattggggggagatcaatgtccgtgaaactcatgattgctttgaggtatatgctctggtccctgggcttctgcgtgaggaggtacgagttcaatcagatcccgctggacgtgtggttatcactggccaaccagagcaagttgacaatccttggggtatcacgccctttaagaaggtagtgaacttaccatcgagaattgatccgcttctgacaactgctgttgtgagcttgcatggtcg

SEQ ID NO: 14857 - DNA, 626 bp, Gossypium hirsutum
  Clone ID: GOSHI-09MAY01-C11815_1
aaaaaaatgagaatcaccttgtggttaccttttttagaaaagcttttttgtgattgattttccttttgtgtttgtgtttgctcttttttattgcctgttgtgtattcgtgaaaaaaaatgctttcctcttcttctcctctcttcctttacaaagattggaagctgggcttttataggcgaaaaaggaaataaatcgaaaaaatacaatatacttgtttccattcgctgctgtttttgtttccttcttgcaggtacagagtctgttggcatgcgtacgggtgcaggcgtggcatacgagggctgtggaggtatgggactgcttcttggttgtggcacaaaacgaaaagagggggggacctaaggtttctggagctgttaagggaatgggcctattgggcttgtttcgatttgggctcatgatgggtatcgggctagggttaatgtatttgggctgctttgtaccaaagacctggactgtggtatacatatttttttttgtgattttgttttttgtattttcgttttgtttcttgtctttatacgggccgggcaaatttggtccattacaattattattatttacttataaatttaaatatatacatatatattacatttttattttt

SEQ ID NO: 14858 - DNA, 425 bp, Gossypium hirsutum
  Clone ID: LIB3165-052-Q1-K1-G11
tagaggtatgggactgctgtagtggaggtatggggctgtttcttggttgtggcgcaaaacgaaaagagggggagacctaaagtttctggagcttgttaagggaatggccctattgggcttgtttcgatttgggctcatgatgggtatcgggctagggttaatgtatttgggctgctttgtaccaaagacctggactgtggtatacatatttttttgtgattttttttttgtattttcgttttggttcttgtctttatacgggccaggcaaatttggcccattacatctatcatatcattcattatacattctaactactaaaaatagtaattacattgtattaaatcattaagcatagtttatagaaatacaaactaaatttctcgagtttactcgaaaaaaaaaaaaaaaaaaaaagggcggcc

SEQ ID NO: 14859 - DNA, 1505 bp, Gossypium hirsutum
  Clone ID: GOSHI-09MAY01-C11595_1
gttctccgtctccttctaaatcttgattgatccaaaaccaaagggaaaaaaatagggcttttttcttacaaaagttgggggttcgaagagcataaaacgataatatgccttcgttacctctcagatcgattttgctcccattaatcccttccttaaccccttttcatgctggtttaagttcccatcgtttgaaacatcttgaaaagagtgatcggcgtggtaatcttagttaacgttttcccctcaaaatcattagctctcttttgactcctttactttctctccttttttcctctctgttttctgtcttcccctagagtcgtccgtttcttttgaggctattaccgtgcgacacgaaggaatctagtttgctcagaaagaaaaaagaaaaccctggagatttggttcgatcttgaactgggattgcttttttcagaggttttaagatcttgtattgatttcacttaccgcagctttcttaagaaagttgaagctaggatttcttgtattccttggtagtggaaatggacatattgggttctggagaggtagaaaatctaagtgacataaagcatgctatggttcgtacatgtttcaacgatgttaatgaatctaacgatacaaacacgagtaaagtggaagagttgctcgaacagaggcagaaaagcaaacctccttcaaagtgtttagccaagtctgcatcatttccttctgctgtgtctacccctgatgatgatgatgatgatgatgatgatgatgaaattgtgactgcaatgcagcgaatgttctctgaggattctgtgcagtctccatcgacctactcccgctcgatttctttgcctactcccttgaagctagtatcagcccttaaaggtagccgtgagaaacagggattgccgccaaagaagcttactgtgaaatgggcaccagatgtgtatgatcctccgccgacatcagtattgcacacagttagaagcaaaaagcagcagaaatcaaagaagaaaaatgacaagaagaaaaatgggaagaaagggcagaagggcaacaactcaggacgaggctgcggtggtggcaaagacatcagactagtacgccccgtgggcgggagtcctgataggtgttataaaccaccgcccgaggttcatccggacagatgagccaattcctctgtcagccttgaggggttcaatgtcggcagtccagacccttattgtgggagtagttttctgaaaaaatcaccaaccaggatgccctactctgttgcagaggctctctgagtaaatctctcctttcatatcacggacaagaaaaagctcttcgcttttatcgatccttgcagataaataataagcctttttcagctttccctatatggatgttggaacaatttacttaactgcaattacgcaatggttttttgacgattgtgtgggtttaaaagttcttttcctttgtaaaaagagtattactagcacctctttaatgagatctgaaacatatttctg

SEQ ID NO: 14860 - DNA, 584 bp, Gossypium hirsutum
  unsure (1)..(584): unsure at all n locations
  Clone ID: LIB3829-021-Q6-K6-E12
tctttgcctactcccttgggggtgggggggggggcttaaaaagatagccgtgagaaacagnattgccgccaaagaagcttactgtgaaatgggcaccagatgtgtatgatcctccgccgacatcagtattgcacacagttatttttttaaacagcagaaatcaaataataagggggggggaagaaaaagggaagaaagggcanaagggcaacaactcaagacgaggctgtggtggtggaaaagacaacaaacaaatacgcaggggtggcgggagttctgataggtgttataaaccaccgccagaggttcatccggacagattagccgattcctctgtcagccttgagggtttcaatgtctgcagtccagacccttattgtgggagtagttttctgaaaaaatcaccaaccaggatgcactactctgttgcagaggctctctgagtaaatctctcctttcatatcacggacaagaaaagctcttcacttttatcgatccctgtagataaataataaagcttcttaagctttccctatatggatgttgggaacaatttacttaactgcaattacgcaatggttttt

SEQ ID NO: 14861 - DNA, 375 bp, Gossypium hirsutum
  Clone ID: LIB3166-040-P1-K1-G8
cccactcgtccgtccactcgttcttctcacgcgtccgcttgtatttatttcacttgccgcagctttcttaagaaagttgaagctaggatttcttgtattccttggtagtggaaatggacatattgggttctggagaggtagaaaatctaagtgacataaagcatgctacggtccgtacatgtttcaacgatgttaatgaatctaactatacgaacacgagtaaagtggaagagttgctcgaacagaggcagaaaagcaaacctccttcaaagtgtttagctaagtctgcatcttttccttctgctgtgtctacccccgatgatgatgatgatgatgaaattgtaactgcaatgcagcgaatgttctctgaggatt

SEQ ID NO: 14862 - DNA, 589 bp, Gossypium hirsutum
  Clone ID: GOSHI-09MAY01-C11555_3
cccgcccctccgttccattcctttatattttgcattttcgtatttttggaattcatcatcttcgttgcgagtatacaatggcaggtcggggtaaaactcttggatccggggcctcgaagaaggcgacatcgaggagtagcaaggccgggcttcagtttccggtgggtcgtatcgctcggttccttaaggctggaaaatatgctgaacgtgtcggagctggagctcctgtttacctagctgccgttcttgaatatcttgcggctgaggttctcgagcttgctggaaatgcagccagagacaacaagaaaacccgaattgtgccacgtcatatccagcttgctgtgaggaacgacgaagaactgagcaaactacttggagatgtaacgattgccaatggaggtgtgatgcccaacatccacaacctcctcctccccaagaaagccggaggctcctcaaaggtttccggcggtgatgatgattagatccagatcaattagtttagattctgaaagctggcgagaaatgcatcccggttccttgtgtgttaatgcggttctgagatggaacaggtcttgaattttagttttga

SEQ ID NO: 14863 - DNA, 701 bp, Gossypium hirsutum
  Clone ID: GOSHI-09MAY01-C11555_2
gcccgaatttccgggtcggccccacgcgtccgccacgctttaatttgtttctgcatctctcgttttatttctcgtatattaatggcgggtcggggtaagactctcggatccggagcctcgaagaaggcaacatcaaggagtagcaaggctgggcttcagtttccggtgggtcgtattgctcggttccttaaagctgggaaatatgctgagcgggtcggagctggagctccggtttacctcgccgccgttcttgaatatcttgccgctgaggttcttgagctagccgggaatgcagccagggacaacaagaaaacccgaatcgtgccacgtcacatccaacttgccgtaaggaacgacgaagagctgagcaagctgctcggcgatgtgacgatcgccaatggtggtgtgatgcccaacatccacaacctcctcctcccgaagaaaaccgggacctccaagacttccggtgccgatgatgattaatgcagataagtttagattccccaaagccgttcacaaatcaacccctccccccctctctctgtagtagttgttgatcctgagattcaaatctctagggtttttggctttggttgttgttctattattaccttctgtggaactttagttagcaattagatttttagggttttcggtataatgtgaatataaatcaaattatccatctttttttccctcct

SEQ ID NO: 14864 - DNA, 950 bp, Gossypium hirsutum
  Clone ID: GOSHI-09MAY01-C11555_1
aggtgccgtaccggtactcggcagtttccggcccagagccacgcgtactgtctacccactctcccgcaagccccaactcttttttatttcttgtttcatataatttcgttgctgatctaaaatggcgggtcggggcaaaactctcggatccggagcctcgaagaaggcgacatcgaggagtagcaaagctgggcttcaatttccggtgggtcgtatagctcggttccttaaggctgggaaatatgctgaacgagtcggcgccggagctccggtttaccttgccgctgttcttgaatatcttgccgctgaggttcttgagcttgccggaaatgcagcgagagacaacaagaaaacccgaattgtgccacgccatattcagctagccgtaaggaacgatgaagagctaagcaaattacttggagatgtcacgattgccaacggtggtgtgatgcccaacatccacaatctcctccttcctaagaaagctggaacttcctcaaaggcatctggaggtgatgaagattagattatgtcaacagtttagactcataaaaccctaagggaatcccctaatttatctccctctgtttacgtgattcttagattgaaaccatcatgggtattagctttgaatgttgtttcacttagttctttatttgttaagtttgtagtttattgatagtgcttagttagtaggtagctttaggggtttttggttgaatgtgaatagaatgaatcaccaagcattatcttctacaatgaatgcaacactagagtttcaattttgtgttgtttgcttgagactatttttagtgaactatttgtttatttgttatttgaaatgtgattcaattgatgtgttgtcttcctttggggggatgttgagggttgggtttcttgtttattttgattaatgtttgcatttattgaagtttgtgggatatttttgt

SEQ ID NO: 14865 - DNA, 741 bp, Gossypium hirsutum
  Clone ID: GOSHI-09MAY01-C11515_1
cgagccctcctctgctttttttaaacgagcttttgcaaccaaaaagtgcgtgtgttctcttaaaagcgaaagaagaacgcgcccatcgtttcaaaattttttccaccatctgagaagtgctttttgggtgatggagaagttaaaaatttctccatttcttcagccaaaagtccgtttggctgataatttcccattttaacctgccttctcccccaaaaagtttcttttctctggttctttagaggagctctatacccattttttcacattttcactttcaaaattttggcttactgctttcgattagaattttcagggaaaattctggattactgctttgctttaccctactcggcggctgtggtttggggattgagaatcgagataaaagaaatggagaagggaaacaggcaagtagttgtttcagcattgcaattcgcttgcaccgacgatgtgcccaccaatctcgccactgccgaaaggcagtggtaaatgaagatgcatctggagatgttgttgctatgagactgcaaattcaacagctgaaggaagaagtatctcatctacgagcttttgttaatggcaaaagtgaaaatctggataatgcgataggaacttgccatcatgcattccagcatcacctaggtcctttaaatgggaatgccctcctggatcattcagtccactttcatctgataaaaggatgtctcagaaaaaagatatgaagttgctcttgttggg

SEQ ID NO: 14866 - DNA, 479 bp, Gossypium hirsutum
  Clone ID: uC-gsronu33B126f04b1
cccttgcgtccgggaaacaggcaagtagttgttggagcattgcaattcgcttgcaccgacgatgtgcccaccaatctcgccactgccgaaaggctggttagggctgctcatgcaaagggagcaaatatcattcttattcaggaactgtttgagggttattacttttgtcaagcacaaagggaggatttctttcggcgtgctaagccttataatgatcaccctaccattaaaaggatgcaggaacttgcaaaagagttgggtgtggtgctgccagttagtttctttgaagaggcaaacagtgcccattataattctgtagctatcattgatgctgatgggactgatcttggactgtacaggaaatctcatatacctgatggaccaggataccaggaaaagttctactttaatccgggagatacgggctttaaggtttttcagaccaaatttggaaagaatggagttgcaatatgttggga

SEQ ID NO: 14867 - DNA, 950 bp, Gossypium hirsutum
  Clone ID: GOSHI-09MAY01-C11525_1
gtgccgccggtttattaggtctcggtcgtggaagatatcgtttcctacccaaaccggacgccgactcaaccggaagtcccctcgcggtttagtccgaccggtccgtcttcttcaaaaccgtcgtccctgcttttcggcgacacggcgattcctcgaaccgccgtgtttactccattgttaacgaacccaaagctcgacactttttactacgtccaactgttgggtatcagtgttggtgggacacgtgtccccaaaatcagaccgtcgttgttcaaaatggaccgggacggtgacggtggtgtcatcatcgattcgggaacttccgtcacccgtctgacccgacccgcttacatcgcattaaggaatgctttccgtctcgggtcatcgaacctgaaacgggcacccgctttctcactattcgacacatgttacgacttttccggtaagacttcagttaaagtaccgacagtggtgttacatttcagaggagctgacgtgtcattaccggcgacgaactatttgattccggtcgatagcagtgggacattttgctttgctttcgccggtaccatgagtggtttgtccataattggaaatatccagcaacaaggttttctggttgcttatgatttagcgggctctcggatcgggtttaagcccaatggatgcgcttaaaaaatggcggttgttttttcttacccctatggtaattggtaagtgaaaaagctctttccccgcctgtttttttttattttttatgctggtttttttagagggtaaaaaaggaagaacaaaaatatctttgttgaatttgagtgtaagaaaaaaaagtaggggaatcattgtcgtttggctgttttcccacgtgttgatgtttggattttaaatatattagggtaaactatagtattagtcactcaaatatatctaagttttttattttcatcact

SEQ ID NO: 14868 - DNA, 384 bp, Gossypium hirsutum
  Clone ID: GOSHI-09MAY01-C11485_1
cggacccgtgggcaagattgggtgttgtttgatgtggatattgtggagattcaggtccagtctccagggagtggtctacggccctcggcccctcctgctgttcctcacgctgattccttgaacttcgaacctacttcaaccttctgcagtttctgccaaatctggacacttttcaagacaagagtcaagtgatccatatgtgggttcatcacctccaaaatccgaaggtaggacaatatactaccatgtagcggatgaaaatggtgaggttgatgatgaggcagtagagggggacctcttctagttttaaagggcaatggagtggatgaaccaactcataaattgtaggaaaagacgggccttgaagatgttgtggtgtgcact

SEQ ID NO: 14869 - DNA, 333 bp, Gossypium hirsutum
  Clone ID: GOSHI-09MAY01-C11435_3
gttgtgtaacgacgataaatacccctcccgtccggtaaagaaatattgtaagtttcgagaaaggggcgatcctatgtggaaaacaaaggtggttttaaacaagggttggggaattggtgaaacgcttttagggggtttaaaaactatttagggcgttgtttttacttgatgaatggtgatgaaggtcgagtgtggggtcaaagtgggtgtttgtttattgtgtggctctggcaaaaagtcctgctgataaaacgcccccgtagtcttaaattttcagcaacggtgacataagaaatgaaaattgccacattttgtttaaattgattatttttt

SEQ ID NO: 14870 - DNA, 1147 bp, Gossypium hirsutum
  Clone ID: GOSHI-09MAY01-C11435_2
gcttataactgtaagagctctcttcagtcctcctccatcagtgatctcaatctccatcctatatatctcaccaagtaacacacactctcatggctcctgaactggttcaagcaggtgttaaaccaactgtgttggctaaaccagtcaccttgcccaagcgagcttacgttaccttcttggctggcgatggagattacgtgaaaggcgttgtagggttagccaaagggttaaggcaggtgaaatccgcataccctttagtggttgccgttttgcccgacgttcccgaggagcacaggcggatcctggagaaccaggggtgtatcgtccgagagatcgaacccgtttacccgcccgagaatcagacccagttcgccatggcttactacgtcatcaactattccaagctccgtatttggaagttcgtggagtacagtaagatgatatacctggacggggatattcaggtgtacgagaatattggcctcctattcgacttgcctgacgggcaattctatgcagtaatggactgtttctgtgagaaaacgtggagtcataccccacaattcaagatcggttactgccaacagtgccctgacaaggtcaagtggcccgccgagatgggtcagccacctgcactttacttcaatgctggcatgtttgtgtttgagcccagtcttaccacctatgaaaacctcttggctactcttaaaagcacccctcctaccccatttgccgagcaggactttttgaacatgtactttaaggacatttacaaaccaattcctttggtctacaacctggttctcgccatgttatggcgtcatcccgacaacgtggagcttgacaaagtgaaggttgttcactactgtgcagcgggatcgaagccatggaggtacacagggaaagaagagaacatgcaaagagaagacgtgaagatgttggttcagaaatggtgggatatttacaacgacgagtctcttgattacgaaaaaccaaccattggtgaaggacaggcggcagagccggtgaacatgcagccgttcctggtggcactctcagaagctggtgcagtccaatacgtaacggccccatcagcggcttaataataaacaacatggccagctctgttttagaagaacaacgatcc

SEQ ID NO: 14871 - DNA, 1464 bp, Gossypium hirsutum
  Clone ID: GOSHI-09MAY01-C11435_1
gctccctcgccctccgaccccagcaaaggcagtccctaaaatcttgctctcttcactcctcctattttaaccatttcttccttgtcctcgccccttccctagcaagctacatttccatggccccccctgaattggttcaacccagtgataaaacaaacgttttcgctaaacaagtcagtttgcgtaatcgtgcatatgttacgttcttggccggaaatggggactacgtgaaaggcgttgtagggttagccaaagggttaaggaaagtgaaatcggcgtaccctttagtggttgccgttttacccgacgtgcctgaggagcataggcggatcctggagaaccagggttgtatcgtccgagagatcgaaccagtttacccgcctgagaaccagacccagttcgccatggcctattacgtcatcaattactccaagcttcgtatttgggagttcgtggagtacagtaaaatgatatacttggacggcgacattcaggtatacgacaacatcgatcacctgtttgatctgcctgatgggcatttctacgcagtaatggattgcttctgtgagaaaacatggagccacaccccacaatacaggatcggttactgccaacaatgccctgacatggtgaagtggcccgccgagatgggaaatccccctgcactttacttcaatgctggcatgttcgtgtttgagcccagccttgtgacttatgaatctctcttgaagactctcaaaatcacacaacctaccccatttgcggagcaggactttttgaaaatgttctttaaggacatttacaagccgattcctttaatttacaaccttgctctcgccatgtcatggcgtcatcccgagaatgtggagcttgaaaaagtgaaagttgttcactactgtgctgcgggatctaagccttggaggtacacagggaaggaggctaacatgcaaagagaagacattaagatgcttgttcagaaatggtgggacatttacaacgacgagtcacttgattaccgtaccagcgcggctgaaggagggacagagaccgtgaacctgcaaccgttcctggtggcactctctgaagttggtgcagtccatttcgtggccgccccatctgcggcgtaaatatgttgtgtaacgacgataaataccagttcataggtgtaaagaaatattgtaagaatcgagaaaggggcgatcctatgtggaaaacaaaggtggttttaaacaagggttggggaattggtgaaacgctcttagggggttttaaaactatttagggcgttgttttttcttgatgaatggtgatgaaggtcgagtgtggggtcaaagtgggtgtctgtttattgtgtggctctggcaaaaagtcttgctgataaaatgtctttggggtctggggccttcggcatcggtgactttcggcaattgtgacatgaaaatagaaaacaagtttgtgaattcc

SEQ ID NO: 14872 - DNA, 478 bp, Gossypium hirsutum
  Clone ID: GOSHI-09MAY01-C11425_2
tccactcatccgcaaaacgtcttgttcggtcccgtgggctcccctttctcacctggctcttgtttgattgctttctttgtttcaattaaattatctcccaatttttcttttttagttttctttatttttcctctccttgatcgttgttagctgcaaaaaggttacgtcagaaatggattttttcttcagaggcctaaatgaggaattttcatcttcccaaatggacattcttagatgtccattttcgagaaacatttacgagccaactaacttttccttctcgtctgccttgccttttcccatgccggtgcgaggagccaaaggtccaatatttgaagatggacccaatttccacatggcattcaggcttttccatggacgtgacggagtagttccgctatctgtacaatcatccttgcgtattgagaaagctgagaccgaaacagccccaccaatagtcaatcctttgctgcaaagg

SEQ ID NO: 14873 - DNA, 1439 bp, Gossypium hirsutum
  Clone ID: GOSHI-09MAY01-C11425_1
ccccgcgtccgccccgcgtccgccccgccgcccgcccacgcgcccgctttgtttcaattaaattatctcccaaaatctttcttttttagttttctttatttttcctctccttgatcgttgctagctgcaaaaaggttacgtcagaaatggattttttcttcagaggcctaaatgaggaattttcatcttcccaaatggacattcttagatgtccatttttgagaaacattaacgagccaactaacttttccttctcgtctgccttgccttttcccatgccggtacgaggagccaaaggaccaatatttgaagatggacccaatttcgacatggcattcaggcttttccatggacgtgacggagtagttccgctatctggacaatcatccttgcgtattgagaaagctgagaccgaaacagccccaccaaagttcaatcctttggctgcaaaggcagccaccattagtctctcatcctttggaccgggagggcctttcagttttgatgcattttctaagtaagtggaacaatcagaaagggaaagggaaaggaaaatcgtccaagaaagagtcttcttcacagggtggaaaatcgaatcacgaagctatgggcaatgaatggctgcaaaacgggaactgtccgattgcaaagtcgtatagggcggtcagcggtgttttgccactagttgcgaaggttttgcagccgccaccggggatgaaatacaggtgcccacctgcagttgttgcagcccgggcagcactagcacaaaccgcatttgccaagaatctccgcccacaatccttacccacaaaagtactggtgatcggggtgttaggcatggcggcaaatgttccgttagggatatggcgggaacacactgaaaaattctcaccatcttggtttgtggctatccatgcagctgttccattcatagccatgctccggaaatcagtgttgatgccaaagacagctatggcatttaccattgcagcgtctgtattaggacaggttatcggatctagggccgaacgatatcgattgaaagcagtagcagcaaagcgattaggtatggaggaatcatcggtttctgtgggtggtgcgaaccagttggacatcgttgcagttaagaacagtgattgcaggaaagatgtggcggaatgggagccagtttccatacaggtggcaatggcaaggccgtcttcatccacagatgtgttttgctaataatatctttaaagagactgccgtttctgcataagagagtaatccttgatgtgtttaaacagagaagtcgcaaagtcgtggaccgtttgtttctatttatgttttgtagtgttcctttgttgaacccagacatcaatgtttttgttttggcaaaaaatcatggacttaataaaagatgcagaaacgcaaattacttcaaaaaaaaaaaaaaaaaa

SEQ ID NO: 14874 - DNA, 403 bp, Gossypium hirsutum
  Clone ID: LIB3272-036-P1-K1-F4
ctgaattctcccctttctcacctaactcttgtttgattgctttctttgtttcaatgaaattatctcccaaaatcttgcttttttatttttcttaatttttcctctccttgatcgttgctagctgcaaaaagggtacgtcagaaatggattttttcttcagaggcctaaatgaggatttttcatcttcccaaatggacattcttagatgtccatttttgagaaatattaacgagccaactaacttttccttctcgtctgcattgcctttccccatgccggtacgaggagccaaaggtccaatatttgaagatggacccaatttcgacatggcattcaggctattccatggacgtgacggagtagttccgctatctggacgatcatccttgcgttttgagaaagc

SEQ ID NO: 14875 - DNA, 1155 bp, Gossypium hirsutum
  Clone ID: GOSHI-09MAY01-C11795_3
ctcagttctcaagtttagaataaccaaaccgagtcggaagaaagaacaagtcaacaaatcaccaaaagtcaacattttcccgctgacactgggcaaccgtcccaaccggaacggcagcctcaccggctcaccctccaaaacttccaccaagttcgcacatgtaacgaatttggcacgtgccaaacaaacagtgaacactgactccaaaaacgcaaatcgctttttttgatcgtcctcagaaaaagacggggcctggcctggaagataaaaataaccaaagcttaaagatcttttgaattctgagagatgtggagaaggctagtgacttcacccttcaaaaccctagccaccgttccatgccgatctgcttctaagacgccatcgccgtcgccgctccgtttcaagtctcacgtttctccattcccttccacttatttccttactcgccgcttctctactggttcagcgggtactgctgtgaagaagagggttgaggatgtaatgcctatcgccactggtcatgagcgcaaggagcttcaggctgagcttgagggaaagaaaatccttgaagatgtaaacaatccagtcggtccttttggcacaaaggaatctcctgctgtcgttaagtcctactacaacaagagaatagttggatgcccaggaggtgtaggtgaggatgaacacgatgttgtctggttttggctggaaaaaggcaaaccacatgagtgctcagtttgttcacagtattttgtgttggaagttgtgggccctggaggtcctccagatggacatggtgacaatgatcatcattaattgcaacctccaatttttctactgaaataaagttttggagaacatgatggaatgatgtccaggcatacaatgcaccttcaaattttcaaacaaaggttgtcttgttttgttttaattattccttggttctcatgggtatttgagatggtacccctaattttctcctggtaatttagacacagggtggtcataatttttaactatgaatcttattaggttaatgctacatgcattgccaaataatccatggctacctcaccattctttcatgaaacttcctgctgttgagtttaaaagtaatcttcttactatataagaaccgttgatttgatttaaagaaaa

SEQ ID NO: 14876 - DNA, 936 bp, Gossypium hirsutum
  Clone ID: GOSHI-09MAY01-C11795_2
gtcatttccctcatttcgccgttccttttgcactgaacaacgaattttttggggtatttttcaaaagaagcgaaggcatcacctgagataaggaaacacttaaaaccctaaaatctttgaattcagaaatatgtggagaaggctgttgacttcacagctcaaaaccctagccacagctccatgcagatccgcttctaaaacggtgccgcttccattcaaatctaacgtttcatcatcgcctttttcctgtctcctcactcgtcacttctccgcctcgtcagcggatagtgctgtaaagaagacggttgaggatgtcatgcctatcgccactggtcatgagcgcgaggagcttgaggttgagcttcagggaaagaaaatccttgaagatgtgaacaaccctgttggtccttttggcacgaaggaagctcctgctgttgtcaagtcctactatgacaagagaatagttggatgcccaggaggtgaaggagaggaccaacatgatgttggctggttttggctggagaagggcaacccacatgaatgctctgtttgttcacagtattttgtgctcgaagttgtgggccctggaggaactccacaccgacatggtgacaacgatcatcatcattaattgcagctttcacgtttattttttcctattggaataaaattggagaggatggaacccagtccacttatagagttctttgcaccttcaagtgttaaaaaaaaaatctatcatgtttggtttttgattggcccttggtcttgtttgagatggtatctctattttttcggtttttcagggtggtcatctttttgaactatgaatcatcttaggtttaacttcaatgattgccaaataattgatggctaccgtccccattgtttcattaaacatcttgatgttgaattttgaaggaatcttacaggttt

SEQ ID NO: 14877 - DNA, 1049 bp, Gossypium hirsutum
  Clone ID: GOSHI-09MAY01-C11795_1
cactccgcagcctcccccgttctttgaaatcctattttccctttatccgcactggggaaaagaatagagaaaaattgcaatagctttttttgatcgtcataaagaaaaagcgccggggcgtgacctgagatcatcaaaacctaaacacgatcctttgatttccgaaatatgtggagaaggctacttacttcacagttcaaatatctggcaacacttccatgccgatccgcctctaaaacggcgccgcttccattcaaatctcacatttctccttccccttctgcttccctcctcgttcgccatttctccgccgagtcagcggatactgctgtgaagaagagagttgaggatgtaatgcctatcgctacaggtcatgaacgagaggagcttgagtctgagcttcagggaaagaaaatccttgaagatgtaaacaaccctgttggtccttttggcacaaaggaagctcctgctgttgtcaagtcctactatgacaagagaatagttggatgcccaggaggtgaaggcgaggatgagcatgatgttgtctggttttggctggagaaaggcaaaccacatgagtgtccagtttgctcacagtattttgtgctggaagttgtgggacctggaggacctccagacggacatggcgatgatgatcatcattaattgcaactttgaatttttttttcctgttggaataaaattgcagaagacgattaaatgatgttccaatatacaatgcaccttcaaatgttcaaaagctgttatctgtcgtttggttttgagatggtattctctgtttctttatggtactttagactgatacacaggtatgggaatttttttggtaaacttaaaatgcatcgccaaataaataaatcttttccattcattcaaaaaaaaaaaaaaaaaaaaaaaaaaaaaaaaaaaaaaaaaaaaaaaaaaaaaaaaaaaaaaaaaaaaaaaaaaaaaaaaaaaaaaaaaaaaaaaaaaaaaaaaaaaaaaaaaaaaaaaggggggcccttttaaaagaaccaaattttttttcc

SEQ ID NO: 14878 - DNA, 358 bp, Gossypium hirsutum
  Clone ID: LIB3166-044-P1-K1-B1
gaaatcctattttccctttatccgctctggtgaaaagaatagagaaaaattgccgtaggtttttttgatcgacataaagaaaaagcgccggctcgtgacctgagatcatcaaaacctaaacacgatcctttgatttccgaaatatgtggagaaggctacttacttcacagttcaaatatatggcaacacttgcatgccgatccgtctataaaacggcgccgcgttcatacaaagctcacagtactccttccgatgatgcgtgcgatcttggtcgccagttctccagcgagtcagcggatactgctgagaagaagagagttgatgatgtaatgcctatcgctacaggtcatgcacgaga

SEQ ID NO: 14879 - DNA, 531 bp, Gossypium hirsutum
  Clone ID: GOSHI-09MAY01-C11745_1
gtccaacgcgcttgttcatctgtggagtttagattccttgtttgcttctattgaaagctcaactacacacagtacgcatctccctttctggttctggtgtctatgctattttctctgagaagctgaaaaatggcggaatcggtggagttgccaggtcgtttagcaattcttccattcagaaacaaagttttattgcctggcgcctttattcgaattcgctgcacttcacagagcagtgtaaaattggtggagcaagagttatggcagcgagaggagaaaggattaataggaattcttccggttcaagatgctgctgagacgacctccatggattccatgttatctcaaggtgttggaagtgaatcaggtgagcgaagctcgaacgttcaggttagcacatctgatgctcacaaggttgatgggaaaaacccttcagaagtcattcactggcataacaggggagtggcagcacgagctttgcatctatcaagaggagtggagaaaccaaagtgggagggtcaccttccttgt

SEQ ID NO: 14880 - DNA, 530 bp, Gossypium hirsutum
  Clone ID: GOSHI-09MAY01-C11705_2
cgcggagacgcgtggtgctcttttcctctcgatttcccgagctaattggaagagtcttgaaggtaaaaaccgaagaaacaaaggctctctctctttgtgaatccaatcaaatcgaagatgttgagagtggcaacgaggcggctcacttcttattcgtctgcgtggaggtcgcaccaggccacctccgctatcgcctctcgtcctttcatcgacggcgccgattcttctgattgtctcagatccaattcctcctcctcctcctcttccttttccttctctttcgcttctcaattccttcttcccaccagaggttttgcttctgagtcactcaccccaaaaagtgaccacagtgtgattcctgatgttccagcaacagtggctgccattaagaaccccagttctaaaatagtttatgatgaatacaaccatgaacgttttcctcctggtgaccccagcaagcgggcatttgcctattttgtcctgacaagtggtaagtttgtgtacgcatctgttatccgtctgctcatcct

SEQ ID NO: 14881 - DNA, 587 bp, Gossypium hirsutum
  unsure (1)..(587): unsure at all n locations
  Clone ID: LIB3829-022-Q6-K6-G12
gcgttcgcttgnagagtaaaaaccgnaanaaacagggggtggttggggggtgtgaatccaatcaaatcgaagagttgagagtggcaacgaggcggctcacttcttattcgtctgcgtggaggtcgcaccaggccacctccgctatcgcctctcgtcctttcatcgacggcgccgattcttctgaggggggggagagccaattcctcctcctcctcctcttccttttccttctctttcgcttctcaattccttcttcccaccagaggttttgcttctgagtcactcaccccaaaaagtgaccacagtgtgattcctgatgttccagcaacagtggctgccattaagaaccccagttctaaaatagtttatgatgaatacaaccatgaacgttttcctcctggtgaccccagcaagcgggcatttgcctattttgtcctgacaggtggtaggtttgtgtacgcatctgttatccgtctgctcatcctcaagcttgtcctgagcatgtcagccagtaaggatgttcttgcactggcttctctcgaggttgatctctccagcattgaacctggcagcaccgtaactgttaa

SEQ ID NO: 14882 - DNA, 391 bp, Gossypium hirsutum
  Clone ID: LIB3166-043-P1-K1-A7
cggaaacggaaggggccggcccgacgcacgcgtgcgaccacgcgtacgcaaatcgaatatgttgagagtggcaacgaggcggctcagttcttgttcgtctgcgtggaggtcgcaccaggccacctccgctatcgcctctcgtcctttcatcgacggctccgattcttctgattgtctcagatccaatttctcctcctcctcattttccttctctttcgcttctcaattccttcttcccaccagaggttagggtttccttttgcttttcaaattttctccgctttgtttcactttttcgtcctaatatggcggtcatatcaaatactattattggttaggttttcgctgtgacaccgttttcatattcaaattctaattgataatacatgct

SEQ ID NO: 14883 - DNA, 916 bp, Gossypium hirsutum
  Clone ID: GOSHI-09MAY01-C11725_2
gattatcaaatcttctcagccactgggggtaagggggcatgggcgaaatatatttatttttttcaagttaccttacgagggggctgaagtaccttcactcggcaaatattccccttcaccagacttgaagcctgggaacccctccttgtcaacgctaactgtgactctaaaatatgtgattttgggccttgcgcgcgggcgcgagcggaggtaatggaacaattcatgacagagtatgttgtcacccccgttggtacccgtgccacctgagctcctactatgctgtgacaattatgggacatccattgatgtttggtcggtaggatgcatctttgcggagattcttggtcggaaaccaatctttcctggaacattgcctcagccagcttaagctaattatcggtgtcctcggaagccagcaggaggctgatcttcagtttatcgataatcccaaagcccgaaggtatatcgagtcacttcctttctctacgggctcccatctgtcccctttataccctcaagccgatcctttagccatagatttgttgcaaaggatgcttattttcgacccgtccaagagaattactgtcacagaagcactccaacatccttacatggcaacactatatgatccaaggtgcaatccaccagcccgagtcccgattaatctcgacattgatgaaaacatgggagaagaaatgattagggggatgatgttgagtgagatgcttcactaccacccagaggctgcatcaacaaatgcttacaccacattgttttagctttgcttacagaaacagtattggtattggtatagagaattctactaccttggagcttaccaattgagcaaaacattttgtctttaacaccttgttaattagttcgggttttgaaataaaataaatccgggttg

SEQ ID NO: 14884 - DNA, 1057 bp, Gossypium hirsutum
  Clone ID: GOSHI-09MAY01-C11725_1
ggaaaggaacgggggcgacccaccgcgtccgattcgacatgcacaattgtgatgtgctttgattggatgcacatggcgccccgcccactcgagccccgttttaaggggatgtttatttggtttatgagcttatggacaccggatttgcatcaggattatcaaatcttctcagccactttctaatgatcattgcaaatattttatttttcagttactacgagggctgaagtaccttcactcggcaaatatccttcaccgagacttgaagcctgggaacctccttgtcaacgctaactgtgacctaaagatatgtgattttgggcttgcccgaaccagcagaggtaatgaacaattcatgacagagtatgttgtcacccgttggtaccgcttgcacctgagctcctactatgctgtgacaattatgggacctccattgatgtttggtcagtaggatgcatctttgcggagattcttggtcggaaaccaatctttcctggaacagagtgcctcagccagcttaagctaataatcgatgtccttggaagccagcaagaggctgatcttcagtttattgataatcccaaagcccgaaggtatatcaagtcacttccttattctaggggcacccatctttcccatttatatcctcaagccgatccattagccatagatttgttgcaaaggatgcttgtttttgacccatctaagagaattaccgtcacagaagctctcctacacccatacatgtcagggctatatgatccgaggtgcaatccacctgcccaagtcccgattgatctcgacatagacgagaacatgagagaagagatgattagggagatgatgtgggctgagatgcttcattaccacccagaggctgcatctgcaaatgcttagatgacattgttttaagctatgctgggttctgttactttgttataatgtttgtttcgcaaccagtattattatttaacctagaagaacaccattgaaacttctgcatgccatggaactttgcattgagatttttagttttgattggctcgtgttaacctgt

SEQ ID NO: 14885 - DNA, 467 bp, Gossypium hirsutum
  Clone ID: LIB3583-023-P1-K1-E9
tggaaaaacaatggggaacacaacccgaagttcgctacaaccaaatcataaactaataaacaagaatattaaaagtaaaacaaaatctgggtacccccttttcccttttatacccacaagccgatccattagccatagatttgttgcaaaggatgcttgtttttgacccatcaaagagaatcaccgttacagaagcactcctacatccatacctgttagggctgtatgatccaaggtgcaatccacctgctcaagtcccaattgatctcgagatagatgagaacatgggagaatcgatgatcagggagatgatgtggagtgaaatgcttcactatcacccagaggctgtatctgccaatgcttaggtaacattgttttagctatccttggttttcgctgctttgttgtaatgtattttcggaactgatatttatcgattggactcgatgaacaatgttgagaattct

SEQ ID NO: 14886 - DNA, 553 bp, Gossypium hirsutum
  Clone ID: AI729211.1
gagacaaattcgacatgacaacgtggttgctttgaaagatattatgatgccaactcagagaaccagttttaaggatgtttacttggtttatgagcttatggacaccgatttgcttcagattatcaagtcttctcagccactttctaatgatcattgcaagtattttctttttcaggtactgggaagttttacctttgctttcaaatgtgttcatcagcttgtaactaacctttggtgttatattatagctactacgagggctgaagtaccttcactcggcaaacatcctgcatcgagacttgaagccagggaaccttcttatcaatgctaactgtgacctcaagatatgtgattttgggttggctcgaaccagcagaggcaatgaacaattcatgacagagtacgttgtcacccgttggtaccgctcacccgaactcttactctgttgcgacaattatggcacctccattgatgtttggtcagtaggatgcatctttgcggagattcttggtcggagacctatcttccccggaacaggatgcctcaaccagct

SEQ ID NO: 14887 - DNA, 433 bp, Gossypium hirsutum
  Clone ID: LIB3197-029-Q1-M1-C12
gttatgcttcccttcgtcttcccgttcgttgtattctcttacattttcgatttgtttggtttgctttctttgcaaggtggtaaataatagcttacgtatcttctcttgtcagttttttttcccagtagccatcataattacttcattaaatatttggagattggttcctataccaggcaaagttactacgagggctgaagtaccttcactcggcaaatatccttcaccgagacttgaagcctgggaacctccttgtcaacgctaactgtgacctaaagatatgtgattttgggcttgcccgaaccagcagaggtaatgaacaattcatgacagagtatgttgtcacccgttggtaccgtgcacctgagctcctactatgctgtgacaattatgggacatccattgatgtttggtcggtaagatgcatctttgc

SEQ ID NO: 14888 - DNA, 375 bp, Gossypium hirsutum
  Clone ID: GOSHI-09MAY01-C11165_1
caaaggggctggttaagaccttagagagtggtagacatttttgcagattttgcggacctttgtccccgtttctctatttctttctttcttttactctttttctttttcacatccttctgttatcttcagtaccatcaccaaaatttggaagcttgaagaagaagaagaaagagggcaatgggggtaggttcaactgcatcttctaagctcaaaaaagcggctaaaaaaatggtgggcgctgcatgtggttctttctcaaagaatactttcttcttctcctcctcctcctgctggtatgtcaatgtcaccattgaaaccaaagaataagtttgaagcagtatcagctggaattgaagcagaatctatcaccaacca

SEQ ID NO: 14889 - DNA, 733 bp, Gossypium hirsutum
  Clone ID: GOSHI-09MAY01-C11115_1
cggacgcgtgggctgacgcattgttttgtccgtaaaaaaaacccttgtttttctctttgaaagatgtgggcaagttcagagggaggtgcaccagaggttactctagaaacctctatgggtgccttcactgttgagctatattacaagcatgcacccagaacttgtcggaacttcattgaactttccaggagaggctattatgacaatgtcaaattccatagaattatcaaggattttatagttcagggtggagatccaactgggactggaaaaggtggagaatctatttatggtcctgtattcgatgatgagataaggtccgagttaaaacatactggagctggtattttatctatggctaatgcgggtccgaattcaaatggaagtcagttcttcattactttatctccagcgccgtcattagatggtaaacacacaatatttgggagagtatgtaggggaatggaaattatcaagaggcttggtagtgtccaaaccgacaacaatgacaggcctattcatgatgtgaagatcctacggacttcagtcaaagactagcaccggagttcggaaactgcgaattgtagttctatgaaatgcccatcgtttccccggatattttgaaattggatcattcataaacgtgttatataccttgtgttagagttatgtttagtataaactgagcagaaacaattaatgaacggcatttcttttagagttttctcctcac

SEQ ID NO: 14890 - DNA, 1284 bp, Gossypium hirsutum
  Clone ID: GOSHI-09MAY01-C11105_1
gggccgccgtccgaaacaatcctaaaaggtgaaacatgtcgtccgacgggaacgtcaccggcggcggcggcgctaacaccgtcggcgtaaccaataagcctttcttttgctaccaatgcaaccgtaccgttaacgtaacgatatcccctccctcttctgatccgacttgtcccatttgcaacgagggtttcctcgaagaatacgacaacccaaaccctaatcaaggttccggtttcctaaacccgaatccgaactcaatcccgttccatgaccctttcttgacgttatcggatccgttcgcttccctccttccgctcctttttccgtcctcttcatccacaactacctcatcctctgcttctattgaccctaataaccctagcctatctgggccgacccgctcaggtcgaggcgacccgttcgctttcgatccgtttaccttcatccagaatcatctcaacgatctgcgttcaagcggggcgcagatcgagttcgtgatccagaacaatccgtccgaccagggctttcggcttccggcgaacatcggggattatttcatcgggccgggccttgagcaattgatccagcagctggccgaaaacgaccctaaccggtatgggaccccacccgcatctaaatcagccattgaagcgctgcctttggtgaatataacgaagagtaacttgaattcggagttcaaccagtgtgcagtttgcatggacgatttcgaggaagggactgaagccaagcagatgccctgtaagcatctttatcataaggattgcttattgccgtggctggaattgcataattcgtgccccgtgtgtcgtcacgagctgcctactgatgatcctgattatgagaggagggttcgcggggcacaagggaccagtggtggtaatgacggggataatagtgggcagaggtctgatggggataatcggactgtcgagaggagttttaggatatcgctgccttggccgtttcaggctcggggacctggtcctgcaccaggtgataatgcagagaccaggcaagaagatttggattgagaattctcaaaatgtaacaacaaagtgcccacatttgtttcatttgacatggtgctaaaacatctactcacagaatttgggtatgagagttgtgtgtaaacatggagaattgagattagtgttttgctattgggtatcatatgtacatctgaaaattttacagctttgtttgtcaacgacaaccgcatttactctttcatacattgttgtatagattctttgatccctgctt

SEQ ID NO: 14891 - DNA, 462 bp, Gossypium hirsutum
  Clone ID: GOSHI-09MAY01-C11095_1
gtcgtctcggggatttgaagcctacttatctcgatgatgcatttggatctctcgagccttccctgctgtctccattgaagggactgtccataaaatccggaatacaagcccagttgcaatctccaactggacttaaaatacgccagaactcgaaccaactacgttcaagctacccaacaaaccttacatcatcccctgtgaggaagccctcggcattcggttatgactcatcagctgcagtggctgcagcagtaatgaattcccggtcttcagcatttgcaaaacggagccagagtttcatagaccgtggagcagtgaccaaccctgccggacttgctgcacctgctaatccgacaagcacaatgtcttcaaacaatttggattggagctcccctaatgggaaactggactggggtattcaaggagatgagctaaaccagcttaggaaaatccgcttcgttc

SEQ ID NO: 14892 - DNA, 860 bp, Gossypium hirsutum
  Clone ID: GOSHI-09MAY01-C11075_1
ctttctttcaagagatttcgttacgttacagtgaaggtgtggccgaaatttctatgctgatttcaagcggcagatctaagtcatcttaagcaagtcctttaaaacgacaaaggttgagtgatttgaaggccagaccggctgctgttatttggcatgtgggaacgtgagggcagagcattctcgatgtacaagaggatgccatctagagatcgttcggatgtaatggatgtagaagagaattcagctttctcacaggacagcatggatgtagaaactacaaatccttcaatgtggctttctttcccacatgttgtagtgggaaccctatcttcattcctatttggctaccaccttggggtagttaatgaaccgcttgaaagcatctctttagatttaggtttcagcggcaatactctggctgaaggtctggtggtgagcacttgttggggcggggcccttattggatctttgttcagtggttggattgctgatggtggcgggcgccgtagggcatttcagttgtgtgctctgcctatgattattggtgctgccacaagcgcaacaacaagaactttggcgggtatgctcattggaaggttcttagttgggactggaatgggaattggtccacctgttgcttctctttatttggcagaggtttcccctgcttctttaaggggaacttatggaagcttcatccagattgcaacttgtctgggacttatgggggctctgtttattggtatccccgtcagagaaattgctggctggtggcgcatttgtttttgggtctcaacagttcctgctgggatacttgcatttgctatgatattttgtgctgaaagtccacattggttata

SEQ ID NO: 14893 - DNA, 420 bp, Gossypium hirsutum
  Clone ID: uC-gsflmaxxa004h08b1
tcgcatttattcttggacgattacatacggcagatctatcaaatcatcttaagcaagtacgatctttacaaatatacgcaagtttgagcgatagaaggccggagctggctgctctagtttgggatgtggggtcgtcaccgtgaagcattctcaatgtacaagaggatgccatcaagagatcattcaactctagttgatgatgtagaagagaattcagctctcttacagaacagcatggacgtggaaactacaaatccttcatggttgctttcctttccgcatgtagtagttgcgaccatatcttcactcctatttggctaccatctctgggtggttaatgaaccgcttgaaagcatctctatagatttaggtttcaggggcaatactctggctgaaggtctggtggtgagtacttgtttg

SEQ ID NO: 14894 - DNA, 582 bp, Gossypium hirsutum
  Clone ID: GOSHI-09MAY01-C11015_1
taaaaaaaaaaaaaaaaaggcgtagcaatcatgatgtcctctcccctctgctccctctcatcattaacccttagctttcatcatcgccactccatgttttgctatctaccaaccgcacaaaacccaccgccttacccaacccagctcccaacaccaagaaaaggaagaagaagaagaaaaaagacaaggaagaagagaatttagatgaagaagatggtttctctcaagaagaagaaacgaaaccctacctcctccatctgcatgccttcttcactgagttaaagggttctctcttttcttcatcaatgaacaaaggcctttttcattttacttcatcttttcttcttttctcttctttcttggggaaatgaagcatcatggtccgatttgtatgctacatatcaactaaaacctaatactataccatatatttactgctgcacatgtttggggagctgtttcctttttttttttctgtatggatttttctttgattttacagcatctgagatcttatctatgctccaaagcagacttttgtttgcctttggtttaggtgattgaagatggcttgagttaata

SEQ ID NO: 14895 - DNA, 575 bp, Gossypium hirsutum
  Clone ID: GOSHI-09MAY01-C11025_1
cgccaacccttccgtttaaatggcattgaccctaatccccatcaccttacccaccaatctaatctgttagctatccatcatcatcatcatcatctttgagaagctcccatggctgataattctgcttgcaacccggacctcattattgctcataaattccccgatacaacttatgctcatactgagagagatgtagctgtctatgccttgggtgttggagcatgtggtcgggacgccgtcgataccgacgaacttaaatacgtttaccatgaaaacggacagcagtttatcaaggttttgccaacattttctactgtattgtcacttacaggtctgccacaacttagtggtgtgcctggcttaaagtttgataaacgtcttctgttgcatggacaacaatacatagaaatacacaagccacttacttcaaatgcctctctacttaacaagacataccatcgcaggtttccatgacataggtaaagcagcaatacttgaacttgtaaccagaagatatgagaaagagactggggaactattaaccttgaatcggtaaggttgtattttcccccact

SEQ ID NO: 14896 - DNA, 373 bp, Gossypium hirsutum
  Clone ID: LIB3166-033-P1-K1-F9
gctatccataatcatcatcatcatcatctttgagaagttcccatggctgataaatctgcttgcaacccggacctcattattgctcataaattccccgatagatgtagctgtctatgccttgggtgttggagcatgtggtaggaacgccgtcgatactgacgaacttaaatacgtttaccatgaaaacggacagcagtttatcaaggttttgccaacattttctactttattttcacttagaggtctgccacaacttagtggtgtgcctggcttaaagtttgataaacgtcttctttgcatggacaacaatacatagaaatacacaagccacttcctttaaatgcctctctacttaacaagacaaaccattgca

SEQ ID NO: 14897 - DNA, 555 bp, Gossypium hirsutum
  Clone ID: GOSHI-09MAY01-C11395_1
cccacgcgtccgcccacgcgtcctaaaaaaacttcatcgacggccgctcaaactccgcccaaacaacctctctggccaccgtcatggaaaacacagacgaactcaagagggtgttcgatcaattcgacgccaacaaagacgggcaaatctctattacggagctccgcgacgtattgaaggcaatgggatccaactactcagaggaagagttcaagcgtgtcatggaagacatcgacagcgatcaagacggttacatcaacttctccgaattctccactttctggtccacttcttccgacgccgttaaagccgcttcggagttgcgcgaggccttcgatttgtacgatcagaacaagaacggcctgatctcggcaaccgagttgcaccaggtcttgaatcggctggggatggcgtgttcagccgatgattgtgtcgggatgatcaagtcagtcgattcggacggcgacgggcacgttaatttcgaggagtttcggaagatgatgaatgcttcttcgattcctggcaatggcgacggatctaagccgtaggatatac

SEQ ID NO: 14898 - DNA, 885 bp, Gossypium hirsutum
  Clone ID: GOSHI-09MAY01-C11365_1
cccagcgtccgcccttttccttccctttttctttctttcctctcttggccttttttttaaaaaaaaatgcagagaatcatagcagtggtgttgtttttattttgcgccacttctcaattggcctcttctctcaatgatggtttgttgccaaatggaaattttgagtatgggcctaagccatcggaattgaaaggaactaaagtaatgagccctaaagcaataccgaattgggaaatttcaggctatgttgagtacatcaaatcaggtcaaaaacaaggtgacatgttgctaatagtacctgaaggaggctttgcagttaggttaggcaatgaggcattgatcaagcagaagattaaggtgattaaaggtatgttttactctctaaccttcagcgcggctcggacatgtgcacaagaggaaaaagttggatgtttcggtttctctgaactacgagaaaaacgactttggtttgttcccaattcagacgatgtatagtagcaatggatgggattcgtatgcgtgggcattccaggcttctgagtctgtaattgagatctcgatacataatccgggtgtggaggaagatgctgcttgtggccctcttattgattccatcgcattgaagaccttgtaccctccaaaacgcacccgagtgaatctactaaagaacggaaatttcgaagaaggtccttacatcttcgcaggaccaatgtccgaaggtgtcataattccaccccacattgaagatgatcacagtccattacctggttggattatcgactccctcaaagccgttaagtacatcgacagcgaccacttcaccgtccccaaaggcaagcgagcaattgaactcatcgccggtaaagaaagttccctctcacaagt

SEQ ID NO: 14899 - DNA, 477 bp, Gossypium hirsutum
  Clone ID: uC-gsflmaxxa047e07b1
cctctcttggccttttttttaaaagagaatgcagagaatcatagcagtggtgttgtttttattttgcgccacttctcaattggcctcttctctcaatgatggctatgttgagtacatcaaatcaggtcaaaaacaaggtgacatgttgctaatagtacctgaaggaggctttgcagttaggttaggcaatgaggcattgatcaagcagaagattaaggtgattaaaggtatgttttactctctaaccttcagcgcggctcggacatgtgcacaagaggaaaagttgaatgtttcggtttctctgaactacgagaaaaacgactctggtttgttcccaattcagacgatgtatagtagcaatggatgggattcgtatgcgtgggcattccaggcttctgagtctgtaattgagatctcgatacataatccgggtgtggaggaagatgctgcttgtggccctcttattgattccatcgc

SEQ ID NO: 14900 - DNA, 890 bp, Gossypium hirsutum
  Clone ID: GOSHI-09MAY01-C11325_1
cgtactcgtgggcggacgcgtgggtggtcgcttgggcggacgcgtggtctgacgcgtgggctgtctcgtggggtcggatctaaatatgctaatctcccgtctcactttccccatcctactacactgcgcaaaccaataccaaacgaccatccatcatggcggcaactgcatcgtctccttggggcaaagccggcgcttgggctctcgatgcagaagaacatgaagctgaactccagcaacagagccgcgccgattctgccgctgaaaagctcgcggttttcccttctttatccgccgccgcctccaccaaaacctagtaaaagtagtgcccacccatctctctcgccgaatttgctgcctacggctctgctaagccgagtgagccaactggcctaactcacgaggacctcctcctactccctaccggtcctcgccaacgctctcccgaggaactcgatcgcaaccgtcttggcggcggatttaaatcctatggttcgaaccgatacaattccaacggcgatgattcctcaagtaatagtagatggggatcttctagggtttcaaatagagattccaataaagaaatggctccctcacgcgccgatgagatggataattgggcgtcggctaagaaatcgactcgtgctgggaacggatttggggttggatttgagaggagagagagaggagggggagggttttttgattcgcaatcgaaagccgatgaagtagataactgggcatctaataagagtagtaaaagcgtgaatgctgctgcaccgccacggagatttggtggggggtttgagagaagaagcagtttcgattcacttcaaagggattcccaaagggatttggataattggggaaagaaaaaagaagagactggc

SEQ ID NO: 14901 - DNA, 1013 bp, Gossypium hirsutum
  Clone ID: GOSHI-09MAY01-C11205_1
ccccgcgtccgccccgcgtccgccccgcgtccgcaatcaatcagcaatctgggtcagatcttcccccattgcccatcttcttccttcaatcgttccattattttagggttttaatctctccttactttttaaacctacaaattaaaaaaaaacagttgaagggaacaaataatcaaacccttaatgctaatgccataatgctgtatacgtttatggagatttaattatttcacgcaccccggggcggacgcgggggcttgaatctcttcagcctacccaagttagcccttatgggtcaagataatttcgccccgcagaagagatcttctactggcggcggcggaggtttaccgacaatccgcaacgaggctggcgctggcggaagaaaccgtggatttcccagtatgccgcgtggcaggcagatgcacaagacattcaacaacattaaaatcacaatcctttgcggcttcgttacgatcctcgtcttgcgcggcacaatcggcgtcggaaatttgggaagctccgaagccgaagccatcaaccaaaacctgatcgaagaaaccaaccggatcctagctgagatccgctccgactccgaccccacggatcccgatgaatctcctgaaactgagctcgggcctaatgttacatacactctggggcctaaaattacggactgggatcagcagcgtaaggtttggctttccaaaaaccctgaattccctaattttgttaatggaaaagctcgaatcttgctcgtcactgggtcgccccctaacccttgtgacaatgctataggagaccattatttattgaaagcgataaacaataagattgattactgtaggcttcatgggattgaaattgtttataacatggctcatttatacaaggaacttgctggttattgggcgaaattgccattgattaggaggttaatgttgtctcatcccgaacttgagtggatttggtggatggatatgatgctttttttacagatatggtgtttgagt

SEQ ID NO: 14902 - DNA, 529 bp, Gossypium hirsutum
  Clone ID: LIB3585-016-P1-K1-A5
aaaaaaacacgttttaggggaacaagtaatcaaacccttaatgctaatgccatattcctgcatacttttatggagatttaattatttattacaccacgagatttaaaaacaatcttgaatctctatagcctagccaatatagccccttatgggtcaagataatttcgccccgcaaaagagatcttctactggcggcggctgaggtttacctacaattcttaacgaggctggcgctggcggaagataccgtggatttcccagtatgccgcgtggcttgcagatgcacaagacattcaacaacattcaaatcacaattctttgcggcttttttacgatccttgtcttgcgcggcacaattggggtacagaaatttttaagcttctgactcccaagccatcaactcagatttttgttttggaaaacaaaccggttcctaactggttttcctattcctaggtctatcctaagaaattccataggatttttttttatacttatctaaatatttttttattcttttctttttttg

SEQ ID NO: 14903 - DNA, 173 bp, Gossypium hirsutum
  unsure (1)..(173): unsure at all n locations
  Clone ID: LIB3585-028-P1-K1-H2
acacgtagagatctgattttactccaatacctatggtagaaattcgcccgagaaaatctttactggcggggcggagttaccgacaatncgcaacgaggctggcgcttgcggaagaaaccgtggatttcccagtatgccgcgtggcaggcagatgcacaagacattcaacaaca

SEQ ID NO: 14904 - DNA, 876 bp, Gossypium hirsutum
  Clone ID: GOSHI-09MAY01-C11235_1
tggaatcgtccctctgttttctctacctttccaagatctcttctcacgatggcccaagcagatcagattagcaacagccctgaaatcaaagagccatccccgaaagtcccaaaactcggtcaaaatggagtacatgaagttacccatggtccagcctccctcttgaaagtcaaaaagctttctgaaaaagccgtgttgccgtcaagaggctctcctctcgccgctggctacgatctgtcaagtgcaacggatacaaaggtgccagccagaggaaaagcgttgattcccactgatctaagcattgctatccctgaaggaacatatggtcgcgttgcgccaaggtctggtttggcttggaagcattccatcgacgtaggtgctggagtgatagatgctgattacaggggacccctgggggtgattttgttcaaccattctgatgttgattttgaagtgaaagtgggtgacaggattgcccagttgatcattgagaagatcatgacacctgatgttttggaagttgatgatctggattctactactagaggtgctgggggatttggatctactggcgtttaaatctctgggttttctttcccaaatgtaataatggattagcgttaggtttaggattaggggttgttttaaaaggttaggtttgggggactactgcctactggtgaaacaaagctttgctttgttttgcttatcggttattgtcttgtaagaaaccctgaatgggtcaatggtagcatattaagcagcaatcggcagtaactaagctctatcatggatatttgcactactgttcaacctgtgctattttgtggatttatatggtttattgcctataatatatttgctgtgccgttgatc

SEQ ID NO: 14905 - DNA, 306 bp, Gossypium hirsutum
  Clone ID: LIB3829-018-Q6_N6-E1
gatcaacggcacagcaaatatattataggcaataaaccatataaatccacaaaatagcacaggttgaacagtagtgcaaatatccatgatagagcttagttactgccgattgctgcttaatatgctaccattgacccattcagggtttcttacaagacaataaccgataagcaaaacaaaggaaagctttgtttcaccagtaggaagtagtcccccaaacctaaccctctaaaacaaccctgatatgtaaacctagagctaactcatccttacagctaggaacacaagacagagatatttaatccc

SEQ ID NO: 14906 - DNA, 133 bp, Gossypium hirsutum
  Clone ID: GOSHI-09MAY01-C12965_1
acaacaaacggaacttttcaaaactctttgttcagatttctgctatattccagcgtgggctttcaagttgtaacgacgcttaaaaatcccccaatgtgcctgttcgtacacttgttaaattatgtcttaaaca

SEQ ID NO: 14907 - DNA, 443 bp, Gossypium hirsutum
  Clone ID: GOSHI-09MAY01-C12895_1
gggggccgccccttccgggttattaacccctttttacttaattttttaaaaaaaaaaaaaaaaaaccctgggcgcttcacttttccctaactttttaaacttgaatcccttaatcatttaagtcaatggccgaagaaccagcaccaccatcggccccgcctcaatcatctgcgccgccgttgggatcttccgttttaccgctagtgaacaagctacaagacatattcgctaaacttggtagccagtccactatagagttgccgcaggtggcggtggttggaagccagagcagtggcaagttccagtgtgctagagtcgcttgttggccgtgatttcttgcctcgtggttccgatatatgcacgcgtcgccctcttgtccttcagcttctccagaccaagcgtaaacctgatggttctgatgaagagtatggcgagtgtcttca

SEQ ID NO: 14908 - DNA, 578 bp, Gossypium hirsutum
  unsure (1)..(578): unsure at all n locations
  Clone ID: AI726394.1
ccctcccccctccccaaagaaatcctaaaatttcacctgaaattagtagaagcaatgatcaaagaagcaatggagtttatgtaacattctctacttcacttctcgaatagaaaaagaaaaaaccctagcggctacactcttccctcactttctaaacttgaatccgttaatcatttaaatcaatggctgaagaagcagcagtagcatcgacgccgcctcaatcatctgcgccgccgttgggatctaccgttataccgttataccgtcacaaaaagaaagtgcattcagtagcctggaattacaccggcaccaagcttgcttccggttccgtcgatcaaaccggtcgagtttggcatattgagcctcacggtcatggaaaggctaaagatatagaattgaaaggacacactgatagtgtggatcaactatgttgggaccctaaacatgctgatcccatagcaactgcatctggtgataagactgttcgtctatgggatgctcgaagacaatcaaataactggaccatggatagctcagggagtgctgttggtagganagaaaatggaacagttccaccc

SEQ ID NO: 14909 - DNA, 679 bp, Gossypium hirsutum
  Clone ID: GOSHI-09MAY01-C12865_2
gaaaatttcactgcgaaattcatatcgggttttcaactcttttcctccaatttgcggcttggtgtgatggataccggatcaaacgtgaagaaaggagccggaggaaggaaaggcggcggtccaaagaagaaaccagtttctcgttcagtgaaagccggattacagtttcccgtcggtcgaattggccggtacttgaagaaagggcgatactctcaacgtgtgggaacgggtgctccggtttaccttgctgctgttcttgaatacctagctgctgaggttcttgagttagctggcaatgctgcaagagacaacaagaagaataggatcattccaaggcatgttctattggcagtgaggaacgatgaagaacttgggaagcttttagctggtgtgaccattgctcatggtggtgttttacccaatattaacccagttcttttaccaaagaaaaacgaaaaggtggcgaccaaggagcctaaatcgccatccaaggctaccaagaagtctcctaagaaggcttagtttcatttatttaattatgtatgtaatttcctttgtgtaggaaaatgttaatgttggtaatgtaggattttaggcgccattgtatttctaaagtctaatttcccagtggttatttcgaatagcgttttgtttgaaatgaatgaatgaaattcagatt

SEQ ID NO: 14910 - DNA, 750 bp, Gossypium hirsutum
  Clone ID: GOSHI-09MAY01-C12865_1
cccacgcgtccgggaaaattttactgcgaaatttcatttccgttttcgattttttcctccaatttgcatttgaagtgatggatgccggatcaaaggtgaagaaaggagccggaggaaggaaaggcggcggtccaaagaagaagccggtttctcgttcggtgaaagccggattacagtttcccgttggtcgaattggccgatacttgaagaaagggcgatactctcaacgtgtgggaaccggtgctccggtttaccttgctgctgttcttgaataccttgctgctgaggttcttgagttagctggtaatgctgcaagagacaacaagaagaataggatcattccaaggcatgttctattagcagtgagaaacgatgaagagcttgggaagcttttagctggtgtgactattgctcatggtggtgttttacccaatattaacccagttcttttaccaaagaaaaacgagaaagcggctgcaaaagagcctaagtcgccatctaaggctacaaagtctccaaagaaatcacctaagaaggcttagttgtttgtctattatagggtttgttttgatttatctgttaatgtatgtaggttccttttgtgtactttggttgtaggaaaatgttggtaatgttgtttagaatatgttttgtttgaaatgaatgaactgaaattcagattgaaaataaaaaccgataccccttttaattgtatattccctacaacctttatatttccaaaccatcatg

SEQ ID NO: 14911 - DNA, 452 bp, Gossypium hirsutum
  Clone ID: GOSHI-09MAY01-C12805_1
ctcagccccgaagccaagagaagagtggtttttgaagaagaaagaaagaaaattatatgtgaaagtatggcggggaaagaagagaatcgaatatttgtgggaggtttgtcatgggatgtcactgaacgacagcttgagcatgcgtttagtccatttggcaaaatccttgaatctcagatcatgttggaaagagataccgggcgtccacgtggatttggatttatcacatttgctgatcgccggtccatggatgaagctatcagggagatgcatggacgggagctgggggagcgcaccatttcagtgaataaggctcaacccaagatgggtgaagatcttgatcacggttatagaggaggttactcatcaagtggcaggggtcgctatgcaggtggagacaggcctgtagcacaggatgaatgcttcaaatgtgggcgttttgggcactgggc

SEQ ID NO: 14912 - DNA, 635 bp, Gossypium hirsutum
  Clone ID: GOSHI-09MAY01-C12585_1
gttggccagtactcaatgccaacaatttcatccacccacagtggcagaaccaacagagggtttccagctatctgcacagaatcaagttccaccatcccaaactgatcaaagctttgtgaggtcagacttaaagtacgaatataaaatgtctgtcaatgaacaagccattagtccagaccgtcttaatcatattagccaagggccagacatcaattctttgatatcatcatctgctgtgaaagcacaggtccttgattcaattaaattaagtttcattgtggacccccaacctgagccaagcttggagcaggtttcctcacaatttcatggcgcattgacattaggcactcgtgaacagagctgtgaatcccaggaactgattattctgaacatgaataaccatgtgcttgaggaccaagttctatcagcagaagaagcaagtactgctgcgagcccttctcctcctgattcttcggagcactctgttaatttcaagggaacaacgaccagcaatggtgctaatgctattatgcctgagaagtcagtttcaactgggcagactaatatcttgatatcagctaagacttctgagactgctctgcttgatgaaagatcattggtagcatgcatagttc

SEQ ID NO: 14913 - DNA, 417 bp, Gossypium hirsutum
  Clone ID: GOSHI-09MAY01-C12545_1
attaaatcagaaagatagtgtctgaaatggcaggaaaaggtgcagaagacgttcgagggggtgtatctccttacaggatttgtccattgggagctcatgtcgatcatcagggtggaattgtttctgctatgacaattaataagggaatactattgggatttgttccttctggtagcactgaggttgcattacgctcaggtcaatttaaaggagaagttaggttcagagttaatgaaaaccataaaccaagacagaccattagcaagggtgaagagattaccgcagataaatcttctccgtcaccaagatgaatttgaatggggtatttatgctagaggagccttgtatgcattacaaagtagagggaaccatcttgctcagggaatcattggctacatctgcgatctgagggtctgg

SEQ ID NO: 14914 - DNA, 498 bp, Gossypium hirsutum
  Clone ID: GOSHI-09MAY01-C12505_6
cccacgcgtccgccacgcgtccgctttgatactttttttgtttgtggtttttggtgtaatctttgataccctttttataaaaaaaccagcccttctagctggtcagagtttagtcttcactccctagaataattttctctttctcacttccaccaacgaaaaagttcgtcgatcggatcacgtattagattgatattgtaaagatgtctccaactgaatcatcacgagaggaaaatgtttacatggccaagctggctgagcaggctgaacgctatgaggaaatggtggagttcatggaggaagttgcaaaaactgttgatgttgaggagctgactgttgaggaacggaaccttctctcagtggcttacaaaaatgtgattggggcaaggagggcgtcttggaggatcatctcttccattgagcagaaggaagagagcagaggaaatgaggatcatgttgcacaactaaaggagtataggggtaagattgaagctgagc

SEQ ID NO: 14915 - DNA, 1159 bp, Gossypium hirsutum
  Clone ID: GOSHI-09MAY01-C12505_5
cacacacaacgtattcctctcggctcttgccctagttcacttgccgcgtccgtttttcacttcacatctgcaacgaaaaagaaagcgcccctttatctggtaggatcaggtattagagtggtatagtaaaaatgtcttcaactgggtcaacacgagaggaaaatgtttacatggccaagttggctgagcaagctgaacggtatgaagaaatggtggagttcatggagaaagttgtaaaagctgtcaatgtagaggagctaactgttgaggaacgaaatcttctctccgtggcttacaaaaacgtgattggggccaggagggcatcctggaggataatctcttcaattgagcagaaggaagagagcaaaggaaatggggatcatgttgctatcatcaaggagtataggggcaagatcgaagctgagcttagcaagatctgtgatgggattttgagccttctggaatctcatctcatcccttcagcctcaacagctgagtccaaggtgttttaccttaagatgaagggtgattatcacaggtatcttgctgagttcaagactgccgccgagaggaaggaagctgctgagagcactttgttggcttacaagtctgctcaggatattgctattgttgaacttgctcctactcacccaattagactcgggcttgctcttaacttctctgttttctactacgaaatcctcaactcacctgatcgtgcctgcaatcttgcaaaacaggcttttgatgatgcaatttcagagttggatactttgggtgaggaatcttacaaggatagtacattgatcatgcaacttctccgggacaatctgaccctttggacatctgacatcacggatgaagctggagatgagatcaaggaagcacctccaaagcctgagtcaggggagggacagcagtgacgagtcaagctcataggatatgtactctgtacttcacctagtagtttcttatacatgcaacctgggctgtagaagtgttccttttactttttttcttctctaatcagcacttggaatcaaatgttccgatggattatacatgcgctttattattggacaggaatttgtttggttttccatgtggtaatatgctaaaatagtgtttaccaatacaaataaatatgcacactttaggt

SEQ ID NO: 14916 - DNA, 718 bp, Gossypium hirsutum
  Clone ID: GOSHI-09MAY01-C12505_4
gctcctcgctgtggaaagaaaaaaaaagggaaaaaaaaaaacagaagttttctatcagatcaagtattagattgatatagtaaagatgtcgccaaccgaatcatcacgagaggaaaatgtttacatggccaagctggctgagcaggccgagcgctatgaggaaatggtagagttcatggaaaatgtagcaaaaactgtaaatgttggtgagctgactgtcgaggaaaggaaccttctctctgtagcttacaaaaatgtgattggggctaggagggcttcatggaggattatctcttctattgagcagaaggaagagagcagaggaaatgaggatcatgttgcaaccatcaagaagtataggagcaagattgaagctgagctcagcaagatatgtgatgggattttgagcctccttgagtctcacctcattccttcagcttcatctgccgagtccaaggtgttttaccttaaaatgaagggtgattatcataggtatcttgctgagttcaggactgctgctgagaggaaggaagctgctgagagcacttcgttggcttacacgtctgcaccggatcttgctctcggtgtcctattgcttacttatccatttaggcttttacacgcttttatcttttttgcattcttcttttctttttctttgtcttatcatttatttttctccttctttccttttttatttttctttttttttttactt

SEQ ID NO: 14917 - DNA, 641 bp, Gossypium hirsutum
  Clone ID: GOSHI-09MAY01-C12505_3
gcgaactggtggaagtcagtagctagacaggtattagagtggtatagtaaaaagtcttcaactgggtcaacacgagaggaaaatgtttacatggccaagttggctgagcaagctgaacggtatgaagaatggtggagttcatggagaaagttgtaaaagctgtcaatgtagaggagctaactgttgaggaacgaaatcttctctccgtggcttacaaaaacgtgattgcccacgcgtccgggccaggagggcgtcctggtaggatcatctcttccattgagcagaaggaagagagcagaggaaatggggatcatgttgctctcctcaaggagtataggggcaagatcgaagctgagcttagcaagatctgtgatgggattttgagccttctggaatctcacctcatcccttcggcctcatctgctgagtccaaggtgttctaccttaagatgaagggtgattatcacaggtatcttgctgagtttaagactggcgccgagaggaaggaagctgccgagagcactttgctggcttacaagtctgctcaggatattgcttttgctgagcttgctcctactcaccctattaggctgttgcttgcatttatcttttatgtattattctatataatttattacatt

SEQ ID NO: 14918 - DNA, 1079 bp, Gossypium hirsutum
  Clone ID: GOSHI-09MAY01-C12505_2
cttcacttgcttacgctcctcgctgtggaaagaaaaaaaaaagttctctatcagatcaagtattagattgatatagtaaagatgtcgccaaccgaatcatcacgagaggaaaatgtttacatggccaagctggctgagcaggccgagcgctatgaggaaatggttgagttcatggaaaatgtagcaaaaactgtagatgttggtgagctgactgtcgaggaaaggaaccttctctctgtagcttacaaaaatgtgattggggctaggagggcttcttggaggattatctcttctattgagcagaaggaagagagcagaggaaatgaggatcatgttgccaccatcaaggagtataggagccaggttgaagctgagttccagtctgctgctgtgaggaaggaagctgctcagagcactgggttggctttcaaggctgcacaggatattgctctcggcgacctagcgccacctcatccaattaggctgggacctgctcttaacttctctgttgtctactatgaaattcttcactcacctgatcgtgcttgctatcttgcaaaacaggcatttgctgaggctatttctgggtcggatacattgggtgaggaatcctacaaggatagttcattgatcatgcaacttcttcgggacaacctaaccctcttgacatctgatatcacggatgaaagctggacacgatatcaaggaagcttccaaacccgagtcaggagagggacagcagggatgagttaagttcatatgatatgtactctgtaatttatgttgcaggttgtacttttacgtacatgcaacgtgggctggtgtagaaggttccttttattttattttttttttatttttacatttatcagtacttggagttgaaattttacattccaatattattatcattcggacatgaatttggttttgtttggtttggtttcaatgttgtaatgctaaattcgagtttattgaatgttaattcagtcctgttttgaacttcttgtctttggccttatgaatctgaaggtacttaaagctccaatttaaaaaatcttatcagatatctatttctt

SEQ ID NO: 14919 - DNA, 1140 bp, Gossypium hirsutum
  Clone ID: GOSHI-09MAY01-C12505_1
cggtccagaactcccccgggtcgaccccacgcgtccgctccctagaataattttctctttctcacttccaccaacgaaaaagtcgtcgatcggatcacgtattagattgatattgtaaagatgtcgccaactgaatcatcacgagaggaaaatgtttacatggccaagctggctgagcaggctgaacgctatgaggaaatggtggagttcatggagaaagttgcaaaaactgttgatgttgaggagctgactgttgaggaacggaaccttctctcagtggcttacaaaaatgtgattggggcaaggagggcgtcttggaggatcatctcttccattgagcagaaggaagagagcagaggaaatgaggatcatgttgcacaactaaaggagtataggggtaagattgaagctgagctcagcaagatctgtgatgggattttgagccttcttgaatctcacctcattcctttggcctcatctgctgagtcgaaggtgttctaccttaagatgaagggtgattatcacaggtatcttgctgagtttaagactggtgctgagaggaaggaagctgccgagagcactttgttggcttacaagtctgctcaggatattgctcttgctgagcttgctcctactcacccaattaggctgggacttgctcttaacttctctgttttctactatgaaatcctcaactcacctgatcgtgcctgcaatcttgcaaaacaggcttttgatgaggctatttctgagttggatactttgggtgaggaatcttacaaagatagtacattgatcatgcaacttctccgggacaacctgaccctttggacatctgacatcacggatgaggctggggatgagatcaaggaagcttcaaagcacgagtcaggcgagggacagcagtgataagttcataaaaattgttctctgtaccttatatttgcaggtttacagtacatagatgcaatgtgagttatcgtagtgggttttggttttgttttcaatgcaattcatcagcacttggaatcgtaatgatcctctgaaattatatgggctgtattattgaacgagaagaattcggtttgggttggtttggttttcacatgctagtactaaaatagtgcgtttgccagtctc

SEQ ID NO: 14920 - DNA, 432 bp, Gossypium hirsutum
  Clone ID: uC-gsronu33B062f08b1
tttttggcaggcttttgatgaggctatttgtgagttggtatactttgggtgaggaatcttacaaagatagtacattgatcatgcaacttctccgggacaacctgaccctttggacatctgacatcacggtattccccccccccccacacaataagtttgtgtttgcacacaatcatgaaattctcatgcagctctgctgtctccagacataaaaaaaatctttaaaatgccacatggatatgaaaaatgcctaaagctatattcctgagtgaacttagttgctttcattgacatgactacagttctctaccatgttctctaaacttcctggaatgacatccttatagcttaatgccaggactaatttcttaaagtttcagttaattctccgagattatcagtgcttctttaccctatttcaagaatggttct

SEQ ID NO: 14921 - DNA, 391 bp, Gossypium hirsutum
  Clone ID: LIB3148-059-Q1-K1-H11
aagttgcacattgcaagtgattgggattttcatttttttttaaaaaaagaaaaaaagaaaaagttaaaacaggtaaaaagtgttcccatgttattggttgaatggggtgatctatatttatttgatgcatgttgccattaattttaggatgaagctggagacgacatcaaggatgcttccaaacccgagtcaagagagggacagcagtgatgagttaagttcatatgatatgtactctgtaatttatgttgcaagatgtacttttacgtacatgcaacatgagctgatgtataaagatccaacaatcatattgaccttcatacttgcacatttatcaatacttagagtggaaattttacattccaatactattatcattcagacatgaatt

SEQ ID NO: 14922 - DNA, 277 bp, Gossypium hirsutum
  Clone ID: uC-gsronu33B051g01b1
tttccttgtgtccgccaagcgtttgcgatgaaactcggatagcctgagacaatggtgtaatctctgataccctttttataatacaacccaacctttagctgtgcagagcaacttattcactctgtagaataattatctctttctcacttccaccgacctaaagagcgcccattcggatcacgtattagattgatattgcaaagatgtctccaactgcttcatttctcagcggaaaatgttgacatggccaagctggctgagcaggctgaacgctatg

SEQ ID NO: 14923 - DNA, 1447 bp, Gossypium hirsutum
  Clone ID: GOSHI-09MAY01-C12785_1
cgggcgttgaagacaaggttaagggagttcgagaagaaaaatgcgtcggtggaaatttttggcgggtttaagaatagtgagtttgtggagaaagttaagtccagtttgaaagcaataatcaaggagcctcaggagtcaaaggatgtacccccactagatgtacctgaacttttagcatatctggtcaggcagtctgggccttttttggatcaacttggcgtcagaagggatctatgtgacaagatagttgaaagcttgtgtagcaaacggaagaaccagcttgttttgcgctcccttgctgaaggagaaccccctacagttgatagtgataagataaatgatgaacttgatttaaggatagccagtgttcttcaaagtacagggcattgttatgagggtggcttttggacagactttgtaaagcatgatgtctcagacgggaaaagacatgttgccattgttacaactgccagccttccatggatgacaggaactgctgtaaatccactttttcgggcagcatacttggccaaatcggcaaaacaaaaagtcactctcttggctccgtggctttgcagatctgatcaagaacttgtttatcccaacaatctcacttttagttcaccagaggagcaggagaactatatacgtaactggcttgaagaaaggactggatttaaagctgattttaaaatctccttttatccaggaaagttttcaaaagaaaggcgaagcataatacctgctggagatacttctcagtttatcccatcaaaagatgctgatatttgtattttggaagaaccagaacatctgaactggtatcatcatggtaaacgctggaccgacaaattcaaccatgttgttggtatcgtccacacaaattacttggaatatattaagagggagaagaatggtgctctacaagcttttcttgtgaaacacatcaacaattgggtcaccagagcgtattgccacaaggttcttcgtctttctgctgcaactcaggatctaccaaaatccgtgatttgcaatgttcatggagtaaatccaaagtttttgaaaattggggagaaagttgctgaagaaagggagcttgggcagcaagccttttctaaagaagcatacttcttaggcaagatggtctgggcaaaaggatacaaagagttgatagatttgttggcaaagcacaagaatgatcttgatggtttcaagttggatgtgtatggaaatggtgaggacgcacatgaagttcagagtactgctaagaggttgaatctgaaccttaattttctgaaaggaagggaccacgcggatgattctcttcatgggtacaaaatcttcatcaaccccagtgtcagcgacgtgctttgcacagctactgcggaggcacttgctatggggaaattcgtagtatgtgcagaccatccttcgaatgagttcttta

SEQ ID NO: 14924 - DNA, 501 bp, Gossypium hirsutum
  Clone ID: GOSHI-09MAY01-C12765_1
acttatgcaaagaattgctatagcaagagcaattatgaaggctcttcgaatccttgttgtggatgaagcaacaagtgcactagactggaatctgaacgagtggtgcaagaagcaatgaccaagcctccattggccgaaccaccatagtaatcgcccaccgcctgtctaccatccgcaacgctgagcttatagcagttttccaaaatggccaggttatagaaattggatcacatgatgagctgatagaaaatcaaaatggtcactacacttcattagtccaccttcaacaaacagagaaagaaaagaaccctgaagaagctaactcaactttacctacttgtgcttcatcttcaatcacaaatatggatatcaacaacacaagtagtagaagactttcattggttagtggatctagttctgccgattctttttctcaaaaccgtgctccactggctggcatttccgaggaggaagatctatataaatagccagcccctcttt

SEQ ID NO: 14925 - DNA, 397 bp, Gossypium hirsutum
  Clone ID: GOSHI-09MAY01-C12705_1
gtgacgcccatgggagacaccacacttctggtcagcattacatgcacgaaaagggcggacgccgtgcttaaactctgtcaacttttcgaatcattgaacctcaagattattacagccaacctcactgttgtctctgccaatctctttaacacgctgtttattcgggctgatgaaaaggagaaagaagagttaaaaatgcagatccaaacagccattgcagcttttaatggtccacaaactcctcctatcaccatctaatcaaaacaacatctcctccctcttggctatctgctttgatgtattgttttcagcttctgctggcacacgccttcacatcgatccactatgtttgagtttttaattatttaattttaagaaactttattttcttttctat

SEQ ID NO: 14926 - DNA, 932 bp, Gossypium hirsutum
  Clone ID: GOSHI-09MAY01-C12615_1
cccagatttatttttcattcgtgcacttggggaaattctccattttatattttcgcggcgtccaaacagaaaatcaatagcaaagtcagaaacccttggttgataaatggaagaaaatcccacggtaagtcctacaacaacaccaacaaacagcagcaacaaaacgacgcaggaacttgcatcagagggtctaaaacatctagaagaaaccattgaagctgcttttcaaatcctctcttccatgaacgacgagctttgcaaccctgccttatggtccaccaatcctactactaataacactactactaatactgctgcacctaacggttcttctctctccaacggcgccgttttaggaaacggtgattcgtcgtccgacggtggacatcacttggagatgggtggaattggaggtagtggcaatggtgcgctcgatgaagctcgccttaggtataagatctccgtcgctgctcttcgcactgtgctcaccgccattcccaattctcagaaggcaaaagcatttgaaacgggttcaacggcgactagtcctgcagatgaagctgatattgaaaagctggaagaagaagcctcgaatctcaggaaggagcttgcaaacaagaatctatacgtaaagcgtctaatagatcaactacgggagcttattacggatgtatcgacttggcaaagtccttgttccatgtaaagtttggacgataaaactgacttatctcagttgccgaaaagagtgccctaggaggtaaatatgaaaccagatatctacattgaatgatgatgatatggtttacttggaggaaaattacctgtgataggtgctatttgtgttatttgatgatagtgcttaagagtttgaatgagacatgacacatatacttacaagttacttaagtttgactacaaaaaagatcgagttc

SEQ ID NO: 14927 - DNA, 717 bp, Gossypium hirsutum
  Clone ID: GOSHI-09MAY01-C12605_1
tttcagtgtttgcgggtgttggagaacgtacaagagagggtaatgacttgtacagggaaatgattgagagtggtgtaattaagctaggtgacaatcaggctgagagcaagtgtgctcttgtctatggtcaaatgaatgaaccccttggtgcctgtgctcgtgttggccttactggtttgactgtggctgaacactcccgtgatgctgaagggcaagatgttcttctctttattgacaacattttctgctttacacaagtgagatggtttattgtggaagctttggaaacattttacattacggctccgtttggaagctaggaaaacattttctggaaaatattgtcctggttttacggtgtttggcagcttgaaaatattttacacttggaaaatggattccaagacacgggtaaaatgacttgcaatttggggaaaatgtcttaccgatttcttttcagtaagacattttccatctccttcatccaggtaaaatttctctgattcttccgttcttgaacttcttatatttcttccctttttccttggttcgtcgcatatatatgctcttctcaggcaatacacgctgctatttcgtctttctcaggcaaagctcttttttagggcaaggaagaacctttctatggaatccattgattacccatttggagaagaattgaaggtaataccaaactaagccagtgtgggaaaaacaaaa

SEQ ID NO: 14928 - DNA, 479 bp, Gossypium hirsutum
  Clone ID: GOSHI-09MAY01-C12155_1
cccactcgtccgaggtaacacacctggctgttcatcatcagcttgtgtctatggcattcaatggggagactcatctttctcagttggaatctttgctaaagaaaagctcaccttgacatcaactgatgtgttcgatgactttctatttggttgtggccaaaataaccaaggtcttttcggaggggcagccggattgataggacttggccgagataaattatctctaccttcacaaaccgcctctaaatacaggaaatacttctcctactgcttgccatcatccgccagctcaaccggtttcctcagttttggctacggtggcgtatcgaaattcgtaaatttcacaacgttgaccactctctcccaaggtgcatccttttacggaattgacattgttggaataagcgttggtggcaaaaaaactaccgatatcagcctctgttttcactgctggtggcgccatcattgactctggaact

SEQ ID NO: 14929 - DNA, 1477 bp, Gossypium hirsutum
  Clone ID: GOSHI-09MAY01-C12165_1
agatattttgtttctatgcaagtggttgaagctttgagtttatctatctagctagttgtagttcgtaatctggctacctccatcccttctattccttagccaagcatttaaaaaagcctgcacagcatgtaatatagtgtttccatctcttcaattacaaacccccaaaaggagaaaagggatacatggtgaggtggaggatcactagttatatagtagaatgtatccatagaatttgttaaatattattgttctcgattcttagtggtcgtggacaagattaaaagaatcgtgtacctacacctttataaaagccgtcaaatcatgtaagagtcgtttctcttagctaccatcaaatatcaattctaaaaaaaaaaaaaatccaaaaaaaagattgttttactgaagaagaaaaaaaatgcccgacgaggagactgcaaccccaacggcatcggcaccggcaactccgggaacgccaggtggaccgctgttcaattccatgagggtggattcactgtcatatgatcggaagtcaatgcctcgatgcaaatgctttccggtgactgccccaacgtggggtcaacctcacacatgcttcaccgacttccctgcacctgacgtatcccttacccgaaagctgggggcagaatttgtgggaacctttatcctaatatttgcggcaacagcgggacctatagtgaaccaaaagtattcgggagccgaaacattgctcggaaacgccacatgcgcaggcctggctgtgatgataataattttatccaccggacacatatctggggctcatcttaacccttccctcaccattgcatttgctgcctgccgtcacttcccctggactcaggttccagcctacatagcagctcaagtttcggcctctatttgcgcttctttcgctctaaagggggtcttccatcccttcatgtctggtggcgttactgtcccctccgtcagccatggacaagctttcgcactcgagttcctcattacttttaatcttctcttcgtcgtcaccgccgttgccaccgacacccgtgccgtgggagagctggctggaatagctgctggggcgactgtaatgctcaacattcttgttgctgggccaagtagtgggggttcaatgaatccggtgaggacactggggccggctgtagcagcagggaattatagggcattgtggatttacttgatagcgcccacactgggtgctgtgatcggttctgccacctacactttggtgaagctccgcgaagatgaggtcgacgcaccacggcaggtcaggagttttcgacgctaggtaatatggagcccacgaaattatgacatcgttgaaaatggaaggggcaaaaaaagtgtggttttcttcttctaatgtctctctatgaaatgaaaccatacacatcgctgttcgtttgtttgtttgattgtgtggggtaaagataagatagcttttgggaat

SEQ ID NO: 14930 - DNA, 540 bp, Gossypium hirsutum
  Clone ID: GOSHI-09MAY01-C12125_1
cgcactttctttgctgacttctgttgaatctgccgaggattctcagaatcaggcaacttcctacgaggagtccgccttgttgcaatggcaggtctgaagattccactaacagcaggaagaaacttccttctaaggaaaagagaggatgttacaagagaaggagagatgaacatgcaccgacagttgtttcttcaaccgtggaagatggtcatgcatggaggaaatatggacaaaagcagatccttaattctaagcacccaaggagttactttaggtgcactcgtaagtacgatcaaggttgtaaggccactaaacaagtccaaaagactggtagatgctggctcccaaatgtttcagaccacttacattggaacccatacctgcagaccagactcattcaaggctccccaaatcatcatagattctgaacctcgggaatcttacaacaagttcagttatggcagcagcaaccccaaaattccaaccaaaaagctgcattgaaatcactccacctgtaaagcaggaaaccaagggagaaac

SEQ ID NO: 14931 - DNA, 1411 bp, Gossypium hirsutum
  Clone ID: GOSHI-09MAY01-C12095_1
atgtgcggaagctgtccaccaaaacaatcttaatctggctgaagctttagttaggcgagttgggttcctagcgatttctcaagctggggctatgagaaaagtgctacttattttgcggaagcattagcccgaaggatttacagattttatcctcaaaacccactcgaccactctcggccgcgtgggcttcacatgcacttttacgagacttgcccctatctcaagttcgctcatttcaccgctaaccaagctattctcgaagcttttgagggcaaaaaaagagtccatgttatcgatttctcaatgaaccaaggcatgcaatggcctgctttgatgcaagctttagcgttaagagttggtggtccgccaggcttttaggttaactgggttcggacctcctagccacgacaactcagatcacttgcaggaagttggttggaagttggctcagtttgccgaaaagattcacgtggagttcgagtatcgtgggttcgtggctaattcgttggccgatttggatgcttcaatgcttgatctcaggccgagtgaagttgaagccgtggccgttaactcggttttcgagttacataaattgttggctcggcctggtgccatcgacaaagtcttttctgtggtgaaacaaatgaagcctgaacttgttaccatcgttgagcaagaagcgaaccacaacggtcctgttttcttagaccggttcactgagtcattacatttttactcgacgctttttgattcgttggaggggtcggtgagcagtcaagataaggttatgtcggaggtgtatttggggaaacagatatgcaatgtggtggcctgtgaaggggtggaccgaatcgagaggcacgagtcgctgactcagtggagaaaccggctgagtacggcggggttttcaccggttcatttgggttcgaacgcgttcaagcaagctagtatgttgttggccctgtttgcaggcggagatgggtatggggtggaagagaacaacgggtgtttgatgctgggatggcacaaccgcccactcattacaacttcagcttggaagctcaccaacaaaaccaccgccataagccagtaaaatttatttatttttaatgagtcgactcaatgagtctaagaagaatcccaactcagtctggtccctccctagtacgaaacccttatctttaatttctgtcaatgttggcttctgaactggttgcctttccagtttgccactcgctttttatcatttttctaattttcagctctctttctgtttaggttaattttttttcttggggaaatctttttgtattttccagggtgaatcactaaaagggttaatgtatttattataaatatgttatatagcgttgctgaaaaataaaaaagaaattgcagaggggtttagttg

SEQ ID NO: 14932 - DNA, 528 bp, Gossypium hirsutum
  Clone ID: GOSHI-09MAY01-C12075_1
cgcaaatgtataagaaagaatgctagcttgggacaattatatggaaatatgcaagaagcctatcagcaaatgcagacccctttagtttaccaggagccttcagctagaggactacatgaactaaaagaatcaaccgttcaagctgctacgtgtacaggcaacatcgatgcccctattgacgaaactttgtttgatatcgagaaagagattgatgatctattgcctgttgaagtaaaagaacagcgtctcagcaacttgcttcaagccaccatggtaggaggatgtgttgcagcaatgcctatccttaaaatgatcccgacttcagtcctctggggctacttcgcattcatggctatcgaaagcttaccgggtaaccaattttgggaaaggatcttattgctcttcactgcaccaagcagaagatacaaggtccttgagcagcaacatgcaacctttgtggaaactgttccattcaagactattgcaatgttcaccatttttcaaacggcgtatctgctcgtatgtttc

SEQ ID NO: 14933 - DNA, 1758 bp, Gossypium hirsutum
  Clone ID: GOSHI-09MAY01-C12025_1
cccacgcgtacgcccacgcgtccgctagcttttcatcagttgggatgtgtaaggcttctgaggaaagagtatgatgtagcaaaaggtctttttgagaaagctgtgagtttgggtcatgtttactccattgccggtttggctagactgggttacattaagggtcataaactcttttcttatgagaagctcagctctgtgatttcttctgttaacccactggggtggatgtatcaggaaaggtcattatactgtgaaggtgataaaaggtcagaagaccttgataaagcaaccgaacttgaccccgctctcacatacccctacatgtatcgggctgcttccctaatgatgaaacagaatgttcaagctgctcttgctgagatcaaccgtgttcttgggtttaaacttgcattagaatgcatggaactccgattttgtctttatttagctattgaggattacaaagcagccattcgtgatgttcccccgcgtccgacactttccccaggattacagaatgtttgagggacgagtggcagcatcccatctccgtacgcttgtgcgtgagcatgttggcagttggacaactgcagattgttggatgcagctgtatgataggtggtcttctgttgatgatattggatctctcttccgtaatctatcagatgcttgaatctggtggggcaaaaggtgttttatacttcagacaatcattgcttctcctcaggttgaattgtcctgatgcggctatgcgaagtttagaattagctcgtagacatgcatccagtgagcatgaacgcctggtttacgagggatggatcctatatgatactggtcactgtgaggaagggcttcgaaaggcagaagagtctattagaaccaggagatcctttgaggccttcttccttaaagcgtatgcattggctgactctagcctcgattcatcttgttcttcaacagttatttcactgcttgaaaatgccttgaaatgcccctcagataatcttcggaaaggtcaagctcttaataatcttggaagtgtcttggttgattgtgggaaattagactcagcagccgactgctacattaatgcccttaaaatacgtcacaccagagcccatcaaggccttgcacgtgtccattttctcagaaatgacaaggccaccgcatatgttgaaatgaccaaacttattgaaaaggctaaaaataatgcatccgcatatgagaagaggtccgagtactgtgaccgtgaccgtgacctcacaaaggcagatcttgagatggtcactcgaatagatccactcagggtatatccttaccggtatcgagctgcagtgttaatggatagccgcaaggagaaggaagccattgcagaactgtcaagggcaattacatttaaagcagaccttcacgttctacacctacgagctgccttccatgagcatgttggtgatgtcttggctgcccttcgagattgtcgagcagctctctctgttgatcctaaccatcaagaaatgttggaacttcacagccgtgtcaacagccatgaaccatgaatctctgttttttttttttttggtaaaaatgcgaaaggggaaaaaatggaaattataacttatatatggaaaaagcacggaagggggaagagattttgaattgcatgatatcattatagttattatcatcatcataacatgatatgttacctttgtaatttatcctgtaagaattttggtcaatgccatgttatcttcttctgcc

SEQ ID NO: 14934 - DNA, 383 bp, Gossypium hirsutum
  Clone ID: LIB3135-037-Q1-K1-F10
tcgcccacgcgttcgggaagcgcttggaaaagcggtagagtctattagaaccaagagatcgtttgaagccttcttccttaaagcttatgcattggccgactctagcatggatttttcatgttcttcaacagttatctcattgcttgaaaatgccttgaaatgcccctcggataatcttcggaaaggtcaagctctgaacaatcttggaagtgtgtacgttgattgtggaaaattggacttagcaaccgattgctacattaatgcccttaaaatacgacacaccacagcccatcaaggccttgcacgagtacattttctcaaaaacaacaaggctgcagcatatgaggaaatgactaaactgattgaaaaagctaaaaacaatg

SEQ ID NO: 14935 - DNA, 374 bp, Gossypium hirsutum
  Clone ID: LIB3048-018-Q1-L1-E5
aggaagcgcttggaaaagcggaagagtctattagaaccaagagatcatttgaagccttcttccttaaagcttatgcattggccgactctagcatggatttttcatgttcttcaacagttatctcattgcttgaaaatgccttgaaatgcccctcggataatcttcggaaaggtcaagtaaggtttcttttgccctatctttttcattagaaaaatcctttttgtcacaacagtttcttctaaggcgtacaatcggattctcggtaatatttttcaagtaagccaaaagatatattctttggctccatcaagtagttgtatcactagcaaaaatcatgtctttcaatgatttcagttttattgttagaaaacgtg

SEQ ID NO: 14936 - DNA, 443 bp, Gossypium hirsutum
  Clone ID: uC-gsronu33B061d01b1
cccacgcgtccgcccacttccattttctattcccacccaaaggtcacctatcgaacagcactcggtcaggtctctcctccgcatatccacctccgatgttccttgcttagggacccttccggtcacgtatgctcacgattcttctcttatcgcctctctagctaagttgtgagccactagatttgtagatctgtaggctatttggtgaaaacattgcttttgttgctaaatgtttcgtattatactcccaatcatcgatttaccaatcttatctgatttacttttttttattactgataccgagtctccttcgataacaactaatgtgaaccccatctgttttcccatgaaaactgcttggaggcacgcaagggtctctattgcaaacgaagaggccacctccccgtgaaccactgttttgaatgcgaagaccttccctaaaa

SEQ ID NO: 14937 - DNA, 383 bp, Gossypium hirsutum
  unsure (1)..(383): unsure at all n locations
  Clone ID: LIB3166-051-P1-K1-H4
gggcgaccgacgcgtccaagaaaactggggagagaaacaactataaacatcaccaaatgccaacaaacgagtagcgattaatcttcttaataggggatcccaaacaccnattatgatcccacttccattttctattcccacccaaaggtcacctatcgaacagcactcggtcaggtctctcctccgcatatccacctccgatgttccttgcttagggacccttccggtcacgtatgctcacgattcttctcttatcgcctcccttttccataccataaaagtcacataaggttctattgctaaaggacttcgcacaattctgtctgcctcttcttagagaaggtagaatatattaagtcaaatttaaataaatttttaaaact

SEQ ID NO: 14938 - DNA, 420 bp, Gossypium hirsutum
  Clone ID: GOSHI-09MAY01-C12255_1
gttcttttaatttttctctgcagattttatgtggcagaagtgctccttgctttggagtatcttcacatgcttgggatcatttacagagaccttaagcccgaaaacgttttggtgagagaagacggtcacataatgctctccgattttgacctctcccttagatgtgccgtctctccgacgcttgtaaaatcttcgaactcaaccctggaatcaaaaaattcggcatactgtgcccagcctgcgtgcattgaaccaacttgtgtaatgcagcctgattgtatccaacctgcatgttttggaccccgatttttttcaagcaagcagaagaaagacaagaagagcaaagttaagaatgaaacaaatcatcaagtgagtcctctccccgagctcatcgctgaaccgaccaatgctcgatcaatg

SEQ ID NO: 14939 - DNA, 1960 bp, Gossypium hirsutum
  Clone ID: GOSHI-09MAY01-C12215_1
caaacccttttcttttgaaaaaaaaaacacccaagtgaatcctgggggcatttgaaaactgtgaaacttaaaccggtgcttcaacttgtgctgttgcagccataactagtgatgagattgtggggaatgggatgagtacttgcatcgtttctgcttcagataataaaggctttggaggcgcagctattgatgttattaatacaggtgatggtggtcagaagttagcaaaccaatcaaaggctgaagagtctctcagcgtttctcttcctgcagatctttctgttgagaacccaccaatttctttatggccgcctttacctactccccagaattcttcaagccagatgatttctcattttcctggaggccctccttcgcacttccccttctatgacatgaatcccatgatggggggtccaatctttgcctttggaccacatgaggaatcatcgtctacccaatcgcagtcccagaagagtagcacaccagcttcaggtcccttagggacctggcaacaatgccattctggagtagattcattctatggtcctccaacgggattcacaggccattttatcaccccacctggaggtatccctggggttcaaggcccaccacatatggttgtgtacaaccattttgctccagtcggacagtttggactaagtttcatgggtacaacctacatcccatctggaaaacaacctgattggaagcacaaccctgcttcctctgcagtcggtgaaggtgatgtgaaaaatttgaatatggctgcttcgcagggtaattctagcaacatacctgctcaaatgcagcatcttccccctggccctgggtcacctcttctgcccattgcatctccactcgctatgtttgatgtttctcctttccagtccaccccagatgtgtctgtccaagctcgttggtctcctgttcctgcttcacctatgcagtctgctacaccatcaatcccattgcagcaacaggcagaaggtgtactacattctcagttcagccaggggcctcctgtggaccgggcggggactagcaataggttcccagactcccgaacatcagcatcctctgactgctctaggaaatttcctgtggcaacagatgcaaccataacccagttgcctgatgaactagggttggtggaaccatctagctcctccattcctgctgcttcagcaccacaagatgctaagagcccgtccatcatgaaagttgctgatgctgccaagaatgatgtcctaaataatgatggtattaaaagtagtgggcatagcacaaattctgcgttgaagtctgttcagtcttcatcccagcaaaagaatatatcttctcagcattacggggaattcttcctggtataatcatccgagagggaatgcaatctcgcaaaagaatgggtcaggtgaattgacccatcgtggaatgagtttccaagggaggaaccaatcgatgggtggagacaagaactttcccacttcaaagatgaagcaaatttatgggcctatacagaccaataatggcacgtcaacatcggcatgatgataggaaaataaagcttctcggactttgatagggaagcatttcttttcaccaaatgcaaaatttttgttgtatcgcttgtactggtgagtggttttggaactttatatatccgctggttttttctgattggagtttgcacaagtggtgttggtgaatagcagttttggtattggtttttgggttactatgtaggaagaaatggggtgtagttgggggttcagttgggcctttgctagaagactatgcagtggtttttgtgtgaaggagctggatgaaccccgtcactcttttatgttccactttgttatggtgcgtaaatgtctttgggatttgatcatttattatgaaggatccagctgatatatttttttcatcttactaatgatataaaaaatttaatatt

SEQ ID NO: 14940 - DNA, 399 bp, Gossypium hirsutum
  Clone ID: LIB3048-038-Q1-L1-E11
acccttttctttgaaaaagaaaaacacccacgtgaatctggtgttcatatggaagagtgtgaagctgaagcggctgcttcagctgttgctgctgcagccataactagtgatgagattgtggggaatgggatgagtacttgcatcgtttctgcttcagataataaaagctttggaggcgcagctattgatgttattaatacaggtgatggcggtcagaagctagcaaacccatcaaaggctgaagagtctctcaatgtttctcttcctgcagatctttctgctgagaacccaccaatttctttatggccgtctttacctagtacgcagaattcttcaagccacatgatttctcattttcctggaggccctccttcgcacttacacttctatgacatgaat

SEQ ID NO: 14941 - DNA, 392 bp, Gossypium hirsutum
  Clone ID: GOSHI-09MAY01-C13995_1
tctcaatgcaattttatcatcatgaacgcccaaaagcatccattagaagcagtgcagagtgagcaacatgatcgccgcctggagagtgccccttctttagcactcactacaaacatatggctgcggctgacttatgacatcaaatctgaacaaagtggaatgcttgtatgcatatccattattgcaaaaatgggtccccacttcacaatctgctgcagagctgaaagtcctgcttcgatggatgatttgcctctttggatgcttgcagaccgtgtggaaactttccctaccaaggattcctgctctatcattctctggtcagaaggctgcccaggttgaagaacctgacccacaagtggatgtcacacttggtgcttcgggccctgcattaa

SEQ ID NO: 14942 - DNA, 623 bp, Gossypium hirsutum
  Clone ID: GOSHI-09MAY01-C13985_1
gctgttgttctggtagtctttcttcaaaccttgtcctatttcatcattttgtttgagttattttgtttgcttgtcttcaggtgttgagttttacaatgggattcagcagagagtaacggcaagtgcatcttcaaattgaatagacctaaatagcactgacagatatctctacaaaaacaatgggatttttccctaacttcgatttctcgaaaaaaataaattaatcctattttacataaaatgatctcttaagatctttgtttatttgctattacatctacattaaccttcatgttgaagatgaaaaactgctacttactgaagttagattttactcgtgcttcgtggtacgatcctatctaccacatcaaggggtggttacttattaatgtttgctaaaccccagtccagttcatttgttcccatcctaagggagggtcttcgagatcgttaaccatctcccaaatatcatcttcatttgcttctggttgatcagagtggtctcctccagagtgtgaagtacttgaggagcttgttacctccatcatagaggctctctctgaaaatgttgcagtcctattctcatgaagttgtgttgctcgtgatacagtttcgagtgggcg

SEQ ID NO: 14943 - DNA, 836 bp, Gossypium hirsutum
  Clone ID: GOSHI-09MAY01-C13905_3
cgtccgttccaatttgaaagtcaccttgcacctcatccctcttgttttgatttaataaatactgttatgtaaccaataaattattagcttgttcttgttgcaacgcatggacatacatattaattgcacaattgtcttctttgttgctcaagtggatattctgagctcattcttgaagtcataacctgacttttgagtttgaatgcagcttgtcccatgtgctgcactggccctatttattcacccctctacttctcataatctagtgaaccggattttctgggcattctgtgtatatctagaagctgtttcagttctaccccagctgcgagtgatgcaaaataccaagattgttgagcctttcacagctcattatgtatttgcactgggtgttgcaaggttcctcagctgtgctcactgggttctccaggttttagacagtcgaggacacttgctggtagccctgggttatggattgtggccctccatggttcttattttcggaaattgtccaaactttcattttagcagacttctgttactattatattaagagtgtctttggagggcagcttgttcttcgtcttccctccggagtagtataagtgaagattctgttttgctttggttgatgagcttgtttgccggaaaaagcattattcggttaaaaatgtgactaggcatcccagttcaaattctggtttttgctcttgacatgtttcttatgactggaaattagcggattgtttgtaaatttcggggtgcagaaactttgggtggatatatattgaaaggcatttggtagatggattatttagcccgccaatgctaacgga

SEQ ID NO: 14944 - DNA, 1241 bp, Gossypium hirsutum
  Clone ID: GOSHI-09MAY01-C13905_1
cttattttataatattcccagaggttgcgaagttaggcgacttaatttcaaataaaaatccacccgaatcacttatcgttttctcaaatcccaatcaaaacgatagaggtcggagattcgaggaaagacaatccaaataaaaatatttttccctattaaacaaaaagcttaaatcaaaccccaaaatctagaatcccacatcctctaaatccccaaaacgggaaaaaaagaataaagaagacatgaggacacagaagaggccgatccatgcggtttcgatgtgggtgagacgacagccgccgaaggtgaaggcttttttggcggtggtatcggggatggcggcattggttcttctccgagtcattgtacatgaccacgacaacctcttcgtcgccgccgaggctgtccattctatcggaatctctgtcctcatctataagctcaccaaggagaagacttgtgctggactatcactcaaatcccaagaactaacagctatctttttagctgttaggctgtactgtagctttgtcatggaatatgacatacacaccttacttgatttagccacattggctacaacattgtgggttatttatatgatccgtttcaaactaaagtccagctacatggaagacaaggacaactttgctatatattatgttgcttgtcccttgtgctgcacttgccctatttattcacccctctacttctcataatcttgtgaaccggattttctgggcgttctgtgtatatctggaagctgtttcagttctaccccagctgcgagtgatgcaaaataccaagattgtcgagcctttcacggctcattatgtatttgcattgggtgttgcaaggttcctcagctgtgctcactgggttctccaggttttagacagccgaggccgcttgctggtagccctgggttatggattgtggccttctatggttcttatatcggaaattgttcaaactttcattttagcagacttctgttacttttatatcaagagcttgttctccgtctaccctctggggtggtctaagtgaagatgctattttgctgtggtcgacgagcttgctgccgaaagaaaacatagcttggttactaatgtgactaggtgttcttgtttaatttctggtttttgctctcagcacatttcttgtgactgcaattagtggattgtttgtaaatttcgggatgcagaaactttgggtggatatttatagggaagcatttc

SEQ ID NO: 14945 - DNA, 597 bp, Gossypium hirsutum
  Clone ID: LIB3825-017-Q1-K6-C1
caaatttgccctccttcatcttctccttcatctgcgtcaaactctctacacaatttctgccctcaaactctcttgccatatttcagatattctccttcatcttctcccacagatctgtaactttctctccttctgttcccatatttcaggtaatttttaattcagattcagatttcttgcccgtcaaataaaaatccacccaaatcacttttattttttccctattaaacaaaaagctcaaatcaaaccccaaaatccagaatcctacatcctctaaatccccaaaacgggaaaaaagaataaagaagacataaggacacaggagaggccgatccatgcggtgtcgatgtgggtgagacgacagccgccgaaggtgaagacttttttggcggtggtatcggggatggcagcattggttcttctccgagtcattgtaaatgaccacgacaacctctttgtcgccgccgaggctgtccattctatcggaatctctgtcctcatctataagctcaccaaagagaagacttgtgctggttgtcccttgtgcagtactagctctgtgtattcatccaacaactttccataatctattgaacc

SEQ ID NO: 14946 - DNA, 245 bp, Gossypium hirsutum
  Clone ID: LIB3189-018-P1-K1-H6
aaattttcccacgctttctggctttctcgagaacaaagaaaaaaaacatgagggtacagcagaggccgatccgcgcgctgtcgatgtgggtgagacgacagccgccgaaggtgaaggcttttttgggggtagtatcggggatggcagcgcttgttttttttcgattcatcgtacacgaccatgacaatttctttgatgcctgccaggctgtccactccattggaatctttgtccttatttataag

SEQ ID NO: 14947 - DNA, 420 bp, Gossypium hirsutum
  Clone ID: GOSHI-09MAY01-C13925_5
aatgactacactcactgggaaatgtatgctattggtggaagtgcaaaccccaccatcaacagccagggtaacagatatgcagctccaacaaacccatttgcaaaggaggttaccaagagagtagatacagctgaagggcagtggaagagctggaattggaggtccgaaggagacttgttactgaacggtgcctacttcacaccatctggagctggagcctcagccagctatgccagggcctcaagcttgggagccaagtcctcttccatggttggagccatgacttccaatgctggtgctcttccttgccgcagaggcaagcaatgctagtattatccatcttttccccaatcaattaaattggctgaaaatcagcctttttacaatctggttgattttccccctctttccatgattctt

SEQ ID NO: 14948 - DNA, 619 bp, Gossypium hirsutum
  Clone ID: GOSHI-09MAY01-C13925_3
cccacgcgtccgcccacgcgtccgcccacgcttccgtcaacgcgtccgggtgaatgtccatatggttaatggggcatgtataaccatccagtttgttaccaatgtgatcatccatggtcttcatattcatgactgtaagcctactggcaatgctatggtgagaagctcaccgtctcactttgggtggaggacaatggctgatggcgatgcaatctccatcttcggttcaagccacatttgggttgatcacaattctctctctaattgtgctgatggtcttgttgatgctgtcatgggctcaactgcccctcccgtccccaacaaccacatgacccaccactttgtggtgatgttgctagggcacagtggctcctacacaagggacaagcaggtgcaagtgaccattgcctacaaccatttcggagagggacttatccagagaatgccaaggtgtaggcatggatatttccatgtggtgaacaatgactacactcactggtgaaatgtatgctattggtggaagtgctaaccccacctctcttctgtttttctattctttatttgattatttcattatatctattatgaattatgatgtatttctatttgttttatttta

SEQ ID NO: 14949 - DNA, 1059 bp, Gossypium hirsutum
  Clone ID: GOSHI-09MAY01-C13925_2
cccacgcgtccgcccacgccccctctcacattttccttttgctttttgttgtctgtttagataagagagagaaaccagggggaaagctcttaagtgctgaagaagcatcgaaagtggcaatggcggttcctatgcaatgggctttctcttctttagctcttctctttttgtttcgtgttggaggatcaattgccaccaacaccacctccaggttaggagacattgatccattgaacgagcatgcggtggctgacccagaggctgttgctctggaggtcgagaccatcattgacttgaatattcgcaatttgaccgaaaggaggaagttggggttcttttcatgtggaaccggtaaccccattgacgattgctggcgttgtgaccctaactggcataagcgccgaaagagactagctgagtgtggcattggctttggaaggaatgcagttggtgggcgtgatgggcgcttctatgtcgtcactgaccacactgatgatgaccctgttaaccccaaacctgggacattgcgtcatgctgtgatccaggaaccccctctctggatcgtgttcaagagggacatggttattaagttgaagcaggagttgctggtcaacagctttaagaccattgatggtcgtggggtgaatgtccatattgctaatggggcatgtatcacaattcaatacgttaccaatgtcattgttcatggtcttcatattcatgactgtaagcccactggcaatgccatggttagaagctcacccactcactttgggtggaggacaatggctgatggtgatgcaatctctatctttgggtcagccacgtttgggttgatcacaattctctttctaatggctgatgtcttgttgatgctgcatgggctcactgccttaccatcccaacaataccttacccaccaataggtgagttgctggtcacatgactttaacagggacaaccatgcagtgacattgctcaacttttgagaggactatctagaatgcagggtggctggttttctgtggacaagactactcctggaagttccttttgagg

SEQ ID NO: 14950 - DNA, 1798 bp, Gossypium hirsutum
  Clone ID: GOSHI-09MAY01-C13925_1
cccacgcgtccgcatctactactttttcgtttctcagctttttcctgtttattttcttttcttgttttgagttgcctgtttgggtagagagaaagtttttgagtaccgaagaagctgagaaagttacaatggcggtttcaaacaactgggctttcgcttctttagctcttctgtttttgcttcttgttgccgcaatggctactgtacggaccggcaacgtttccagcaatgtggaaacagagaaggtgcagagctcaaagaactccacaatggcagctaggtcagaggaggtcgagccacttaacgagcatgccgttcctgacccagaggctgtagcagccgaggtggaatccatcattgacatgaacattcgcaatgtgactgaaagaagaaagttggggttcttcacatgcggaacaggtaaccccattgatgattgctggcgttgtgacccaaactggcagaagaaccggaagagacttgctgattgtggcattggttttggaaggaatgcaattggtgggcgtgatggacgtttctatgttgtcactgaccctaatgatgatgaccctgttaaccccaaacctggtaccttgcgtcatgctgtgatccaggaccagcctctttggattgtgttcaagaaggacatggttattcggttgaagcaggagctgattatgaacagttttaagaccattgatggtcgtggggtgaatgtccatattgctaatggggcatgtatcaccatccagtatgttaccaatgtgatcatccatggtcttcatattcatgactgtaagcctactggcaatgctatggtgagaagctcaccgtctcactttgggtggaggacaatggctgatggcgatgcaatctccatcttcggttcaagccacatttgggttgatcacaattctctctctaattgtgctgatggtcttgttgatgctgtcatgggctcaactgccattaccatctccaacaaccacatgacccaccacaatgaggtgatgttgctagggcacagtgactcctacacaagggacaagcaaatgcaagtgaccattgcctacaaccatttcggagagggacttatccagagaatgccaaggtgtaggcatggatatttccatgtggtgaacaatgactacactcactgggaaatgtatgctattggtggaagtgcaaaccccaccatcaacagccagggtaacagatatgcagctccaacaaacccatttgcaaaggaggttaccaagagagtggatacagctgaaagccactggaagagctggaattggaggtcggaaggagacttgctgctgaatggtgcatatttcactccatctggagccggagcctcagccagctatgccagggcctcaagcttgggagccaagtcctcctccatggttggatccatgacttccaatgctggagctctaccctgccgaagaggcaggcaatgctagatagtatatcccccacccaatcaattaaaatggttgaaaagccagccatttactagctctttcccatcattcaaaaagcactaccaatcaaatatccatattctctgtagtctatcctccccatctaccagcatcatcgcatattctgattttaaagtgtaaatttattcatttttccacattgtcattattttgtcctacccactctactcattttgtttgtcaatctgtgcaacctgcttcaactctagtgaactaaaaaatccatcttaagagcaggtacgcaagcgttgtccttggttcccttttcctttatttgccccctt

SEQ ID NO: 14951 - DNA, 541 bp, Gossypium hirsutum
  Clone ID: uC-gsflnu33B081d07b1
tttattacgcgttcgaagaaacagagcaattgaaagagacctaaggcttgacagccgagcactcttacatggttggagccatgacttccaatgctggtgctcttccttgccgcagaggcaagcaatgctagtattatccatcttttccccaatcaattaaattggctgaaaatcagcctttttacaatctgtttgattttccccctctttccatgattcttaaaaaaaaaaattaaagcactgcctaccccaatcaaatatccatttatactatatatcccctgtcttgttttccaccccatctacctgcttcatcacatattttgacgacgtgtacaaatttacacattgtcattatatttggcttgtcctgccagctcactcatcctgtttgtcaatttgttttattttctcaacctcggcctgcttcagcttcaactcaagtaacccaaaccaaaaggaaatatatgtgttaggagcaagttgcggagcgttgtcccctttttccccaccttatgagtattttactgggtcatttgtc

SEQ ID NO: 14952 - DNA, 518 bp, Gossypium hirsutum
  Clone ID: GOSHI-09MAY01-C13855_1
cctactcgtccgcatcaaagcaaatagagaagaatttagaaagcaaagatgattagactcgtcaatgtttctatttgtgttctctttatttctgttactggcatcctagtaaaagccgataatgcaccttctccatcgccaaagacaactcctgtgtctccggcgaaagctcccaccacttcttcaagtcctccaatcacatcgccttctaaatctccttcatcatcacctccgtcggcaactcctgcgagttccccatcgataacatcgcccccgcctgcaacaactcccactgctatgcccacaccttctcaatctcctactgccactccgcctgcttcttctagccccccggctcaatccccagcgactccatcaccagcggcaagttctcctccgtccatgactccagtcggtgctccacctgttgcggaaggtccggttggaactcccgagtcttctgccaatattccttctagttcagcgacgccagcggagagtcctgcgatttcccatcg

SEQ ID NO: 14953 - DNA, 823 bp, Gossypium hirsutum
  Clone ID: GOSHI-09MAY01-C13845_2
atttgcttgagcatcaatatcacatgatgatttattctgtgcctccaaaggttcctatggctccaatacaaaatgggatccatcccatgcccgttaacaatttaccaatgggataccctgtgctgcaacaacctcaatttccagctgcagggcaacctcatatggactccatgggtatatcaagctgtcatgttgtcaacggagtccctgctaccagcaactttcaacctatgcggatgaattctgggaatgacatggtgatggacagcaatgccagtgatgtaatacctgcagttccaccaaccactgccatgtcatccatgtcagagatgcctttgagctgtacatcagtagcatccagtgggagttttcccttcagtgcatcagatatgtcagggatgggagtagacacatcggcacttgattcagccttcacaacacgcgtgccaagttcagtaggattgcagctgggacaggataatgaaactgggaattctagagattcctttagaccacttgatcagattcagtggaatttcagtctcacagatctgactgcagacttgtcaaacttgggagatctaggtgcccttgggaattaccctggttctccttttcttccctctgattcagaaattttgcttgattcttcggagcaagagaatatagtggaggaattttttgttgattctgtccccgaacagccgtgcttctcgtctgatgaagataaatcctagataaaggttagtaacgttccttcttgaaattgttaggaataagaacaagatttgacatctatttagtatgcatttttaaattttga

SEQ ID NO: 14954 - DNA, 1039 bp, Gossypium hirsutum
  Clone ID: GOSHI-09MAY01-C13845_1
cggccgcgtgggcggcgcgtgggcggacgcgtgggcggacgcgtgggcggacgcgtgggcggacgcgtgggtggccccaatacaaaatggaattcatcccatgcctgtcaacaacttaccgatgggataccctatgctacaacctccaattccggctgcagggcaacctcatcttgactctatgggcatatcaagctgtcatgtggtcaatggagtccctgcacccagcaattttcaacctatgcgtatgaattctgaaaaagacaatgccactgatgtaacacctgcagctcctccaaccactaccgtgtcatctatgtcagagatgcccgtgagccctacatcagtggcatcaagtgggaattttcccttcactgcatcagacatgtcagggataggagttgacacttcagcacttgattcagccttcacaacagatgtggcaagttcagtaggattgcagctgggacctgaaaatggagccgggaattctagagattcccttagatcattggatcagattcagtggaatttcagtcttacagatctgacagcagacttgtcaaacttgggagatttaggagcccttgggaactatcctggttctcctttccttgcctctgattcagaaattttgcttgattcttcagagcaagaggatattgtggaggaattttttgttgattccgtacctgaccagccaaactctccatctgaggaagagaaaccatagaccaaggtgagtctttaccttctgatcttaaaattgttaccggtaggatagatttagatcaataagaacaacatttgacatctattcggtaggcatttcgagtctttagcaaatttgaagctttaagctgtataattttatatctcgatcgatcgaatagcagtcagcaaacctcaaaccagccatgttccccggttgtaatttttcacgccattgttgaaacgagactttatttaattattattgtccgagactataattaaaaatactgggcgtaccttgtttaagatcaaaacgttcctttct

SEQ ID NO: 14955 - DNA, 645 bp, Gossypium hirsutum
  Clone ID: GOSHI-09MAY01-C13865_1
gctctacagcacaacaaaaaaggcaactagacttgagaaagaaaaacagtctcaaaatgcagcagaagtcaggcttcctgatcctcttgctctccctcattttccttcctctcatcttctccgacgccagaaaggaggctcccctcggaggatggagtccgatcaaagacaccaaggacccacacgtgataaagatcgcggaattcgccgtcgaggagtataacaagcagtcaaatgggagtttaaagttggttaaggtggtgaaaggcgagacccaggtggtggccgggacaaactaccggttgattttgcaggcgaaggaaggggccgtcgataacacgtatcaggctgtggtgtgggagaagttgtggctgaatctcaggaatctcacctcctttaacctcgtcaagggttagattggattataatgtaatttatgttcatatatgttatccttgtccttttctattacttaacagagtggagaataaaatcttaataatacataattatgtgagtttgggatgtttcggcttcaaaaaaaaaaaataaaaaaattatataaataaccgcccatattaacttgaaccggtgaaggtaaaaagacgtaaaaaattttaatataaattgtaaataaataaattg

SEQ ID NO: 14956 - DNA, 855 bp, Gossypium hirsutum
  Clone ID: GOSHI-09MAY01-C13595_6
atttcaccacaaaacgcaaagaaggcaatccattttccccgagtaaaacgccaaagaaaacaaaaaatatgagagaaatcttgcacatccaaggtggtcaatgtgggaaccagatcggggctaagttctgggaagtcatatgcgacgagcatggagttgacaacactggaaaatataacggtgactccgaccttcagttggagcgcatcaatgtctactacaatgaagccagtggtggaaggtatgtcccacgcgctgttctcatggatctggagccgggcactatggattccgtcagatctggtccttttggacaaatctttcgccccgataacttcgtcttcggacagtctggtgctggcaacaactgggccaagggtcattacacggagggagctgagctcattgattctgttcttgacgttgtcaggaaagaggcggagaattgtgattgcttattgtgattgtttgcagagttctgatgggatccggtgcattagtgctggtatgatcggacccatcaattcttgcgaattctatttatataaaggctacccctgatcgcgcttgagcctcgaatttgaatttaaatacgaccaaataacgtttcgagtgatttattccgtaaataactaattagttaaacgatgagatataaaaaaatagaaaaaaaatttaatgagatataaaattggaagggtgcaacacgaggacttcccaggaggtcacccatcctagtactactctcgcccaagcacgcttaactgcggagttctgatgggatcccgtgcattaagactggtatgatcgcacccatcaatttctacgcattctatttttataaggctacccctg

SEQ ID NO: 14957 - DNA, 793 bp, Gossypium hirsutum
  Clone ID: GOSHI-09MAY01-C13595_5
aggacttcccaaggggtcacccatcctagtactactctcgcccaagcacgcttaactgcggagttctgatgggatccggtgcattagtgctggtatgatcgcacccgtcaactcttgcgcaatctattcatataaaggctgccccttatcgcacttgcgcctcgaactttaatgcaaattcgaccaaatatcggtccaaattatttatttcgcaaaacgcaaataacgaatgaggtacaccacgtggagaaaacgcaactaaaaaaaacattgtatcaaataaaacgggaggggtgcaacacgaggaccgcccgcgaggtcacccatcctagtactactctcgcccaagcgcgcttaactgcggagttctgatggggtccggtgcattagtgctggtatgatcgcacccatcaattcttgcgcattctatttatataaaggctacccctgatcgcgcctgagcctcgaatttgaatttaaatacctccaaataacgttgcgagtgatttattccgtaaataactaattagttatacgacgcgatataaaaaaaatagaaaaaaaatgtaatgagatataaaattggatgggtgcaacacgaggacttcccaggaggtcacccatcccagtactactgtcgcccaagcacgctttactgcggagttctgatgggatccggtgcattagtgctggtatgatcgcacccatcaattcttgcgcattctatttatttaaaggctacccctgatcgcgcttgagcctcgaatttgaatttaaatacaaccaaataacg

SEQ ID NO: 14958 - DNA, 575 bp, Gossypium hirsutum
  Clone ID: GOSHI-09MAY01-C13595_4
ccctcgtttccgcccacgcgtccgcccacgcgtccgcccacgcgttcgaccacgcgtccggttctgatgggatccggtgcatctccgctggtatgatcgcacccatcaattcttgcgcattctatttatataaaggctacccctgatcgcgcttgagcctcgaatttgaatttaaatacgtccaaataacgtttcgagtgatttattccgtaaataactaattagttatacgatgagatataaaaaaaatagaaaaaaaaattaatgagatataaaattggaggggtgcaacacgaggacttcccaggaggtcacccatcctagtactactctcgcccaagcacgcttaactgcggagttctgatgggatccggtgcattagtgctggtatgatcgcacccatcaattcttgcgcattctatttatataaaggctacccctgatcgcgcttgagcctcgaatttgaatttaaatacgaccaaataacgtttcgagtgatttattccgtaaataactaattagttatacgatgagatataaaaaaaatagaaaaaaatattaatgagatataaaat

SEQ ID NO: 14959 - DNA, 1903 bp, Gossypium hirsutum
  Clone ID: GOSHI-09MAY01-C13595_2
cccacgcgttcccccccccctcttcactcccgtcctcacatttcccaacaaaaagcgaaggaaatcattttcatcaatcccccctatcacccttctttatctttcccacggaaacgaagagcaaatcagaaaaccttgtgaagaaaaaatgagggaaatcttgcatatccaaggaggtcaatgtgggaaccagatcggggctaagttctgggaagtcatatgcgatgagcatggaatcgacaacactggaaagtataacggtgactccgatctccagctggagcgtatcaatgtctactacaatgaagccagtggcggtaggtatgtccctcgcgctgttctcatggatcttgaacctggcactatggactccgtcagatccggtcttttcggccagatctttcgtcccgataactttgtcttcggtcagtctggtgctggcaacaactgggccaagggtcattataccgagggagctgagctcattgattctgttctagacgttgtcagaaaagaggcggagaattgtgattgtttgcagggttttcaagtttgtcattcattgggtggcggtactggatctggaatgggaacccttcttatttccaagatcagggaggagtatccagatcgcatgatgttgacattttcggtcttcccttcgcccaaggtatccgatacagttgttgaaccatacaatgctaccctttctgttcatcagcttgttgagaatgctgatgaatgcatggtgttggacaatgaagctctttatgacatctgcttccgcaccctcaagctcgccactcctacctttggtgaccttaaccacctcatctctgctaccatgagtggtgttacatgctgtctacggttccctggacagctgaactctgatctccgcaagctggccgttaaccttatccccttccctcgattacacttcttcatggttggatttgctcccttgacatccagaggatcacagcagtaccgggcactgactgtgcctgaactgactcagcagatgtgggatgctaaaaacatgatgtgtgctgctgacccacgccatggccgttacctaactgcctgtgcaatgttccgtggtaagatgagcactaaggaggttgacgagcaaatgattaatgtccagaataagaattcgtcatactttgttgagtggatccctaacaatgtgaagtctagcgtgtgtgacatcccacctaagggtctgaaaatggcatctactttcatcggaaattcaacttcgattcaggagatgtttaggagggttagtgagcagtttacagctatgttcaggaggaaagctttcttgcactggtacactggtgagggaatggatgagatggagtttacggaagctgagagcaacatgaatgatttagttgcagagtaccagcaataccaggatgcaactgctgacgacgagtatgaggaaggagaggaagaagaagaggaagctgcttgagtgaataacgatatgtatatgtttcttgggtgatgtttatgttgtcaaatcaagattgacataacataatatgtatggttgttgtgggttcttcttccttgtatctttgatggattgatttcttgtgtctctgcatttgcttccaaagcttatgatgaatgataagatttgaaggacatattttttgtcaaatactatttctttttatatttaagaaataaaacttatttttttggaaaaaaaaaaaaaaaaaaaaaaaaaaaaaaaaaaaaaaaaaaaaaaaaaaaaaaaaaaactaaaaaataaaaataaacataacataaaggaaaaataatataaaaaaataaaaattacaaaagttatataaaatagaaaattaaaaacatgggggggccctttttaggggttccaacttta

SEQ ID NO: 14960 - DNA, 981 bp, Gossypium hirsutum
  Clone ID: GOSHI-09MAY01-C13595_1
ggcaagtccaaaccctaaagtgcgcctctcccaatttcttcttcactttgaggtttgagcagatcggatggttcgttcatccaaggtggtcaatgtgggaaccagatcagggctaatttctgggaagtcatatgcgacgagcatggagttgacaacactggaaaatataacggtgactccgaccttcagttggagcgcatcaatgtctactacaatgaagccagtggtggaaggtatgtcccacgcgctgttctcatggatctggagccgggcactatggattccgtcagatctggtccttttggacaaacctttcgccccgataacttcgtcttcggacagtctggtgctggcaacaactgggccaagggttattacacggagggagctgagctcattgattctgttcttgatgttgtcaggaaagtggctgagaattgtgattgcttacaagcatatagttgatttcaattttccaaggttagcagattttggagctgcaatatctggtgcaaacaaattgcaatgccagcaagttattgaagagttggatgtgcataagcggttgcaacttacactggaattagtaaaaaaggaaatggaaatcagcaagattcaggtctaaatcatttgaagcatacttttaggactcaattgcgaaagcaatcgaggaaaagataagtggtgaacaacgctgatacttgttgaatgagcagcttaaggcaataaagaaggaacttgggttagaaacagacgacaaaacatcaccttaagtaacatatactcgtacagttcaatcaattcagcgctgcaagaaaacagaagcgaatgtataataaccgtgtattgtagtactgatttttgttatatattaacgaaagaatatatgttcttttacttttattgccatattataggtgaatgttgaaatttattactataatttattttacttttattgttaatgaaaagtaatacttc

SEQ ID NO: 14961 - DNA, 605 bp, Gossypium hirsutum
  unsure (1)..(605): unsure at all n locations
  Clone ID: LIB3825-001-Q1-N6-F6
aaaaaacatatattcttttcattaatatataacaaaaatcagtactacaatacacggttattatacattcgcttccgttttcttgcagcgctgaattgattgaactgtacaagtatatgttacttacagggaacaaaaggggggtncnttttnatttncncaatgtcgnccttatttttagtctaataaaaaaaaatccccttcctttttcgttgtggtgaaacaacaaaagaaaactttacttatcactccatgtgtgaccaaagaaaaatacatccacggcttcttgcaaatcctcagtagcatctgccctctttgagtaactgaaagtgcagttttgtcgtctgtttctaacccaagttccttctttattgccttgagctgctcattcaacgagtatcagcgttgttcaccacttatcttttcctcgattgcttttgcaattgagtcctaaaagtatgcttcaaatgatttagacctgaatcttgctgatttccatttccttttttactaattccagtgtaagttgcaaccgcttatgcacatccaactcttcaataacttgctggcattgcaatttgtttgcaccagatattgcagctcca

SEQ ID NO: 14962 - DNA, 490 bp, Gossypium hirsutum
  unsure (1)..(490): unsure at all n locations
  Clone ID: uC-gsronu33B126e10b1
ttgcaatccattttccccgagtaaaacgccagagaaaacaaaaaatatgagagaaatcttgcacatccaaggtggtcaatgtgggaaccagatcggggctaagttctgggaagtcatatgcgacgagcatggagttgacaacactggaaaatataacggtgactccgaccttcagttggagcgcatcaatgtctactacaatgaagccagtggtggaaggtatgtcccacgcgctgttctcatggatctggagccgggcactatggattccgtcagatctggtccttttggacaaatctttcgccccgataacttcgtcttcggacagtctggtgctggcaacaactgggccaagggtcattacacggagggagctgagctcattgattctgttcttgatgttgtcaggaaagaggctgagaattgtgattgctcngcaggatttcaagtttgccattctttgggtggtggtactggatctggaatggga

SEQ ID NO: 14963 - DNA, 368 bp, Gossypium hirsutum
  Clone ID: LIB3197-019-Q1-M1-G7
cccacgcgtccgccctaaagtgcgcctctcccaatttcttcttcactttgaagtttgagcagatcggatggttcgttcatccaaggtggtcaatgtgggaactagatcagggctaatttctgggaagtcatatgcgacgagcatgaagttgacaacactggaaaatataacggtgactccgaccttcagttggagtgcatcaatgtctactacaatgaagccagtggtggaaggtatgtcccacgcgctgttctcatggatctggagcgctattctcatggatctggagccgggcactatggattccgtcagatctggtccttttggacaaacctttctccccgataacttcatcttcggacagtctg

SEQ ID NO: 14964 - DNA, 334 bp, Gossypium hirsutum
  Clone ID: uC-gsflnu33B068d12b1
taactgactcagcagatgtgggatgctaaaaacatgatgtgtgctgctgacccacgccatgaccgttacctaactgcctgtgccatgttccgtgcgtatgatgagctcattcgaggtgagccttctgaagtaacaatcaaaatagcggattaatcgatttttaattcgcttagattaatcttatggaattaagctccccggggcactgcgatactataactctcggacgtagtgtccaagttgtgaagaggttccgtatgctgtatcgtatgaatcctcttcctgttgctggaactaagcgatcctgtaagggatataatatggaggcaataat

SEQ ID NO: 14965 - DNA, 290 bp, Gossypium hirsutum
  Clone ID: LIB3148-029-Q1-K1-E5
tgctcacttacgctcacgcattcatgtttttcttgtatctatgatggattgattacatcgtgtctctgcatttgcttacaaagcttatgatgaatgataagatttgaaggtcatgttatttgtcaactactatttctttttatatttaagaaataaaacttaatttttttgaaaaaaaaaaaaaaataaaactaacttttaacaatatttgattaaatcaataaataaatttacttactatatatttaaattacttaataaattatatttttaaatttcttttattttta

SEQ ID NO: 14966 - DNA, 421 bp, Gossypium hirsutum
  Clone ID: GOSHI-09MAY01-C13585_1
atcgcttacgcgtccgtccacgcgtccgcccacgcgtgcgttggtgatgcacctctttgatacccaccgtacacaaatggaaagctcagggtactaaaggctcttgtgggtggcagcatattaggcattatccgtgctttgatgggatggtccaaggcttaaaagagaaaacctatgtggctatctctgttgtcactttttattatttttttcatgttatgcaatttactgatttcaatatattttcaagcatgtaagtcagtttaaagaccacggttgtatagttttcttttttcgcttaaaatcaatgtgatgttcataatgtaggtatcatgatttgagaatcattttataggaatgaattggcactgatgcagctcaacattgtaaaaatgtgttgatttgttatgttttaatcttg

SEQ ID NO: 14967 - DNA, 691 bp, Gossypium hirsutum
  Clone ID: GOSHI-09MAY01-C13555_1
cccacgcgtccgcggacgcgtggcttttagtaccgatttagaagtttccattcccgattaaagccatcatcggcccgaagagctttacagcccaaaatcttatttccgggaaatccaccgataatcgacgaactctctctcgatctcacctaagattcgccgataatcgaaattttaaaaataacccgacaacaacaaagatgaagaaagaagacacagtgaaactcattagcgctgaaggaatggaattcgttatcgacaaagaagctgctatggtttctcaaacaatccgtaacatgcttacttctccaggtggtttcgctgaggcggagcatggggaagtgactttcccggagataagtgctgtgattcttgagaagatttgtcagtatttttattggtctcttcaatattccaggggcaaagagactgagttccacattgaacccgaactgactctggagctgatgatggctgcgaattatctccatacttagccaattttcgtattttaggtctgttttcttgcccgagaggagtatgtatgtcgcgtgctttttagcttctctgctccaatgcatagtggtatatttatgattatcttatgtgattgttttgacttagaacatagacttatatgtaggtaaatgaatgcacttattgtgagacttatgattgattctaatacacc

SEQ ID NO: 14968 - DNA, 517 bp, Gossypium hirsutum
  Clone ID: LIB3828-034-Q6-K6-D3
cccacattttctgtcgggccaaagagcgttacagaccaaaatattatttccaggaaaatccaccggtaatctacgaactctctctcgaggtgacctaagattcgcccatattcccaattttaaaaatcacccgacaacaacaaagattaagaaagaagcacaccttatctcattagcggggggggatagaatccttcatagacaaacaaactattatcttttctcaaacaatccgtaacatgcttacttctccaggtggtttcgctgatgcggagcatggggaaatcactttccccgaaattaacgctgtcattcttgataagatttttcagtcttttcattaggctcttaaatattccaaaagtaaagatactgacttccacatcgaacccgaactgactctggagctgatgatagctgcgaattatcttcatacttatccaattacttccttttcatattatagaaaatactacaagtctgttctcttgcccgaaagcaatatgtatgtcgcgtg

SEQ ID NO: 14969 - DNA, 393 bp, Gossypium hirsutum
  Clone ID: LIB3189-012-P1-K1-F10
ggaattcgttatcgacaaagaagctgctatggtttctcaaacaatccgtaacatgcttacttcgtgcaggtggtttcgctgaggcggagcatggggaagtgactttcccggagataagtgctgtgattcttgagaagatttgtcagtatttttattggtctcttcaatattccaggggcaaagagactgagttccacattgaacccgaactgactctggagctgatgatggctgcgaattatctccatacttagccaattttcgtattttaggtctgttattctgcccgagaggagtatgtatgtaagcgtgcttttttgcttttattcttcaatgctaattgtgttgtttttataatattctttttatgattggtttttacttattagtatt

SEQ ID NO: 14970 - DNA, 565 bp, Gossypium hirsutum
  Clone ID: GOSHI-09MAY01-C13545_1
gcagactcgagcaggagagcttcgaaaaaccagccaaatcctcttcctgtacttgcaatccttgctaaggatgttggtgagctagcagtccatgagacgaaggttttcagtccaatactgaagggttggcatcctttggcagctggtatagccgtggccacccttcattcttgttatgcaaatgagataaaacagttcatctcaggtattatggagttaactcctgatgctgttcaagtcctgagagctgcagataaacttgagaaagatcttgttcagattgcagttgaggatgcagtagacagtgaagatggtgggaaggccataatccgtgagatgcctccttatgaggctgaaactgcaattgccaatctggcttaagggttggttcttgacaagtttttatcagtcttaagttatgtgatgcctggaatttgctacttatgttgttttatcctaatacttatttattagggttttcttcgttttatatttgtatttttgtttattattgattagttcttttatttcttatctatactttatacttttttgtcttatttac

SEQ ID NO: 14971 - DNA, 995 bp, Gossypium hirsutum
  Clone ID: GOSHI-09MAY01-C13525_1
gaaagttaaatggtttttcacagacaccataaggaagtagacaagcatgatgatgagttcaaataacatggagtgttccgctaaagcgaaggaagaagaagaaatcaccaaaataagtcttatgagaagcatggttgaaacacaagatccttcttccaaggaagtagatgatatgacaatgagaagatttctaagaggtcgtgatttagatgtggagaaagcatcgagcatgttcctcaagtacctgaaatggagacgaagctttgttcctaatggtttcatttctccatcagaactcacacatgaaatccaacagaacaagatgtttttgcaaggttccgacaagaaaggacgacctatttctgttcttcttgctgcaagacatttccagcataatggcggcctcgacgaattcaagcgttttatagtctacattttcgacaaaatactgaccaggatgcttccaggacaagataaatttattgtgatcggagatcttgaaggttggggatatgcaaattgcgacatccgggcatacctttctgctctctctctcctgcaggattactacccagaaagattaggaaagatgttcgtagtgcatgcaccctaccttttcatggcagcctggaaagttgttcaccctttcatcgacgtcaaaaccaggaagaagatagtattcgttgagaacaaaagcctgaaatcaacattgcttgaagaaatagacgagagccaactgccagaaatatatggtggcacgctaccattgattcccattcaagacagctaaaaagcacacccatgaatatatatatatatatatatataagttgtttgttaaagaagctttaagggaatagattttatagtctattttcaagatttgttgctattttccttaataatgttatgttcaaaatttaaatttctatctttccttgaagtacaatatattttattattacatcaaatacttgttagttggaatattaaaa

SEQ ID NO: 14972 - DNA, 429 bp, Gossypium hirsutum
  Clone ID: LIB3083-053-Q1-L1-A10
gctaaagcaaaggaagaagaagaaatcaccaaaataagtcttatgagaagcatggttgaaacacaagatccttcttccaaggcaaaatcatgatttcttctgttatgtcaaaattatgattgaaaaattgaaccagaagtccgacaagttgaactttcgcttcttgtaggaagtagatgatatgacaatgagaagatttctaagaggtcgtgatttagatgtggagaaagcatcgagcatgttcctcaagtacctgaaatggagacgaagctttgttcctaatggtttcatttctccatcagaactcacacatgaaatccaacagaacaagatgtttttgcaaggttccgacaagaaaggacgacctatttctgttcttcttgctgcaagacatttccagcataatggcggcctcgacgaattcaagcg

SEQ ID NO: 14973 - DNA, 628 bp, Gossypium hirsutum
  Clone ID: GOSHI-09MAY01-C13425_1
ctgtgattgattccttttcttatgatctccctccatttcccttttttctttttgcctctttctatctcagatcgccactctcaatcttcctttgtgttttttttttggctttcttaatttcagtgaatgattatttttgttgactttctcttttgaagaagatttggagaactcaatcatctcttgttagccaaaagaatatatcttgatataataacaagaagaaggggaggaagagattgtggagttgtcggctgattgtttgtgaactgggaagttaaagataaagagactgatagatatatcaacaaagagatgggatctttcaagggtcatgctttgccagggacactgtttctgatggtgggtgtatggcacatatggagttccgtggttcggtttgtgtcaaaccccaagtcttttgaggtcagagtatggagcccagttcctgggtttaatgggaagttgaagcacttggtgactatatgttgtagccttcggcgctttcattgatctgtggattgggcctttgtattcaacccacctcaagttttttgtggatggagtcttgaatccatcacacttgaacgattttgagcattcagggatgcttctaatgtttttcctc

SEQ ID NO: 14974 - DNA, 671 bp, Gossypium hirsutum
  Clone ID: GOSHI-09MAY01-C13715_1
gccagcggggtgagagatcaaaggtaaaaaatgatcaggaacctgatcaaatgcaagcggcgcctgatcgaaaagaagctgcaaagataactgaaggatcaactccaaatgatttacccggcagcaaggccatagatgcaatagtgtcggcaacagcggtttggatttgatggctgaagttcagagtgtttctatttccagtcaaaacagcgaatccagtgaaagttgtgcacccgacaatttgaatttcactactgcgtcgaacaagaaaagtcccgaaatttgaagcggcagcccctgaagccaaattggatatgcttcttaattctttcaatgagactaaacttctcgatacttccaacttaagttccgaaaaaccctcgagcatcggttcactcaaagcttccaatttagacagtttgctggatgatttattacaagaaacatcgacaacagtaaaccgagggatagattcatcaaagactggcgcaggtaattcaacttcccaaaatttgctcgatgatttattacaaaaaacatcatcgacaattggtaatgccaaacttggttcggataacaatgttcgatcttcttcttcatctttccaatctgtttcgaagtcaaaaatttggatgatttttgattcatggctaagatactatctgatgact

SEQ ID NO: 14975 - DNA, 1198 bp, Gossypium hirsutum
  Clone ID: GOSHI-09MAY01-C13195_2
tatttctacccccgctccggaagcagacatgggaaaaaccgagcaaaattcagttcttttaatcccaattttcttctttttattaacaatatcattgcctgtctctgtttatgccaagaaaccagtggcgattccctcgaaaagaagacgttcctcatattaaatgtcaagtttgtgagaagatagcatcacagttggttcaacaagttcaatcgaaacaaacccagatctctcccaagaagatctcagaatatcaaatcattgagattgcggagaatgtttgcaatttgaagaaagaagaagctgattggattttgaagattgatatagttgaacaaggggataaattagagctagtggaacaaaatgctgaagggatttgcaatacagagtgtaagacaattgagagaacttgtcaagaggttatggggtattctgatactgatgttgctgaatatatatacacgtcgaaacctgatgttgagtcattgacgaattatctgtgtaaagacttaactaaggcatgcaaaaccaagcctcccccactaccaaaggataggactccgggagaaccttttgtaccgaaaccaactaaagaggctgaaatggaaaagatgttacgatccatggagggtatgccaggagcacccaacatgcaaatgtattcaagggaggagctaatgaacatgaagaatttcggtggagatgccgacgatgatgaagatgaagacgaggaccaatttccatcgaatttgggaaaagtgttgagagacaaagaaagtaaacaaaccgattggaaacaaaagatcatcaaaggtgtaaaagatgcaggtgaaacattgaagagacatgcaactaaggtgtcttttagggtacaaaaatggtggaaaggatttaaagctgctcaatcaaagtccggtaagacagaactttaagacaccaccgaaatcgtgagttcaaggaacacgagttgttagcaggttctgttttcgtgttttcttccattgcattaatatgttcggaagaatttgattagtagaaagtcgaggtcgaggaaggtttacgagtgtctttccctgtattttgggaagttttgatgatttcatttcatccattagaactctatgtttaactagtgtcaccaagtagcaaaacttatttttttgctgattataaatacacaatctgttggaattct

SEQ ID NO: 14976 - DNA, 756 bp, Gossypium hirsutum
  Clone ID: GOSHI-09MAY01-C13195_1
aagagatctttttataagaactcttccaaggattatttcgttattattatttctacaatctaaagagacagagcaatgggaaaaacagagcaaaattcagttcttttagtcccaattttcttctttttattgacaatatcattgcctgtctctgtttatgccaagaaaccagtggcgattcctcgaaaagaagacattccttatattaaatgtcaagtttgtgagaagatagcatcacagttggttcaacaagttcaatcgaaacaaacccagatctctcccaagaagatctcagaatatcaaatcattgagattgcggagaatgtttgcaatttgaagaaagaagaagctgattggattttgaagattgatatagttgaacaaggggataaattagagctagtggaacaagatgctgatcggatctgtaatatctatttgttcatcctccacataacttgtcttgaggttcttggggtatctgatcctgacgtcctcgaatacttgttccccctccgcaatcttcaagctttatttcatggatcacttctccgtggttcccgacttcgttctttggtggctctatctctgtctcctcccttttggtgcggatctgactctccgtggaatgtctgcgcttgctgttcctggtctttcgggcggttgctggagcgttagcttttgcctcctttttctggttctttcccctgttgcgtttgcgtcatcttgtcgtcgcgcgtgcgcttgtttcctctt

SEQ ID NO: 14977 - DNA, 616 bp, Gossypium hirsutum
  Clone ID: GOSHI-09MAY01-C13155_1
gagatcatatttatcgccatggcccaccccccccccaaaaaaaaaaactatgtctcctctaaagcaacaataagatatgtctgaagcaaagctgcgttctcatgttccaaaatttggtgactgggacaatggtgatctaccatatacaacctactttgaaaatgctcgcaaagagaaagctggcataaggatgaaccctaatgaccctgaggagaatcctgaggccctcatgtatacgaggggaggcccggaaagcaactacgatggccggtccgtgccggccacggccgataaacaccatcagaatgccgctaataaagatggttcttcttatgatcatcaaaagagcgcaagaaggcaacggaacacagcactggaatccgaaaacaacaccggatcggaccgttcgattctgcattcgagtcatcgacgtcgaaactcgggtcaaaagaatagtcggcctgggggaagtgccttctctgcatctgtctcagacaatcacaaagaactgggaatcatccacttgatggtaataaaggaacaacatcagttcccaaatttggggaatgggatgaaacagatcccacatccggagaaaggtttacataatatttac

SEQ ID NO: 14978 - DNA, 811 bp, Gossypium hirsutum
  Clone ID: GOSHI-09MAY01-C13065_1
tcttttgttgtgaagaaaaaaatggttggtgtgtttaggttagtgagggggtatccgggaccaagtggctttggttcagcctccaccgcccaagaggttaccgaagggattgatggaaccaacttgactgctctagttaccggaggagcaagtggaattgggttggaaacttctagagtattggctcttcgtggagtccacgtcatcatcggtgcaaggaacatgaaagccgcgaatgaagcaaagaacaaaattgttagagagaacacaagagcccgtatagatgttctggagctggatctttgctctactagttcaatcagatcatttgccgacaatttcattgctcttcatcttcctcttaatatcttaataaacaatgctggcatcatgttttgtccctttcagctttctcaagatggaatagaggtgcagtttgcaactaatcatataggacatttcctcttaacaaaccttctactggacacaatgaagaacacagttaaagcaactgggatccaaggaaggattgtcaacttatcatcaatagctcaccactactgttataataaagggatccgatttcataagatcaatcacaaacaaggatacagtgagaaaagagcatatgggcagtccaaattagcaaatatattgcatgccaatgaactctctcgtcggttgcaggaggagggtgtgaacatcacagttaattcggttcacccgggattgattatgacgcctctgtttagacactccgctgctctgatgaaacctttgaagttctccagtttctttctctggaagaacg

SEQ ID NO: 14979 - DNA, 372 bp, Gossypium hirsutum
  Clone ID: GOSHI-09MAY01-C13005_1
cggacgcgtgggttcatttccaagctctaaccctgcgttcaatggaaatacaagcccctcatcccatcaccaaatcttcagaccctgagaaacatgatgccaccagcggcggaaaccacgacgtcgaagacgacgagatctcccctatcgaacaagtccggctaaccgtaaccaacaccgatgacccgacgttgcctgtatggaccttccgaatgtggttcttaggcttgttctcatgcgcccttctctcttttctcaaccaattcttctcttacagaacagagcctctcattataacccaaatcacagtccaagtttccacacttcccattggccatttcatggcttctgtcttacccaaaacccagttcg

SEQ ID NO: 14980 - DNA, 375 bp, Gossypium hirsutum
  Clone ID: GOSHI-09MAY01-C13025_1
aatccataaacactttgcccccaattaccatagaagaggtgtttagacacattggaccactttattcagggtgtggaaataataatacactattttgtctcctttcagcactgtttttcaactatccaattattcagctttacttgagctcacacccaaagaagataacttgcttcttccctacagtgaggaatgaaataaagctaaagctatgaagatcgtttgtaaagattgttgttttatggagagaccagttagggttcttgggttcttgtttttgttactgcaaatcgaaaggtcttcatcagctttcaattatttgattggccttggaacctatgacataactggacctgctgctgatgttaatatgat

SEQ ID NO: 14981 - DNA, 477 bp, Gossypium hirsutum
  Clone ID: GOSHI-09MAY01-C13335_1
aaacagaacaaaaaagcaaagaaaagatgctcccgctcccactaaagttggtacgacaagccattacacatcaccctctccttctctcccaaactactcaccaccgtcgccgccgcagtcgccgtcacgatcaccaccaccgtgatcttgatgaagaagaagatgatgatagtgaaaatgatgcttgcaattccaaacccagctcttacaatttttatcatcattcctcaaaaccaacgaaacccaaatccaaaaccccatttcttttttttcttcctactagagaactcatcggtgatacatacaggttggccaacatagctagagaaatgggtatggatttgtaccctactccttccctttctcacatcattttctctttctcttcttcccctccttctccttcctcttcttcctctatttcttctgcttcttcttcatctgcttcttcttctgctttgctctatcttcttcttt

SEQ ID NO: 14982 - DNA, 652 bp, Gossypium hirsutum
  Clone ID: GOSHI-09MAY01-C13285_1
tacctgatgttaagacaagatctctgaaaggataaacataatgctttccacaaagcccatgaatcaaattcaggcgagctgtcacattcttcggacttaaggattggatctatcagaaatagaaaggcatgatgagatttcaacagtagagatcgaagctagtaatgtagtctctggtattcaagaacatgctgagaatgctgctggtgagccagaacagaaacatcatgaggagtcatctgaaaagccaaacctaaaacttaaaggtaaaaaggcaaaatcccatgactcaagttccagttccagctccagctcgagttccagtgattctgaatgaaaaaacaacaataagaaaggaaaatattccctgccgcccccagttttattctaaaaatggttctttttcccctttcctttacaagaaacgaatttttaggtttcctagtttggttatcatcatgttttgttgattgattgattgagttattaaagaatgagttatggtttgatttgttttttttttggttaagccaaagcaatctgaagtgtaaaattgattttgatacttgaaagatttgtgtaaattattgtattttgtttgtaaaaatgaagaattgttgaattctaatatatatacagttgggcaatggat

SEQ ID NO: 14983 - DNA, 312 bp, Gossypium hirsutum
  Clone ID: LIB3189-007-P1-K1-F8
cttaaaggtaaaaaggcaaaatcccatgactcaagttccagttccagctccagctcgagtgccagtgattctgaatgaaaaaacgacaaaaagaaagaaaaatatagtttggcatttccagttttattctaaaaatggttctttttcccctttcctttacaagaaacgaatttttaggtttcctagtttggttatcatcatgttttgttgattgattgattgagttattaaagaatgagttatgggttgatttggtatatcttttattggtagagccaatgctatttgttgagtataatttctttttttttc

SEQ ID NO: 14984 - DNA, 713 bp, Gossypium hirsutum
  Clone ID: GOSHI-09MAY01-C13255_3
gcaaattcagcagtaaacagcattggcccactcgggcttccctctagacctgttagtttccctctagtcttcaccctgtcaagtatttagctaagtatccatacaggggcaagccatatgttctagctatgctatgtatggtctctgcaaatatgggccaacttgcagattcgatcacccatacatgggatgcccttataattatggtctaagtgtccctttatccgtgttggatacgtctctcttaccatatcagagaatgtcaccaacagcccatttgtctgaagctcctctgccgtcaaagctctctgatttggcatggaacactgactctgtgagcaagaaacatcagaactcggagattaaaaattcggatgatccacctcctcaacaggttacgtcaccacattctttgcagggttcttcgaaaacctcacatgatgattgaaactgatttaacatgtcatttttgttaatctcttttaacttgctatccttttgttcaaattcgaaacctttgaacgagactttcatgatgtgtacctcctgcacccctttcacctgtgatccagctgagtcgatataggttgttggaatatttgctatgagcaaaatgctgggaggcaggaaggcaatttttcttttcttatttgtggtgaataaaatgcaggtgaaaagttgtaagatcctatgttttaaattttggcttgctc

SEQ ID NO: 14985 - DNA, 714 bp, Gossypium hirsutum
  Clone ID: GOSHI-09MAY01-C13255_2
aaaaaagagaagaaattgctctctcattgcactcttttgatcgtcgtcgtcgttattatgagttaaaatcgtttttttttaaaaccatacgaatttgccttgatttatgccctgcaattgactcttttttttttctctcttgttgtttgttttttgattgtttcgatcaaaagtaagatacggttttactaactttccgtgccgcatccaccgatgccagataatcggcaaattcagaacaatgttgtttcgaatcaatccgctgatagcattgaagaagcaattttgcgtttgaaaataaatgataataatcaagaggtgggtgtttctaaatcagtctcgtatcctgatcgtcctggtgaaccggattgttcttattatttaaggaccggatcatgtggttatgggagtaactgtcgttttaaccatccggcttatgatgctcaggccggccaatatcgggaagaactccctgaaagagttggacagccagactgtgggtacttcctgaagacaggaacttgcaaatatggatccacatgcaaatatcatcatccaaaggacaggaatggagctggacctgttacatttaacactcttggtctccctatgcgtcaggatgaaaaatcatgcccttatttcatgaggaccggatcatgtaagtttggagttgcatgcaagttccatcatcccagcctgcttcagctgggactg

SEQ ID NO: 14986 - DNA, 1729 bp, Gossypium hirsutum
  Clone ID: GOSHI-09MAY01-C13255_1
ggaccggccctcccgggtcgacccagcgtctcttttttttatttgaaatctgacagcatttgctttgatttattcccttccattattttttttttcgttttgatcaaaaagtaagaaacggttttacaaaattctgtgctgccatcaccgatgcctgataatcggcaagttcagaacaatgctgtgtcgaatgaaaccgctgataaaattgaagaagcaattatgcggttaaaaattaatgataacaatcaagaggtgggtgtttctagatcagcctcgtaccctgatcgtccgggtgaaccggattgttcttattttttaaggactggatcatgtggttatggaagtaattgtcgtttcaatcatccggtttatgatgctcagagtgggcaatacagagaagaactccctgaaagaattggacagccagactgtgggtactttctaaagactggaacttgcaaatatggatccacatgtaaatatcatcatccaaaggacaggaatggggccggacctgttacatttaacattcttggtctccctatgcgtcaggaagaaaaatcatgtccttattacatgcggactggatcatgcaagtttggagttgcgtgcaagttccatcatccccagcctgcatcacctggggctggcttacctgcaaatgctgtgggatcatcgattttgccaccatcaggtgtgccatatgttggtggattacccgcatggtcactaccgaggccaccgcttgtctctggcccgcgtgtacaaacccaaagctacatgcctgttgttgtttctccttctcaaaacacaattcctgctcatggctggagcacctacatgggaaatatgagtcctgtatcttctgctggtattcttggatcgaatttcgcttacaacttgatgaatcccgctgagtcgggttctactgaacagatgcctttgctcatcaacttctgcttctaattttcctgaaagacctgatcaacccgaatgtcggtactatatgaacaccggcacttgcaaatatggatctgattgcaagtaccatcatccgaaggaaaggattgctaactcagccatgagtagtgttggcccactcgggcttccttcaagacctgggcaacctgtatgttctagctacgctatgtatggtctctgcaaacacgggccaacttgcagattcgatcatccttataagggatatccttataattatgctctaagctatcctttatccatgtttgatacgtctctcctaacatatcaaagaatgacaccaccacccaatttatcagaagctcctctaccatcaagggttcctgattgggcacggaacaccgaccctgcgagcaagaaacatcaaaacttggagaccaagagttcagatgattcgtccgaacaggttgtttctccgccacattctttgcagagttcttcaaaaacctcacacgatcagaactagtttaatctgtgtcgttgtatcatcatttttaacatctgttttgttaaatctgaaaccttgtgaggacacacttcattatatgtgtacttcctgcaccccctttcacctgtggtccgacagtgttgtaggcattttttttcctgaatatttgatatatgcaaaatgctggggggacgggaaggctttttttttgtgtgtgggttgtgaataaaatgcaggtgaaaagttgatgtctttctcaaataaaaaaaaaagtaaaac

SEQ ID NO: 14987 - DNA, 451 bp, Gossypium hirsutum
  Clone ID: LIB3825-017-Q1-N6-D10
tcgcgatctagaactacggacgcgtgggtctagatcgcgagcgtccgcccttgtgtttttttgcttttgctctacaaccttgcacctgcattgtattcaccacgaataacaaaagaaaaattgccttcctgcctcccagcattttgctcatagcaaatattcaaacaacctatatcgactcagctggatcacaggtgaaaggggtgcaggaggtacacatcatgaaagtctcattcgaaggtttcgaatttgaacaaaaggagagcaagttaaaagagattaacaaaaatgacatattaaatcagttccaatcatcatgtgaggttttcgaagaaccctgcaaagaatgtggtgacgtaacctgttgaggaggtggatcatccgaatttttaatctccgagttctgatgtttcttgctcacagagacagtgttccatgccaaataagaaag

SEQ ID NO: 14988 - DNA, 490 bp, Gossypium hirsutum
  Clone ID: GOSHI-09MAY01-C13275_1
ctcgtgtcttgtctctcacagtctgttatagtaaaagctagaggcaccaaaaaaaaaaaaaaccatgggaagatccatttcctgtttcaaaatcatcacttgcggcactgattcagctgataaaaacgacgacgttatcgatgttcctcaggacaagagatcgagtgacaaaaagggatggagtttccggaagagatctgaacggcatcgggtgcttagcaacactgtggtacaagaagcttctactggactggaggaaagtcctgaaactgctagttatgttcaacagtctgatgtctccgttgctcctgagaaaacctccaccgttcagtacaccgaagagaaacttcagtcagtggcaccaaaagattacgttgaagaaaaatctcaattattgacccaagaggacttgaaagtgcccgaacctgttgttgctgccacgaatgaggctaaagatgattctaacgtggatgaatccgtttgtgtagtc

SEQ ID NO: 14989 - DNA, 761 bp, Gossypium hirsutum
  Clone ID: GOSHI-09MAY01-C13215_4
acagctttatgaaatgtataaaatgtcgcatagttgcttcatggatgaagtattagtgaaagataggttcatgaaaattttatccttttctcttctttattgaacctaaagcaatgtgcgctttagtttcttttgtctattattggactattgagaaatctgggctaaaggttaagcttcgcgagactgatgtgaacctgtatctaataactgttttgctggccagattttaagaagtttggaactttgttatgtttttgctctattatagcgataatgctttaaagggaaatagatagttaattactaattagtatgcaaatagtttttttctttagtattattgtgaattgtgggacatctatttcttacttaactccaaagcacttgatgaaatgggaaaccgtgtaaatgagctggagcagagcattaatgacctaaaagcagagatgggagtggagggctctccatccccattagccccatcgaaccaaaagtcggatgaagcaaagcaagaggaaggctcagcataaagcttggccccaagggtgtttttaacagttggctataaattatgattgtaatttggtgatatgttgttttatttgagattacttttggccagagaccagggacattactgagtgtcccttttttatccccctttttatttgtatcaagtatttcttctctgtagtgggataaacaattatctgcttttaacaccagtcgaggaaattaacgatatgagtggcttgttc

SEQ ID NO: 14990 - DNA, 512 bp, Gossypium hirsutum
  Clone ID: GOSHI-09MAY01-C13215_3
cccacgcgtccgcccacgcgtccggttctagatcgcgagtctgccgcccttttttttttaaattaggtggctatcaatggacgggcataatttggaagactcaaagcaaagcactgttgatatgtctgttttcgtgcaaaatcttcttcaacaaatgcaatccaggtttcaaacaatgtcggagtccatcatcacaaagatagatgaaatgggagaccgtataaatgagctggagcagagcatcaatgacctaaaagcagagatgggaatggagggctctccatcctctttagccccaccaaagcataagtcatgacggagcgaatcaagaggttgactctgcattaaaactggccagagattgtatttagcggttaatggtgaatgttatatcggtctaatttggggattatcttggttcgagactactttcgtgcaagagagagcagggacattactatgtgtccctgctttccagtttttacatgtaccaagtttttcttctgtgaact

SEQ ID NO: 14991 - DNA, 576 bp, Gossypium hirsutum
  Clone ID: GOSHI-09MAY01-C13215_2
cacgggggagcaccaaagaccatgccaacaatccaagatccactgccaatcaatggacgggcaaaattcggatgactcaaagcaaagcactgctgatatgactgtttttgtgcaaaatcttcttcaacaaatgcaatctaggtttcaaacaatgtctgattccattatcaccaagatcgacgacatgggaaaccgtataaacgaattggagcaaagcatcaatgacctaaaagcagagatgggagtggagggcacttcatctccgttagacccatcgaagcaaaagtcagacgaagcaaagcaagatgaagggtcagcataaaactttgccagaaactaccacttgcagttgattatgattgtattatctggtttgtctttgagacgaactaaatatattgtcaagagagggacattactgagagtcccccctttccttttttagttgtactaagtatgtttcatctgtgaaactgtgagaaaaaaagagttatctcccttgaaacaccaatagatgcactggttgtttggcgaattatagagggaattaatgaaaatatgatattgttgttaagt

SEQ ID NO: 14992 - DNA, 657 bp, Gossypium hirsutum
  Clone ID: GOSHI-09MAY01-C13215_1
gccgattgctatcttttcttcctcaccgccaagtcttaaacgcccaattttgggaagctattttttctttctctgcagaactttcctggtacacattttcgctggacgggcataatttggaagactcaaagcaaagcactgctgatatgtctgttttcgtgcaaaatcttcttcaacaaatgcaatccaggtttcaaacaatgtcggagtccatcatcacaaagaatatccttttcgtatatttatagggggaatttaatgaatttgaagtttttactgtgcaataccgggcctggttgagatgctattaaacctgaaccttaatctgtggcaaccccaaatctaatttgctagatgatttttattttctaagataatttgtcctagcttacattcaatctagaaatacatttcaacattgtctctagttactatgaattgggttcatttttcttcaatgttttagggtgatttcggtgtggattagttttgggtttagatgatttcgatcttagctttcagttgtttttaatttgggttctgaggttttaatgttgttttacagtatctatgaggatttgcatatacaatttacataagtattagggtttatgacattcatcggtaaccccttttttattttttgaagtgccgctt

SEQ ID NO: 14993 - DNA, 331 bp, Gossypium hirsutum
  Clone ID: LIB3146-014-Q1-K1-C3
cttcgggccggttaaccaccgggggaccttccaaggttccactgcaaaacaatggatgggcaaagttcggatgactcaaagcaaagcactgctgatatgactgtttttgtgcaaaatcttcttcaacaaatgcaatctaggtttcaaacaatgtctgattccattatcaccaagaatatcctttcacatgttctttcataagataacaacttcgtcaaatatatcaaatgtcactagtaactggtttgtcgtatttggtaatgaaaaaattgtctagttttcttgttgagcttttaattttattgttacataaataggttggattgtctaa

SEQ ID NO: 14994 - DNA, 302 bp, Gossypium hirsutum
  Clone ID: LIB3189-006-P1-K1-G9
caagttttcgaattgaagctacggtttaacgaaccagcgggaaacaacaatccaagattcactgccaatcaatggacgggcataatttggaagactcaaagcaaagcactgctgatatgtctgttttcgtgcaaaatcttcttcaacatatgcaattcaggtttcaaacaatgttgttttccatcatctctaagagtgttttattggtagaccgtataaatgatctggagcagagcattaatgaccttaaagcagagatgggtttgtagggctcttcatcctctgtagcctcaccaaagcta

SEQ ID NO: 14995 - DNA, 265 bp, Gossypium hirsutum
  Clone ID: uC-gsflnu33B008b10b1
tccacgcgtccgcggacgcgtgggttcaaattgaagctacgggtcgggttagcaacgggggagcaccaaagatccactgcaaaaacaatggatgggcaaaattcggatgactcaaagcaaagcactgctgatatgactgtttttgtgcaaaatcttcttcaacaaatgcaatctaggtttcaaacaatgtctgattccattattaccaagatcgacgacatgggaaaccgtataaacgaattggagcaaagcatcaatgacctaa

SEQ ID NO: 14996 - DNA, 681 bp, Gossypium hirsutum
  Clone ID: GOSHI-09MAY01-C8986_1
tccagtgtctgtacttgaaaccggtagcgcttgctcatctgcaaagccggcacctatcagggctaagctaagtttcctggtgaaacgtgaccgaagcaagcgcaggcgagcatctacctttaacctgcagttcacattgcctttcatatcctccacaggatctacttccttggttggttctgaatcagaatcagaaagccatttaacagagaaatctgccaaaaagagatagaagaaaaagaacctgacatggctttcaggttcctgtgagatcgacaaatcctcctccgaagagactgctgttgttaggaaatgtacgcactgtgaagttacaaaaactccacaatggagagaaggacccaagggtccaaagaccctttgtaatgcatgtggggttcgctacaggtctggccgcctctttccagaataccgtcctgctgcaagtcctacatttgttccatcattgcactccaactctcacaagaaggtgatagagatgaggaaacaatgccaagctgccgaagtcggtaacaccatctacggtgttaattccaccagaaatagaaatgcggtttaaatagcaaccgcattgatgattattagtttagcaagcatttagcagggagcttccttgttctgtgttttactattactattgttattatcattattttccttgtt

SEQ ID NO: 14997 - DNA, 428 bp, Gossypium hirsutum
  Clone ID: GOSHI-09MAY01-C8886_1
ccacgcgtccgttatattcaatttcttcagcttcttccctaaaccacccaaagcttttgatcgcagctttggtggaaaacagacttctttttatatataaaaatgagacgaaactgcaacttggaacttcgtcttcttccttctagttatcccagcgacagtcacgacatgatggaagcaagaattgaaagcccagaaacccagcagcaacagctaacaattttctacaatggaagagtttgcgtatctgatgttacagagcttcaggcaaaagccattctaatattagcaaaccgggaaagagatgaaagaatgaaaagtccgacgggatgtgaaccggtgtcgccgacgttaaaatcccaggtgaatagcccaaacacatcactttccatgaagagatcgcttcaacggttcctccagaaacgaaa

SEQ ID NO: 14998 - DNA, 801 bp, Gossypium hirsutum
  Clone ID: GOSHI-09MAY01-C8846_1
gcaaggagtaggtcaacgacaacaagcgctttcttcttcctctgcctttactcttcgttttatctcactgcttcaacaactcctctcttccccaaagacgccctccccaccaaatctggctaccttcctgtcaaccacgccactggttctgctattttttatgccttctatgaagctcaaacccccacttcccctctctccaaaaccccacttctcatttggctccaaggtggccctggatgctcctccatgattggcaacttgtttgagctcggaccatggcgtgttgtctcttctcacatgaaaaacgctcataatttgactcttgagcgcaatccaggttcttggaaccgcttatttggtcttctttttctcgataatcctattggaacagggtttagcattgcatcgacgccgcaagaaattcccagagaccaactttctgttgccaagcatttgtttgctgctatcactggttttacctcattagatccggtggttaaggatcgtcctatttatattactggtgagagttatgcaggaaagtatgttcctgcaatcgggtactatattttgaaaaaaaatccccagttgccggtttcacgaagagtgaacttcaggggtgtcgctataggtgatgggctaacggatccggtcacccaggtgacaactcatgcagacaatgcttactattgtggtttagtcaacgagaggcaaaagggtgaacttgaggaagcacaaagggaggctgttgagttggttaagatggggaactggagtgaggcatcatatgctagaagc

SEQ ID NO: 14999 - DNA, 660 bp, Gossypium hirsutum
  Clone ID: GOSHI-09MAY01-C8816_1
ccccgcttccgcccacgcgtccgggcggctgccggtttttctcagtttggttctttaaaagaaagaacactttttttttctttttttttgctttgctggtgtttggtggttgatctcttcttttgcttcttcatgttctcattttcatgtctaagcccatagagcatgattacataggtttatcagagcagcagctcccttcaatggagaaaagctctgataaaaaggatggtttacacttgaaagatactgagttgagactcggtttacccgggtccgagtcaccggagagggaggatcatgaccaaaacgtgctttcactgaagagttttgtgtcaggggcaaaaagaggtttttctgacgcactcgatggtggcggtaattgggttttctccggcggcagtggtggaggaactgaagggttgttttctcctagacctgcccgtaaaaataatggaggaaaagatctttctgggtcggattcgggttcggttttgaaagatggagcagctcggaagccatcggtgggtcaagagaagaagcctcaggtagctgctaccagtagccatggaaatgggaatattgctccagcttcaaaggcacaggtagttggatggccaccaattcggtctttccgaaagaatacgatggcttctcacc

SEQ ID NO: 15000 - DNA, 562 bp, Gossypium hirsutum
  Clone ID: GOSHI-09MAY01-C8516_2
tctggaacatgtattatatagtgttctttgaggaccacataccaatcagagtgttcaggaactgctttgatttgggagtgaggttcccattcaaccaaccaatgaagatatactcagcttatggaacgccgatgactgggccacaaggggtggtctcgaaaagaccgactggtccaaagccccattcataaccgcagactgcgttgggtccgcaacatgttcactatttacaactattgcagcgattgggagaggtaccccacaatgtctcccgagtgcaagaaatacagatacgcttgacccacgccccccaccaccgagtccatgttccccccttatattcttcactaccatatgagatccgtcattgtcctttagatttcaattgcttgctggccttcacttatcttccacatcaatttcattatttggtattttactcttaaaacattggttttcgtgataatattatttaaatatagatcacaataacattatcttgtaagtataataagcttggattcgatttcaaataatttcatttcttattattatttattgt

SEQ ID NO: 15001 - DNA, 1318 bp, Gossypium hirsutum
  Clone ID: GOSHI-09MAY01-C8516_1
ttcacgcgtccgcccacgcgtccgccccaaaccaccttgttctccccccttctccgtctttctggcaacatgggttcaccaccactttgggttctgcttctgggtgtgttgtttatggcttccggaacaatcgcagctccccctaagaagcctgtagatgtaccattctccagaaactatatgcctacttgggcttttgatcacattaagtatttcaatggtggctctgagattcagctccaccttgacaaatacactggtactggtttccagtccaaaggatcatacttgttcggacacttcagtatgcaaataaagctagtccctggagattctgctgggactgtcactgccttttatttgtcttctcaaaactcagagcatgatgagatagattttgagttcttgggcaacagaacagggcaaccatacattcttcagaccaatgtgttcactggtggcaaaggagacagagaacaaaggatttacctttggtttgacccaaccaaagaataccactcctactctgtcctctggaacatgtatcagatagtgttctttgtggacgacataccaatcagagtgttcaaaaactgcaaagatttgggagtgaggttcccattcaaccaaccaatgaagatatactccagcttatggaacgccgatgactgggccacaaggggtggtctcgaaaagaccgactggtccaaagccccattcatagccgcatacaagagcttccacatcgacgggtgcgagtcgtcggtggaagccaagttctgcgccacacagggaaagcggtggtgggaccaaaaggcattccaggacctcgacgcctatcagtggcgcagactgcgttgggtccgcaacaagttcactatttacaactattgcagcgatagggtgaggtaccccacaatgtcgcccgagtgcaagagagacagagacgcttgagtcatttccatcaccaccgagtccaagttccccccttatattcttcactaccatatgagatccgtcattgtcctttagatttcaattgcttgttggccttcacttatttccacatcaatttcattatatgtaattttactcctaaaacatttgttttcgtgataatattatttaaacatagattacaatctcttgacaggggacaagagcattatcttgtaagtataagtataagaagcttggattcgatttcaagaaataaaagtctatttaaaaaaaaaaaattttggtgtgtgaaaaaaaaagacgaacaatccgataaaaagacatctgtcaggtgagagtttgcctgctaagatatcat

SEQ ID NO: 15002 - DNA, 444 bp, Gossypium hirsutum
  Clone ID: LIB3145-014-Q1-K1-H11
gtcttctcaaaactcagagcatgatgagatagattttgagttcttgggcaacagaacagggcaaggatacattcttcagaccaatgtgttcactggtggcaaaggagacagagaacaaaggatttacctttggtttgacccaaccaaagaataccactcctactctgtcctctggaacatgtatcagatagtgtgagtgctctttttctttttttaagtatttcaactgaaatgcacttgttatttagtgattctgattaagcttttgaaaaaaaaaataatgggggtgcaggttctttgtggacgacataccaatcagagtgttcaaaaactgcaaagatttgggagtgaggttcccattcaaccaaccaatgaagatatactccagcttatggaacgccgatgactgggccacaaggggtggtctcgaaaagaccgactggt

SEQ ID NO: 15003 - DNA, 358 bp, Gossypium hirsutum
  Clone ID: uC-gsronu33B014a11b1
acaatcaatcaaccgttggagataaggctgaagacgaagaagtccaaccagagaaagaaggaaccgctgctgctcctcgcaagaggaggcgcgacacttaaatctgaggcagagtggcagattagtcgtgctttggggacgacataccaatgagagtgagcagaaactgcaaagatttgggagtgaggtttccattcaaccaaccaatgaagatatactccagcttatggaacgccgatgactgggccacaaggggtggtctcgaaaagaccgactggtccaaagccccattcattgccacatacaagagctttcacatcgacggctgcgagtcgttggtggaagccaagttctgcgc

SEQ ID NO: 15004 - DNA, 190 bp, Gossypium hirsutum
  Clone ID: uC-gsronu33b112a11b1
tttcattatatgtaattttactcctaaaacatttgttttcgtgataatattatttaaacatagattacaatctcttgacaggggacaagagcattatcttgtaagtataagtataagaagcttggattcgatttcaagaaataaaagttattcgtggggcgctggaggcgtcagcagcgaaacggtgtag

SEQ ID NO: 15005 - DNA, 415 bp, Gossypium hirsutum
  Clone ID: GOSHI-09MAY01-C8496_2
cccacgcgtccgcagatatacttcacatttagcaaaagaatttttttttccaacttgggtatttaactttactccatcttcctcctcctccgttcttcctttttaggatctgggttttttccccccaattttttaaggttataaaaaaagaaaatggggagaggtagggttcagttgaagaggattgagaacaagatcaacaggcaagttactttctccaaaaggagagctgggttgttgaagaaagctcatgagatctccatcttgtgtgatgctgaggtcgctttgattgtcttctcccacaaagggaagctctttgaatactccactgattcctgcatggagaagatccttgaacgctatgaaaggtattcttatgctgagagacagcttgttgctactgagcctgaatctc

SEQ ID NO: 15006 - DNA, 446 bp, Gossypium hirsutum
  Clone ID: GOSHI-09MAY01-C8496_1
ccaacttgggtattttaactttactccatcttcctcctcttccttcttccgttttaggatctgggttttttccccccaattttttaaggttataaaaaaagaaattggggagagggagggttcagttgaagaggggggagaacaagatcaacaggcgtgttactttctccaaaaggagagctgggttgttgaagaaagctcatgagatctccatcttgggtgaccgctgaggtccctttggttgtcttctcccacaaagggaagctctttgaatactccactgattcctggtatttccccccttcattctgggtatttttattttttgtaaaaagtattctccaaggttttgagaaacaaagatatagttacttttgttttttggctcttaaactaaaatagatgtttatgaaagtggtttttgaggcactgtctttagcagtttt

SEQ ID NO: 15007 - DNA, 598 bp, Gossypium hirsutum
  Clone ID: GOSHI-09MAY01-C8486_1
ctcaacattaaataaaaagggaagaaattagaacaaaagagagggagagggagagagagaaaggaaaaggataaagaaaccccaatcccccttttgtttacaaaggggaagattttaatgttccaacccaccaacctccatttcttcatcgtaaagtctcctgttatccaattatttacgtccatgtcgcattagcactcgattaccgtgagaaagggtaaaacggggcaacataaataggagagaaagagatggatttgagtttcagaagaggtgaagctaaaggcagtgttgttgcaggctctgtctgggaaactagaatgaagagtgatgaagttaaagatggaattaaggttttcaatgctggcaccattactgaagaaaacagtaatggtgttggtggtactaaaagattgagcttgaagaaaggccaacctgttgtcggcggtgtcgggatgagaaaaacttggaaaaatgagagttttgaagggttagagaagaacccaattcagattgctaaaggcaaagccgaggaacaatgcaaggagttgagtgtgtctgttggtggaattaagtagagaaaccacccaattccggt

SEQ ID NO: 15008 - DNA, 518 bp, Gossypium hirsutum
  Clone ID: GOSHI-09MAY01-C8476_2
cccacgcgtccgcccagtttcatcggcaagaatacgacgccgtatcccactactcggtgcgttttgcgtcctgggtttggggttccccagtctctgctcaatactcccttcttcctcttacctcaagacgagttgtcctcagtctccccattttgttcatatagaaaggtcgaaatttagtacccaatcagcagataagaccgttcaggctgtgaaaatggaggggaatagcaacattgttccaagcatcgtcgtctatgttactgttcctaacagagaagcaggtaggaagttggctggaagcatcgtgaaagagaaacttgcagcttgtgtaaatatagtaccaggtctggagtcggtgtatctatgggagggaaagataaactcagatcctgaggagatgctcataatcaagacaaggcaatccctcttggaagctctaacagagcatgtgaaggcaaatcacgaatatgatgtgcccgaagttattgccttgccaatcactgggggcagccccc

SEQ ID NO: 15009 - DNA, 768 bp, Gossypium hirsutum
  Clone ID: GOSHI-09MAY01-C8476_1
gagcgtcgaaccttgtttcatcggcaacaatacgacgccgtatcccactacttggtgcgttttgcgtgctgggtttggggtttcaattctcccttcttcctcttacctcaaaacgagttgtcctcagtcttcccattttgttcatatagaaaggtcgaaatttagtacccaatcagcagataagaccgttcaggctgtgaaaatggaggggaatagcaacattgttccaagcatcgtcgtctatgttactgttcctaacagagaagcaggtaggaagttggctggaagcatcgtgaaagagaaacttgcagcttgtgtaaatatagtaccaggtctggagtcggtgtatctatgggagggaaagataaactcagatcctgaggagatgctcataatcaagacaaggcagtccctcttggaagctctaacagagcatgtgaaggcaaatcacgaatacgatgtgcccgaagttattgccttgccgatcactgggggcagcccccagtatctagaatggcttaaaaacagtacaagggactgaacttctcggatgtagtatatgacctgccatgaatgtctgaaaacatgtaagtgcccagttatggttgtgttatgaatggcttcatctgactcgaataaaggaagcatgtcatgttcgtaatcggaaagattaaaatctattttcggtgggaaaaagatgtgttggagttggtgtgtttttaagacaaggaatttgctctgataaatgcagcctattatttgttctcc

SEQ ID NO: 15010 - DNA, 877 bp, Gossypium hirsutum
  Clone ID: GOSHI-09MAY01-C8466_1
ctttacccgtcgccttcggcttcgcgatccttttgtctgttttctttagttttctctttttaaggttctcatggtctgtacaattatactatatcaatatacagagcaaagacccaatcgatttgaagatcagctgcttcgaaattcagataattgtttgtgcagctgagattgatacagaaaacatatatggctgcctttgcaactgccgaggcctgcgattcaaacacagcgcttttggcaagcggtgaactgcgtgctctagaaccgattttcaagatatacgggcaacgtcgttcattctcaggacccattgtaacactcaaggtgtttgaggacaatgtcctggtgaggcagcttcttgaaacccggggtgaaggaagagttctagtcatagatggcgggggaagcaaaaggtgtgctttggtcggaggaaacttggcgcagtcggctcaaaacatgggttggtctggtattgtagtgaacgggtgcattcgagatgtggatgagattaatgcatgcgatatcggcgtccgagcattgggatctaatcccttgaaatcaaataaaaaggcaattggtgaaaagcatgccccgatcagcattgccggaaccttaatccgtgatggcgaatggttgtatgccgatagtgacggcattcttatctcgaaaatggaactatctatctaaagcagtagtccttacctttccgagccaataaggggaccgattaagttctcagtaacaggatcgatatcatcccaattgtgagttctttagttggatattgattatgaacatgatgatatttcttgttttttaacatttttcacttcggtacacaattatagtcatattgttgaatgtagagaccatc

SEQ ID NO: 15011 - DNA, 586 bp, Gossypium hirsutum
  unsure (1)..(586): unsure at all n locations
  Clone ID: LIB3829-007-Q6-K6-F5
ttcattgntttttttcagttatcatcgcttatttctttgcaacattttgatattggatgaaaacagcgaatgtttattgtcgaagttaactaagtcattggtttagtggcaaaagatctccgttggttgaaactagatcctggaatcgtcacgacatatgaccgcctgttttattattgatgctttngaaaacaaaatgctttaacatctggagtacttaagtggggtgcattaggggggaattatcggaggagcgactgttaagttttgagacagttattcggtaatatgctctatgaatgcatggcaaagagttcaaaggatatgctgtactgtatgtgatttacttaaagtagttctttatgattcatctttgcctgcttgttttagcctacaaatgaactgaatatgccccgcaggaaaacatatatggctgcctttgcaactgccgaggcctgcgattcaaacacagcgcttttggcaagcggtgaactgcgtgctctagaaccgattttcaagatatacgggcaacgtcgttcattctcaggacccattgtaacactcaaggtgtttgaggacaatgtcc

SEQ ID NO: 15012 - DNA, 401 bp, Gossypium hirsutum
  Clone ID: GOSHI-09MAY01-C8796_1
tccgcctaatgccaaggacctttctaccatttgggtgttctacaaactgagcatgctaaatcgggttgcgatgccttgttaagacaggagttcatggaagggtcttttcttcagacagtggaagagccattgcctgggttgatcacaatcaacggaataaattacacggctaaaactcgcgggacattagcagattatcatcggttactcgttccaggagagagatatgaagctatggctactgtgcctgggtctaaatcaaaggccacacatatttggttggaaaaagacgaagccacaaatgtagactttattcttgatccagaactctcttctgatggaactttacttcgtagtatttgtgattgtggcagaaaaagccggctcctttcaaagggtat

SEQ ID NO: 15013 - DNA, 776 bp, Gossypium hirsutum
  Clone ID: GOSHI-09MAY01-C8746_1
ctcaggttcagcctgttcatgtcccccctccaagcccctagtcttcagctcaataaatggaactaaaagaaagttgaatccaacatgggttttcaagctcttgttaagcttgcattgatatgctttcattctcttgcttggcctctctttgctttaggttatcctctacgtgcttccattcaggcaattgaggctaattccaacactgacaccaagaaattagttacttattggattatcttctcactgatttccttgttcgaacatgctttcatggggatccttcaatggcttccattttggccatatatgaagctaaccattgtctgttggatgatgataccccatttcgatggtgccttttatgtttataatcgatttgttcatccatgtttgtatatggatttgccaactatcattaactggttcaagaagcagcaagacttgtttttgaaggacaatttcttgttgaagtagctgatgactgtgtgaaggcacatggaccaacagaagttcaagagaaacttattgctaatgagccaaaggggacggagactagcatattgcagaaaggcataaaacctgtgcaaataacagagaaatgggaagttgctccgattccgaaaaccgatcccaatgtcattcagacagtgaacaatactactgctacacttccagaaactgtgggagaggtgggtcccgatttacctgagataccttcagataagcaagttcagaaggaatggacttgtgctatgtgtcaagtgacaaccacg

SEQ ID NO: 15014 - DNA, 1397 bp, Gossypium hirsutum
  Clone ID: GOSHI-09MAY01-C8776_1
aaataagagcgatccatgtggtggaaggtatatttatgtgcataaacttcctccaaggtttaacgaggatatgcttaaggagtgtaggagtttgagcctttggactaatatgtgtaaatttactagtaataaagggcttggtcccccacttgagaatgttgaaggggtgtttgagaataccgggtggtatgccacgaatcagtttgcggtggatgtgatattcagtaatcgtatgaagcagtatgagtgcttgaccaatgattcctcgatcgcagccgcaatatttgtaccattttatgctggctttgatattgcaaggtatctttgcccactcgtccgctcaacaagggatgctgcttcgctagatttggttgattggctgatgaagaggcctgagtggggtataatgggagggaaggatcattttctcgtggctggtagaattacctgggatttcaggagattgagtgatgaagaatctgattggggtaataagcttctgtttctacctgctgcaaggaatatgtcaatgcttgttgttgagtcaagcccttggaatgcaaatgattttgggattccatatccaacctacttccatcctgcgaaggatgaggaagtctttgtctggcaagatcggatgcgaaatctggagcggaagtggcttttctcttttgcaggtgcacctcgtcccggtaaccccaagtcgataagggggcagattatcgatcagtgcaggcagtccaaggtgtgcaagttgttggaatgtgattttggggagagcaaatgtcattcaccaagcagcataatgcagatgttccagagctccctcttctgcctacaacctcaaggagactcatacacgcggcgatctgctttcgactcaatgttggctggttgtattcctgtcttcttccatcctggctcggcgtacacacagtacacttggcaccttccgaagaattataccacatattcagtgttcatcccagaggatgatattcgtaaacggaatgttagcatagaggagaggcttagtcaaatttctcctgagcaagtgaagatcatgagagaggcagtcataaatctcattccaaggctaatatatgctgatcctcgctctaaattggagactcttcgagatgctttcgatgttgctgtacatgcggtgatcaataaagtcactaagttgaggaggaacatcatccaaggtcgttccgaatatgataacttcgtggaggagaacagttggaaggcccgcctttttgccgaaggacagcgcgaggtcggagctcacgaatgggatcctttcttctcaaaccaaaggacgagcagagagatcaatctgccgaagctgcgaaaaattcttggaagacgagcagagagatcaatcataaatg

SEQ ID NO: 15015 - DNA, 512 bp, Gossypium hirsutum
  Clone ID: GOSHI-09MAY01-C8726_1
cccacgcgtccgcccacgcgtccgcccacgcgtccgacccccagaacttgtactaacagctactccacgacaagtcggaaatgcacgccaggacagattcacaggtgacaagcctcgccccatcatccccaaccaggtctccgcggcgtccagtttactatgtgcagagcccttcacgtgattctcacgatggagaaaagacaacaacctccttccattccacgccggttatcagccctatggggtcacctccccattcccattcctccatgggccgccactctcgtgagtcttcatccagtcggttttcagggtcgcttaaacctggatcccgcaagatctcgcctaacgacgctccgttaaggggagctcatcggaaggggcataagcagtggaaagaatgtgatgtgatcgaagaagaaggcctccttgaagatgaagtaacgtgagctcggactccctcgaagatgctatgttctagcttttcttgtggcttctttcttctcttctct

SEQ ID NO: 15016 - DNA, 378 bp, Gossypium hirsutum
  Clone ID: LIB3166-030-P1-K1-E12
cctccgtactaacatttactcaaatcaggttggaaaccaccccaagccaaatggggggtgcaggcctggcccaatatcccaaccaggtctccgcggcgtccagtttactatgtgcagagcccttcacgtgattctcacgatggagaaaagacaacaacctccttccattccacgccggttatcagccctatggggtcacctccccattcccattcctccatgggccgccactctcgtgagtcttcatccagttcgttttcagggtcgcttaaacctggatcccgcaagatctcgcctaacgacgctccgttaaggggagctcatcggaaggggcataagcagtggaaagaatgtgatgtgatcgaagaagaaggcctc

SEQ ID NO: 15017 - DNA, 867 bp, Gossypium hirsutum
  Clone ID: GOSHI-09MAY01-C8686_1
ctgcaatttgcgataagttacatgagccggtcagaattgctatagtggggaagtacacaggccttcctgatacctaatctctctatcctgaaggctttgttgcatgcatctgttgctcggggtaagaaacttattgtggattgggttcctgctagtgaccttgaagatatgactgaaatagagaatcttgatgcttacaaggctgcgtggaagttgctcaagagtgcagatggtgttctggttcccggagggtttggtgatagaggggtgcaaggaaaaattcttgcagcaaagcttgcacgggaaaacagaattccctttcttggaatatgtctaggaatgcagattgctgtcattgagtttgcacgatctgttctaggattgaaagaatgcaaatggcacttgagttcgattcctagcacttcgaaatccttgggttattatttatgcccgagggctcaaaaacgcataagggtggtacaatgcgtctggatcaaggaggacatatttccaagtatcggactgcaaatctgtgaaattatatggaaatagaggattcatagatgagagacatatgcacagatatgaggtaaatcctgatatggagcacgccttgaaatgccggctatcttcactgcaaggccaactagttacgcttggagatatgaacaccggtcttctacaacattgtgtaatccttccaatttaatagacagaaaactccgcctgtctagttataggccctttggattaagcgctcaaaagtgtagcctaaaggactgaaatattgccttttaaaaaccaggtgggataccccttaaagtgctatttgatgggatatgtattagtatggtatgtcatattttg

SEQ ID NO: 15018 - DNA, 351 bp, Gossypium hirsutum
  Clone ID: GOSHI-09MAY01-C8656_1
ccacgcgtccggccacaaaaaaagagaaaaacgacttcctccctggaaatcttaaactcctcgtttcaaaagctcttaactataaatattctatttataccgacgaggtgtttaagtaatttgttcaattggtgtatgttcttttagtttcttgttagatttgtttttctgttttggattttaggttaagaagagcaggaattgctttataaatcaatcggaaaagaaacgctaggatggaatctatggatggaaataatgtataagataaggaatttaagatgcgtacccctaagattaacgaggatttgtacagccgcccgctttccggtggcgttatcactgtcaaac

SEQ ID NO: 15019 - DNA, 1126 bp, Gossypium hirsutum
  Clone ID: GOSHI-09MAY01-C8606_3
ggcgaagcaagcgcaagtttttggtttgcaaactctgttttgtataccgtcggcaaatggggtgtggtgagttagggtcaacggaactcatcacgcaaagctcagagataatgaacaaggttcgggttttgtttaatttcaatatcgagatcgaagctggttcttggtgtatgagtaacaacactgctgatcaaggcgaaaatgatccctcttcgctttggattagtgacccacatgctggagtcgagtttaaggaaagcagcaacaccaccaccaccaccaatcatactagcaaccagaatcagcagactcagaagtcaattcagttctgcgacaatcgtagttccagtagtttaaccgagaatccgagttctattcctgctggaaatcatcaccagcagcagcagagtcatccgcaggggcaaagtttatgcttgaatttttccgattatggctttgatgagagtagcagtgtgaggaatgggaattcatcttctcatttgttgaaacctgaatccggagagatattgaattttggtgagagtaagagaagtgggaatgggaatttgttcacaggaaactctccgttcgctgtggagaacaagaagaggtcgcctaattcaagagggagtaacgaagaagctatgctttcgtttacttcaggtgtaattttaccttcatctggtgtggtgaaatcaagtgggggtgccggggattcaatcactctgatcttgaagcttccgttgttaaggaggctgatagtagtcgagtcgtagagcctgaaaagaggcctcgaaaacgggggagaaaaccggctaacggaagagaagagcctctaaatcatgttgaagcagagcgtcaagaagggagaagcttaaccagaagttttacgccctgcgtgcggtggttcctaacgtgtcgaagatggataaagcatcgctcttgggtgatgctatttcatatattaacgagctcaagtcgaagctacaaagtgcagatttggagaaagaggagatgcaaagccattaaaggcattgaagaaaaatttgtcaagtaaagctccaccaccacatgatcaagacctcaagatttcaaatcacagtggctataaattgatagatttggc

SEQ ID NO: 15020 - DNA, 971 bp, Gossypium hirsutum
  Clone ID: GOSHI-09MAY01-C8606_2
gttgaatccaatttaaagaaaacattttcaacaacaacaacaacaacaaccaatagtactattaaccaaaatcaccagactcatatgtcaattcagttctgcgacaatcgtagttccagtagtttaaccgagaatccgagttctattcctgctggaaatcatcaccagcagcagcagagtcatcagcaggggcaaagtttatgcttgaatttttccgattatggctttgatgagagtagcagtgtgaggaatgggaattcatcttctcatttattgaaacctgaatccggagagatattgaattttggtgagagtaagagaagtgggaatgggaatttgttcacagggaactctccgttcgctgtggagaacaagaagaggtcgcctaactcaagagggagcaacggagaagctatgctttcgtttactttacgtgtaattttaccttcatctggtgcggtggaatcaactggggggtgtaggaaaaaagtagttgaaagttttgggttttgctttgttgatttcttttgtttcacattttcctactgaccaaacaagggcaagatctgtttctagcccacagaatctacttgggaatgaacgaattcatgttgacatggaaacaggaagagcctggttgatgctattgaaaagggtattgatctacgcaaacaaatactagaactatataacgattattaccatgcggactgtgagttggtattgtgggaagtctttgatatactcacacttgtgggatatatttctgacatcgacaggtctcaagaagcaaattaagtggagtcttgttgaaactgtaactttgcggtaaagagttaggtgctatcctgaataagtgcactgctgcttttcacgtctagaaacaaatattggtaattttgccaaaggacaccttttttttggtgtgcctttttttgggtatgtgagaatatttggtgtcccctgtgtgg

SEQ ID NO: 15021 - DNA, 482 bp, Gossypium hirsutum
  Clone ID: GOSHI-09MAY01-C8606_1
caaattttcccctaaaatggaggcacgaaagacgattcatctcctttgatgagagtagtagtgtgaggaatgggaattatcttctcatttgttgaaacctgaagccgtggagaacaagaagaggtcgcctaattcaaaagggtgcttcgaagaagctatgctttcgtttacttcaggtgtaatcttaccttcatctggtgtggtgaaatcaagtgggggtgccgggtgattcagatcactctgatcttgaagcttccgttgttaaggaggccgatagtagtcgagtcgttgagcctgaaaagaggcctcggtgaactctgatgtgggcctattctcgtcgaggaacattcgttgcaccttctccttctttcccgtttcgctgctaatttcgcttctttgcccttttttgcttgtaaagttcaccaataccactctgtatttttttccttcgttttcacttgtaattttcttcggcttattaa

SEQ ID NO: 15022 - DNA, 410 bp, Gossypium hirsutum
  Clone ID: uC-gsflnu33B074c06b1
gactagagattcacccgaaatctctgttgatcaagaaaagaaaacattggaatatggaagtgttaaaagcagcttggtgtctgccaaagttagtgacgggactagtagtcttgccaagatcagtgaccgtcttgattatgttgagagtggcaagagggagtaacgaagaagctatgctttcgtttacttcaggtgtaattttaccttcatctggtgtggtgaaatcaagtgggggtgccggggattcagatcactctgatcttgaagcttccgttgttaaggaggccgatagtagtcgagtcgtagagcctgaaaagaggccttgaaaacgggggagaaaacctgctaacggaagaaaagagccttttaatcatggtgaagcagagccgtaaagaagggagaagcttaac

SEQ ID NO: 15023 - DNA, 331 bp, Gossypium hirsutum
  unsure (1)..(331): unsure at all n locations
  Clone ID: LIB3166-003-P1-K1-H5
tgtttaatttcaatatctaaatcaaagcttgttcttgttgtttgatttacatcactacttatcaaggcgaaaactaaccctcttctctttactttattaacccacattcttaaattcttttttaaggaaatactttaaccccaccaccaccacctatcatactaccaaccattatcagcatactcagaagtcaattcagtttctgcgacaatcataattccaatagtttaaccgagaatccgagttctattcctgcttgaaatcatcaccaacagcaacatattcatccgcatgggcaaagtttatgctngaatttttccgattattgctt

SEQ ID NO: 15024 - DNA, 483 bp, Gossypium hirsutum
  Clone ID: GOSHI-09MAY01-C8636_1
gccagtttcaatggcaaagttttgttcctgttttctcctctgctgttttctctggattcatatccccacctgggctcaaagcagacaaccctcctacgccgaacagcaagagaccgacagggtgacgaacttgcctggacagccgccggtgaagttccggcactatgctgggtacgtcaagctccgacctcaagactccaaagccttgttctactggtttttcgaagcccaagatggagtttccgacaagcccctagttctttggcttaatggaggacctggttgctcatcagtggcctacggagcagcacaagaacttggtcctttccttattcgtagcaatggcactcgccttacttttaacaaattctcttggaacaaagttgcaaacatactgtttttggaggcaccagtcggagtggggttttcatacaccaacaattcccaagatttacataaactgggtgatcaagttacagcagc

SEQ ID NO: 15025 - DNA, 485 bp, Gossypium hirsutum
  Clone ID: GOSHI-09MAY01-C8196_1
cccacgcgtccgcttttgcagataaccggctttctttaaacttagttttcttgattgcccgacacaccgttatcccttgttaaatgctctttgcccttttctcctcttctcttattttttctctctgaaaatggaaggagtgaaattggatagatggggttatgaagttaaaacctcttccgattcttgcatatctgtaatcaacgcttactatcaccaggtgctttcctatggaagaaataggaaagtgatcttagaagctcctgttcttgacaaagactgcgttttagccaacattttggccgcccattttctctcttcctctgacccttcaaaggctccttcactcatagaagctgccaacgctggaattgagcaagcctcgtcttatgagaaagccgtttttgaagctgtcaattatttgatttctcagaacagagatgatgatgttgccgtggagttacactctaagctctagagagatt

SEQ ID NO: 15026 - DNA, 721 bp, Gossypium hirsutum
  Clone ID: GOSHI-09MAY01-C8166_1
gatttttacagagagagagggggaagaatggtcaaacattaccggtggcgcggggcaatggttgatattccccccctctctctctctttaaagctctcttcatctctctcccttatttctctctctttttgtctttgaatttgtgttgaaaggttcttttggtcgtagaacttttttgggtttttgtttgtaattcgtttgattaccaaaagaaactgatttttttttcttttttgggttattttgtggatttctgggttttctttctcaagtttgctcgagagataaatggcacaacgttctcgtgtacccaagtttggcaattgggagagtgaaggtaatgttccttacacagcttatttcgataaggcacgtcagggtcgcaatggaggaaagattgtgaacccaaacgatccccaagagagtccggaattacatcaagattacggagctccgactagagctccccctgcttcacgaccaaaaccagaatcggatgaaccaataggacatggacctgcaagaaggggacacgaacgaggaaggagcagggaagaaggtgacctcaggcaatatgctaactctccagcacgtaacgagaatgtcaaccgcagagctgctggagactctacaccttctcgttatggtcgtggagtaagttctggtgaatcccagaaacgttccatgagaacaagtattggatctgaaaacagcatagata

SEQ ID NO: 15027 - DNA, 539 bp, Gossypium hirsutum
  Clone ID: GOSHI-09MAY01-C8106_1
gggccggacccacgcgtccgcccacgcgttcgaaataccaactggaaggatttttttataacgatgctggatgtttaccgggagcttatacatgaaggacttcgcatatggatattcagtggtgacacagatgctgtaatcccaattacatccacccgcgacaggatagatgctctcaagcttgcaactgtgaaaccatggcgtgcctggtatgatgatggccaggtaggaggatggacccaagagtatgaaggactgaagtttgtatcagtgaggggagctggacatgaagtccctttgcatagacccaaacaagctctcgccctcttcaaagctttcttatcaggaacctccatgcctgcgcctgcctctgcctctgcccctgcccatgcccatgcttctcagctactcatctccgactcctgaacttttgggttgatttcatttcatgctttctcaatgtaatatctactttgggggattctaatgttcccgctttcccaaaacattcaataaaattttcaattaagaacaatcat

SEQ ID NO: 15028 - DNA, 470 bp, Gossypium hirsutum
  Clone ID: GOSHI-09MAY01-C8136_1
gaattatcctattactctgcttctgtttttcgccacacgattttctctttttcattttgtggccaacacgatatcattgtcttcacttttctctttaatcccctatcttgtttcagcccaaggatcggagccatgctccttcatttctctcctgcttcttctacttctccaccttccccttcttctttcacctccaattatttcctccacagattatcaatttccagaccaccgtacttggagttcccattaaaacccagaacccatctctttaaacctacctctcctcccgtttcttactcgaccaagaccaagttgttgtatccttctgccaacagggctgaattcaggtcatacgctcttcctggatttgatttcgggagcgttgaatctgtgttggaggcagctggcgttttgactgccatcattgttgttcatgagacgggtcacttcctcgctgcttatctcca

SEQ ID NO: 15029 - DNA, 1101 bp, Gossypium hirsutum
  Clone ID: GOSHI-09MAY01-C8036_1
ctttttccttgttagagaaaacaaagatcttcatttcctttgccactttccctactttttcaacaacaacaaaaaaaagaacccttcctttctcgtagctatggcgtttagaaccttagatatcaacgttatctctgcaaaaggcttgaaaaacgtcaacctcatcgataaaatggacgtttacgccgtcgtttcactcaagggtgattcatcgaagcaaaaattgaagacgctggtgcataaagattgtggcaaaaccccgaattggaattttccggtcaagttcaccgtcgatgaatcattggctaaaaacaataagcttagcatcaagttcaagatcatgtgtgaacgtatattcggtgataaagaacttggtgtagtcaacgttccggtcaaagagcttttggattcgccgggcgatggtgggtcaatgaaattcgttagttttcaggtgaggaaaccgtcggggaaacctgaagggacacttgatttttcttacaagtttggggacaaagtttcggagcccgtcggaaagaataagggtgacgatcatcctcatcatcagcctgttactgcgtatccagcggcgtatgtggcggctggatcgagttctgccgttccgtatggtggtccgggggcttatccaccaccaccacaaggtgctgggtatggataccctcctccgccgccgcatgcagtggcgggttgtggtgggtatccaccacagggaccgcctccgcctgggtatggatatccacatccaccaccggggtatgcgtatcctcctccaccaccaggggcttacgggtaccaaccggtgcaacagccaccgaagaagaatagcaagtttggattgggattgggtgccgggttggttggaggagcgattggtgggatgttgatcggagatatggtgtctgatgcggcggattatgatggcggctttgacggcggctttgattttatgatatttttattatgtattttagtttggggcctttttatggggttttggtattacaaagaaactgataaaagaatgtattttattcccttgttttaatgtaaagcaaaagtataagtgggtttttcaaggttcct

SEQ ID NO: 15030 - DNA, 943 bp, Gossypium hirsutum
  Clone ID: GOSHI-09MAY01-C8356_1
cgttttccccctcactattcttcgtaagaacattcgaacttaccaaacggaaaaacaatgcgactcggttcctgactcagtcatggccctctttattttcttcccctttccaagatgtttcctcgttttccccttttcaaatctgtactcccttcctatttaaaaaaacaataaacaattacatgtttatctcaccttctccttccccatttgacttcttcgacccccctttgttgaaactcgggacttaattgaccaaaatcccaccttccccctcagctgcctccttcaaccttcaaaatctctgtttttcaccctttctcaaaatcccatttttctgatcaagattttcatgtttatgacttgatacaccaatctttttcacccgtattcatataatttctttctgatcctgaaatccccaagatgaacaatctgttctcaggctccttctctcgcttccggagcgaagaggcgtcccctgatcaccatgtaatcgagatgactcagtcttcctccacctctggcggtgttaacctcgacaagttcttcgaagacgtcgagtccatcaaagacgagctcaaagaactcgagaggctaaaccacgacctttcagcgtctcacgagcgaagcaagacgttgcacaatgcgaaagccgtgaaagaattgagagcaaagatggatgctgatgtagccatggccttgaaaaaggccaagctcattaaggttaggttggaagcgcttgaccgctccaacgcctctaaccggagtttacctggctgtggaccgggttcttcttcggacaggacgaggacgtcggttgtgaacgggctgagaaagaagttgaaggattctatggagagttttaatgggttgagggaaaagatctcgtcagagtatagagaaactgttcaaagaagatatttcacgggtacagagaaaa

SEQ ID NO: 15031 - DNA, 407 bp, Gossypium hirsutum
  Clone ID: GOSHI-09MAY01-C8346_1
gcgggtttgaatcctcgtaccgtacgggaatacgatgaagcaataacacgagtgtcattaggttacaagtcagtggatgaatattactcaaattcatgtagttgtcatgtcgtacaacatgtccggatccctttgctttgcgtccaggctgcaaatgatccaattgcgcccattgaggcaactccttactcagatatcaaggacaactcgaactgcatgctgatagtaacaccccagggtggtcatttaggctgggttgccggtgatgacgcaccctttggagctccctggactgataatgtggtgatcgaattccttgaacatctgcaaaagaatgcatctaaacccgaatcatcttgagctatggagatagaaaactctgcggcaggattcagagggcttgcatc

SEQ ID NO: 15032 - DNA, 1078 bp, Gossypium hirsutum
  Clone ID: GOSHI-09MAY01-C8376_1
ggattattgaagttttcttttctttctctttgtttgggaaaaaaatggctggaattgttgtggttttcgatttcgataaaaccattatcgaccgtgacagcgataactgggttgtcgatgaattgggctttaccgatttgttcaaccagcttcttcccaccatgccctggaatactctcatggacacgatgatgaaggagatgcatgcacaaggaacaaccattgatgacattgttgaggttctgaaacgatctccaatccaccctaggatcgtcccagctattaaatcagctcatgctttagggtgtgaactgaggattgtaagtgatgcaaacatgttcttcattgagaccattctggaacatcttggagtgaaggaatgtttctcagagctcaactcaaatcccagctttgttgatgaagaagggaggctgaggatcttcccttatcacgatttcaccaagacttcccatggctgcaatctttgccccccaaatatgtgcaagggggtgatcattgaagggattcaagcaggtttagagggggagaagaaaatcatttacctcggagatggcagtggggattattgcccaagcctaacgcttggagagggtgactatgtgatgccaaggaagaattttccagtatgggaattaatatgcaggaaccctatgctcatcaaggctgacattcatgaatggagtgatggcgaagacctggagcgggttcttctggatatcatcaacatggtatctgttgaacataactctgctccattgttctctgttgactgtaaactgcagaccatttcaacatccaaccatgccctgcctcatgccctgcctgttccacagtagatgtgtgattgctgctcaagttgttcaatgggttttggtttgattgttgggatttacggatttaatcttcccttaccaaaatacattgaaaataagggtctcttaagtttctcatgattccaaagcaatttgattctttggaacatgattgatgaggatgtatttattaaaaaatttacttcacaatatttgaaatatatattaaagaaaatttacttcac

SEQ ID NO: 15033 - DNA, 409 bp, Gossypium hirsutum
  Clone ID: GOSHI-09MAY01-C8316_1
ccggaaacaagtggaacgacacagatccgacccgaatatgttcataggtacgggcacagccgagcacaaccaccctgcgccaacgcatcggaattcactcgctggcagcactcgccagaagcctttcactccacaaacggtcaccgccggtgactcagtcaaaccttcctcatctaaacccgccgacagcttgtctccgacggcctccgtggatgaaggggttgcggttcaaagtccataggtggacagccgagaggatttggttgaagatgaaggggaagatgaatctgggatgtcggacacggcggcgagtgatgatttcttcgagggcttaaaagggctcgctgaaattgtcaccagaaattgctttcccgataactttccggcaaagtttgactttccttggact

SEQ ID NO: 15034 - DNA, 925 bp, Gossypium hirsutum
  Clone ID: GOSHI-09MAY01-C8306_1
cccacgcgtccgccttaggggagttggcactgatagtgattccacttctatacccttcttttctaattatatgagtactgcagggaatgatttttcggttaatccagcaatgacaccttccagttgcattgataaatctggatttttgcagtctcaggaaaatgtgggccaatcaaacccacaaactagaacctttgttaatgtttataaatcagggtccttcgggagatcattggatatttctgcattcagcaactacaatgaacttcgcagtgaactggcacatatgtttggccttgaaggccagttggaggaccctctgagatcaggctggcagcttgtatttgttgaccgggagaatgatgttcttctccttggcgatgacccctggccggagttcgtgaacagtgtctggtgtatcaagatactttccccacaggaagtgcagcaaatgggcaaacgaggcctggagcttctaaactctgtgccagttcagaggctctctaatggcagttgtgatgactatgtgagccggcaggactcgagaaatcttagctctggtatcgcctccgtgggttctttggactactgaatgaaattcatcgggttatgatacctgtttttcttcctgtaatattaattgtgttcttgcaacccctttttaatagtaggtgggaaatgagcctgcctaacttctagctttggaagtttattttttatataaaagctaatagtaatactgtaattataaaagatctttgtcgcctatgttattgaaatatccacactccatatgtattaggatatatcaatatttatgaagcaaacttagctttttccaaacaataaaatatgcataagccagaaataaattttggtttttgctaaaatttatgttttctacgatataattaatattttatta

SEQ ID NO: 15035 - DNA, 411 bp, Gossypium hirsutum
  Clone ID: LIB3120-008-Q1-K1-A10
gttgtattcgagtatgtactaaaattggatacccaacacgatttgatggacctgttttcaggtgaaagagatcgtggtcatcggacacagtgcctgcggtggaatcaaggggctgatgtcattcccgtacgacggaaccacttcaactgatttcatagaagattgggttaaaattggaatgcctgcaaggaagaaggttaatgcaaaaaatcgtggggagcctctggggcttcgatgcaccttttgtgagaaggtaatcatcttaaatttaaaatctctgctattaaataatgctgttaatccagatagggaaataataacaatattaagaggttttaaaaccaagcctgatagtgaaactggtttaattaaataaatcataaaaataaagaaaaagattagaaaatagag

SEQ ID NO: 15036 - DNA, 384 bp, Gossypium hirsutum
  Clone ID: LIB3165-028-P1-K1-C5
tgaaaaacgcgaagagaaccctgctctgtagggtgttcttgccaggggtaaaagcccaacgtgtgtgatagtggcatgctcggactcaagggtgtgcccctctcatgttctaaacatacaaccaggtgaagctttcgtggtccgcaatgtcgccaatatggtgccaccatatgatcagaataagtactctggaaccggatctgctatcgaatacgcagttttgcatctcaaggtgaaagagatcgtggtcatcggacacagtgcctgcggtggaatcaaggggctgatgtcattcccgtacgacggaaccacttcaactgatttcatagaagattgggttaaaattgggatgcctgcaaggaagaaggttaatgcagaaaatcg

SEQ ID NO: 15037 - DNA, 610 bp, Gossypium hirsutum
  Clone ID: GOSHI-09MAY01-C8206_1
acgggcattatcttcaatcggtgaatataaaagggcagaggatgcacatgtgaaatcaatccaacttgaccgaagttttgttgaggcctgggctcatcttacccagttctatcaagatctagcaaactctaaaaaggcttttgattgccttcaacaagttatacaaattgatccaaggtatgctaaagcatatcacttacgtgggttactacttcatgggatgggggagcacaggaaggctattaaggatttatcagtgggatggagcattgaggactcggatattgagtgcttgtacttacgagcttcatgctatcatgctattggagaatatgcagatgcggtcaaggactatgatgctgccctagatgttgaacttgactcgatggaaaagtttgtgcttcaatgtttggccttctatcagaaagagattgctttatatacagcttccaaagtcaacagtgagttttcttggtttgatattgatggagatatagatccactgttcaaggagtactggtgcaaaagatcgcaccccaagaatgtatgtgagaaggttttcagacagcctccattgcgtgattctctgaagaagggaaaagctaaaaac

SEQ ID NO: 15038 - DNA, 999 bp, Gossypium hirsutum
  Clone ID: GOSHI-09MAY01-C9976_1
cacccttccgaaaaaggtatacccagaatattttatttttctcaaagaaaagaaagatgagccgtaggttttcggatcaggtgagagtaacctctgaaaacctgctggagggtcctaatgatgatggctacagttggagaaaatacggccaaaaggatatccttgaagccaaatatccacgcacccgtcccagatgcacctatcgaaacacccaaaactgctgggctacaaagcaagtccagagatcagatgaagatcccaccctctttgaggtcacatacagaggaactcacacatgtgcaaatggcaaccccgcagttccatccccagaaaaacaacataaatcaaactcaaacggccttaataataccaattaccaaccattgcaatcacaagatgccctctcagagtttcgagcaggcctaagagtcaatactgagggcttagacaataaagagatggcacccccattctcttttgcttcaacatcatttgggtgtataaagagcgaaaaccatagcttttcaccttcaggagtacttgattactacaatatcttcggcagcttttcatcgccgttcatgtgtgccgatacaccagaattaaactacttttcagtttcccagatgaacaacttccaaggggtgctcaacacacagcattctaaatctgatctcaccgagttggtttcagccaacacttcggccaccaattctccaattatggacttggatttttcgctcgaccaagtggagttggacccgaatttcccatttgacacaccgggatttttctcctaactcttttccgcaatcgaataagagtaatggtagatgtcaaattcgggttccaataaccaaagtaagttcatggtgagccgtgtgttctgcgaagaactattgtacaatacatgtccctttcaattctatgttggttttgagaaatttcctcagattaaacaaacttaaaaaaaaaaaaaaaaaaaaaagtctcgccgct

SEQ ID NO: 15039 - DNA, 880 bp, Gossypium hirsutum
  Clone ID: GOSHI-09MAY01-C9906_1
cccacgcgtccggtggattttcttcacaatatgttagtatatgaaaccctgacgctttttcatgcagtggggaaattcttgcataacaaaagagacacagaaaatgtagttgcattagaccaaaatgcatttcgagtaggggagaaattctcaagacttccttttaaaatggattatccagaaaagatactctgccaagcacatggtcaatcaagacctattacagattttcttcatgaaaatgttctagattttgtgagcaatgaggcaatggatgatgcatgggctgtggcttcatatcttggtgatgctgatttgcttctcgctacctctcgaaggactttaaatagacatagtgagatagagaatgttctacagtctgctgctgcttcagtcgcagttcgtggagttctctatggaaattttcatccatcaccttcaagatggcatgctattcgcaaaccaaagctttggcagatagagcaatcatcatctcacaatcagaatgagatgctaaggcagaggtttatggaagatggtggatcgtcaagcttttccgaagtatcggttatagctacagagtatagacccgtgttaaaatgggttggttacagaaaagccagagatgttgaaactcatgagtcggaagatgagagcgtaaaaagaatgagtatagatgaagaagaaagtgaaatttctgatgatgatgatattgaagattggtgagagatagatacttaatagctgctctgctcaaggatcaagccttattcaagcagacagccagtagttcattgtaaaataattagttctgcatttttttacttaaaacatatgtgacactttccctctgtaaatatctcttctgttatttcttctt

SEQ ID NO: 15040 - DNA, 331 bp, Gossypium hirsutum
  Clone ID: GOSHI-09MAY01-C9886_4
cacaaatgtccttgaaaaacccaaccaaagcccccaaaaaacgacacttcttgagtatgtgtttttcatattgtaatagctgaaaagcttgcagtaataagttctgtgagaagagaggaaatggatggatttcttgtagtgtcttcgtttgtaatcctagaagctatgaacttgtcaaatagttttaattaaacatataactgaagataaataagtagtatatattaagttcccttttgttctcgttaaggaaattgtatgttctaagcagaatgtaagcctaatatatgtttatatttaaacattgagaaataaataataaatctgagta

SEQ ID NO: 15041 - DNA, 532 bp, Gossypium hirsutum
  Clone ID: GOSHI-09MAY01-C9886_2
gtgagctcttaccaatggctttcaaagctttgtttctgttactattggccacttttgggctggtctcaacaacagttgcttccaatgaagtgggagagaagactgagattaagtatgctgctcctgttccagtgaaggcacctatccctgctccacccgttaagcctcccaccactccggcaccgccgttctaggccccaactccagcacccccaaccaaggcccccactccaccatataaaccaccagctcctgcgccaccaaccaaggctcctactccaccatataagcccccagctcctgcgccaccaaccaaggctcctactccaccatataagcccccagcaccagcaccaccaaccaaggctcctactcccccatataaaccccctactcccgcaccggcaccttcagtcaaggtccctacacccccatataagcccccgacatctgctccatgacccccaaccaaagtaccaactccagcaccagcaccaccaactaaagcaccaacttccccatataaaccccc

SEQ ID NO: 15042 - DNA, 955 bp, Gossypium hirsutum
  Clone ID: GOSHI-09MAY01-C9886_1
caactaaaggccccactccatataaaccccttaccaaggcccccactccaccatataaaccagcaaccaaggctcctactccaccatataaacccccagctcctgcaccaccaaccaaggctcctactccaccatataagcccccagctcctgcaccaccaaccaaggctccaactccaccatttaagcccccagcaccagcaccacccccccaggctcctactcccccatataaaccccctactcccgcaccggcacctccagtcaaggcccctactcccccatatatgcccccacacctgccccaacacccccaaccaaagcaccaactccagcaccagcaccgccaactaaagcaccaactcccccatataagcccccagttcctacacctccagttaagccaccaacaactccagcaccgccttacaagccaccaagtccaccattgccgcctgttaggacaaaaaaggattgcatcccattatgtggacaaaggtgcaaattacactcaaggactaacctatgcttgagagcttgcatgacatgctgtgacagatgcaaatgtgtcccaccagggacatatggcaacagggaaatgtgtggcaaatgttatactgatatgagaacccaccgcaacaagcacaaatgtccttgaaaagcccaaccaaagcccccaaaaaacgacacttcttgagtatgtgtttttcatattgtaatagcaaaaaagcttgcagtaataagttctgtaagaagagaggaaatggatggatttcttgtagtgtcttcgtttgtaatcctagaagctatgaacttgtcaaatagttttaattaacatataattgaagataaataagtagtatatagtaagctcccttttgttctcgttaagaccaaggaagcttgtatgttctaagaaaaacccagaatgtgaccccaatatatgtttatattt

SEQ ID NO: 15043 - DNA, 366 bp, Gossypium hirsutum
  Clone ID: LIB3149-003-P1-K1-F4
gtgagctcttaccaatggctttcaaagctctgctgctgttactattggccacttttctgctggtctcaacaacaggtgcgtgcaatgaagtgggagagaagactgagattaagtatgctgctcctgttccagtgaaggcaccaccaactaaagcaccaactcccccatataagcccccagttcctacaccttcagttaagccaccaacaacttcagcaccgccttacaagccaccaagtccaccattgccgcctgttaggacaaaaaaggattgcatcccattatgtggacaaaggtgcaaattacactcaaggactaacctatgcttgagagcttgcatgacatgctgtgacagatgcaaatgtg

SEQ ID NO: 15044 - DNA, 243 bp, Gossypium hirsutum
  unsure (1)..(243): unsure at all n locations
  Clone ID: LIB3149-056-Q1-K1-C9
gtacaagtctccgccaccaccacctccatcctcacccaagcacccttacaagtacaagtctccaccacctccaccgccatcaccacccaagtacccttacaagcacccgcgaccaaagcaccaactccagcaccagcaccaccaactaaagcaccaactcccccatataagcccncagttcctacacctncagttaagccaccaacaactccagcaccgtcttacaagccaccaagtccacca

SEQ ID NO: 15045 - DNA, 1880 bp, Gossypium hirsutum
  Clone ID: GOSHI-09MAY01-C9856_2
catagatagtatgtttcaaagctctgccactccccgtctctcatctgcttctagctgggccctttaatgtctgccaacaaagcctgacggtgacgttcttctccttctcccctttttctaaaccaaaataaaacccccactaaactctttcaaattcagtcacccaaataaacaacaatggctacttcatcatcttcttcaaagctttcccttttcttcttgttttccttcttgtttgcttccactttagctcgtaattccccttcaccaacaacaaaaatcctcgatgtcttagcttctttgaaacaagctcagcatattctttcctttgatcctcaaatttctaatggtttttccaaaagccaaccccttttcgtcaactcttcttcttcatcgggttctggtttttcgattccacttcattcacggggctctttgcgaaaaacccatcatgttgattataaaaacctggtccgatcccgactcgaccgtgattcagcccgagttaacacgctcaccaccgaggtactactcgctgtcaatggggttcgcaaaactgagctgaagcctgttgttaccgagttagaaccagaggcgctttccacccctgttatttccggtacgagccaagggagtggggagtattttacccgggtcggagtcggtaacccggctaaacaattctacatggttcttgataccgggagtgatgttaattggatccaatgtgaaccatgtacggattgttaccaacaatccgacccgatttttgacccgtcggcgtcgtcgacttacagtccggttacttgcgagtcaaggcaatgttctcttctacgacaatcggcttgtcgtggcgggaaatgtctttaccaggtgtcctacggtgatggatcttacacagtaggggatttcgtgactgaaacggtgtcgttggggaactccggtgacatcaatggcgtggctttgggttgtggccatgataatgaaggcttgtttgttggagcggcggggttgcttggactcgggggtggacccttgtctttaacatcccagattaaagcgacatcgttctcttactgcttagtggatcgtgattcgaccggctcgtcgactttggacttcaactcgggtttaccggccgactcggtgatcgctccattaatgaagagccggaaggtgaatacgttttattacatcggtctcaccgggttcagcgtaggtgggcaagcggtaaacatttccccggggctttttgaaatcaacgagtcaggagagggaggagtgatcatagactgcgggactgccatcactcggctgcaaactcaggcatataacgcgctgcgagacgcgtttgtgaaacagacacaggggttgccgagcgcgagtggggtggcgttgttcgacacgtgttacgacttgtcgtcgaagagcagcgtgaaggtgccaacggtgtcgctccatttcggggaagggaaatcacttgatttaccggctacaaattatttaatccccgtggactcctcgggaacgttttgcttcgcttttgctcctacgtcgtcgtctatgtctattattgggaacgtgcaacaacaagggacacgtgttagcttcgaccttgctaataatagggttggcttatcttctcataaatgttaacgacactaattaatttaataattaccctttttcttattgctgctgtaatatgagtaacgcttttttctgtttgaaaaggatgggtcccactggaataaattataaaaaaagaagaagaaagtattagggttctgttagaaattaaaaaaaaaaaataaaaaaaaaaaaaaaataataaaaaaaaaaaaaaaaataaaataaaataaaaatgtaaaaagaaaacg

SEQ ID NO: 15046 - DNA, 1915 bp, Gossypium hirsutum
  Clone ID: GOSHI-09MAY01-C9856_1
catggctccccccgcccccaaccatttccttctctcctttcccctcttcctttcctttctgttcacttccaccctcgctcgtctctctccccaaacaaccacgactacactcgatgtctcttcctctctttcacaagctcaacatatactttccttcgacccacaatctttgaaagctttcgctcagacccaaacccaaccccttttcttcaactcttctacttctgctgctgttttctctgttccacttcactctaggggctccatacacaaaacccaccacaccgactacaaagcccttgtcctatcccgactagagcgtgactccgcccgtgtcgactctctctctaccaagctcctactcgctctcaatggagtcaagaaatcccagctccgcccactccctacccagatccaagctgaggcactttctacccccattatttccggaacaagccaagggagtggagagtacttttcccgggtcggagtcggtaaaccggctaaacaattctacatggttcttgatactggaagtgatatcaactggattcagtgtgagccctgtaacgaatgttaccaacaatccgaccccatatttaacccatccgggtcctccacttacagcccggttacttgcgaatcaaaacagtgctcttctcttgaagtttccgcttgccgtagcgggaaatgcctataccaagtctcgtacggtgatggatcttacacggtgggtgatttcgttaccgagacagtgtcgtttggaaactccggtaacatgaatggagtggctttgggttgtggccatgataatgaaggcttgtttgttggagcggcgggtttgcttggactcgggggtggacccttgtctttaacatcccagattaaagcgacgtcgttctcttactgcttagtggatcgtgactcagcgggttcgtcgacgttggatttcaactccgggttaccggctgactcagtggttgctccgttaataaggagccgaaaggtggataccttttattacgtcggtctgaccgggcttagcgtaggcggccaacctgttcaactcccgccgggctttttcgagttggaacaatcgggaaacggaggagtgatcgtcgactgcgggacggccataacacggttgcaagcggaggcttacaacgcactccgcgacgcgttcgtgaaattatcgccggacttgccgaccaccggtggggttgcgttgttcgacacgtgctacgacttgtcttcaagaaccagtgttagggttccgtcggtggcgtttcatttcagcggcggaatgtcactggacttgccggcgaaaaattatttgataccggtggactcatcgggaacgtattgcttggcgtttgcccccacgacgtcgtctttgtctataattgggaacgtacaacagcaagggacacgtgtgagcttcgatttggctaataataaggtcgggttctctcctcataaatgttaagacagtaaataaatagcttattggtgataatttactaatttacctatccatttcttctctggtaaaagaaggtgaagaatataccgaagtttgtttgtttgtaatatgtatggtaattttatatttaggttgaatttttaccatttagtcgtacttttttacattggggaaataaattccaaagaatggagaagcagtgtggacgtgggcggttaatgaatttaacccgccttaggattgatttacttgtactgtgaggtaagttcagtgtcattatgtagtaaatttgttgaaatttgaagggcaatgaaaagagtcaagttggatgttgtaattgaaaaaaaaaaaaaaaaaattctgcgctaactaaaataaaaaaaatacaatgaaaatttatttataaaaattagaaaaaagaatatgaatgag

SEQ ID NO: 15047 - DNA, 379 bp, Gossypium hirsutum
  Clone ID: uC-gsronu33B143d03b1
cccatgcgtccgcggacgcgtggggagaatacggggggtttcattgaactcaccgggggcagcacccgccggcaagcggtaaacatacccccgggagctttatgaaatcaacgagacaggagagggaggagtgatcatagactgcgggactgccatcactcggctgcaaactcaggcatataacgcgctgcgagacgcgattgagaaacagacacaggggttgccgagcgcgagcggggaggcgttgggcgacacgtgatacgactaggcgactaagagcaccgtgaaggtgccaacgggtggcgttccatttggggggagggaaaacactcgatataccggctacaaatacttgaagcacccgggactcctcgggaac

SEQ ID NO: 15048 - DNA, 309 bp, Gossypium hirsutum
  Clone ID: LIB3146-042-Q1-K1-G2
tggagaagcagtgtggaagaagcagtgtggtacgtgggcggttaatgaatataacccgcctttggattgatttactttcaccgtgaggtaagttcagtgtcattatgtagtaaagttgttgaaatttgaaggggcaatgaaaagaatcaagtcggatgctgtaattattacaaacgcgtgcatgcatgacacgtggacgtattagatttcagcattgtggtttttgattttacgtgaagggattcgacagcaaatagctaagttggaatcttttcccgataaaaaccttctacacaaattctttcgtgc

SEQ ID NO: 15049 - DNA, 1134 bp, Gossypium hirsutum
  Clone ID: GOSHI-09MAY01-C9806_1
agacatccttccttgcttttaaggaggaagttgcgaaagagtttggcataccattacagtatcaacgtttttggatttgggcaaagcgtcagaaccatacgtatcggccgaatcgaccattgacccctcaggaggaggctcaatctgttggacaattgagggaggtttcaaataaagcccacaatgcagaactaaaactgttcttggaagttgagtgtggccaggatttacatcctattcctccacctgataagacaagggatgatattctacttttcttcaagctctatgacccagagaaaggagaattgcgttatgttggtagactattagtaaaactttctggtaagccaatagactatatagcgaagctaaaccaaatggctggtttttctcctgatgaagaaatagaactttatgaggaaataaagtttgagccttgtgtgatgtgtgaacaccttgataagagatgctcattccggttaagtcagattgaagatggggatatcatatgctttcagaagtcttctccaattcaaagtgaagaagcatgccggtgtccagatgtgccatcatttctggaatatgtgcacaaccgccagattgttcgttttcgatcattgcggaagaccagaagacgatgatttttgtctagagctgtcaaagatacatacatatgtatgatgttgtggaaagagtggcttacaaaattggtctggatgatccatccaaaatcaggctcacatctcacaactgctactctcaacaacctaagcctcaacctattaaataccgaggagtagagcctctttcagaaatgttggtccactataaccagacttctgacattttgtattatgaagttctggatatccctttgccagaattgcaagggctgaaaaacctgaaagttgctttccatcatgctacgaaggaggaagtggtaattcacaatattagattgcccaaacagagcactgttggagacgtgattgatgaacttaagactaaagtggaattgtcacatccaaatgcagagcttagactgcttgaagttttctatcacaagatctataagatctttccacccagtgaaaagattgagaacataaatgaccagtattggacattgcg

SEQ ID NO: 15050 - DNA, 665 bp, Gossypium hirsutum
  Clone ID: GOSHI-09MAY01-C9596_2
atttgctcaccttttctatcagtttagtcttcgttcctacatttgttctttattttctttaccagaaacggagtgctgcatggatttgagagcattgaaatcgagtgtaagagaactgaccatgcaaaacacccaccatgttttcgatgattccttggtcatgaatgttatgaacggcgccgttgctggtgaagatttctccatcgattgcttccttgatttcaataacggagaatttgaagaaggttccgttgaagaagaagaaaaaaactctgtttctacttcatatcaacaacgtgttgcagatgatgatagtaactctaattccaccagttttacactctccgtaccggatgatgaaatagcagggcttgaatgggtgtctcactttgtggacgagtcggtaccggagattcctttgccatgccctgtttttaagcaggaaactgataaccatgcaggaactcggtttgaagcggaaaccggcccggtttttgtgaaaacgccgtctctttcatcgtcggttccaagtaaagcgaggagcaagaggtctaaaccgacagtcccgacatggtcggttgggtcactgcctacttccgagtcatcgtcttcgacagcatcatcttcgagtacttgctcggggtcttccatgacttctacggagt

SEQ ID NO: 15051 - DNA, 612 bp, Gossypium hirsutum
  unsure (1)..(612): unsure at all n locations
  Clone ID: LIB3825-005-Q1-K6-D1
cttgatttcaataacggagnatttgatgaaggttccgttgaagaagaagaaaaaactccgtttctacttcatatcaacaacgtgttgcagatgatggtagtaactctaattccaccagttttacactctccgtaccggtaatttttcattaattagaagtaatttaaaaaaaatccctcctctttttgaattcaaaattttgaattttttgtttttgttttctttaggatgatgaaatagcagggcttgaatgggtgtctcactttgtggacgattcggtaccggagattcctttgccatgccctgtttttaagcaggaaactgataaccatgcaggaactcggtttgaagcggaaaccggcccggtttttgtgaaaacgccgtctctttcatcgtcggttccaagtaaagcgaggagcaagaggtctaaaccgacagtcccgacatggtcggttgggtcactgcctacttccgagtcatcgtcttcgacagcatcatcttcgagtacttgctcggggtcttccatgacttctacggagttggctaatggtttcggagtaccgccgacaaagaaacagaagaaaaaaccggtggcggttcaaggtagtggga

SEQ ID NO: 15052 - DNA, 419 bp, Gossypium hirsutum
  Clone ID: GOSHI-09MAY01-C9526_3
ttattcaaatgggtgcatgtcaacaggaccggatgtcattattaacaatatggcgcatggtgctcctgaggatgaagtacgccatgcgggtgacctgggaaacataattgctaatgctgatggagtggcagaggcaacaattgtggacaagcagatgccactaagtggccccaatgcggttgttggaagagcatttgtggttcatgagcttgaggatgatcttggaaagggtggacatgaacttagtctaaccactgggaatgctggcggaagattggcatgtggtgttgttggcttgactccggtataaatcttatcgatgaaaccagtttggggttgcgctatttgttggttggatttggcagcttcttttatagagccgcatgtgatgttgctttcaatgttgatagcgtgttata

SEQ ID NO: 15053 - DNA, 1057 bp, Gossypium hirsutum
  Clone ID: GOSHI-09MAY01-C9526_2
cggccgcgtcgacacggcagccaccacatccttggctcacgttatccccctcaaaatcctcactttcactccctcacaaactgcaaagctgcggcaatagcagcaatggctgcccatattttcacgacaaccccgtcccacctcgctctctcttttccatcctcaactaacccttcaaacccaccggttcttctctcctcatttcgtggggtctctcttaagctccctcgtcaatccctctcccttgctgctactattcccaagaagcccttttctgtgtttgctgttaccaagaaagctgtcgctgttcttaaaggtaattcggaagttgaaggcgttgtcacgttgacccaggaaaatgatggtcctacaactgtgaatgttcgaattactggtcttactcctgggcctcatggcttccacctacatgagtatggtgacacaacgaatgggtgcatgtctacaggagcacatttcaatcctaacaatatgacacatggtgctcctgaggatgaagtacgccatgcgggtgacctgggaaacataattgctaatgctgatggagtggcagaggcaacaattgtggacaatcagataccactaagtggccccaatgcggttgttggaagagcatttgtggttcatgagcttgaggatgatcttggaaagggtggacatgaacttagtctaaccactggaaatgctggcggaagattggcatgtggtgttgtgggtttgacaccaatgtaaagaaaccagcttggtcttcggccattgttgtttgcttttcctacacattagttacttgcaatgggttgtgagtgttttagaagtttcttattgaatccagttatttggctttaaaaccaactagttccagtttattatgaatagaaaagtggttctggtataccaagggaaatgcatatgcacaggttgctattagcactgatgatgtatacaaaagcggcgaggttgtggaacatgttatacaagagcttgggggaaaggttactcgtaaaccggggccaatggctgggatcaacactaaaaatac

SEQ ID NO: 15054 - DNA, 1235 bp, Gossypium hirsutum
  Clone ID: GOSHI-09MAY01-C9526_1
cagtaactcactcactcactcactcttctaatctctgatactattacagagcttttgaacttgttgaaaataaatggctcaaggctcagctgcagttcccagtactgagttattagaatggccgaagaaagacaaccgccgcctccttcatgctgtctaccgtgtcggtgacctcgaccgtactatcaaattttacaccgaatgttttgggatgaagctgttaagaaaaagagacattcctgaagagaaatattccaatgcctttcttggatttggaccagaagaatctcatttcgtcatggagttaacatataattatggagtaacttcgtatgatatcggaaccggtttcgggcattttgcgattgcgacagccgatgtgtacaaaatggtcgaggacattcgtgcgaaaggcggtaatattactagagagcctggtccggttaaaggcggatcctcggtcattgctttcgtgaaggatcctgatggttatatttttgagctcatccaaagagcttctactcctgagccactctgtcaagtaatgcttcgtgttggggatttagaccgctctgttaagttctatgaaaaggcgttgggaatgaagctagtaaagaaggtggataggcctgaatataagtactccatagctatgatggggtatgcagaagaacatgagactactgttcttgagttgacttacaattacggagtgactgaatataccaagggaaatgcatatgcacaggttgctattagcactgatgatgtatacaaaagcggtgaggttgtggaacatgttatacaagagcttgggggaaaggttactcgtaaaccggggccaattcctgggatcaacactaaaattacctctttcctagatcctgatggctggaaaactgttctggttgacaatgaggactttctgaaggaactcaagtaggcactaaaaaagagtaatgctactatatgaataaatcagtatcttgttgtgtaagcgagcagatatgtctgttaaatatggtgtttgttatgctacctggaccatttcccgcttgtatcagttgtggattctagtatgttgcatagctatcagcaggttatgcttatgattgatgatattcacgatttacatccctgttttttagatgtggtcaataaaaagacgcacttggaccgtcatgccttgataatggtatagtccgcggtagtgatgatgaccctctccatgtatc

SEQ ID NO: 15055 - DNA, 316 bp, Gossypium hirsutum
  Clone ID: uC-gsronu33B108f07b1
cctattcgtccgcccacgcgtccgcccacgcgtgcgcggacgcgtgggtctagtatgttgcatagctatcagcaggttatgcttatgattgatgatattcacgatttacatccctgttttttagatgaggtcaataaaaagatgcacttggaccgtcatgccttgataatggtatagtccaaatctgtcaattatacagttacgatgatccattggggcatctctgcataaaaaaaaaaacgacagaaaaaagatagaaaacacaaaaaaaagcacaagcatagacatcaagcgaaaaaacaacaaatgaaaacgg

SEQ ID NO: 15056 - DNA, 435 bp, Gossypium hirsutum
  Clone ID: GOSHI-09MAY01-C9486_2
aaaaaaggggggaggacgcgtaccggagataatcaggtggtgccgtggtccattgtagcaaatacacctccgccggcgcctgcggcttctagtagcgatgattgggctggtggtgaaagagaggtctctagatcaacaaatttgttttcattaaaaaggtcgagagggaatgcttcagatcttcactctgaggacgatccggatcgtttatcttcaaaacggaggtacggctaccatactgttgtggcgacgcggtgcagagcagagggtggaggcgtttcggttgactccaggactatgaggctatcgaaggaccaacagatcaaaccggagggcacggttcagttgcagtccaattcgagaggcgcgacgagtacggagtcattaggcaaaaattagagtttgagaaaatccaagtaaaaatatcttaaaatt

SEQ ID NO: 15057 - DNA, 1081 bp, Gossypium hirsutum
  Clone ID: GOSHI-09MAY01-C9486_1
cccacgcgtccgctgagacacacttgtttataaactaagaaacgtaaactatggctccttgtttacgattggtttggaacttgctgggatatcaagccccaataaaatatatatattttttttagagttgcgtgttcccggcggccggtgaagtgttgtgagctctgtaagttagcggcgacaacgtcttgtgaatcggaccaagccagtttgtgctgggattgtgacgctgtagtccacggggcttacttccttgtggcgagacatgtgaggtgtctgctctgtcacgcttgtcagtctctcactccatggagagccactggttccaagcttggtcgcacggtctccgtctgtgagaggtgcatcgacggcggtgatcgagaagagagcgaggcggaaaatgacgatgatggtgacggagaagacgatgaaggagatgattctgatgatgacgtgtctgttggagatgatgtggaggacggagataatcaggtggtgccgtggtccacagtagcaaatacacctccgccggcgcctagttcttctagtagcgataattattctggtggtgaaagagaggacgatccggatcgtttatcttcaaaacggaggtacggctaccatactgttgtggcgacgcggtgcagagcagagggtggaggcgtttcggttgactccaggactatgaggctatcgaaggaccaacagatcaaaccggagggcacggttcagttgcagtccaattcgagaggcgcgacgagtacggagtcattaggcaaaaattagagtttgagaaaatccagtaaaaatatcttaaaatttgttagtacttgtaatcccttagccgtccgatttgagttggtttggcctgctatttctgattttctctaaccttttctaacaataggctttgattaatcattgatggaaatgttgaccctgtaggccttgtactgctttatttgtactaatccaagaatttttaggagtgctaaatgctacaaagcttcatctttccttttggtgtttggattcacctcctttctgtataattattatatttaactagggttttcttttc

SEQ ID NO: 15058 - DNA, 394 bp, Gossypium hirsutum
  Clone ID: LIB3166-014-P1-K1-H9
cgaaagagaaactaagaaacgtaaacaaaattcttcaagaaaacgaaaggagaaggagcttgctgggagattcaagccaaaatatcttcttcttttttttttgcgttggttgaaggaggaaggagatgaagagttgtgagctctgtaagttagcggcgacaacgtcttgtgaatcggaccaagccagtttgtgctgggattgtgacgctgtattccacggggcttacttccttgtggcgagacatgtgaggtgtctgctctgttacgctttgcagtttctcactccgtggagagccactgtttccaagcttggtcgcacttgtcttcttctgtgtgtggtgcatatacttttgttttcctaaaatgtacttttcttatattgactattactttt

SEQ ID NO: 15059 - DNA, 793 bp, Gossypium hirsutum
  Clone ID: GOSHI-09MAY01-C9466_1
cgacccacccgtcccggctttggaaggcaaaaggacactggcgatgatggtgatggctcaccttccataggctggactcttcgtgaaacatgcaaaatctctatgagacggcgaagaaagccaatggttgcccaggcttccggctgtgaaggtgcaaacagtaactagctgctgcaaaatttgatggctattgtgaaggggagctgcataatgcaacattatctggaaaccagcatcctatacgcattgagattactgaggctgcaatggaacttggcgcatgaaagctatcatttttagtcaatgaagcaatccagatacacatcaaaagagtgtacaggccatgaaagcaaagatgagcgatctctgtcaaagattacgaatgccacaaggtctcgttgagggattaaagcaacaatgatctcccaactggtccccgatgggagcttagcaagggaccaatacgatggtcacatctccaccacgtcaacaccctggcatgagcttttcaatttacttgcgttacaaattcaatgcccgaaaaatgcctcattttatttatgcttctcttaccatgaaactgcgttgtggttttagttttctgatggaactcacactttttattctaaaatgccttgatgacttaaaaatatctgttcaacttcaaggtcgtattgcacattccaaaatggaaatatgatggtacagtgcatgcatccttccatggatttgtaagtttaaacagtatgttacttaacaatatgctaagtagaaacactatatatgttacttg

SEQ ID NO: 15060 - DNA, 388 bp, Gossypium hirsutum
  unsure (1)..(388): unsure at all n locations
  Clone ID: LIB3135-027-Q1-K1-C9
nccacgcgttcgggagcttatcaagggattaaacgatggtcaaatctccaccagtcaacacctgggggagctttcaatttttatatacacatcaatgcacaaaatgctcatatatatgctttataccatgaaactgcgttgtggccttatttttctgatggaactcacactctttattctaaaatgccttgaagacttaaaaatatatgttcaacttcaaggtcctattgcacattccaaaatgaaaatatgatggttcagtgcatgcatccttccatggatttgtaagattaaacagtatgttacttaacaatatgctaactagaaacactatatatgttacttgaaaccctatgtccaatgtatcaaaaatgctatcttgcataac

SEQ ID NO: 15061 - DNA, 610 bp, Gossypium hirsutum
  Clone ID: GOSHI-09MAY01-C9796_1
ccggtttgacccagcgtttttaaaacatggggaagaagcctcctgggccgcttgttatgaaggagttgaagaggaggggggtgacgcccacttcactgctggaggatgccaaaagatccatttatgaattgaatgaggattgaaaatagggaaagaaatggggagttccactacaaggaatgctgtctcaactgaattcgagaaaagcttatctaatcaaagggagcgatccatggaattgaacagtgaaggccttgaggggctagttccacgggctaaactgttgctaacacttggaggaactttcttccttgccttttggcctttgatccttttaactatcgcattcttttccgccctctacctttattttggaccatcattcattcataacggaaataagacatcaggtttccctgccgcaatacatcgacccttacgaacttctggaagatgaaaggatttctgaaacagcccctcgtttaaattgaagaacaacaacatacaggaaagttccttggacttaaaagattacaggtttatgtagcatatttctttcacctcctgtagttttgttgtctttgtaaaatcctcgtatattggtaggaac

SEQ ID NO: 15062 - DNA, 1360 bp, Gossypium hirsutum
  Clone ID: GOSHI-09MAY01-C9786_1
ttcacgcgtccgaccggagataacaaaaatacagcagaagctatatgccatgaaataggtgtttttgggccgatggaagacatcagttcaaaaaggttaactggggaaggagtttatggcacttccagataagaaggctcatctgagacaaagtggtgggcttctattttctagggctgaaccgagacacaagcaagagatagtgagattgctaaaggaagatggagaggtggttgctatgactggtgatggagtaaatgatgcacctgccttgaaactagctgatattggaattgctatgggcattgctggaacggaggtagcaaaggaagcttctgacatggtgttggcagatgacaatttcagtacaattgtttctgccgttggtgaaggaagatccatttacgacaacatgaaagcttttatcaggtacatgatctcgtcaaatatcggtgaggttgcctccatattcctaacagcagcattgggtatacccgagggcctgattccagttcaacttctctgggttaatcttgttacggatggaccccctgcaacagctttgggattcaatcctccggacaaggatatcatgaagaagcctcctcggagaagtgatgattcactcatcactgcttggattttattccgctatctggtaattggactatatgttggagtagcaactgttggcgtcttcatcatttggtatacacacagttccttcttgtgcattgatcttagcggggacggccacacccttgtcacatacccccagctcgccaactgggcccagtgctcatcctggaaaaatttcactgtttcacctttcacagccgggaaccaagtcttctacttcgaaaataatccatgcgattacttccaaggcggcaaagtaaaagcaatgacactttccctctcggttttagttgccattgaaatgttcaactcccttaatgccctctctgaagatggaagtctcttgacaatgcctccatgggtcaatccttggctcctcctcgccatgtctgtgtcattcggcctgcacttcttgatcctctatgtgccattccttgctcaagtattcggtatcgtacctttaagctttaacgaatggctgctggttctggccgtcgcattccctgtgattttgatcgacgaagtgttgaagttcgtagggaggttgggacggcggatgagatcctccagtcaaagacctttgaaacccaaaacagagtgaagacagatatggtataaatccgataagtggatactagacagccaatgctagcctctaaaatgattaaaattcttgggaactgtcctctaacatggcgtttttacaatctgtgttatataa

SEQ ID NO: 15063 - DNA, 1567 bp, Gossypium hirsutum
  Clone ID: GOSHI-09MAY01-C9756_1
gcagcgtaagataagaaagcatggagaaagattgtgggaaggagattatggagatgagggagtgttataggaagggaaacaccaaacatgtaacatggaggagggctcagctcaaaggcttgctatcttttcttgcggaaaaagaggtggaaattttcacggctttaaacctggatttagggaagaattatgttgaagcatttcgtgatgaggtaggacttttaaagaaatcactgaatcttgcattgaaggatttgagaacatggatggcaagcaaagaggctaaacttccttcaattgcactgctttcatatgctgaattggttcctgagcctcttggccttatcctcgttatctcttcttggaactttcccatgggattatccttggagcctttgataggagccatagctgcaggaaatgctgtggttataaaaccatcagagttggccgctgcaagttcttctcttcttgctaataccctccccaattaccttgatactcaagctatcaaggtcattgagggtggccctgctgttggtcaacaactgcttcaacacaaatgggacaagattttcttcacaggaagtacaaaagtgggacggataatagtgtccgaagcagcaaagaatctaacgccagttactctaaagctgggtgggaaatgccctgctattcttgattccctttcctggtcttgggacaaggaggtggctataaatcgaatcattggggcaaaatatggatcttgtgcgggtcaagcatgtatatcaattgactatctattagtggaaaagccattttcatctaccgtggtggaactgatgaaggccatgatcaagaaaatgtatggagataaccctagagaatcacacagtatttcgaggataattaacaaacatcatttcttgagactgagagacctttttactgatcaaaaggttaaagactgtattgtctatggcggttcaatggatgaaggcagcttgttcattgagccaacaatattagtggatcccccactaaaatcagcaatgatgacagaagagatctttggtccattgcgtccaataatcacgttggataagattgaagacagtattgattttatcaattcaaggcctaaaccattaccactatatgctttcaccaaaaatgaggtgttgaaggagagattggtatctgaaacatcatctggaagtgtggtttttaatgatgcaatcattcagttcgcagctgacacccttccatttgggggcattggtgaaagtgggataggaaaataccatgggacattctcctttgacacatttacacactacaaggcagtggccagaagaagcttactcactgatttttggtataggttccctccatggaacaattacaaactggaactccttgagaatacttacaattaccattattttggattgctgcttgtcattttggggttgaagaggtctagaaagacttttctcgtcaactagtactttcagatatatacatatacctctttatccatgcatggctatattataagcaacatttaaatgttggtaacgat

SEQ ID NO: 15064 - DNA, 933 bp, Gossypium hirsutum
  Clone ID: GOSHI-09MAY01-C9716_1
gtgatgttctttttgatcctcatagtggtgaaatctatgatcgagatgaggatcacttggcgattgatgatggagcttcttggaataatgccacgcaagattgcattaggtgggcgttattcccgagactttttcaacagatatggagacttgaggcatatacgcaggttacatttttggcctctcgataaggtgcttatggagaagtataatttcagcgagcaagatgctaaagacatggcggacttcctcattccaatccttgattttgcccctcgaaaagagacccacagcagctcaatgcctgaaccatccgtggatcagttctggccctcagctgctacaactttccacaactgctcccaaacagcacggagatgatggtacatctaaaagggaaaggaaagagaaggatgacagggaggccatggaagctggagtagggaatatagaaattgatggaggatcttctaagccattgaaagaaacacttccaaagttgaactaacactttccccgaacagttttaatcggatggtaaattctttcttcctcgtattgcatcgccaaaaggctacatgtattgttcatgggcaattctctgcaagtactacagtttttcttcggttctgtcaacatccatactataccattcaaagcgatagggcttttcaggtgtcagcaccagttttgaaagagccatttagagcatgtgttcaaatttcagggttacatcttgctagcaaagactctcaatggtggatggatcccccccccctacatactcagtttccattgtgtctaatgtattcatgcccccaacatctatatcaatctctgttttgaaaatgatttgtgtaaaaagcattggaaatgttgcagttctgatatttcctaaaaatccaaaatggaatgctattgcaatttgggttt

SEQ ID NO: 15065 - DNA, 573 bp, Gossypium hirsutum
  unsure (1)..(573): unsure at all n locations
  Clone ID: AI728161.1
atttctaggatcacttggcattgatgatggagcttcttggaataatgccacgcaagattgcattaggtgggcattattcccgagactttttcaacagatatggagatttgaggcatatccgcaggttacgtttttggcctctcaataaggtgcttatggagaagtataatttcagcgagcaagatgctaaagacatggcggacttcctcattccaatacttgattttgcccctgannagagacccacagcagctcaatgcctgaaccatccgtggattatttctggtctccgcacctacaatttccccaactgctcccaaacagtacggagatgatggtacatctaaaagggaaaggaaagaaaacgatcaacgggaaggccttggaacttgaatttgggaatttcaaatttgatggaggatcttctggccctttgatgaaacacttccaaagttgaactgagccttcccccaaccggttttagtcggatggtgatttccttctcccgccgttggcctccccaatagggcggttgttttgtcctgggccctgtcctgcggtttcgccgctttc

SEQ ID NO: 15066 - DNA, 1017 bp, Gossypium hirsutum
  Clone ID: GOSHI-09MAY01-C9706_1
catcattaaagaagtcaaacaactctggaccactgaatagacatggagatcctgtaaagaaatcatcgggtccacaatccggtggagtgagggcgagtggacctcaaaattctggtcctattcctcctgttctccctgcaacaggccttattacgtctgggcccatctcctctggcccactgaattcctccggggctcctcggaaagtgtctggtcccctggaatctttgggatcaatgaaagtccaagggtctgccgtagttcataatcaggctgtcaatgttcttggccaagatgatgacttttctttcaggaggaacttcccgaaaccaatattttgggcactgatactgcttttcgtaatgggtttcattgctggtggttttatttttgcggcagttcacaacgtcattctcctcctcgttgttgtggttcttttcggtgctgtcgctgcattatttgcttggaactcttgctatgggagaacagctattatgggtttcattgctggttatccaaatgcagagcttagaaatgcaaagaatgggcaattcgtgaaaatctctggggtggtaacatgtgggaacgtgcctcttgagtcatccttccagaaagttcccagatgtgtttatacatctactccgttgtatgagtaccgaggatgggattccaaagctgccaatcctaaacatcgtcgttttacctggggactccgattgttggaaaggcgtgctgttgacttctacatctccgatttccagtctgggttgagagcattagtaaaaacaggcaatggagcagttgtgactccttatgtggacgactcaattgttatagatgtcaacccagccaacgaaacattatctccagagttcatcaggtggttgggagaaaggaatctttcaagtgatgaccgattaatgcgactgaaagaaaggtatatcaaggaaggaagcacggttagtgtaatgggagttgttcaaagaaacgacaatgtccttatgattgttcctccgc

SEQ ID NO: 15067 - DNA, 626 bp, Gossypium hirsutum
  Clone ID: GOSHI-09MAY01-C9726_1
ccaaccccaaaatccttgttaacacattcgatgctttggaacacgaagcattaaacgccattgaaaatttcaacatggtaggcatcggacctttaatcccatcttctttcttgaactcaaatggctccttggataattccttgagaaccgatctttttcaatccgattcaaaagattacatccaatggttagactccaaaccaaaatcggccgtcgtttacgtttccttcgggagctatgcggtgttaacgaagcaacaagtggaggaaatcgctcgagctttaatatccagccggcgaccgtttttatgggtggtgaggaaccggaaagatggaggcgaagaagagaaagaagaagataaactgacttgcagggaagaattggaacagtttgggatggtggttccatggtgttcgcaagtggaagtgttgtctcatccgtcgttgggttgcttcgtgacgcattgtgggtggaactcgacgttagagagcttggttgccggtgtaccgatggtagcttttcctcagtggacggatcaagggactagtgcgaagctgattgaagatgtgtggggcactggggtgagagtgagcactaatgaagaagggatggtggaacgtgatgag

SEQ ID NO: 15068 - DNA, 603 bp, Gossypium hirsutum
  Clone ID: GOSHI-09MAY01-C9666_1
gttagctgcttcaaacttttttttaaaccctcaaagcttcacaaggtctttctttctttcttttcttttctttttaagggataaataatgggagggttcaagcatcttgttgttgtgaagttcaaggaagatgtggtggtggaggagattttgaaaggtatggaaaagctggtttctgaggttgatgctgtcaagtcctttgaatggggacaggacatagaaagccaagagatgcttagacaaggatacactcatgccttcttgatgacgttcgaaaagaaagaagattacactgcatttaccagccatcccagtcacattgaattctccgccacttttgttactgccattgacaagttcgtggtgcttgatttcccttcggttcttgcaaaatctccggcttgatctgcaagaaagaaaaaagctacccaggaatttaagtgttttgagtatttgttatgtttaatctctctgttgtttgcatctctatgttttctgcttatgtgttatggctttctgccattgctatcaattccccaataatcacaatttgtattattgatatgcaaaaattcacatgcattttgcttctttttctccgct

SEQ ID NO: 15069 - DNA, 1992 bp, Gossypium hirsutum
  Clone ID: GOSHI-09MAY01-C9196_1
cttttcttctcttctcttgtcttctctcctagccctcggtctggtgcttttggagatagaggtaccaggctgctgtaagaaaggtgccggtggcgcttctcatgaggatgacctcaggggtgtttacttggtttggcaggacctcacggtggtgttgccaaactttggtaataaaccaaccaaaaggttgcttcaaggacttagtggatatgctgagcctggcagaatcatggccattatgggtccttctggttccggaaaatctactctgctcgactctcttgcaggtagacttgccagaaatgtggtcatgactggaaatatccttttaaatggaaagaagaagagactagagtatggtgctgttgcttatgtaactcaggaggatgtgatgttgggaactctgacagtaagagaaactttgacatactcagctcatttaaggcttccgaccacgttgagcaaagaagaagtgaaagacattgtggagggaacaatcatggaaatgggtcttcaagactgtggtgacacagtgattgggaattggcatcgaagaggaataagtggtggggagaagaagagacttagcattgcacttgagatcctcacgatgcccaaaatgttattcctggatgaacctactagcggccttgacagtgcctctgctttctttgtggttcaatctctccggaacatagctcgcgatgggaggaccgttgtctcttccattcaccagcccagtagtgaagtttttgcactgtttgatgaccttttcttgttatctggtggtgaaactgtttattttggggaggcaaaaatggctgtccagttctttgctgaagctggttttccatgcccaagtagaagaaacccttcggatcacttcctccgatgtataaattcggactttgacgccataactgccacattgaagggttctcaaagacttcgcgataaaccaacatcctcggatcctttcatggagatggcaacagcacagatcaaggctgcccttgtcgaaaagcaccgggactcaaagtacgcgaaaatggctcgagctaggagtcaagaaatatctaaaattgaaggacttgaggtagaaacaaatagtggaagtcaagcaacatggtggaagcaacttacaacattgacaaaacgatcatttgtcaacatgtgtagagatgtaggatattactgggcaaggattgtgatatacatacttgtatctatttgtgtgggaaccgtcttctatgatgtcggatatggcaatactgcaatccttgcccgagtagcctgcggtgcatttatcacaggtttcatgaccttcatgtccatcggaggttttccttcttttatcgaagaattgaaggttttcaataaagaaaggctgaatggatattatggagttgcggcttatacactttccaatttcttgtctgcatttccgttcctagttacgatttcacttatcacaggaaccataacattttacctggtgaaatttcgatccggattttcgcattatgccttcttttgtctcaatatcttcttcagcatcgctgtgattgagagcctcatgatggtggtagcttcgatggttcctaattaccttatgggaatcgtaaccggtgccggaattatcgggattctaatgatgacatcaggcttcttcaggttgctgcctgatcttcctaagatattctggcgttaccccatttcgtatatcaattttagctcatgggcacttcagggggcgtacaagaacgatttcataggcctggaattcgacccattactaccaagggatcggaaactaaccggagatgaaatcattaccaagtactttggggtgacggtagaccggtccaagtggtgggatttaacagcagtggtggtcatccttatatgttaccgccttatcttcttcatcattcctgaagatgaaggaaaaggcttcaccatttttgcaagaaatttatgcaaaaaaaacac

SEQ ID NO: 15070 - DNA, 811 bp, Gossypium hirsutum
  Clone ID: GOSHI-09MAY01-C9126_1
actctctctcatggcttccgagcagtacggtgccgtttttgaggaatctcaggacgacgacgaggaaccctcttcctccggtaacgacgacgtgctcaacggtcacgacgaagaggacgaggagttgctagaagaagaagaggaagaagattttaattccccctctttgctacctcaaccgattgccgcagtcgtaccctccgcctcaatccccgccgttcctcttgccgttccttcatccaccgtcgtgaccgtcgcttctgttcctctccggggttcgactcccgactctaaacgccaacggattgattccgccgtctccgagaaaaaacctcctccgccgcaacaattcgacgaatcgcggcggttatttcaacgtttatggactgatgaagacgagatcgagcttctcaaaggatttctcgattacacgacttcgaaaaccaactctaattcttctcaccatcaccatcacgatacggcgttgttttacgatctaatcaaatcgaaactccagctcgatttcaacaagaatcagttagtcgagaagcttcgaagattgaagaagaaatataggaacgtgatgaataagatcaattcgggtaaagaattttccttcaaaagccctcatgatcaagctacttttgaaatttctagaaagatctggagtagtagtgttggcaaagtagaagataatgttttagattatgatgaaaataatattactcctactactactactaacatcaatttactcgatgaaagtggagagaaaaagaatcttactccgaaatccgcagccaataagaga

SEQ ID NO: 15071 - DNA, 507 bp, Gossypium hirsutum
  Clone ID: LIB3583-010-P1-K1-D11
gcttcgaaggttgaagaagaaatataggaacgtgattagcaagatctgttcaggtaaagaattttccttcaaaagccctcatgatcaagctacttttgaaatttctagaaggatctggagtgatggtgttagcaaagtagaagataatgtcttagatgatgacgaaaataacaataataacaacgctagtttgatcgatgaaagtggagagaaaaagaatttgacacagaaaccagcagccacgaagaaaaggtcgagaaataaaggagtgaaaatggaggaaaaaagagatgtaaacgatggaattgtgcatatggatagtaactctaatgatagggttaataatgataatggtaatgtagaagcacttggtgttggtagcagtggaggaggagctaacacgggggcggccggggtcatagaggagaccgtgaggagttgtgtaacacccttgtttaaggagttgttaggtagtgtaatggtaggaggagggggatatggagaaag

SEQ ID NO: 15072 - DNA, 1672 bp, Gossypium hirsutum
  Clone ID: GOSHI-09MAY01-C9056_1
aatcaaccaccaaacctagaaggccagacctgaacaaagctaagatcatgtattcttctccccccgcgcccccgtcctctctttacccacaggtcgatctttcaaacccagacgccacttcatcttctccttcttcttcgtcttctttgtacccttctttggacatgaaagatttagccgaaaacctcttccccgacgacgccaccgccttgcacacccaccaagattctgcagaacaactcctcctcaaggttcctggtgccatcgttcaccttattgagcgagaaaccagcgttgagcttgcttgtggtgatctctgtattgttagtctccttcaaggcggcaacgttgttgctgtttttgctcgccttggtgacgatattcaatggcctttggctaaagatgagcctgttgtaaaacttgatgcttcccactatttctttactcttagagtgccatcgaatgggtcgtttgaagacggaaaagattctaatcaaaccgaggatgttttgaactatggtctgacaatagctgcaaaagggcaggaaggtttgttgaaggaacttgatagaatcttggaaacttacagttgcttttcggcgcaacaagtcaaagggatagagaactggaatcttgtggatgcgagaaatgtggcgcccgaagagttgaatacaaaggaaaaaagggacttaatcgtgggaagttcaatggcgtattggacgactctggcgcccaatgttgaagactatagcgggtctatagcaaaggcaatagcatcggggtcagggtacgttgtgaaggggattttgtggtgcggcgatgtcactgttgataggttgaaatggggcaatgatttcttgagtaagaggataaagtcaggttcaacctctgagatctctccagaggccttgagaaggatgaaaagggttaagaagttaacaaagatgtcagagaaagtggccactggaattctttcaggtgtggttaaagtgtctggattcttcacaggttcaattgttaactccaaagttggcaagaaatttttcaacctgctgcctggagaaatcgttcttgcttccttggatggatttaataaggtttgcgatgcagttgaagtagcaggaaggaatgtcatgtctaccacatctgtggtgacaacaggacttgtttcacaaaggtatggagaaaaggcaggaaaggttacaaatgaagggcttgatgcggcaggacatgcaattgggacagcttgggctgtgtttaagattagaaaggctcttaatcccaagagtgtcttcaaacccacaactcttgcaaaagctgctgcacaggctaatgctgctgaattgaagtccaaaaataacaagtaaacagagttgctttttagtttgaacaggaagacaaaaacagagatgcttgtaggactgcagttttccaaaggttgagaattctcaagtggattgtatttgtactttgcaattgttgtgaattactatgcatcttaagaaactcaattccccctatacaaaatcagattacttgtacccgagtatattattaagctaaaaactgttgcctagtatagaatgggttttgggaaagaatggttttaggtttgaagaaaatctccactcctttgatattggcaaaatttaaatgaaaggataattgtact

SEQ ID NO: 15073 - DNA, 607 bp, Gossypium hirsutum
  Clone ID: LIB3829-021-Q6-K6-F10
gtcgacccagcgttcgctctcgtcaactttaccttatttgttgatggatggaggggatctcgtcttctctgctaggatgcaactttcatgcctgctatctattttatcatatatatgtgataccatttgtcatgcggccatcatctgcatgttgtgtgcgtgtccaaagacgtcattagtttttgatgcgaggtgatggcttcttttgaagtgtttggcacaacactgcatttaaatagaaaatgcaacatggttggtattcttacggtgtttctgcttgtatgtccatttagataaggtttgcgatgcagttgaagtagcaggaaggaatgtcatgtctaccacatctgttgtgacaacaggacttgtttcacaaaggtatgcttactgagaagaaaaagttgattacgtgggagttggtatatatgatcatcatgtttatcagacgtactactggttttggtggtgtaggtatggagaaaaggcaggaaaggttacaaatgaagggcttgatgcggcaggacatgcaattgggacagcttgggctgtgtttaagattagaaaggctcttaatcccaagagtgtcttcaaacccacaactcttgca

SEQ ID NO: 15074 - DNA, 613 bp, Gossypium hirsutum
  Clone ID: GOSHI-09MAY01-C9046_2
cttgcgcttagaggaggtttcagacatgggctattatccactcggaaatcctccctgcggtgagatatgcgtgaaaggaaagactcttttctctgagtactacaaaaaccctgaactgacaagagaatctttcggggatggatggtttcatacaggagacataggccaaatgcttcctaatggaattgttaaggttattgataggaagaaaaatcttattaagctctcccagggagagtatgtcgcactagagtacttggaaaatgtttacggagtcactccaatcatcgatgatgtatgggtctatggaaacagcttcaaatcaatgctagttgcagtggttgtgctacatgaagaaaaagctaaaaaatgggctgagttgaatggttacactgtttcactctttgagctctgttctctgagtaagcttcagaattatgtcctctcagagctcaaatccacagctgataaaaacaagatgagaggttttgagtatatcaaaggagtgattttggaagcccgggctttcgacatggagcaagatctaatgactgcaacattgaagaaaaaaagaaacaatctgctcaaatattatcaggctgaaatagatgca

SEQ ID NO: 15075 - DNA, 619 bp, Gossypium hirsutum
  Clone ID: GOSHI-09MAY01-C9046_1
ccctcgcgtccgcccacgcgtccgcccacgcgggcgcccacgcgtccgctgagctctgttctctgagtaagcttcagaattatgtcctctcagagctcaaattcacagctgagaaaaacaagatgagaggttttgagtatatcaaaggagtgattttggaagcccgggctttcgacatggagcgagatctagtgactgcaacattgaagaaaaaaagaaacaatctgctcaaatattatcaggctgaaatagatgcactctaccataacttgactacaaaaaaatgaaaagccgaagtagtatgcttgtgccatacccccacggtttatcgtcatcctgtaggtgaaaatggtgttgaatgcctatgcttaatgcataatataagtaataattgtcgttaactggttttcaatatagaattcagaaggcacaagttgcatttcagtggggaaagggagaagatattatggtgatattagcacaacaaaaggtgaaaatttaatcagacgcgtgggtgtttcaccttcttatttatttgtattattcacctatccttttgagttagtaatatgtattttatatatttccttttagaaaaactcatttcagaattgacaaa

SEQ ID NO: 15076 - DNA, 657 bp, Gossypium hirsutum
  Clone ID: GOSHI-09MAY01-C9006_1
attctcagccagcctgtgggttcagaggaaagccgaaatccaatttatattattagtattattatttattattatgagacagaagaaataacagaactcccaattttcttttcccctttttcttaattctagaatctccgccatgagcaacaacggtaacaatagcaacagttccgatcccgatcgccctgtccgtgtttacgccgatgggatctacgatctcttccacttcggccacgctcgctccctcgaacaagccaagaaatcgtttcccaatacgtatttgctggttgggtgttgcaatgatgaaacaacacacaagtacaagggcaaaactgttatgaccgaatcagaacgttatgaatcccttcgccattgcaagtgggttgatgaagtcattcctgatgctccgtgggtgatcgatcaagaatttctggataaacacaatattgactatgtggctcatgattcacttccctatgctgatgccagtggagctgcgaacgatgtgtacgaatttgttaaagctgctgggaagttcaaggaaacaaaacgaactgatgggatttctacgtcagatatcataatgagaattgttaaagattataaccaatatgtgctgcgtaacttggaccgtgggtattctaggaaagagct

SEQ ID NO: 15077 - DNA, 379 bp, Gossypium hirsutum
  Clone ID: GOSHI-09MAY01-C9026_4
caaaaagcttcaaatctcctctgcctattggagattacagcaaaaggctttttttttttttcattataattttacaagtgtaaaaatccccttggggaatgcagagagatgagacgttcatcgttggcaaggcctgagctttgttaccaccgtaagcgctccatcggcggccgaaattgtcaccgaaaacacgtcgaagacgggtgattcagtttgaaggctttcaggtttaaatatacatatatttctcacttataattgtaaatatacagtacttcagatcaaagggtatccggttcttttcttatttttctttttaatttctcgagcttttattggtcaaaaatggcggacaaagcttaaacccgaaacccatttt

SEQ ID NO: 15078 - DNA, 845 bp, Gossypium hirsutum
  Clone ID: GOSHI-09MAY01-C9026_3
ggaaaaaaagggtacgacggagccaaggcggatatttggtcttgtggggtgattttatacgttcttctcgccgggtttttaccgtttcaagatgataacttggtggcaatgtataagaagatttacagaggagatttcaagtgtccgccatggttctcacctgaagctcggaggctaatatccaagcttttagacccgaacccgaaaacccgaatcgccatctccaagatcacggaatcatcttggttcaaaaaatcaatccccaagactaaaacaactaaggaagaaatagaattcgaagcattcaatggagagaaatcttctaaacccgagaccttaaacgcgtgccacataatttcattgtcggaaggcttcgatttatctccgttgttcgaagagaaaaagagggaagagaaagaggagttgaggttcgccacgacgaggccggcaagcagcgtgatatcgaggctcgaagaggtggccaaatcggggaagttcagcgtcaaaaagagcgagtgtagggtgcggttgcagggtcaagaatgtgggaggaaaggtaaacttgccattgctgccgatatatttgcggtgacgccgtcgttcttggtggtggaagttaaaaaggaccatggcgacacattcgagtacaatcagttttgcagtaaagagctccggccggcgcttaaagacatcctatggacgtcgccgcccgagaactcgactgtggcttgatttatgtgaggtgggaagtcattgtttgatgatgaaggttattgttgttattgcgaaagtgtgattatgtgattgtttttagatgggaaatggaacacccagatttggtggtg

SEQ ID NO: 15079 - DNA, 464 bp, Gossypium hirsutum
  Clone ID: GOSHI-09MAY01-C9026_2
ttccacgcgtccgcccacgcgtccgcccacgcgtccgattcataacacaactcaatggtaaatggagcgacccaaattgaaaaatgacaaatagagggggccaaaaacaattgctacacaaccaaaccatgatccaaacttaaaaataggacaatcctacactcatccttaccactgaaattacactactaaatgaatcaacccagatcccagagaggaaaacacggacttagtttgtaccttagaaatcgagaatggaacgggaattcggcggtcgcttgatttatgtgaggtgggaagtcattgtttgatgatgaaggttattgttgttattgtaacagtgtgtttatgtgattgtttttagatgggaaattgaaaacccagatttgttgttgtttgatccattgtatgttgctgatgttttcagatgttgtgctgttaatgttgtggtagtgggctgcttt

SEQ ID NO: 15080 - DNA, 1558 bp, Gossypium hirsutum
  Clone ID: GOSHI-09MAY01-C9026_1
cccacgcgtccgcccacgcgtccgcccacgcgtcccaaaaagcttcaaatctcctctgcctattggagattacagcaaaaggcttttctgtttttgtttttgttttattttttatttatttataattttacaagtgtaaaaatccccttggggaatgcagagagatgagacgttcatcgttggcaaggcctgagctttcttaccaccgtaagcgctccattggcggccgaaattgtcaccgaaaacacgtcgaagacgggtgattcagtttgaagggtttcagttttaaatatacatatatttctcacttctattgtaaatagacagtaattcagatcaaagggtatccgtttcttttcttatttttcgttttaatttctcgagcttttacggttcaaaaatggcggacaaagctaaaaccgaaaacccatcttttctccatggaaaatacgagcttggccgtatgttgggtcatggaacgttcgccaaagtctaccatgcgaagaaccttcaaacagggaagaatgtcgccatgaaagtggtgggcaaagagaaagtgatccaggtcgggatgatggagcagatcaagcgagagatctccgtcatgaaaatggtgaaacaccccaacatcgtcgagctgcacgaagtgatggcgagcaagtccaagatttacttcgccatggagctcgtccgcggcggcgagctcttctcgaaaatcgccaaaggtcgtctcaaggaagacgctgccagggtttacttccagcagctcgtttccgccgtcgattgcggccgcagccgcggcgtttaccaccgtgatttgaagccggagaatcttctcttagatgaagaaggcaacttgaaggtcaccgatttcggactcagcgctttcacggaacatttgaaacaagacgggttgttgcacacgacttgcggaacgccggcgtatgtggcgccggaagtcattggaaaaaaagggtacgacggagccaaggcggatatttggtcttgtggggtgattttatacgttcttctcgccgggtttttaccgtttcaagatgataacttggtggcgatgtataagaagatttacagaggagatttcaagtgtccgccatggttctcacctgaagctcggaggctaatatccaagcttttagacccgaacccgaaaacccgaatcgccatctccaagatcacggaatcatcttggttcaaaaaatcaatccccaagactaaaacaactaaggaagaaatagaattcgaagcattcaatggagagaaatcttctaaacccgagaccttaaacgcattccacataatttcattgtcggaaggcttcgatttatctccgttgttcgaagagaaaaagagggaagagaaagaggagttgaggttcgccacgacgaggccggcaagcagcgtgatatcgaggctcgaagaggtggccaaatcggggaagttcagcgtcaaaaagagcgagtgtaaagtgtcgttgcagggtcaggaatgtggggaaagtaacttgcttgtgcaattatgcgggacccgtgttttgtgg

SEQ ID NO: 15081 - DNA, 286 bp, Gossypium hirsutum
  Clone ID: LIB3148-053-Q1-K1-G7
gctttatgtatacaaatttcacatggccgaagacgataatcaaactccaggcttaaagaatctgtgaacattttaattcccgttccattctcgatttctaaggtacaaactaagtccgtgttttcctctctgggatctgggttgattcatttagtagtgtaatttcagtggtatggttgagtgtaggattgtcctatttttaagtttggatcatggtttggttgtgtagcaattgtttttggctccctctatttgtcatttttcaaattgggtcggtccatttacc

SEQ ID NO: 15082 - DNA, 187 bp, Gossypium hirsutum
  Clone ID: uC-gsronu33B157c10b1
cccatgcgtccgagcttttagacccgaacccgaaaacccgaatcgccatcttcaagatcacggaatcatcttggttcaaaaaatctatcccctaagacttatacaattattgatgaaattgaatttgtagctatctaattgtaagatattttttattcttattttttaaatttttttttatattatt

SEQ ID NO: 15083 - DNA, 794 bp, Gossypium hirsutum
  Clone ID: GOSHI-09MAY01-C9346_2
tgaagatccaagtattttctctctctttttctctctcatttttgtttctctagtggtttttgttaaagattatacctttacttcgtttctactcaaaaaatcttttttttttgcttgtttgcagacttgtgtcctcaaagttaacatacactgtgatggatgtaagcacaaagtgaagaaaatcttacaaaagattgaaggggtttttaagaccaccatagattctgagcaaggtaaggtaacagtgttgggaaatgtagatcctaatgttctaataagaaagcttgcaaaatcagggaagcatgcagagccttggggttctgcaaaagctaacaacaatcaagctcatcttgcccaccagttcaagaacatgcagatgcttgataatggcaacaaaggtggaaacaacaacaacaagaacaacaaccaaaacaacaacaagggtggtcagaaagggaacaacaacaacaataaccagccgaaaggtggtcagccgacacctcaacagttgcaccagcatcttcaacaggttcaacaaatgaaagggttccaagatctgaagctgcctcagttgaaggacatgaaaatgggtcctaatcccaaccaactccaaaacaacaaagctgtcaagtttgctgaagaggaagatttcagtgatgatgattatgatgatgatgacttggataatgattgtgatcttgatgatgatgattttgatgatggcgatgagttggatgatcctcgtcatccatttcacaagatgaaggctatgatgggggaataatgctcctcct

SEQ ID NO: 15084 - DNA, 1004 bp, Gossypium hirsutum
  Clone ID: GOSHI-09MAY01-C9346_1
tttgtactcttttcgtcgttgtttcctccttcccttttatcctctcatcccctctaccctttaataagaggcttcttttcttataattctttgctttgttcatattttcccttcaaaattcagaggtattttttgaattttattttgaatttctgtgttgtttttaaagttcgtttgattttttttcccttcgtgtgctgagatcttgcaaatctgattttcaaaaaccaaaaattaaaggcaaatatcaagagatttcgaagaaaaacaagaaaagaggcggaggaacatagatgccaagcgccggaaggtcaccgtctttgtgttaataactgtggtttcttaggaagtccggcgacgatgaatctttgttctaaatgttacagagatttccgacttaaagaacaacaacaagcttcttcggctaaatcgtctatctctacctctccttcatcttcgtcaacggcagtcgaatctgtttctcaggtacctctcctgactctccctgaagtcaaaggagttccgctggttgtttcggctgtcgcgatctctccggtggcggaacagaaaccacaacagcaacagcaacagcaacagcaacaacaacaacaacaacagcaaccgactcggtgcactgtttgcaagaaacgggtcgggttgaccggattcaagtgcaagtgcgggattacgttttgcgggtcacacaggtacccggaaaatcatggatgcacgttcgatttcaagaagattgggcgagagaagattgcacgtgccaatcccgtggtcaaagcagagaagatcgtgaggatttgagaagaagaagatggaaagccgattgaccctttgacttttaatgagtaaaagaaaaaaagagaaatagaaatgtcaaactcgttaagattgcgacacgtgtttcagtgttggtccccatacctttaaaaattgggcttggataaaaatattttatcttataaaataagtcttctatttttattaaaagaaaa

SEQ ID NO: 15085 - DNA, 457 bp, Gossypium hirsutum
  Clone ID: uC-gsronu33B124e09b1
tttacgcgtccgcccacgcgtccgcggacgcgtgggctccggtgacggaacagaaaccacaacagcaacagcaacaacaacaacaaccgactcggtgcacggtttgcaggaaacgggtcgggttgaccggattcaagtgcaagtgcgggattacgttttgcgggtcacacaggtacccggaaaatcatggatgcacgttcgatttcaagaagattgggcgagaggagattgcacgtgccaatcccgtggtcaaagcagagaagatcgtgaggatttgagaagaagaagatggaaagccgatcgatcctttgacttttaatgagtaaaagaaaaagagaaatagaaattgtcaaactcgttaagattgcgacacgtgtttcggtgttggtccccatacctttaaaaattgggcttggataaaaatattttatcttataaaataagtcttctattttta

SEQ ID NO: 15086 - DNA, 388 bp, Gossypium hirsutum
  Clone ID: LIB3166-013-P1-K1-C7
tgcagagccttggggttctgcaaaagctaacattaatcaagcacatcttgccaaccagtggaagaacatgcagatgcttgataatggcaacaaaggtggaaacaacaacaacaagaacagcaacagcaacaacaacaacaacaacagcaaccgactcggtgcactgtttgcaagaaacgggtcgggttgaccggattcaagtgcaagtgcgggattacgttttgcgggtcacacaggtacccggaaaatcatggatgcacgttcgatttcaagaagattgggcgagagaagattgcacgtgccaatcccgtggtcaaagcagagaagatcgtgaggatttgagaagaagaagatggaaagccgattgaccctttgacttttaatgagt

SEQ ID NO: 15087 - DNA, 819 bp, Gossypium hirsutum
  Clone ID: GOSHI-09MAY01-C9376_1
tggaaactctggaaacagtttgagatagttctaaattttcttggactggttgagaagttcttctatctctcaggtagatatgacattgagcttgcagttggagatgctgttatggaaaactctttattactagctattgggcatattgagttagatctgccagaacctccagagaaggcaacccgccctcctcctcagcctgttgatccttactcaagatatgggcccaaagcagaaataactcacatcttcagggctcctgaaaagcgtccccctaaggagctttctcttgctttcctgggtcttaccttcttgccattgcttggattcttgattgggctattacgattgggggtgaatttgaagaactttccttccaatgccgtaccggccacgtttgccacactcttccacgtcagtattggagcagttctgtcgctctatgtgctcttctggttgaagttggatctattccaaacactgaaactacttggtttcttgggagttatccttgtgttggttggccatagagtcctttcccatttggctgctacatctgccaagcttaaatctgcctgagttgattgaagattaattcctattcctttgcaagcgttgcttgctgcaagattattctcctcttctcttttggttagcagatttttcttcggtcatttttaacccaaaattttggtagggcttattttctcgattcaagtcaatctgttacgtcaaagaaaaagaaaaattttgctactccaaatttaaagcctcttaagttttattaggtagcagcaacatcgagatgactttcgattc

SEQ ID NO: 15088 - DNA, 619 bp, Gossypium hirsutum
  Clone ID: GOSHI-09MAY01-C9366_1
ctggagcaccttggattgagggaatatttctcagagatcgactccaatcctagctttgtcgatgaagaagagaaactaaggatcttcccttatcatgatttcaccgagagttcccatggctgcaatctctgccccccaaatatgtgcaaagggagggtgattgaaaggattcaagcttctttagaagggaagaagaaaatcatataccttggagatggcagcggagattactgcccaggcttaaagcttggagaggcagactacatgatgccaaggaagaattatccagtttgggatttaatttgcaggaacccaatgttgatcaaggctgagatctatgaatggaccgatggtgaagagctagagaaggttttgctgcaactaatcaacatgatttctcttgaagaagacgatgccaattcttcccaattcatcttcgttgactgcaaattgcagaccatgtcggcatccaaaaatgccttccctcatgccctcccggttcctcagtagatccatgccattgctcatatatattagctgacttggtcgaaaccgttttcattggtccgctgcttgtttttcttttttctttttaaatattaattgtgtttttttagat

SEQ ID NO: 15089 - DNA, 417 bp, Gossypium hirsutum
  Clone ID: GOSHI-09MAY01-C9316_4
tttccatctctccaaacacaattcactaaagcaaaaacagcttgtagaagaagggatggccgcctcgggtaggtacaatttccatttttcccagttccgcaagaaacccatccattttttacattcatattttcgatttgatgatttgtctctttgggttgatcttgtttaatatttctggggttttgtgattgtttcagataaagttcaagaactgcatgtatatgagatgaatgaaagagatcgtggtagtccagcttaccttcgtttaagtcagaaacctgttaactcacttggtgatatttgccccttttagcaacaaagtaaggttttttttttccggatttttttttcgaattaaccaaatagttattgatatatatgtaattacagatatataggggagatatggagaaa

SEQ ID NO: 15090 - DNA, 799 bp, Gossypium hirsutum
  Clone ID: GOSHI-09MAY01-C9316_3
cccacgcgtccgcccacgcttctctttctttccttctctccaaacacaattcactaaagcaaaaacagctagaagaagaaggaatggccgcctcggataaagttcaagaactgcatgtatatgagatgaatgaaagagatcgtggtagtccagcttaccttcgtttaagtcagaaacctgttaactcacttggtgatattgtcccttttagcaacaaaatatataggggagatatggagaaacggataggaataactgcagggatgtgtatattgatagagcataaacccgaactgaaaggtgaccgctacgaagccatcttcagcttttacttcggagactacggtcacatagcggtgcagggaccttacttgacttaccaggactcgtatctcgctattactggtggatctggcatttttgaaggcgtctccggtcaggtcaggctccaccaaatcgtcttcccctttaagcttttctacactttctatttctacggggttggggtactcccagcagagctcctttgcaagccggtggacccgcgcccagcggttgaagccgttccggctgctaaggcttgtgatgccacatcccaccatggcaaatttcacgaattaaatcatctgcaatgtcaaggggatcttaggataaattttgttgtagcagagtttaagattagaatgaattaaagaaatgaatgtgttgtcctttttaaacttttttgtgcaatggatgatttttggcttttagcctttgctctgcaaaaaaacaaaacatataatgataacctgtgtgt

SEQ ID NO: 15091 - DNA, 1044 bp, Gossypium hirsutum
  Clone ID: GOSHI-09MAY01-C9316_2
cggacgcgtgggctttctttcactccaaacacactctcagtatgtctgctttaagatccaccatttcttctgggataatcagatcaacttcacccacccattccttgttgcctgcagcttcatctttcaagcccatcaaaaacccttgtttacctcaaacccacaagcttttcacatcaaactccaacactttctcagctcccaagcgaggtttcacttgcaaaagccaggctattccatctgataactcagctccggaaaaagttcaagaactacatgtgtatgagttgaatgagagagatcgtgggagtccagcttaccttcgtttgagtcagaaatctgtgaactcactgggtgatcttgtcccttttagcaacaaaatatataggggagatttggagaaacggatcggaataacatcaggaatatgcatattaatagagcataaacccgaaatgaaaggtgatcgctacgaggccatcttcagcttttacttcggagactacggtcacatagcggtgcagggaccttacttgacttaccaggacacgtatctggctattactggtgggtctggcatttttgaaggcgtctccggtcaggttaggctccaccaaatcgtcttcccctttaagattttctacactttctatttgaagggaattggtgaactcccagaagagctgctttgcaagccggttgacccacacccagctgttgaagccgttccggctgctaaggcttgcgagccacatgccgccattgcaaatttcactaattaaataaattatgaatcttatgtaattttaaataatttgcaaatccaatgatgttagtatttttattttcattttaatattttgtagtagagagtaaaattagaaataaatgtgttcctttttaaaaaaaaaaaaaaaaaaaaaaaaagggcgaacaataaaaaaaaaaccaaacttaagtaaaacatgcaatgcgacggcataagctctttctatagggaacacctaaaattcaattaactagaccgtgggggggcgccttttt

SEQ ID NO: 15092 - DNA, 772 bp, Gossypium hirsutum
  Clone ID: GOSHI-09MAY01-C9316_1
atcggagtttcggcctagacccacgcctccccccgcgcccgggaacgtagtgaatttgcaaccgaaaaccgaatcaagatcttcgcaatctcatcgagctacaaaaaagaaaaatggatctcagaatcatgggtttcgattctccgctcttgaatactctccaacacatgatggatctttctgacgatacggagaagatcccgaacgcaccatcaaaggtttacatgcgggatgccaaagccatggctgcaacaccagcggacattaaggagtaccccaagtcttacgtgttcatcgtcgacatgccggggctgaaatcaggggacatcaaggtccaagtggaggacgacaatatgctcttgatcagcggagaaaggaaacgagaggaagagaaagaaggagccaagtacgtgagaatggagaggcgggtcggcaagtttatgaggaaatttgcgttgcctgagaatgctaacgctgatgccatctctgcaatctgtcaagacggggtcttaactgttactgtggagaaactgccaccccctgagcctaagaaacccaagaccatcgaggttaaaatagcttgaagcagctttagatttacggttaattgtcaatgggggctttaaataagttgggggttagccctgtaagtagtttctagcgtttgccgtggtggtttctgagtgcgttaaacgtttgatgtcagagttctatgtcgtgttgtgttgaaatcatgaaatgcagatgttaccgttagtattttcttgtaaaa

SEQ ID NO: 15093 - DNA, 388 bp, Gossypium hirsutum
  unsure (1)..(388): unsure at all n locations
  Clone ID: LIB3148-033-Q1-K1-G7
tttctctccaaacacactctcagtatgtctgctttaagatccaccatttcttctgggataatcagatcaacttctcccacccattccttgctgcctgcagcttcatctttcaagcccatcagaaacccttgtttacctcaaacccacaagcttttcacatcaaactccaacactttctcagctcccaagcgaggtttcacttgcaaaagccaggctattccatctgataactcagctccggaaaaagttcaagaactacatgtgtatgagttgaatgagagagatcgtgggagtccagcttaccttcgtttgatgtcagagttctatgtcgtgttgtgttgaaatcatgaaatgcagatgttaccgtagtatttcttgtnaanaaaaa

SEQ ID NO: 15094 - DNA, 162 bp, Gossypium hirsutum
  Clone ID: LIB3149-008-Q1-K1-A7
caagaactacatgtgtatgagttgaatgagagagatcgtgggagtccagcttaccttcgggtgagtcagaaatctgtgaactcactgggtgaacttgtcccttttagcaacaaaggaagccttccctttctattttcactgaattcaatttaaggaaataat

SEQ ID NO: 15095 - DNA, 410 bp, Gossypium hirsutum
  Clone ID: GOSHI-09MAY01-C9236_6
ttttaaaataagacccacaaatataaggtacccacagcttttatttaaccatccttctcctttttccaatttcacttcacattttgtctggctttttttaagtgctcccaccagggtagatgcaattattataactaggattttgggatgttagtgttgccgtctgcgagaaatcacagttccacggattcttggcggaactctggtagtaaaggttcatggcataagcagcgtgggacgctacggtgttcggttcgaaacaggcacctcccggttggatcggactgcaatcgatgccctggccacatgcatagtctagactcgactgcaattgagcatcggaaataccggccttcggtacgcaccaaccagttgcagtcggtttcggttgaggagtcgccggagtcgga

SEQ ID NO: 15096 - DNA, 1082 bp, Gossypium hirsutum
  Clone ID: GOSHI-09MAY01-C9236_5
cggacgcccggcgcggccgcacactctcattctctctctgtatttcctttgtctctttaatggctactttcttcttcttcctcctctccttccttatctgctttcacttctcaagtgctgagccgtttattggagtgaactacggccaagtggcggacaacttaccgccgccgtcagccaccgcgaagcttctaaaatcgacgtcgattgagaaagttagattgtacggagcggatccggcgattatcaaagctttggctaataccgaaattgggatcgtaatcggagcagctaatggagatattccttctttggcttccgatccaaactcagcagctcagtggattaactccaacgtgttgcctttttaccctgctagcaaaatcatcctcatcactgttggcaacgaggtattgactacaaatgacccgaatttaataaaccaactgctacccgcaatgcaaaatatgcaaaacgccattaacggtgcttcactgggtggaaagatcaaggtctcaacggttcattcaatggcggtgttgggtcaatccgacccgccatcttccgggttgtttaggccgagttatcaacccgcattgaaaggtttgcttcagttccacaaggacaacgggtccccttttgccattaatccgtacccgtttttcgcttatcaaagtgactccagacccgaaacgcttgccttctgcttgtttcaacccaacgcgggacgagttgactcggggaacggaatcaagtacatgaacatgtttgatgctcaggttgattcagtgcattctgctttgagtgctatggggttcaaggatgtcgagattatggttgccgaaacgggatggccatatagcggcgacagtaatgaggtcggacctagcattgagaatgcaaaagcctataacgggaacttgattgctcatttgaaatcgatggtcgggacaccgttgatgcccgggaaatctgtggatacttacctctttgcactctatgatgaggacttgaaacccggtccccgttctgaacgggcatttggactttacaagccggacctttccatggcatatgatgtt

SEQ ID NO: 15097 - DNA, 848 bp, Gossypium hirsutum
  Clone ID: GOSHI-09MAY01-C9236_1
gggggggtgttttttctaatatacatggactaattttcttattttttaagtaaaaataagtaaaatacaatccaatccataatacaaaagctaatgtgagttttaccctttgcaaaaatgagtttgagtagtattcaatcctcaaacattcagggggagataataagcatttgaacaagtaaagaaccagcagaaacttggacatgaaacctatattttaggcataagaacaggccaaaattcattgactatatataaaacaatagatttagagaagatatggtaagcgaaatatgattttattttttttaataattggggaagaaaaataaatgcttcggattgaatctaaactttcataccttcgtcatactgattttgatattatgtttaagagattataagcatgacccattttttttaaccacaaaagttcatcaacattccaaccctaactttattacatcaaataatttacccaaaaaagaacacagaccacagcaaacccatatcaaaggagaataactttacagtcaaagctactttgtatttctaaaataagacccacatattttatcttacttttctaagtgctcccgccagggtagatgcaattactataagtaggattttgggatgttagtgttgccgtctgcgagaaatcacagttccacggattcttggcggaattctggtagtaaaggttcatggcataagcagcgtgagatgctatggtattcggttcgaaacaagcacctcccggttggatgggactgcaatcgatgccttggccacatgcatagtctagactcgattgcaattgagcatcggaaatgccggccttcggt

SEQ ID NO: 15098 - DNA, 429 bp, Gossypium hirsutum
  Clone ID: LIB3585-065-P1-K2-G6
cggacgcgtgggcggacgcgtgggcggacacgtgggttcggatcgaatctaaacttttatacctacgatcatactggttttgatattatgtctaaaaaattataagcatgaccccattttttttaaccactaaaagttcattactgttccaaccctaactttattagatcaaataatttacccccaaaaaagaacgcagacggcaacactaacatcccaaaatcctagttataataattgcatctaccctggtgggagcacttagaaaagccatacaaaatgtgaattgaaattggaaaaaggaaaaggatggttaaataaaggctgtgggtaccttatacttgtaactttaactgtaaagttattctcctttgatatggctttgctgtggtctgtcttctttttttgcggtaaaatatttatatctaa

SEQ ID NO: 15099 - DNA, 571 bp, Gossypium hirsutum
  Clone ID: LIB3829-008-Q6-K6-F11
cttttatgtaaaatgaaaaattaaattgctcaaaacgaaaaaaattaaggaccaattgtataatttaacctaaatttttgtttgaaatgatgatttaacatgccacgtcagcttacagttacaccgttaacgacaattaacgctcagtgactaaaatgttataacatggtaacgtaaataactaaaacgtaacatttcagacataaatgactaaaatgtaacctgaaataaataaaaatacttatttcaatagtttaccctatatatatatatatataacacccatattcgacatttatatcaaaatctcaataatataatatcttaatttccatttttttttctctaaaagaaaattttcctttgattgcagcttatagtaattgcatctaccctggcgggagcacttagaaaagtagataaaatatgtgggtcttattttagaaatacaaagtagctttgactgtaaagttattctcctttgatatgggtttgctgtggtctgtgttcttttttgggtaaattatttgatgtaataaagttagggttggaatgttgatgaacttttgtg

SEQ ID NO: 15100 - DNA, 400 bp, Gossypium hirsutum
  unsure (1)..(400): unsure at all n locations
  Clone ID: LIB3148-033-Q1-K1-C4
gaaaacattcacaacatgcataactttgaaattttaaatgaaaatgaagaaacataaagaaaatcgtggaggtagcaaaaaaaatgagctatctgaaagagttagtcaataaaggagttagccaaaaggctcaccaaatagttaacaaaaaaaaatgggctagctaaaagagttggttaagaaaggagaaaggaaaaaggttcataaaaaggagttagccaaaagagttcgccaaaaaggagcacttagaaaagccagacaaaatgtgaattgaaattggaaaaaggaaaaggatggttaaataaaggctgtgggtaccttatatttgtagctctaactgtcaagttattctcctttgatatggaaaaaaaaaaacnnaaaaaaaaaaaaaaaaaatatt

SEQ ID NO: 15101 - DNA, 936 bp, Gossypium hirsutum
  Clone ID: uC-gsronu33B004f03b1
cccatgctttcgaataagcaaacacacactctcatggctgctctgtatttcctttggctgtgtaatggctactttcttcttcttcctcctctccttccttatctgcttttcacttctcaagtgctgagccgtttattggagtgaactacggccaagtggcggacaacttaccgccgccttcagccaccgcgaagtttctaaaatcgactttcattgagaaagtctgattgtaccgtttcgttcccgctatttttcttgttttgttatatttttctctttggattctttatcttgcccttttctgttcctatctcttctcttttctctctcctttttcttttttttctcctactttttcttatcctttttcccttcttttttttttttctcttctttcttctaattttctatctttttatttcttttcttcatttctcctttcttttttctttctattatctctttctcttttctctttacttattttcttttatttcgattcttttctttctcctctccttttttctttatttttactctctcttttcttttatttttctttctctcactcttcttttatacactttcccattattttctacattatctttatttttctcctttcctctattctcttttttcttttctttattttcgatgtcttcctttttttttctctcttttcttacttttatttttttttctcttcattctctctatctttttcatttctcttttttttttctttcttcttcctctactcttttatactttactctttttgctcttttttctttattctcttacttctcttttctccccctcattctctcattatcctttttcttttcttcgtttttctatattttttttttttatttttttcttcctctccctcttcctacattattctccctccccccccctctccccccc

SEQ ID NO: 15102 - DNA, 623 bp, Gossypium hirsutum
  unsure (1)..(623): unsure at all n locations
  Clone ID: LIB3543-030-Q1-K6-B9
ttcgcccagcgtccgcccagcgtccggggggtggggaggatatggtctgaaccccatagcactcaaagcagaatgcgactgaatcaacctgagcatcaaacatgttcatgtacttgattccgtctccccgnagtcataatcgtgccccgcgtgtgggctgtgaaacaagcagaaggcaagcgtttggggggtggagtcactcttgagtgctatggggttcaaggatgtccagattatggttgccgaaacgggatggccatatagcggcgatagtaatgagggcggacctagcattgagaatgcaaaagcctataatgggaacttgattgctcatttgaaatcgatggtcgggacaccggtgatgcccgggaaatctgtggatacttacctctttgcactctatgatgaggacttgaaacccggtcccggttctgaacgggcatttggactttacaagtcggacctttccatgacatatgatgttggcatttcaaagagtagtcagactccaccgactccgaaaactgcggtgactcctcaaccaaaaccgactgcaactggttggtgtgtaccaaaggctggtatttctgatgctcaattgcaatcgagtctagactatgcat

SEQ ID NO: 15103 - DNA, 446 bp, Gossypium hirsutum
  unsure (1)..(446): unsure at all n locations
  Clone ID: LIB3583-033-Q6-K7-H5
ccccgcgtccggggtcatgcttataatctcttaacataaaaaagacacagaccacagcaaacccatatcaaaggagaataactttacagtcaaagctactttgtatttctaaaataagacccacatattttatcttacttttctaagtgctcccgccagggtagatgcaattactatgagtaggattttgggatggccatatagcggcgatagtaatgaggtcggacctagcattgagaatgcaaaagcctataatgggaacttgattgctcatttgaaatcgatggtcgggacaccgttgatgcccgggaaatctgtggatacttacctctttgcactctatgatgaggacttgaaacccggtcccggttctgaacgggcatttggactttacaagtcggacctttccatgacatatgatgttggcatttnaaagagtagtaaga

SEQ ID NO: 15104 - DNA, 355 bp, Gossypium hirsutum
  unsure (1)..(355): unsure at all n locations
  Clone ID: LIB3149-060-Q1-K1-H9
atttaatttttcttctccaattataaaaaaaaaaaatcatattttgcttcttgcatgttcgatgtaccatgtcttctctaaatgtattgttttatatatagtcaatgaattttggccttttcttatgcctaaaatgttggtttcatatccaagtttcagctgattctttacttgttcaaatgcttattatatgattatgaatgtttgaggattgaatactactcaaactcatgttgtaatttttgtattagaaattaaattatattttattttacaaaantnaaaaaaaaaaaaaaaaaaaaaaaaaaaaaaaaaaaaaaaaaaaaaaaaaaaaaaaaaaaaaaaannnnnnnna

SEQ ID NO: 15105 - DNA, 599 bp, Gossypium hirsutum
  Clone ID: GOSHI-09MAY01-C9226_1
cggacgcgtgggcaaggaactacatggcaaatcaagttcaaactagattgtactgcaaatgaaacggaaacatacaaactacgattggcgttggctactgcacatgctgctgaacttcaggtaagggtcaatgatgatggaaagtctcctctattttcaagtggacaaattggtaaagacaacacaatagccagacatggtatccatgggctttaccggctttaccatgtcggtattccggggaatctgcttcttgaaggagataacaccatatttctaactcaaccgaaaagcaccagccctttccaaggaattatgtatgactatattcgattagaaggccctgcatcttctaatggaaacaagaaagcttaaattttttccagatatccacaaaattgaagctagaaacaggtttgaacaagtgtctgtcaaagaagcatatcctgtttcatattgattaaaccgtatctctgtagttgatttatgtacaacatcaaaatcccatggattcaacacataaaataaaattgaaaatatttaaataaataaaaaaaggtaactagatcactgtctttaggtagttgctttctatgttt

SEQ ID NO: 15106 - DNA, 832 bp, Gossypium hirsutum
  Clone ID: GOSHI-09MAY01-C4976_1
aaattgtcggaggatgaattatcaagtcttaagaaacaaattcttgagggcttttcaccagatgatgcatacccatttggtgctccattgtttatggagaccccaagaccatgttccccacttgcgcagatggagtttctggcatttgaagagattatgccacttgctgcaataactgatgatgaagcctttcctgaaggcaatggaagtcaatcaggtcgcaaagcatcactatcgctcagtacactagatgtgctaagtgtcaatgagcttttggattcggttctggaaacagcgcgacaagtagcaagcttttcagtttcgcctacacccattccttatgaacaaatgaggagtcagtgtgaagctcttataataggtaaacagcagaagatgtcggtgattcatagcttcaagcatcaacaggaagccaaggcaacctttgaggaaaatggaaaggaggtcctctgtttaccgaatgtgaaagttgagttttcagaagatctcaagttgattagcaacgagcaagttcatgcaaggggacaacttgccctctgttcattggagtatggacaacattcattcaaattaccgccatcaagtccctatgacaagttcttgaaagcagctggatgctaaaaaggaagtggagttttcagtagatctgaagttaattagtaagcaacattttttcaggttactaccatcaagcccatatgataagttccttgaaagcagctggatgctagaagttggagacgtttcatacatgcatatacacatatttgttgtatcgaccctgccatgtgtcaattccttcaatttttttttt

SEQ ID NO: 15107 - DNA, 509 bp, Gossypium hirsutum
  Clone ID: GOSHI-09MAY01-C4936_2
gcgacgcgcacgcgtccgcccacgccgtctcggccccaagccgccaagccccctgccctgtggttagtcgcgtctcgaaaataagtgataccgcgtgttgtgtttgttgtaatgtgagggacgttgataaggaaaaaccagaaaagaaattagaggaaatgggaagttcgtcaaatggatgatttcttcggtggtggtgcttgcttcagatttgggcatagacgcccgtcctttcttatcgaaccaagacactgaaattgaagaccaagacaactggcatgactgttcgcaggatttttccgatgaagatttctccgacctcgagttcctccagttcgtctgccttcagggctctgataaatcgggtaatcgcattttacgcattgtcggaaagtactttcccgctccagttgttagcggggagcgactgaagagatatatataccacaagatatgcagtgagttgcctgaaggtccattctgcttagtttatatgcacagtacagtgc

SEQ ID NO: 15108 - DNA, 1101 bp, Gossypium hirsutum
  Clone ID: GOSHI-09MAY01-C4936_1
gggattcgacgcacgcgtcacgcgtaagaccacacatacactcagcttggttacagatgttagagggttaccttggaaattaaaagcagcaggtggagtagccaagccagaatccctgtaattagtttcgtttcgaaatgagggacgttgataaggaaaaacagaaaagaaattagaggaaatgggaagttcgtcaaatgatgatttctcggtggtggtgcttgcttcagatttgggcatagacgcccgtcctttcttatcgaaccaagacactgaaattgaagaccaagacaactggcatgactgttcgcaggatttttccgatgaagatttctccgacctcgagttcctccagttcgtctgccttcagggctctgataaatcgggtaatcgcattttacgcattgtcggaaagtactttcccgctccagttgttagtggggagcgactaaagagatatatataccacaagatatgcagtgagttgcctgaaggtccattctgcatagtttatatgcacagtacagtgcagaaggaggataactcccctggtgttactatcttgaggtggatttacgaagaacttccccctgagatcaaggataggctgcaagtcatctacttcatacaccctgggcttcgttcaaggcttgtctttgccactcttggccgattcttcttaagtgggggtttatactggaagatcaagtacataagccgcctacaatacctatgggaggacataaagaagggagaggttgagatccctgaatttgtgcaaaaccatgacgatgttcttgagcaccggcccttaacagattatggtattgagccagatcctctccacttaacagaggtacctaacactgcttactcattagggaggtatgaagagagattaacctcaagggaattcatgtcatagtttcgatattaaacacacagctgaacccagttaaagggtttgcaggctctggccagtaggaattatcaggtaaaacaagaaataagattgtctatagtagtctttatatcgcgtgccttgaattgtgagaaatcgctacgctgtacttgtagttaattaaatttggtgtgttatgg

SEQ ID NO: 15109 - DNA, 1034 bp, Gossypium hirsutum
  Clone ID: GOSHI-09MAY01-C4876_1
agtgggggggatggtggtgagagtacaagaaagaagtcgaggctaatttcaatgcttgacgaggtttaccggagctacaatcaatattatcaacagatacaagctgtagttgcatcgtttgaatatgttgccggactgggcaatgctgctccttacgcaaacttggctttgaaagccatgtctaaacatttcaggtgcttgaagaacgcaatcaccgaccagcttcagttcattaataagcctcatggtcaaacaagcccgggaaaagatgaaggtccaatgtttggaaacactgaaagaagcctttataaccgagctgttcataatgctgggttccatgagcaccaacctgtttggcgacctcaacgaggccttcctgagcgtgctgtaactgtacttcgagcatggctatttgaacactttctacacccttatccaactgacacagacaagcttatgttggctaaacgaactggtctatcacggagccaggtgtcgaattggtttataaatgcgagagtgagactttggaagccaatggtagaggaaatacacatgctcgaacaagctcaaaaaaattcgcaaaaggaggctagaaatccgaacaagtcaagtgaccatttgtcttccgcaaactctatcgcacccgaaaacccatctacctcctttcaaagggctcaggataccccatcaaagcgcacaagaagtgaaccactttccgatataccccttggaagtgaaccacataacttgacgtacaacagcttatcaagccatccacatgttggtatgggtgttagcatggctggtgggagtaatggtgtctccttaacacttggtcttcatcagaacaatggtatcagcttatccgagccattttcttttaatgcagctcagcggtttggccttggcctaagcagtgaggggtatgttatcggtggttatgaagcacaaaatcggcattttggcagggatgttatgggaggacaacttttacacgattttgtaggttgaaaaaatgtttcaaaagaaaa

SEQ ID NO: 15110 - DNA, 1096 bp, Gossypium hirsutum
  Clone ID: GOSHI-09MAY01-C4836_1
gttaatgaaaatttaaaaaattatataaaaaaaaactataaactagtgcagcggggtttcaatccctttgttcgaactgatatacaccagctattcggattcggacaacattgctataaattcagagaaggaatgatactaattataataatatatatgttttatcctcagcttgaatgttactgttacagtttacaagttaaaatttgggataagtaacagcaaattaccattacgaataatgaatacagaattaaatgcacacaattgctatggtaaaaggtgaaacctattcaggggtgccagtaactacacgatgctccccgattgcaatacccgctttcgtaaaatttacagacccgttgccctttgggcggaggtctgaatgaaccaactctgtttggaggaggaccaccaccaccatatgatgagtgcctattccatgaggaccttcccctgctgtgaaaatcacggtcccttgtatcaacatacctttgttggtccctcggatcgacgtacctctgttggtctcttggatcgacatacctttgttgatcccttgtatcgacgtacctctgttggtttccgaaatatgctggatttgttgcagaagtgcctgaatggatgctactacgattttcctggattgttccgtgacctgttccccaactaaggtttgtagtttcttgacctaaatcatcccaatgaaaacttgtatttccatgaacggctccccagttggtacccgtggtttccggtcctggtctccaaggggaacctacagtggtcatgccccaagttgttactggttgtgcaggaggttgcatgtctgaacgagcttcaaattggttaaccgagacatcgctaggcctcgtatcttcatccatttcggcacttgtggaagaatgaccgccggaactcttttgagcatcgagaacttcagaagtagagatcccgaatagctcgttggtcaaagctgctagagatggcatttgtagatcgtttgttgagcttaaagcgtcacttttcctggatcaggtgcagggctcagtcctcctacaggactaaaacaatcaggttcagaacctgagccaag

SEQ ID NO: 15111 - DNA, 633 bp, Gossypium hirsutum
  Clone ID: GOSHI-09MAY01-C4596_1
cccacgcgtccgcccacgcgtccgcccacgcgtccgcccacgcgtccgcggacgcgtgggcaaaattttaagtaacaaatttggttatagaaaaatggctactccatcaacactttgctgtgctatacttctcttcctatttccattacaattcatggcaacaacaaccccttcttgccccggtgattgcgagcctaatgatgccgatgacaatgatcgatttcattttgctcaaaacttagagttccttgaagctgagttcttcttgtatggtgcacttggcaaaggcctcgacgcctttgaacccgaatttgctaaaggcggaccacctccgattggtggcagacgggccaatctcgactaccttacccgtcggatcatcgaggaattcggttatcaagaaatcggtcataatagggaaattgtgagaagaaccggtgggattccaaggcctttgattgatattagctctgaaaactttgcaaaattatttgataaagcagcagggtacaatttggatcctccatttgatccttatgaagatcccatcaagtatatgttagcagtatatgctatcccctatgtgggactcaatggctatgttggtacaacccctttgcctcaaaaattcgc

SEQ ID NO: 15112 - DNA, 522 bp, Gossypium hirsutum
  Clone ID: LIB3584-053-P1-K2-H8
gtcagaagcacatttattcaagaatccaccaagggagctcggttgtttgctctaatatatttatttatgtacatatttcaagtcatttcaaaaatatgtataattgtagcaagtctcaacaatttcatggatggaggtaaggagtaacgacaaattctatcaagttgcctgagcagatgaatggagcaaatatacttttctttggctaaaatcttcttgtatggagcaacttgacaaaagcctagacgcctttgaacccgaatttgctaaaggcggaccacctccgattggtggcagacgggccaatctcgactaccttacccgtcggatcatcgaggaattcggttatcaagaaatcggtcataatagggaaattgtgagaagaaccggtgggattccaaagcctttgattgatattagctctgaaaactttgcaaaattatttgataaaacagcaaggtacaatctggatcctccatttgatccttatgaagatcccatcaagtatatgttaacagtata

SEQ ID NO: 15113 - DNA, 1072 bp, Gossypium hirsutum
  Clone ID: GOSHI-09MAY01-C4586_1
cttgaactacatcccatcattattctcttctcccataatccaattcaaagggatgaagggcaacgctcaaaatggcctgaaaaaagggccatggacacctgaggaagacaggattcttgtagattacattcagaaacatggtcatagcaaatggaaatcagtaccagctttagctggtttaaacaggtgtggaaaaagttgcaggcttccatggactaattatttgagacctaatattaagagaggcaatttctctagtgaagaagagcaactcatcattgatcttcatgcacttatgggcaacaagtggtctgcaatagcaagacatctccctggaagaacagataacgaggttaaaaatctatggaactcacgtttgaagaggaagcttatacagatggggatcgatccaataactcacgaaccattaactgatcccaggttacaccagttgcttgccgctgctagctttagtaacctcattaacaatccattagacatcatcaatgccctcatgttacaatcagatgctgttgcaacacttgctaaatcactccatttgtctcataacatgcttcaagctctagctagtaccccaacaacaatggcttctcaagacccaacaaaagcttgttccactagcaatgaatatcaatttggttcttcttcagagtcactgcctgttaatgttccaaatttggatactactccccagcctattcctccaatggctcctagacccactattgttgatgatcaccatgaaaccaacaacatcactaacccttcttcaactacctttcaagaatgggatgattttatggatggtggtgaagcaagtgaaccttattggagggatattatagaccaggcatcatctcagtcatggcctatctcttagttaagtggagctgtgggattgaataaatacatacgtatatataaataaataaataaattgtatgtatgtatacatacatatatatatcaagagtttggtctaataacttgtcgaaaacctagcatcatcaattaagaattggtatctcattagatgtaaattggaggaaca

SEQ ID NO: 15114 - DNA, 1026 bp, Gossypium hirsutum
  Clone ID: GOSHI-09MAY01-C4546_1
cccacgcgtccggcatctgatctgaaccaagatgaaaaacccaaaccagatttactcatggcccccctccccaactatgagacagttatgattattttaaacgcaagattgttcttcgattcgttgaatttcgttaagtgaagatggaagactgggaggatgagattccacctctccctgcaaaggaacaacttaaaagcaaatgggatgatgaagatattgatgactctgatatcaaggaatcatgggaggatgaagatgaacctgctccgcctccgcaacctgttgcaaaagctccagacgaaaaggccccaaaaaaggctgcattaaaagctactgaaaagaaaggaaaagctgttgaagtagctaaagaagagccccttgatccagtggctgagaaacttcgccagcaaaggcttgtggaagaagccgattataaatcaactactgaactgttttccaagaaaggtgatgataagactcttgataattttattcccaaatctgaaagtgactttgtggagtatgctgagcttatttctcacaagcttcgcccatatgagaaaagttatcattatattgctctactcaaggctgtgatgagattgtcattgacttctttgaaagcagctgatgtcaaagatattgcatcttcggtcaccgcaattgcaaatgaaaagctaaaagcagaaaaagaagccacaactaaaaagaagacagttgggaagaaaaagcagctccatgttgataaaccagatgatgatttggtggttgctgcttatgatgacattgatgattacgactttatgtgattcatttttgggcaaatgccacccaccttcaagcgtttgcactacggatccttgggttaccacaacaaccatatatatgcagatccggcggctcttctcttttttaatttttccctttctttcttcttccaattcttggagaaatttagttgtctgatgaatagtctatccataatatggatgatattgttacatgaagaaaaccattagatta

SEQ ID NO: 15115 - DNA, 518 bp, Gossypium hirsutum
  Clone ID: LIB3585-007-P1-K1-G5
gatattctttcccaatcgcaattgctttcctgacctatgcctaaagaatgaacacactgaaactgtcttttcttaccatctgtacacttcattatttttacctttgattacaaaggaaacctaaggaagccatcattctgttaagccaataaaaccgttcagattgcagagttgcaactatgctcaacattcttaacatatactttaacagtgcatttctgatttcatagcttcgatttgacaaatgctagaaagataacaaggtgataaggtgttcggtgaagatgaaagactgcgaggatgagattccacctctgcttgcaaaggaacaacttaaaagcaaatgggatgatgaagatattgatgactctgatatcaagaaatcatggtaggatgaagatgaacttgcttcgtctacagtctaatgggcttcattgtaacttgtatgacctcgttgatgaagacgattctaaatctacgactgaactatgttccaagagaggtcttgatcaaacttt

SEQ ID NO: 15116 - DNA, 458 bp, Gossypium hirsutum
  Clone ID: LIB3584-016-P1-K1-C11
cccacgcgtccgtgctggaaagataacaaggcgagttgttgttaagtgaagatggaagactgggaggatgagattccacctctccctacaaaggaacaacttaaaagcaaatgggatgatgaagatattgataactctgatatcaaggaatcatgggaagataaagatgaacttgctccacctcttcattgtaacttgtattaattacgtttactagtgtattttcttgtcggggctctttggtcctatagatctttttattacttattaaaattctatactggaaaacatgttcaaaattgcaaccttttaaaccaactaaacataggcaagaaaaacttagttacaagtgttgagcatggtgtatggatttgcttgtgttattctgaaagttattagttatttctggattggtcctgatttgatttttgatacattgttctcctggcattttcaga

SEQ ID NO: 15117 - DNA, 388 bp, Gossypium hirsutum
  Clone ID: LIB3165-060-Q1-K1-D7
aaggaaatacatttttttttcattttctggtttcagggttgtggttagattcgtggaatttgttgaagtgaacagtacatggaggactgggaggatgacattccgcctcttgtttcaaaggagcaacctaaaagcaaatgggatgatgaagatgttgatgatgctgatatcaaggaatcgtgggaggatgaagatgaagaacgtcttctgcaacccgtagcaaaagctactgaagagaaggcccccaagaaacccttatcgaaagctaccgaaaaaaaagggaaaactatcgaaatagctaaagaagagccccttgatcccattgccgagaaacttcgccaacaaaggcttgtggaagaagctgattttaggtcgactaccgaacttt

SEQ ID NO: 15118 - DNA, 470 bp, Gossypium hirsutum
  Clone ID: GOSHI-09MAY01-C4536_22
tccgcccactcgtccgattgttttcaaaatcattggaagcaataaactgttgtgcccagcatctgtagacaacttgggagcatcaagtatcccatgtaatgcccatgctcggtcgcgcgggcggtcgcggggatcctcgtatacaagaagaggctttgagaaagtctctattccttgccaaacagcttgatatgcagggatgatgaagatgattctgctgccaagatgaaggcagctgaggaagccttcgaagcaaaacagaaagtaacaaatagcttgtctgctacctgttctttttttttttatcatgttttataattttgtgacaaattgttcttggtactctgaagatatttatgcagaattaccctatgattctattgtatttatactgcacgactgcaccatgtatttcttaactagtttgataaattttaaagaaaaaaaaaaaagaaaataaaattacatat

SEQ ID NO: 15119 - DNA, 995 bp, Gossypium hirsutum
  Clone ID: GOSHI-09MAY01-C4536_21
gggtttaggggtttggatttgattctcgaaattttgtaagagaaggtgacgtaaatggaagtggagttacccaggcctgataatcccgccatgacctttgacgaggtttccatggagcgtagcaagaacttcgttaaagctttgcaggagctcaagaacttaaggcctcagctttattcagctgctgagtactgcgaaaagtcgtatctccataatgagcagaagcagatggtactggacaacctgaaagattatgctgtacgggctcttgtaaatgctgttgatcaccttggcaccgtggcttacaagttgactgatcttcttgagcagcaaacattggaagtgtctaccatagagctaaaagcatcttgtttaaatcagaaacttcttacgtgccaaacatacacggataaagaaggtatcaggcagcagcagttgttggcatttttcccatgacatcacaagcactacattttaccgaatgctgtcagcaagaaggtacattttagtccccaggtacagactgatcctaggcaaacttatctccatgctaaagctcgtcttcagccttcagatactcctgcatcaaaaactctttcttggcacttatcctcagaaaccaagtctactttgaaagggacttcacaaactttagcaagcaatgaaatctcaaaacctcctgcgcccgcttctgaggttttccagttagtggagaatggagacaatgcaagggcaaagtcttcagcagcactttttcctgcttctaatgcacttgtcccatcactgggtatcacacatagggagttggagggttccaaacctttgacagcattcaggtcatttgataacccaaagcgcgacattatacgtgcacctgttaggagcaaaagtgtgctgtcatctttctttgtcaaacaaaaacaaatgaagctaaaggctggatatgttgcatgaatctcctaaaacaaacttacgacaacgatgatgccacacta

SEQ ID NO: 15120 - DNA, 746 bp, Gossypium hirsutum
  Clone ID: GOSHI-09MAY01-C4536_20
cacgcgtccgcctacgcgtccgcccacgcgtccggaagaggaggctgccgaaaagttggcaccaatcaaactagaaaatttagggaccgcacgacttgtggttgatttcgataggtggtggactggtgaggaatctgtgaatgttctcttagaatccacaggtcaagtgactacagtaaagtctgctagacaggtcattgatgcactgaatgttgagggacctgacattgatataatacttactgaagtcgacctccaaatgacaaaaggaatgaagttgctaaagcatattatgcggaataatgaactgcggcgcattccggttattatgatgtcggcccaggatgaggtctctattgttgttaagtgcctgaggcttggtgctgctgactatcttgtcaagcctttacgaaccaatgaattgttgaacttgtggacacgcatgtggagaaggcgacgtgagggatgatgaagatgattctgttgccaagatgaaggcagctgaggaagccttggaagcaaaacaaaaagttacaaatagcttgtctgctacctgttcttttttttttatcatgttttataattttgtgacaaattgttcttccctgcatttatattgtattgtatttatgcaaaattaccctatgttttataatatcatgccaagatatttatgcaaaattaccctatgattctattgtatttatattgcatggttgcaccatgtatttcttaactagtttgat

SEQ ID NO: 15121 - DNA, 256 bp, Gossypium hirsutum
  Clone ID: GOSHI-09MAY01-C4536_17
ggacaaatgtatcgttatgaggatgattttgaagaagccatgcttcaggatactttattaccaagatttccttgattaagtaaatgtattatatcttttattaccaagatttacttgattaagaaaatacattgtatattttattaccttgcatatgtattatttattttagttttgattctaaaaaaagtcataaaaacaaagatgaaaataaaaaaagaaaaaaataaaaaagaaccaaataaaataaaagggc

SEQ ID NO: 15122 - DNA, 592 bp, Gossypium hirsutum
  Clone ID: GOSHI-09MAY01-C4536_15
cccacgcgtccgagtttgtacttcttggttcatgtccagttccccacattcagagggaatgtgagggtatagcaaaccaatgccaaaactacgaacacattcggctaatactaaaatatgacgagtctctttctcatgccatttacgcagcatctgacatgttcatcatcccatctatttttgaaccttgtggccttacacagtgcttgtacaagagatttacactatcatgatttgtacaatatacgaagttgatgactgatccaaatgcacccattattgatttttatccgaccgattttgaagttgacatgaatggcaagcggtattcttggcagggtcttgcaaaattgcctttcattgatgaagagcaacttcttgctgaggttgcaaaaatagaacacactgtgacggatgaagaagcacagagaaacagtacagtgtgtgacatgctttttgtggctgcatcacaccgcctctctgaacaaatcttttctcttgacagtcgtaaacaatcgccagaaaggcaacggattgaagtcaaggaggaagtcaaacctaatttgagggtctatctctattcatcttctta

SEQ ID NO: 15123 - DNA, 458 bp, Gossypium hirsutum
  Clone ID: GOSHI-09MAY01-C4536_7
gttccttcaagctgtgccctggtattgtagagaataagttaagaattgacttaaatttaaacatttgcctgacacacgctgcattattgttgaagtcagcatgttttgttttgttttgcttttgccagtacagctgttgtagttatgtaaagagaatggggcctgccaataataataagcatgtaggcacaaaatctgctgttcaaattcgaagccatgctcaaaagtttttctctaaggctcattgctttgagttcattacaagatttccttgattaagtaaatgtattatatcttttattaccaagatttacttgattaagaaattgaattgtattttttattacattgcaatgtgtatagttataggtaggttcaactagtcagtctgtttctcatatgtattatttattttagttttgattctaaatttttatttttactttaatatttatgac

SEQ ID NO: 15124 - DNA, 432 bp, Gossypium hirsutum
  Clone ID: GOSHI-09MAY01-C4536_6
tcgcccacgcgtccgcccacgcgtccgcccacgcgtccgtccacgcgtccgggatgacatactggattgtactcttattctcatgcagagcatgtaggcactaaatctgctgttcaaatttgaagccatgctcaaaagtttttctctaaggctcattgctttgagttcattacaagatttccttgattaaataaatgtattatatctttttttaccaagatttacttgattaagaaaatgcattattgcttgagaaagcaaatccgcatattgctctctctcgaattaatttctcattctgagcctgctgtagtagcattcatctatgcccttgaggccttgactgtacttgggttctgttgttgcaatagcttgcgggatggtacatagcatggctatattactgaagatgagcatattttattgggtttc

SEQ ID NO: 15125 - DNA, 522 bp, Gossypium hirsutum
  Clone ID: GOSHI-09MAY01-C4536_4
ttaagttttaaagagtggaatggttacaagtgattcaggacatcaatacaaacttcaaagtgatgcaaaatgtgatacaatgggaaccttgtggcgcattctaggagtaaataatggtgctcagagagtctttggtgaagccactggattttctcttctgctaaccaccctccatagttttcagggtgatggtcactcagaagaaccttatttattagtttacatcaaagtcttcacatatttattacgccttatgacagcaggggtgtgtggtaatactattaataggacaaaactgcatgctatcatatcatcacacacattttatgatcttctatccgagtctggcttgctgtgtgtggattatgagaagcaagtgatacgtctattgttggaacctgctcaaaagtttttctctaaggcttattgctttgagttcattacaagatttccttgattaagtaaatgtatgatatcttttattaccaagatttacttgattaagaaaatgcattcttgttt

SEQ ID NO: 15126 - DNA, 614 bp, Gossypium hirsutum
  Clone ID: GOSHI-09MAY01-C4536_3
atcggatcagctcagagagcaaaggagggaaggtatgctatgtggaagatgatgccagaatatggtgccggtcattggtagtcggaaagtacattactagaccaattattactgacgatggccaaccgatagaaggtgaagattgtcatgtgacaagtgctgtttcagacaacaagaaagtggcgcactggatgcttttcctgcatcaaattggtttggatgtttttcgaaccgatcgagcacttgtgttctacgaggatgaagctaatcaagcaaaactttgggatattcttgctatatattcatgggtagatgatgatattggttatgttcaaggaatgaatgacatttgctctccaatggtaattcttcttgaaaatgaagccgatgcattttggtgctttgagcatgcaatgcgcagactgagggaaaactttaggtgcagtacaagttcaataggtgtgcaatcccaacttggtatactttcacaagtaattaaaactgttgaccctaagcttcatcaacaccttgaggatctagatggtgggggggttttggttgccgtttcgcatgctgatggtacttttccggagagaattctccttcgtcgatgc

SEQ ID NO: 15127 - DNA, 822 bp, Gossypium hirsutum
  Clone ID: GOSHI-09MAY01-C4536_2
gtttatgtaacaaaaagtacaaacactgtaataatttagctgagtctcttttttcatacaattttatagatggtgattattggaattttaactaacacaggttcctattttttatgggtctgcaaatgcttgggtagaggcaatagaacaagttggcagaaaagaggccttggatcggggctttgggatgtagaaaacgacaatgatggccaacaagaaggctgcgttttgcgggttatatcccagttttagtcattctatctaaaatgttctttgcagcgattgggtttaaagtagaggttgtacaatacaacaacatcaagtttcaagtatgggatttagaaattcatatgttggaaatctttctcttttttatgaaatagaggagaagcttaagcagggtcacaacgttgtacttatatcaaaccatcatactgaagctgacccaatcatcatctcattgttgcttgagaaagcaaatccgcatattgctgagaacatggtggttctctcttgaattaatttctcattctgagcctactgtagtagccttcatctatgcccttgaggccttgactgtacttgggttttgtggttgcaatagctgccgggatggtacatagcatggctattactgaagatggaacattattttcttgggtttcctcagatcctcatcttagatgccaacaggttctattccattatctttgttgattttaacttcctctggagtgaagcttttatttacttcatttggatgaatttgtacagctatattccctttgtgagaaaacaatcgtaagcattctgcttgtaagt

SEQ ID NO: 15128 - DNA, 662 bp, Gossypium hirsutum
  Clone ID: GOSHI-09MAY01-C4536_1
gagcagcaacctcgcccggccggtggattattcaactttacaaatacacatagtaaagggtaaagggtatggggatcgaattgggctatgagcagcaaattgtaggggaattaaaacgtcacaccaaattgggctatgagcagcaaagaaaaatttttttaattggcagaaaaccaacttcccttttctttcccatactgccagaaaattgaggggaccgcacggcacttttaatttcttgtggttgatttcgatagggtggtggggactggtgaggaatctgtgaatgttctcttagaatccgcaggtcaagcatgacactgatggttttgataaacaaggaatgaggcttctgcttgcgacacttaacaggatatttgattcattgcagacaacttatgaaggatttcagacttcaacggtaaaggcaatatatatatttgatttatctgcacaagtgcccgttcggtgccaaattgccggctcacattcgaagtcctgctcaaaagtttttctctaaggctcattggtttgagttcattacaagatttccttgattaagtaaatgtattatatcttttattaccaagatttacttgattaagaaaatgcattgtatattattaccttgcatatgtattatgtattttaagtttcattct

SEQ ID NO: 15129 - DNA, 590 bp, Gossypium hirsutum
  Clone ID: LIB3828-020-Q1-N6-F5
ctcggtaataaaaagaataatacttttatttaatcaaggaaatcttgtaatgaactcaaagcaatgagcgtgaaactgaaagcaacagaattgtaatgaactcaaagcaatgagcatcagaattgagaagaaaaaaaaaatcacgatacgcaaacaagatccaaaacttctgttcctttggacgcccacactggatagtccccgcttcaacgccattggctatcagagcccgaaaagcatcagtaacttggcgtccttgtagcccatctttttgcagagaccatctattatcagtatttttcttctttgaaaaacccgtaaaatatgggttttggtgttaaataatcgactgttcagcaatgctagctgccttaccataagcatcttggatgttctcagcaagcctaaaggttgaagacaagatttagcatggagataactttgcctaggatctgtctgtaactgtggactaaaatgtatcttcttgctgacagaattcggtaaaatgtagtgcttgtgatgtcttgggataaatgccaacagctactactgcctgataccttctttatccgtgtatgtcttaaaatgaa

SEQ ID NO: 15130 - DNA, 422 bp, Gossypium hirsutum
  Clone ID: LIB3146-023-Q1-K1-G5
cccacgcgtccgcccactcatcctctcacttcttacgcccacgcgtccgggatgacgtacgggattttactcttattctcatgcagagcatgtaggcactaaatctgctgttcaaatttgaagccatgctcaaaagtttttctctaaggctcattgctttgagttcattacaagatttccttgattaaataaatgtattatatctttttttaccaagatctacttgattaagaaaatgcattattgcttgagaaagcaaatccgcatattgctctttcttgaattaatttctcattctgagcctgctgtagtagcattcatctatgcccttgaggccctgactgtactagggttctgttgttgcaatagctgtcgggatgtacatagcatggctatattactgaagattgagcattatttta

SEQ ID NO: 15131 - DNA, 606 bp, Gossypium hirsutum
  unsure (1)..(606): unsure at all n locations
  Clone ID: LIB3825-014-Q1-K6-A11
gctgcaatgagaaggaatctagggctttcatctgctgatgatcaacggccagtggtaggctgcataacaagattggtgccacagaaaggtgttcatctgattaagcatgccatatatcgaacattggagatgggcggtcagtttgaacttcttggttcatgtccagctccccacattcagagggaatttgagggtatagcaaaccaattccaaaaccacgaacacattcggctaatactaaaatatgacgagtctctttctcatgccatttacgcagcatctgacatgttcatcatcccatctatttttgaaccttgtggccttacacaggttagtcacctattgcacatgttgattcacgaattctaaaagctgttgctatcgagaactctaaggatgtggacgcagctgcggagattgttctgtctgagattctgccttacgccttacctatctaaacgaaccgtggctggtagttcttcctcacggaatcgaagccctcctgtgcaagaaaatgaaggtagctttttttatgatttagttgtaaacttgtttttttctgcattgttctttggcaatntttcaagtttgtggaataattagttg

SEQ ID NO: 15132 - DNA, 442 bp, Gossypium hirsutum
  Clone ID: LIB3149-004-P1-K1-C9
cgattatgttgtatattgaatatttgagattctgatattctattgagtgttggattgaattctacattgcaggtggtagaatgttttgtggtgcagaccaatgtgcaaggctgtcaagtttatatcttaattctcccctctgattggcagaggatcatgttctgttcatgcccaaaaacgatttctagcatatgttgaaaaagccaagactgctggagggttggattcgtcatttcattatggcaatggcagaaacggtaaagagaatgggccgtgccaataataacgactgctgtagttatgtaaagagaatggagcctgccaataataatgaagcatgtaagcactaaatctgcagttcaaattcgaagccatgctcaaaagttcttctctaaagctcattgctttgagttcattacaagatttccttgattaagtaaat

SEQ ID NO: 15133 - DNA, 435 bp, Gossypium hirsutum
  unsure (1)..(435): unsure at all n locations
  Clone ID: LIB3147-033-Q1-K1-D12
cccacgcgtccgcccacgcgtccttttaatttcaaaacccatattttacgggtttgtcaagtgagaaaaatgctgagaatagatggtctctgcaaaaagatgggctacaaggacaccaagttactgatgctttacgggctctgatagccaatggcgttgaagcggggactatctagtgtgggcgtccaaaggaacagaagttctggatctcgtttgcgtatcgtgattctttttttcttctcaattctgatgctcattgctttgagttcattacaagatttccttgattaaataaatgtattatatcttttatgatcaagatttacttgattaagaaaatgcattgtatgttttattaccttgcatatgtattatttattntaagttttattctaaaattttatttttacttaaaaattctaacttttttatttt

SEQ ID NO: 15134 - DNA, 370 bp, Gossypium hirsutum
  unsure (1)..(370): unsure at all n locations
  Clone ID: LIB3146-055-Q1-K1-E3
ataacattataagacacctaatttactataacattataaaacaatcttaaaaagttgaacggatgtacttatctttgccatgttcactatggtttgaacagattaagttacttttattttcatgcagagcatgtaggaaccaaatttgcagttcaaattcaaagccatgctcaaaagtttttctgtaaggctcattgctttgagttcattacaagatttccttgattaagtaaatgtattatatcttttattaccaagatttacttgattaagaaaatacattgtataatttattaccttgcatacgtattatttattttaaaaaaaaaaaaaaaaaaaaaaaaaaaaaaaaaaaaaaaaannnnnnnaa

SEQ ID NO: 15135 - DNA, 351 bp, Gossypium hirsutum
  Clone ID: LIB3146-025-Q1-K2-F2
ccacgcgtccgggtttgaacagtttaagttactcttattttcatgcagagcatgtaggcaccaaatctgcagttcaaattcgaagccatgctcaaaagtttttctctaaggctcattgctttgagttcattacaagatttccttgattaaatacatgtattatatcttttattaccaagatttacttgattaagaaaatgcattgtatgttttattaccttgcatatgtattatttaatttagttttggatctaaatttttaattttacttaaaaagtctaacttttggaattttaatggggtaataaattaatattttaaaatcttaaattaaattcaattatttttatt

SEQ ID NO: 15136 - DNA, 380 bp, Gossypium hirsutum
  Clone ID: LIB3582-053-P1-K1-C4
cgagttttgttctttcgaatcccagtggggaaactttaggtgcagtataagttcaataggagtgcaatcccaacttggtatactttcacaacttggtatccatatattccacttagaatagagaaggttccaaacttttgaaagtcgaagttaccgattgctcccaagaactaaccaaggaggtgaaatctaaatccaaattctcaaattcatatttccaaacatagcatttggaaattcatatttctgagcctgctgtagtagccttcatctatgcccttgaggccttgactgtacttgggttctgtggttgcaatagcttccggaatggtacatagcatgggtattactgaagatggagcattattttattgggtttc

SEQ ID NO: 15137 - DNA, 639 bp, Gossypium hirsutum
  unsure (1)..(639): unsure at all n locations
  Clone ID: LIB3582-058-P1-K1-B1
gnaaaaatttttaattgcagnaaaaccacttcccctttccctactgccaaaaatttagggactgcacgacttgtggttgatttcgataggtggtggactggtgaggaatctgtgaatgttctcttagaagccgcaggccaaggtaaagtcttccctttccagattcagaacttaatttatttatttttattattttagaatttttatatttataattttttttccttatcctaaattttttttcttgaaaatcacaaattaattttattaatttaagacaatctaataagtttatatttgaattttttagacaatcatattttctttttctatttcccacacttgggtatgataatggtagcagtgaagtagaggttctcacaccgaaaaagtgaataaaatcacaagtttccctctcattatcatttccctaaaatgaaatcattttgacttctttttatgcaagactttcgtgatacaatcccatttatcattcatacatacctacgtgtatatatatatattagattatatacatgcacgacatgaatgaaattgatataataattaaatatggtaatacttgagttattaaaaactataatattttgagtttgagtnctataaatatattttgag

SEQ ID NO: 15138 - DNA, 298 bp, Gossypium hirsutum
  Clone ID: LIB3148-029-Q1-K1-A6
cggctttctcttctgtttttgcttctttgattcagctaatagagcatgtaggaaccaaatttgcagttcaaatttgaagccatgctcaaaagtttttctctaaggctcattgctttgagttcattacaagatttccttgattaagtaaatgtattatatctgttattaccaagatttacttgattaagaaaatgcattgtataatttattaccttgcatatgtattatttattttaatattgattctaaatttttatttttagttaagtattctaactgttggattttgcaaaagaat

SEQ ID NO: 15139 - DNA, 382 bp, Gossypium hirsutum
  Clone ID: LIB3166-044-P1-K1-F9
cccacgcgtccgcccacgcgtccgtccacgcgtccgcccacgcgtccgcccacgcgtccgctcttctattgcaattttttctaagccagattctgtcagcaagaaggtacattttagtccccagttacagacagatcctaggcaaaattatctccatgctaaatcttgtcttcagccttcaggtatagtgtttcttagcaagtaggaactcttctatgttagttgttttcggcattgttgtgatataatttcttaaaggaagaaggtaaacatcatggtactgattaaatgtttttcaagtatagatactcctgcatcaaatactctttcttggcacttatcctcagaaaccaagtctactttgaaagggacttcacaaact

SEQ ID NO: 15140 - DNA, 635 bp, Gossypium hirsutum
  Clone ID: LIB3543-053-Q1-K6-G3
gcttctttaactcactttttgaaggtttgctttcagaatttaggattttagaagctctccatttaagatagaagtatagacattttgataatacacggttcggggctgctgatatttggtttttctatttcatcccatgctttggctgacacggtaatgctggcagtatgggaaagaagggaagttggttttctgcaattaaaaaaattttctttccacactccaaggaaaagctaaataatgaatcggaaaaaagaagtgataaagaaaagaagaaaggcccaggaaaattaaggcatggagaaaccaattccttccttcccctctttagaaagcccagcagtatagagaaaattctgggggaagctgaacgagagcataatctaatattcaggcctcccacacctccggagcagccaagaacaccaccttttgtgcctcatagacctgcatctccacagggtccatctccaagggttgcctctcctagggttgcttctccaagagctgcttcccctccacgagctgcatcccctagagctgcttcaccacctccacctgcaccttcaccccctcgagctgcttctccacgagttgcttctccaaaaggtgcttctccaaaacctgctccttct

SEQ ID NO: 15141 - DNA, 529 bp, Gossypium hirsutum
  Clone ID: uC-gsflnu33B092g11b1
gtgaatcacagcttcaacagcttatgctcaaatatgtgcaccgtatcacacatgggcggtttgacaaggaactgaacaaaaaatttagggactgcacgacttgtggttgatttcgataggtggtggactggtgaggaatctgtgaatgttctcttagaagccgcaggccaaggtccaatctacatctgatggagctgattccactctttcaaaccccctgtgtgaggagtctgctcaaaattcttcaaaatactctaacagacagagcatacatccaccacctgcctttggctcatcgcctaatcttgaagcccttgcacttgaagcaaataagtctaaggatcaagatggagatagttctttacttgacagttcacatctttcccggagtgcattaactgattaggtcctgtcaaagttcaacttttttatctcagagcaattctttaccaccattctttagttgacttcagttttagtcctatgcatgaagtttcattttcatcagaagaccaaccaaaaatttctt

SEQ ID NO: 15142 - DNA, 404 bp, Gossypium hirsutum
  Clone ID: LIB3149-002-P1-K1-C12
cccacgcgtccggagcagcaaagtatgaatgaatgtgattatctactgtacaaatatacatagtaaagtctagagtatgaatcgaattgctatgagcagcacatttagggataaaatgtcacactaaattgctatgagcagtaaagaaaatttttttaattgcagaaaaccaacttcccttctttcccatactgccagaaaattgagggaccgcacgacacttaatttcttgtggttgatttcgataggtggtggactggtgaggaatctgtgaatgttctcttagaatccgcaggtcaagcatgacactgatggttttgataaacaaggaatgaggcttctgcttgcgacacttaacaggatatttgattcattgcagacaacttatgaaggatttcagactt

SEQ ID NO: 15143 - DNA, 416 bp, Gossypium hirsutum
  Clone ID: LIB3166-042-P1-K1-A7
ccggtaaggaccgggcggaccgacccgtccgtccacgcttccgttttatttgaacattttttgtcatccaagtttgacaaggaactgagcaaaaaatttagggactgcacgacttgtggttgatttcgataggtggtcgactagtgaggaatctgtgaatgttctcttagaagccgcaagccaaggccaccgtattttctttttctatttcccacacttgggtatgataatggtagcagtgaagtagaggttctcacaccgaaaaaggtccaatctatatctgatggagctgattccactctttcaaaccccctgtgcgaggagtttgctcaaaattcttcaaaatactcttaacagacagagcatacatccaccacctgcctttggctcattgcctaatcttgaagcccttgcac

SEQ ID NO: 15144 - DNA, 414 bp, Gossypium hirsutum
  Clone ID: LIB3145-029-Q1-K1-D8
gtttggggctgctgatatttggtttttctatttcatcccatgctttggctgacatggtaatgctggcagtatgggaaagaagggaagttggttttctgcaattaaaaaaattttctttccacactccaaggaaagctaaataatgtccatctacatctgatggaactgattccactctttcaaaccccctgtgcgaggagtctgctcaaaattcttcaaaatactctaacagacagaagtttgcttttattttcactttggacattaactgtattgttaatgatgctgacaattctagctggcttttcaattgtcagcatacatccaccacctgcctttggctcatcgcctaatcttgaagcccttgcacttgaagcaaataagtctaaggatcaaaatggagatagttcttta

SEQ ID NO: 15145 - DNA, 417 bp, Gossypium hirsutum
  unsure (1)..(417): unsure at all n locations
  Clone ID: LIB3493-052-P1-M1-G7
ctgtaattgatttatgtatgtgtataacataaagcgtggtgatttggaaaaagagatgtaacanacatgcagtgtaagtatattttctcatactgcacatgtttgattcacgaaattctaaaaagctatttgcttatcgagaaacctctaaggatgtgggacgccagcttgcagagattgtttcagtctgaagaattctgctttacctttatctaaacccaaatcatggcttagtnnagttcttcctcacccggaatcagagcnncctcctgtgcaaagcannaatgaagggtagcnnttttttttattgatnnttagttgtagaccttgttttttttcttgcatttgtnngctttggcagnttttgccaagttttgtgggaaaataatatagntaattattctcctgtattgttct

SEQ ID NO: 15146 - DNA, 400 bp, Gossypium hirsutum
  unsure (1)..(400): unsure at all n locations
  Clone ID: LIB3145-017-Q1-K1-B11
ctttttactcatttttaatcccatgctataattgatttatgtatgtgtataacataaagcgtggtgatttggaaaaagaaatgtaacaaacatgcagtgcaagtatattttcttacacctactgcacatgttgattcacgaattctaaaagctattgctatcgagaactctaaggatgtggacgcagctgcggagattgttttgtctgagattctaccttacctatctaaacgaaccggggctggtagttcttcctcacggaatcggagccctcctgggcaagcaaatgaagctgggatgatgaagatgattctgttgccaagatgaaggcagctgaggaagccttggaagcaaaacaaaaagtaacaaatagcttgtctgctacctgttctttnttttt

SEQ ID NO: 15147 - DNA, 370 bp, Gossypium hirsutum
  Clone ID: LIB3120-012-P1-K1-E2
cccacgcgttcgaacagaccagcaatggaagttcgtctcgtgcaggtccaatctgcatctgatggagctgattccactctttcaaacccgctgtgcgaggagtctcctcaaaattctccaaaatactctaacagacagagcatacattcaccacctgcctttggctcatcgcctaatcttgaagcccttgcacttgaagcaaataagtctaaggatcaagatggagatagttctttacttgacagttcacatctttcccgacccatgcatgaagttacattttcaacagaagacaaaccaaaacttcttagtcagttgaccgcattgcttgctgaggttgggctgaacatccaggaagcacatgtggttt

SEQ ID NO: 15148 - DNA, 377 bp, Gossypium hirsutum
  unsure (1)..(377): unsure at all n locations
  Clone ID: LIB3135-024-Q1-K1-B11
ggctttttgattatctttcanaaaatgatcagccaaatgaaaagaacacgattgtgttcaaactccatgtgcagtgtaaaagaggtagtccacgtattacagggatgatgaagatgattctgttgccaagatgaaggcagctgaggaagccttggaagcaaaacaaaaagtaacaaatagcttgtctgctacctgtttttttttttttttttatcatgttttataattttgtgacaaattgttcttggtactctgaagatatttatgcaaaattaccctatgattctattgtatttatcctacatggctgcaccatgtatttcttaactagtttgataaattttatgtgtggtgtttaatttttcgttnnnnaaaaa

SEQ ID NO: 15149 - DNA, 1389 bp, Gossypium hirsutum
  Clone ID: GOSHI-09MAY01-C4526_1
cccagcgtccgggctatttaagttatagttttagacccttcaagaattgcccggccagtgcccttgcttatgatcacatggttgggagctttgatgacagtgctactgttgaagaatttgctaaaagagtggagttttgacggttgaaactgaacatgtggatgttgccactctagagaagcttgaacaacaaggaattgattgtgagcctaaagcttctaccattcgaattatccaagataaatatctccagaaagttcatttttctcggcatggcattccacttcctgagtttatggagattaataatctagaagaaaccaagagagcaggtgaactatatggctatcctcttatgattaagggtaagaggttagcttatgatgggcgaggaaatgctgttcccacgcgtccgcccacgcgtccgagagctttcttcggccatagatgtccttggtggatttggccgtggcctgtacgttgagaaatgggctcctttcataaaggagttggctgtcatcgtggcaagaggaagagataactctatcctgtgctatccacttgttgaaactattcacaaggaaaacatatgtcacattgttaaggcacctgctgacgtgccatggaggatcagaaaacttgcaaatgatgttgcatataaagctataagttcattagaaggtgctggtgtctttgcagtggagttgtttttgacgagggatggtcagattctactaaatgaagtagctcaagacctcataatagtggtcatcacactattgagtcctgctatacatcacagtttgaacagcatttgcgggctgttgttggtcttcctctcggtgatccatccatgaaaactccagctgctatcatgtacaatctactgggtgagcgtgaaggggagccaggtttcagagtggctcatcaacttatagcaagggcactagagattccaggagctactgctcattggtatgataagccagaaatgcgaaggcaaaggaagatgggtcatataactcttggtggcccttctggtggtattttagaagtacggctgaaatcaatgctgagggaagaagggtatgaaaatccaaatgaagttgcaccacgtgttgggattgtaatggcttcggattcagatcttccgggtttgaaggatgcagctcgaatcttaaatacgtttggtgtgtctactgaggttcggatagtctcagcacaccggacccctgaactgatgtactattatgcctcctctgcttgggagcgaggcattcacgttatcattgcttgggctggtggtgcaactcactcaccaggtatggtagcttcacttacacctttacctgttatcggggtccctgtgcgtgcctatacattggatgg

SEQ ID NO: 15150 - DNA, 395 bp, Gossypium hirsutum
  Clone ID: LIB3166-014-P1-K1-F9
cccacgcgtccgtgtctttgcagtggagttttttttgacgagggatggtcaggtgtagatcggccatctttatgagttgggtattccactcctagatggccagcaataattcagcaattctgcctttgactgaccttctttgtttctattagattctactaaatgaagtagctccaagacctcataatagtggtcatcacactattgagtcctgctatacatcacagtttgaacagcatttgcgggctgttgttggtcttcctctcggtgatccatccatgaaaactccagctgctatcatgtacaatctactgggtgaggatgaaagggagccaggtttcaaagtggctcatcaacttatagcaagggcactggagattccaggagctactgct

SEQ ID NO: 15151 - DNA, 726 bp, Gossypium hirsutum
  Clone ID: GOSHI-09MAY01-C4496_1
gtgccgatcaattcatattccatgcagactcaaccgcctcagctgatcgagctttctcaacttcaccacccaaatgtagtctccaccggcctgcgcttatcttttggcgatcaacaacaaaagttacagcaacatcaaaatcagaaccaaaatcaaagctatgggcaacaacaacagcaacaaaatcttgtttcaaattcctctgtttttgcatccgatgatctggtcacccaaatcaaacgccagagagacgaattagaccattttcttcaagcccagggcgaggaattacgacgtactttagcggagaaaaggcataggcattaccgtgcgctactagaggcagcggaggaatcggtagcgaggaggtttagagaaaaagaagcggaagtggagaaagcaaagcgccggaacgtggagttagaggcacgtgcggcgcaacttggcgcggaggtacaggtttggcaggcgaaagccaaggcacaagaggtgacggcggcttcgttacaagcgcagctccaacaggccataatgaacggaggagctggtttgacgcagcaagatagcaggagaggtggggaagaatggcggaagcgcgccggcggggaatcagaggcgcaggcggaggacgcccagtcggcttacgtggatccgggacgtgtcgtagcagctgcttctggcccatgttgcatggcgtgtaggacacgtgccgtggaaccttttgct

SEQ ID NO: 15152 - DNA, 709 bp, Gossypium hirsutum
  Clone ID: GOSHI-09MAY01-C4456_1
gaaagagcttcatatcaacaacaatggctgcaaacatccatgatcaaagtttctctattgcttttggtcttcttgggaatattttgtctttctttgtttatcttgccccactgccaactttttacaagattttcaagaagaaatcaacagaaggttttcaatcgattccatattcagtagcacttttcagtgccatgttgcttctttactacgctttcctcaagcaacacgatgcagtcatgctcatcaccattaactccattggctcctgcatcgaatccatttatctcattttttacctgatttatgctaccaaaacagccaggatatacacgacaaagctggttatatttttcaacatagtggcattaggattaatcatacttgtcaccttggtattttttaaaggccatcttcgagtttctatcgtagggtggatttgtgccatcttctcagcttgtgtctttgctgctcccctcagcatcattagattagtgataaaaacgaagagtgtggaatacatgccattcccattgtcattctttttgactctctgtgctataacatggtttctttatgggttttcattaagggatttctacatagcaacaccaaacattttggggttcagctttggaataacacagatgatattatatcttgtatatcgcggcgaaacgaaagcattggtcttgcctgatagcaacaa

SEQ ID NO: 15153 - DNA, 485 bp, Gossypium hirsutum
  Clone ID: LIB3584-048-P1-K2-D4
cagcgactgcatacgagaccgaagcctattattttaacctgtgaaaaaccaaatacagccattcttactaaggatcgccggattactcttgccaatcctgacagaatatacaccccactactttctttatgccgcaaacctgagctatgcatgattgatcatacaagaaaaaaagccatagttatgagacccagcactattatgtattcgaaggtgaatttgtgccattcaatacaactcgtgaagttgctgatatattaagcccaataaggtactggattaaaactatatgtgtgtaatacgtgcacttgccattgtcattctttttgactctctgtgctataacatggtttctttatgggttttcattaagggatttctacatagcaacaccaaacattttggggttcagctttggaataacacagatgatattatatgggggatatcgttggagaaacgaaagcattggtcttgcctgatag

SEQ ID NO: 15154 - DNA, 1151 bp, Gossypium hirsutum
  Clone ID: GOSHI-09MAY01-C4476_1
ttttccttttttattattacagatcatttatgggcataggtcacaagcttcgagaaaaacaagtcccttcttatctttgcagggagaatagagaaagaatatccaatggaaggctacaagaatgcttctaaacacatagcagtgttggctttccctttcggcacccatgctgcccctcttctcaacattatccgtcaactatcagacgcttgccccgacaccatgttttccttccttagcacccaacaatcaaacaactcaacttttcccaaaaaccttgataaaattaagccttttaatgtatgggatggattacctgaggggtatagctttagagggaatcctcatgagcccgtcgattatttccttaaggcagttcctgggagttttataaaggctatagatgctgttgtgtctgaaactggtaaaccagttgattgtttgataacagatgcattttatgcatttggggctgatatcgcggacgagctgaatattccttgggtggcggtttggatgtctggccctagggcactcttccttcatctccagaccgatgttattcgccagcatgtaggaattaacaatccggaagacaaaccacttgattttcctgaattttctggctttcgtgttactgacttacctaatggaatagcctctggagacattgatgcccccatgccagcattgttgcataaaatgggagtgtcactgtcacgcgccacggcaattgtcgcaaattcatacgaagacttagataatacagtggtgaacatgctgaaattaagattcagtatgttcctcaacgttggtcccttcaatctggtatcagtttctagttccaccgtggatgactcgcatgggtgcttggattgggtgagcaagcatgaggcagcatcggtggtatacatcagctttggaagcatgataaccccaccaccccatgagctacaagcattatgtgaagccctggaggaatgtgagtttccatttctttggtctgtgaggggaaatcctgagaaacaactgcctcaaggattcctggaaagaactagctccaaaggaaagatagttccatgggctcctcagcaacaaatattggaatatccatcagttggggtttttgtaagtcatggcggatggaattc

SEQ ID NO: 15155 - DNA, 1099 bp, Gossypium hirsutum
  Clone ID: GOSHI-09MAY01-C4466_1
tctttagattttcttccttctatacaagacttcgggtcatccttattcttcttgctttcgtcgctcttttgcctcccgttttcttccacttcaagctccgccgtttgcatcagacgaaattaaggaagtgtggttggctgaacaatcctccccttgtgtgtgctcatggtggtgactcaaccaatgctttcccaaacactatgtctgcatatagtattgctcttcattctcaagtagactgcattgagattgatgtctctcgctcatcagatggagttttgtttgcacttcatgacagggatttgcagcggatatctggtaacagcacttctaaagttgggcactttagatcaaacgagctcaaagaactagatgtctatcatcagtcgggtaattcaaagattcctacaattgaagatgctttgaagttgatatcagcatcagttcggcaggtgattctagatgccaaggtggggcccccatcatatgaaaaggggcttgcaaatgatattctttccactgttgagaagatgcaatgtaagaattgcctcatttgggctaaaagtgatagtttagtaagggacataatcaagctctcatcagatgttgcggtaggctatgttgttatggtggatccccatactggtgctcgaactaacttgttgagaatgaaagggcccaaggtggctggcgcctaccatcaattgattgatgaaagaatggttaagacgctgcatgggagagagaagaaggtatatctgcctgcacagtcggtgacgtcgattccatgatgaggatgctgcatatgcgtgcagatgccattgttactagcagccccactttactccaacgcactatgcaagaccaacgaaccacagtgctctgggagaaggtttttctttaacacgatgaccatgcttgatttttatcgatttcacgacctgattagtgatatgatattgttgaacagtcgcatgttttcagtgcacctgtctttatttgttgatttgcgttttttatcttttgaaatttcgatcttataatttatctattcaagaatatacttaacctcgaaagaaacagggagcacttagttggg

SEQ ID NO: 15156 - DNA, 671 bp, Gossypium hirsutum
  Clone ID: GOSHI-09MAY01-C4746_1
gttaatgataagcggaataaacttgcacaacctctaaagtttgcagttgggtttaacagaagagggactgaagagagccaaatgaaaactccgaaagatgcatcaaagaattctgatatgtctgtattattggaccgcaacaaatgctttggtgccgtggctgctgccgttaaaggcattgtttcagattcagtcgtggatctgaaatctcctgagctatctattcttgtcgagttgcttcccctttctggagtgcctaatggatcgctattggttggtgtgtcagttttaccccaaaacctggttagtactaagccaagactctgcattaagccactggtttgcgataaaaatgggaagaaggcaagttaaagcaggtaacttatgaagcgagttacgccatgattggtgtggagggctgaatcccccggtaatatgagcccatggtgaaataattttgtatactgtaccttcaccccattggagtaaaaatagtttaattttgataaaaagaaagtgctttcatggttgaatttagaagttagtgtgagcaaacaatgttccatttatctcctaaatggttttacacgtgcttgcgcggtggtggactccatggagaccaatgttgagatgccgccataaaacttgaattgctcgttgggatttttttt

SEQ ID NO: 15157 - DNA, 719 bp, Gossypium hirsutum
  Clone ID: GOSHI-09MAY01-C4776_1
cccacgcgtccgataaatataaaaccatgggacagcatattgaaagatattaaagagggaaagaagaggagaatggatagatagggaaccatatgcctactggaaagggaatccatttgtggacgagaaaaggcaggaccttcttaaatgtaatgtcactggtcaacaggtactggaatgctcgcctgtttgtccaggactggtatccattgaaagctcagcacggttttaaacaatccaacgttgcagatcaatgcacatataggtacaagatctacattgaagggtatgcatggtctgttactgaaaaatacattctggcctgtgattctgttacattgattgtacagcctcagttctatgacttcttcatgagaagcatgcagcctgtggagcattactgtgcctataaggaatgatgacaaatgcagatccctcaagtttgctgtggactggggcaacaatcacaaaaagaaggcacatgaaattaggaaaagcacccagtagctttatgcaggagcagctaaaaatggactacatttatgattacatgtatcatttgttaaatgagtatgccaagttgttgaaatttaagccaagaatacctgaaggagccattgatttgtactaagaggtaatggcttgtcaagcagaagggctacgaaggcgaaaaaagaattcatgatggaatcattggtgaaaggtccttcactcacaaa

SEQ ID NO: 15158 - DNA, 671 bp, Gossypium hirsutum
  Clone ID: GOSHI-09MAY01-C4766_2
cccacgcgtccgcggacgcgtggcttcaaagcatccctcgaaaacggtttctttgacgaacatagtcgccgttttttccttctcattcagtgcgcttcaatcgaagaaaaaaaaatggcaatgaatttgggacaccatattggaactctttccggcaaacaaattccgacggaattcgccgccggagaacaaccatcatcaacaacagcgagtccatcggcagtttggaaatcacccgccggtaatctccgatccaatagcccacaagaaaatgcatccccacctatgttaacaccgccactgacaccgaacagcgccggggagtggtcgtatttgatcaatctcccaatgctgcgtccggatctttcagtagcatgccaggcattcgcgacgtcgtcgccgctggagatgacggaggaagaggtggcggggacggcggagtggacagttggaggtaggaaggatgagaagaaaggagtgtcagtgttcgtgatgatgccgttggatagtgtgacgaatgggaacacggtcaataggaagaaggcgatgaatgctagtcttcacgctttgaaaagcgcgggtgtggaggggataatgattgacgtttggtggggactggtggagagggaaggcgccggtgcttacaattggggtggctacaccgagctcct

SEQ ID NO: 15159 - DNA, 2159 bp, Gossypium hirsutum
  Clone ID: GOSHI-09MAY01-C4766_1
tcaagcgggaaacatccccaactgaataaatttacgcaaaacaaaaaagaaagaaagggtgtacgattcatttccttttttcttctcatctctgacaggtaatcggaaaagcaaacagttcgaataaatagaaaatggcgttgaatttggcgcatcagattggttctctagccgggacacaaattgcagctgaagtcaccaccggagaacaatcatcctcagcgacggctgatgtgtcgggagttcggaaagttccattggcgaatctccgatgcaacgccccaggagaagctctgtcccctccaatgttaactccaccgttgacgccgcgaagcgcggcaaacaggccggctatgatgagtccgtcgctgcgtccggatctgtccgccgcttgccaggctttcgggacgttatcaccgctggagacggctgaggagtcatcggcgtcggtggcgtggaaggagggagggaagaaagaggagaagaaaggggttccggtttacgtgatgatgccgttggatagcgtgacgaacgggaatacggtgaatagaaagaaggcgatgaatgcgagtctccacgcgctgaaaagcgcgggagtggaggggataatgattgacgtttggtggggtctggtggagagggaagcgacgggtgcttacaattggggtggctacgccgagcttctcgagatggctaagaagcatggccttaaagtccaggctgtcatgtcattccatcagtgtgggggcaacgtcggtgactcttgcattattcctttgcccaaatgggttacagaggagatcgagaaggacccagacctcgcatacactgatcaatggggaagaaggaactacgaatacctttcacttggttgcgataaccttcctgtcttgaaaggccgtacgcctgttcagtgttatgctgatttcatgcgtgcctttagggacaatttcaaacacctccttggtgataccattgtggaaatccaagtcggaatgggtccggcaggtgagcttcggtacccttcgtacccggaggcgaatgggacatggaagttccctggaattggagccttccaatgtttggtgcagtatatgcttagcagcctaaaagcagcggctgaagcggcgggtgggccagaatggggtagcactggcccaactgatgctggtcactacaacaattggccagaagatacgccttttttcaagaaagaaggtggtggctggaatacgccatatggtgaattcttccttacctggtactctcagatgctgttagaacacggggcgagaattctatcgtccgcaacatcgatttttgacggtgcaggtgtgaagatctctgtgaaagttgcgggaatccactggcattatggaacccgatcccatgctcctgaactcacagctgggtactataacacaaggtaccgagatggttacctcccgatcgctcaaatgctagcacgtcatggtgccgttttcaacttcacttgcatagagatgcgggatcatgagcagccccaagatgccttgtgtgcaccggagaagctagtgaagcaagttgctttagcaacaggagcagcacaagttccacttgccggggagaatgcacttccccgttatgatgaatacgcccacgagcagatcttacgagcttcatcgttgaatgtcgatggctcagcagttgatagagagatgtgtgcatttacgtacttgaggatgaacccatcgctctttcatccgggcaattggagacggtttgttgcattcgtgaagaagatgaatgagggaaaaggagctcgtcggtgttgggaagaggtggagcgggaagccgaacaattcgtgcatgtcacgcagcctttcattcaggaggccgccgttgcccttatgcattagcgtagcttagtaaagagtttgtattaataacagttcctcaaggattctgaaatgatatagtttttcctttcacatttttttcctatgcagtggctagggaaaaaatgcatgttgtatgatttggtattcgattttactttgtaccaaatagttccaactctttccaattttaagcaaggatgatatacattagattatttatttcccttttttaaaagatattaggatttgaattttttaaaaaaaggattttccgtttat

SEQ ID NO: 15160 - DNA, 990 bp, Gossypium hirsutum
  Clone ID: GOSHI-09MAY01-C4716_1
ctcatcggcggcggatgctcagaatattggttggggtcggtggtatagcatgaaggagctggagatggcgacacgtggattcgccgaggagaatgtgatcggtgaaggtggttacggcgtcgttttccgtggccttttgcaagacggttccgtcgtcgctgtaaaaaatctgcttaataacaaaggccaagcagagaaggagttcaacgttgaagttgaagccattggcaaagtgagacataagaacttggtgggtctagttgggtactgcactgaaggtgctcaaaggattcttgtgtacgaatacgttgacaatggcaacttggaacaatggttacatggtgatgttggacctgttagccctcttacttgggatatacgaatgaagattgccattggaaccgccgaaggcttagcctatttgcatgaagggctagaacccaaagttgtgcatcgtgatgtaaaatcaagcaatattctactggacaagaagtggaacccgaaagtatccgatttcggattagccaagttattaggatctgaatcgagctatgtgaccacgcgtgtaatggggacgttcggttatgtttcaccagaatatgcaagcacaggcatgttgaatgagggaagcgatgtctatagttttggagtattgctgatggagataattacggggagaagcccgatcgattattccagggcaccaggagagatgaacttagttgaatggttcaaaggcatggtagcaagtcgtcgcggtgaagagctcgtggacccgttgatcgaagttcaaccttcacctagagctttgaaacgagcattgctcgtttgtctccggtgtatagatttggatgccaataaacgaccaaaaatggggcaaatcgttcatatgctcgaggcagatgatttcccttttcgctcggagcatcgaccggcacaggagagatactctgttccatcctccgtgccaacatccgccaaatttccgca

SEQ ID NO: 15161 - DNA, 891 bp, Gossypium hirsutum
  Clone ID: GOSHI-09MAY01-C4696_1
tctctccaactttcctttgctgacccgccatgaacatcctcaaaaacctcggctttggggccaacaacaagccaaccgcttcaatggagaattgcgccatcgctcagggtcctgaagacgacgtcccgcctcctggtcaactgtttgctcagttcggggcgggctgctttgggggcgttgaactggctttccagagagtttcggggatcaccaaaactgaagttgggtattcccaagggttcatgcataatccgagttatgaagacgtgtgttcggggactaccaaccacagtgaagtcgtgagggttcagtatgaccctaatgagtgtagctatgacactttgcttcatgtcttttgggctcgccatgatcctactaccctcaaccgccagggtaatgatgtggggacacagtacagatctgggatttacttttacagcccagagcaggagaaggcagcagtggaatccatggaaaaacagcagaaactcctcaacagaaagattgttactgaaattctgccggccaggaaattctatagagcagaggaatatcaccagcagtaccttgcaaagggaggtcgttttggttgtaaacaatctgctgagaaaggatgcaatgatcctatccgatgctatggctaagttgccactttttctgtatgcacttctgcttttgtctatggaattttaatgccttgtggtatctatggtggtactgaaggcggtggacttggaattattcataattccaaggcagaccgatatctatggtttggttatctacggggataggttaggacatggatgtttggactttcaaatttggcgatcatgtattaatttggaaatattacctgcctttatgggggaggatgtctccttttccttc

SEQ ID NO: 15162 - DNA, 387 bp, Gossypium hirsutum
  Clone ID: uC-gsronu33B004a09b1
cccacgcgttcgcccacgcgtccgcccacgcgtccgcccacgcgtccggtcaaagagtgcttgaaattgtcgggaggtcgttttggttgtaaacaatctgctgagaaaggatgcaatgatcctatccgatgctatggctaagttgccactttttctgtatgaacttctgcttttgtctatggaattttaatgccttgtgttatctatgttgttactgaaggtggtggacttgtaattattcataattccaaggcagaccgatatctatgttatgtatatctacagtgataggataggacatgatgtttgaactttcaaatatggcgatcatgtattaatattgaaatattacatacctttatggtggaggatgtttccttttcttcc

SEQ ID NO: 15163 - DNA, 805 bp, Gossypium hirsutum
  Clone ID: GOSHI-09MAY01-C4646_2
ggaagcctgctttaacaaagctttttacttcccgaatctcctgcacgccttccatcatttcacacatgcgttggtgctaatgaggaaaggttaactcctaaatggtacaaggaacatgggattgaattagtccttggaactcgagttaagtctgttgatgtcagacgtaagaagctattgacagcaactggagagacgataagttacaagatccttctcattgccacaggagctcgggctttgaagcttgaagaatttggcgtggatggatcagaagctgaaaatgtctgtgtcttacgagatttagcagatgcaaacggtcttgttaatgtgatgcaatcttgttccagtggaaacgctgtagtaattggtggtgggtacattggaatggaatgcgcggcatctttggcgatcaataaaataaatgtaaccttggtttttcccgaagtacattgtatggctcgtttgtttacaccgaagattgcaagctactatgaggaatattatcaagctaaaggagttaagttcgtcaaaggaactgtcttgacgtcgtttgaatttgattctagtggaaaggttatggctgttaatcttagagatggaagtcagctacctgcagacttggtcgtggttggaatcggaatacgcccaaacacgagcctttttgaaggccaactaacacttgaaaaaggtgggatcaaggtgaatgggaagatgcaaacaagcaacgactcagtttatgcggttggagatgttgcagcatttccagtcaaactatttggtgaaactcgcagactggagcatg

SEQ ID NO: 15164 - DNA, 979 bp, Gossypium hirsutum
  Clone ID: GOSHI-09MAY01-C4646_1
gttttgcctgaaaaagccaaacaccttcgagaaaaaccgaaaatttctttaaacatagaaaagaaaaggcgtattttctcggataattaatgggaagagcgtttgtgtatgtaattcttggaggaggtgtagcagctggatatgcagctcttgaatttacgagaaaaggggtttctcctggtgaactttgcattatttctgaagaacctgttgccccatatgagaggcctgctttaagcaaaggctttttacttcccgaatctcctgcacgccttccatcattccacacatgcgttggtgctaatgaggaaaggttaactcctaaatggtacaaggaacatgggattgaattggtccttggaactcgagttaagtctgttgatgtcagacgtaagaagctattgacagcaacaggagagacgataagttacaagatccttctcattgccacaggagctcgggctttgaagcttgaagaatttggagtggatggatcagaagctgaaaatgtatgttacttaagagatttagcagatgcgttggctcgattgtttacaccgaagattgcaagctactatgaggaatattatcaagctaaaggagttaagttcgtcaaaggaactgtcttgacgtcgtttgaatttgattctagtggaaaggttatggctgttaatcttagagatggaagtcagctacctgcagacttggtcgtggttggaatcggaatacgcccaaacacgagcctttttgaaggccaactaacacttgaaaaaggtgggatcaaggtgaatgggaagatgcaaacaagcaacgactcagtttatgcggttggagatgttgcagcatttccagtcaaactatttggtgaaactcgcagactggagcatgttgattcagccagaaaatctgctaaacatgctgttgctgcaataatggaacccaagaaatcaggcgagtttgactaccttccattcttcta

SEQ ID NO: 15165 - DNA, 1252 bp, Gossypium hirsutum
  Clone ID: GOSHI-09MAY01-C4616_1
tttcccacgcgtccccccgccgcgtccgaaagattgaaaatggctgctaccttctttaggagactctccaaagccaccccagctaccttcaacaatgcatttcgaggtcaacccaagtccggttttgctggatttcgcttctctaccatcgccgccgttgccggtggaatctctacttactactgcttctccgactcaaatttggttcatctagatcaagtcaatgaagagactggtccaaaagttgctctgaaatctgataagtggcttgaatttaagttgcaagatactgcaagagttagtcacaacactcacttgttcaggttttcatttgatccctctgctaagttgggattggatgtcgcttcatgcatccttactagggctccattaggacaagatgctgaaggaaaaaccaaatatgtcatacgaccgtatactcctatatcagatccagatgctaagggatactttgacttattaatcaaggtgtatccagaaggaaaaatgagccagcattttgctagcttgaaaccaggcgatgtagttgaggtgaaagggcccattgaaaagctcagatactcacccaatatgaagaaacacattggcatgattgcaggtgggacaggcataactccaatgcttcaggttattgaggctatactaaagaaccctgatgacaagactcaggtgtcactgctttatgccaatgtctcccctgatgatatattgctcaagcagaagcttgatatacttgctgctagtcatccgaatcttaaggtactctacactgtagacaatccaactaaaacttggaaaggaggtgctggattcatttcaaaggatatggtcacaaaatgcttacctggtcctgctgaagatactcttatccttgtatgcggtccacctggtatgatggaacacatatcaggtggtaaggctaaagactattcacaaggagagctaaccggcatactcaaagaactcggatacgctgagcgaatcgtttacaaattttgagtatagaggaattcaaggatttgaagagacactctcatagggtttcaacataaattttgtgtaataaagcttcctgaaagaacaatgaattgggcaagatttaaatcccagggtatcgaataatatttgtagtgaaacatacaatgtaaattactactttttcacaggcttgtactagagaaatcgtgacacagagcttttttgaaaccctgcaaccaggtgttgggtgggt

SEQ ID NO: 15166 - DNA, 402 bp, Gossypium hirsutum
  Clone ID: LIB3135-040-Q1-K1-C6
aataaccgaacgaaaacgccagggatcatctacacaatgcctgcgttatactatgcgtggtggggcgtatcatcacatggcatggcatgaacatatatgcaccctacctcgggttccatcaaagcctgattaggactcgaaaaccaaacgggacatagcacccgttgcatgatataaaaagacacatactacacgagtctattgacttaattatcaccggctatccataaggaataattaaacagcgttctgctatcttgaaaccacgcgatgtatttgaggtgaacgggcccatttgaaagctcagatactcacccaatatgaagaaacacattggcatgattgcaggtgggacaagcataactccaatgcttcaagttattgaggctatactgaagaacc

SEQ ID NO: 15167 - DNA, 991 bp, Gossypium hirsutum
  Clone ID: GOSHI-09MAY01-C4606_7
tgtggtttgagagaaaactgatgctgctggctctggaaaacctcaagtttatctatctgctgttctacaggtcacgatcattcagtgtcagatgaagatggcatagccatcattaagcatgcagtcgaaagaggagtcactcacatcgatacagccgacctctatggacccaaaactaacgaaattctggtcggaaaggcattgaagcatctgccacgagagaaggtacagttggctacaaaattcggtgttgaaagcatgggtccagatggtccggttatcaatggcactcctgaatttgttcgttcttcacttgaggctagccttcaacgcctcgatgtggattatattgatctttactatataatcagagttgaccgcaagactcctatagaagatactatggaagaactgaagaagttggtggatgagggaaaaataaagtacattggtatatctgaagctagccccgaaactataaggagggcacacgctgttcatcctcttactgccgtacaacttgagtggtcgctttggactcgtgatgttgaggaagaactaattcccctttgcaggtttgttcttctatcttcaatcatcggtaactttttttttattcgaatatagatatattcaaatttttatatatttggagggatataaatatacccttttgctcaaatatattgaaattcacttattgattggcttttctcaaggtatcaactggtttaactccttcaactgctgtgaggttatgcctgcctaaatgtgttcaacaatacagggaactcggaattgggattgttgcatatagtccccttggtcatggtttctttgccggtaaagcaaaggaggatccctctaatagttctcttgtattggaaactcactttatatggcttaacctatacttaatctatgttatatgggttcaggagtaagtgttggatacagatatgtgtcccgcatgaatatattcagttttttt

SEQ ID NO: 15168 - DNA, 522 bp, Gossypium hirsutum
  Clone ID: GOSHI-09MAY01-C4606_4
cggatactcgaagaaaaaacagtcatagtaagttagtatcctgcagaaatagcagagacttttctagcatattcctccagatatatgtaaaaccttaggaaaatgaacatatccgtgttggacactcagatacaagttcctgtaccaacggccagtttgcattgatatttaaaaccaaagcttttgacacattgttcccacgcgtccgcccacgcgtccgatgatgttgcccctcttcctggaacaaccaagattaaaaatctagacagcaacattgaatcagtgaaagtaaagctgacaaaagaagatttgaaagaaatttcagatgcgatcccaatccatgaggttgcagggggtacttatcctgatgctttaaagcaattctcttggaaatatggcaatacaccaccaaagaagagcgcctaggttttaaaacaaagtttcatgagttactaaagctttggaaattgctgttgtaagttgatatgcttaggctttcatagcctttatataataaaaatt

SEQ ID NO: 15169 - DNA, 847 bp, Gossypium hirsutum
  Clone ID: GOSHI-09MAY01-C4606_2
gttacgtgttcgcccacgcgtccgaccactcgggcgtgcactcgtccgggagggcgcacgctgttcatcctcttactgcaggacaacttgagtggtcgctctggactcgtgatgatgaggaagaaataattcccctttgcagggaactaggaatcgggattgttccatatagaccacttgagcgaggtttctttgccaggagagcgaataaagatacctctaatacgcctgtgagaatgttcacaaggttgagtggagaaaacttggagcgaaagaggatcctatattcgaaagtagagaagttggctgaaaagcatggatgtacaccggcacaacttgcacttgcctgggttcttcatcaaggggatgatgtttctcctattcccggaacaaccaagattaaaaatctagacagcaatatcgaatcagtgaaagtaaagctgacaaaagaagatttgaaagaaatttcagatgcgatcccaatccatgaggttgcagggggtacttatcctgatggtttaaagcaattcacttggaaatatggcaatacaccaccaaagaagagcacctaggtttagaagcaaagtttcatgggtgttgggatgaatggatttcccaagaaactgaagccattgaaagattgatgagttactaaagctttggattgtcattataatggagggttcagtatttatgatgttgttgtgtcatattttgtatcgtgttatttttagttgtttgaaataatcaagtctaagtgtgtacttggacgaatagagttgtagctgttgtttaatcaatgtatgtttttattgttctatatagttcttgatctctctggtctctc

SEQ ID NO: 15170 - DNA, 1296 bp, Gossypium hirsutum
  Clone ID: GOSHI-09MAY01-C4606_1
ctttgtttgtagaagacagaagaagaagaagacccagaagaagaagaaaaaggaaacaaaagatggcaattgagattcctagagtgaaacttggaactcaaggatttgaggtttcaaagctgggatttgggtgtatgagtcttacaggtcacgatcattcagtgtcagatgaagatggcatagccatcattaagcatgcagtcgaaagaggagtcactcacatcgatacagccgacctctatggacccaaaactaacgaaattctggtcggaaaggcattgaagcatctgccacgagagaaggtacagttggctacaaaattcggtgttgaaagcatgggtccagatggtccggttatcaatggcactcctgaatttgttcgttcttcacttgaggctagccttcaacgcctcgatgtggattatattgatctttactatataatcagagttgaccgcaagactcctatagaagataccatggaagaactgaagaagttggtggaagagggaaaaataaagtacattggtatatctgaagctagccccgaaactataaggagggcacacgctgttcatcctcttactgccgtacaacttgagtggtcgctttggactcgtgatgttgaggaagaactaattcccctttgcagggaactcggaattgggattgttgcatatagtccccttggtcatggtttctttgccggtaaagcaaaggaggatacctctaatagttctctggaagtgttcccaaggtttcaaggagaaaacttggagcaaaataggatcctatattcgaaagtagagaagttggctgaaaagcatggatgtacaccggcacaacttgcacttgcctgggttcttcaccaaggggatgatgtttctcctattcccggaacaaccaagattaaaaatctagacagcaacattgaatcagtgaaagtaaagctgacaaaagaagatttgaaagaaatttcagatgcgatcccaatccatgaggttgcagggggtacttatcctgatggtttaaagcaattcacttggaaatatggcaatacacccccaaagaagagcgcctaggtttagaagcaaagtttcatgggtgttgggatgaatggatttcccaagaaacatactatcgctttggattgtcattaatggagggttcagtgttgatgatggtgttgcgtcatattttgtatcgtgtttgcctggacgaatagagttgtacctattgtttaaccaatgtatgtttttagtgctctaaaatcgttcttgtctcttcttttctccc

SEQ ID NO: 15171 - DNA, 403 bp, Gossypium hirsutum
  Clone ID: LIB3166-006-P1-K1-G2
agaagaaaaaggaaacaaaagatggcaattgagattcctagagtgaaacttggaactcaaggatttgaggtttgagattttgtttcctactagtttatattagttaagaaaatggcgttttcttttggggggtaaaatctattattttttggttgctgcaggtttcaaagctgggatttgggtgcatgagtcttacaggtcacgatcattcagtgtcagatgaagatggcatagccatcattaagcatgcagtcgaaagaggagtcactcacatcgatacagccgacctctatggacccaaaactaacgaaattctggtcggaaaggtatcctttcggcatctcttcaagttgaatcaaattgaaactgagagcgattctttcatgttctcaatttccaacac

SEQ ID NO: 15172 - DNA, 477 bp, Gossypium hirsutum
  unsure (1)..(477): unsure at all n locations
  Clone ID: LIB3197-053-Q1-M1-H5
gtccggccgacatgtatggacccaaaactaacgaaatgcttagtgcctttccaccagaatttcgttagttatggttggaaaggcattgaagcatttgccacgagagaaggtacagttggctacaaaattcggtgttgaaagcatgggtccaggtggtccggttatcaatggcactcctgaatttgttcgttcttcacttgaggctagccttcaacgccttgatgtggattatattgatctttactatataatcagagttgaccacaagactcctatagaagataccatggaatgaactgaataagttggtggaagagggaaaaataaagtacattggtatatctgaagctagccccgaaactataaggagggcacacgctgttcatcctcttactgcagtacaacctgagtggtcgctctggactcgtgatgttgaggaagaaataattcccctctgcagggaacttgnaatcggga

SEQ ID NO: 15173 - DNA, 509 bp, Gossypium hirsutum
  Clone ID: uC-gsflmaxxa098a02b1
cgccacgagagaaggtacacttgggggaattttaaaacccaatgggggggtccaaatggtccggttatcaatggcactcctgaatttgttcgttcttcacttgaggctagccttcaacgccttgatgtggattatattgatctttactatataatcagagttgaccacaagactcctatagaagataccatggaagaactgaataagttggtggaagagggaaaaataaagtacattggtatatctgaagctagccccgaaactataaggagggcacacgctgttcatcctcttactgcagtacaacttgagtggaccctctggactcctgatgttgaggaagaaataattcccctttgcagggaacttggaatcgggattgttccatatagtccacttggtcgtggtttctttgccggtagagcgaataaagatacctttaatacccctctgagaatgttcccatgtttagtggagaaaacttggagaaaaataggatcctatattcc

SEQ ID NO: 15174 - DNA, 546 bp, Gossypium hirsutum
  unsure (1)..(546): unsure at all n locations
  Clone ID: uC-gsronu33B007g05b1
ctgtgagattatgagaccggtgggagggtattatttttagggggttccaccaacattaaaattctagacagcaactttcttttctatcttagttaatctttctacgaagattttttagaaattacagatgcgatcccaatccatgaggttgcagggggtacttatcctgaaggtttaaagcaattcacttggaaatatggcaatacaccaccaaacaagaggacctaggtttagaagcaaagcttcatgggtgttgggatgaatggatttcccaagaaactgcagccattgaaagattgatgagttactaaagtctgcattgtcattaatggagggttcagtatttatgatgttgtttcgtcatattttgtatcgtgttctttttagttgtttgaaataattaagtgtcangttgttacttgtacgaatagagttgtagctattgtttaatcaatgtatgtttctctttttctttaatatcttttgatttctttgttctttcctncctcttctttccttttgtctccttatttactttttttcttc

SEQ ID NO: 15175 - DNA, 362 bp, Gossypium hirsutum
  Clone ID: LIB3272-013-P1-K1-A1
gaagcattttataactgtccaaaacctgtcttttctttttcttttgtttatggtggcttttaaaattgctagagtgatacttcaaacttaaggatttgttagtgcaaagctgggatttgggtggatgggtctttcaagtcacaataattgagtgtgagatgaagctggcatagccatcattaatcacgcattcgaaagaggaatcactcatttagatacacccgacatgtgtggacccaaaactaaccaaattttggttggaaaggcattgaagcatttgccacgagagaaggtacagttggctacaaaattcagtgttgaaagcatgggtccaggtggtccagttatcaatggcactcctg

SEQ ID NO: 15176 - DNA, 323 bp, Gossypium hirsutum
  Clone ID: LIB3166-053-P1-K1-G5
agaaaaaggaaacaaaagatggcatttgagattcctagagtgaaacttggaactgagggatttgaggtttcaaagctgggatttgggtgcatgagtcttacaggtcacgatcattcagtgtcagatgaagatggcatagccatcattaagcatgcagtcgaaagaggagtcactcacatcgatacagccgacctctatggacccaaaactaacgaattcttgtcggaaaggcattgaacatttgccacggagaggtacagtggctacaaattcgtgtgaagcatggtcatatgtcgtataatgcctctgattgtcgtcttact

SEQ ID NO: 15177 - DNA, 1421 bp, Gossypium hirsutum
  Clone ID: GOSHI-09MAY01-C4636_1
caccaacgcttcgttttcatttcatttcccttttttttaaactttttttctctccactaaactaaaaaatctctttgaaattttataattctgggggaaattttcgtaatctagggttaggatttttaaataagaaagagaaagaaaacatgacgtcttcggtggattcaaactcacatggaaacctagacgagcagatttcgcagttgatgcagtgcaagcccttagcggagcaagaggttagggtattatgtgataaggctaaggagatactgatggatgaaagcaatgttcagcctgtgaaaagtcctgttacaatatgcggtgatattcatgggcaatttcatgatcttgctgagctttttcgaattgggggggaagtgtccagatacaaattacttgttcatgggagattatgttgatcgtggttactattcagttgaaactgtaacactcttggtagctctcaaagtgcgttacccccaacggataactattctgaggggaaatcatgagagccgtcagattactcaagtgtatgggttttatgatgagtgcctaaggaagtacggcagtgccaacgtttggaagatcttcactgatctgtttgattattttccactaacagcattggttgaatctgaaattttctgtctccatggtgggttatctccatccattgaaacactggataacatacgtaactttgaccgtgttcaagaagttcctcatgagggtcctatgtgcgatcttttgtggtctgaccctgatgatcggtgtggatggggcatttcacctaggggtgccggatatacctttggccaagacatatccgagcaatttaaccatacaaacagtttgaagctgattgctagggctcatcagctggtcatggaaggatacaattggggtcatgaacaaaaggtcgttactatattcagtgcgccaaattattgctatcgatgtggaaacatggcctccatcttggaagtagatgattgccagggtcatacattcattcagtttgagccggctccaaggagaggagagccggatgtgacccggaggacacccgactacttcctataaaaacaaactggcattgaatcaacgagtctccaccgattggtccctgtcaatgggcttttccgggcggttgggtggcagcaaagccatcctatgaggctgatcacactgatgagaatccatggcagaaaaaaggatcaccgcaagagctggtaacacatgcatatgtaccatttccagcaaacaatggtacaatttagtgtatttccatagactctaatttttgttttcttgacgcatgcgaagatctgtagaagaaagatgccgagaacatttgccctataattaatgctttttttttgactaaaaaaaaaaaaaagggggccctttttaga

SEQ ID NO: 15178 - DNA, 526 bp, Gossypium hirsutum
  Clone ID: LIB3584-042-P1-K1-C10
gtttcaatagctaccggatttttcttttttaacacaaacgacttttcacgtaagctttgttagggtggcatgtcgtgtatatttcttgatgacacaaatgggcaatgaactagtttaaaaacaattgcatagttaaaatagcctgggactacattctctgttacactagggtatatatatacactggtcccattacatatgtaaattgttttctattgactgtttggattagtaagcttctgtttagttaatttttttggtctttctttgaagataatttttgcttttccatcttcaggtacggcagtgccaacgtttggaagatcttcactgatctgtttgattattttccactaacagcattggttgaatctgaaattttctgtctccatggtgggttatctccatccattgaaacactggataacatacgtaactttgaccgtgttcaagaagttcctcatgagggtcctatgtgcgatcttttgtggtctgaccctgatgatcggtgtggatggggcatttc

SEQ ID NO: 15179 - DNA, 1012 bp, Gossypium hirsutum
  Clone ID: GOSHI-09MAY01-C4196_1
gggatgttgtcatgtaaaactgactttaaggcttttaaatcacccatctggtctcgaacgggtatacctgaggtcaatctagcatttcttctgtcaaaggctaggtcaagctgaactgtaataccctccgtcgcctctgtttgaccattgactctttcgatggtaaatgtgagtttttttctctcggatcccattcagttctgctatgtaactattaactttctgcgccatatccctaactgagacgatcttcctttcacgggtgaattggtttcgggagctccatatacaccataacgcacaataaaaggaccgatattgatcttttgtactcctttcaaaaacccaggtcagcctctcccggtgtcgctgcttccttcgtactcgagtctgcaccgaggacaccggatgttgtctgtcactttcttgtatcttagatttcctaatgaagggatgtagttctaggagattcgccatactattattttaaattttgctggtagttgtaaatcacatagttttctaaagaagttttttgtttcgagctgtattaaataactattaggatccaagctagaatattgtaatagtttataggcgtttcttactgaaaactcccctgagggttcttctttccacacctggaagtctatatgttctgtctctgctaaagggatctgtaaaatcttttgtgctatatccggctgaaagcctaccaattgcttcactccctggaatccaacaatcagtccatacgtctatctcagtccctcatccaactctccagcaaagcccgttatgaattagccctcttgctgcccagatgctcttccaggtatataaaggtcgatgatatgggctcatgcttacagtaaagagatacttcaaaaacaatttggtgggataaccctaagcaatgtgttgtttcttcatctaccatcgacgttagaggtgttcttctttgggctcctccaaggcctggcttcgttaaattcaatgttgatgggatagc

SEQ ID NO: 15180 - DNA, 384 bp, Gossypium hirsutum
  Clone ID: GOSHI-09MAY01-C4046_6
ggacacacaagacataattgagaaggcacgcttgggtgacctggattatgtaaagcatgctttcacactttttactgatttcgttgccgtatttgttcgcattctgataatcatgttgaaaaattcagctgagaagggtgagagaaagaagaagaagaggagtgactaaatcataaagcaccctatggaataggcttctcatctaatccgccgtgttgaactccattgttaatacaagttttatttcttgattccattgttaatacatgtgttgatatacgggaaggttaggtctttactgtttctgtttcttccggtggtttttctgatatggaacctttaaactaatgacatgttaatatttgcctttaaaaaaaaactcga

SEQ ID NO: 15181 - DNA, 692 bp, Gossypium hirsutum
  Clone ID: GOSHI-09MAY01-C4046_3
cccacgcgtcctccacgcgtccgtggacgcgtgggttcagattgatccaagtgtgggggtgtctgcattagtgggaactgcattggcctttgcatgtttttcaggagctgcaatgttagcaaggcgaacagaatacctttacctcggtggcttgctttcatctggtgtgtccattcttatgtggttgcattttgcttcctctgttttcggtggttccaccaccctctttatgttcgagatctactttgggctcttggtgtttgttggctacatggtactggacacacaggacataattgagaaagcacatttgggtgacctgcattatgtgaagcatgccctcacccttttcactgattttgttgctctatttgttcgcatcctgataatcatgttgaaaaattctcctgagaagaacgagaagaagaaaaagaggaggaatgattgaaccgtaaaggcgtagcccagtaaagtttgctcatcagatataacctgccttggaaatatggaagttagttgacaatacaagttcgttttcttgctttttttttttttgtggtgaatcactatgttaatatacctaaaagataggtgttaactgttacttcatctttatgttggtttttgttttggaacattggtcaaactaatgacatgttcatatttgcttctctcaaaaaaaaaaaaaaaaa

SEQ ID NO: 15182 - DNA, 1076 bp, Gossypium hirsutum
  Clone ID: GOSHI-09MAY01-C4046_2
cccacgcgtccgcccacgcgtccggtttctatctctcttcctaacaattgagcaattttctgttattttctctctcgacaaacaatggaagcgttctttgaatctcgatcgagaagcaactggagttacgatacactcaagaatttccgtcagatttctcccgtcgttcaatctcatctcaaaagggtttatttgaccttatgttgtgccctggttgcctctgcttttggggcttatcttcatatcttatggaacattgggggttacctcacatcattcgcatgcttcggaaccatgatttggctcctctctatccctccttatcaggaacaaaggagagtttcccttctgatggcatccgcagtgttcgaaggggcttcagttggtcctctgattgacttggccattcagattgatccaagtgttttggtagctgcatttgtgggaactgcaatagcctttgcatgtttttcaggagctgcaatgttagcaaagcgcagagagtacctttaccttggtggcttgctttcatctggtgtgtccatgcttctgtggttgcatcttgcttcctttatctttggtggtagcgcagccttctttatgtttgagatctacttcgggcttttggtgtttgtgggctacatggtagtggatactcaagacataattgaaaaggcacacttgggtgacctggactatgttaagcatgcccttacccttttcaccgactttgttgccgtattcgtccgcattctgataattatgttgaaaaattcagctgagaagagcgagaagaagaagaagaggcgtgactagatcatgctaaagctgaaagcagtagcagcggaggtttgctaatctgatatcatttttcttttttatctttttctcttttgccttggaagatgaagtttgtgatgaatacaagtcgtttttcttgcgctttgtactaaagcaccatgttaatatgtcaaaagaagataggttttactttctgcatcttttgatggtattgattagtacttggaagagtacatcaaattaataacacgttactatgtttgcatttttcgttt

SEQ ID NO: 15183 - DNA, 905 bp, Gossypium hirsutum
  Clone ID: GOSHI-09MAY01-C4046_1
ctcgtactaaaaaaccaaatgattttctgtgctatttctcagcaaacaaatggatgccttcacttccttcttcgattcccaatcgagaaacatctggagttacgatactcttaagaatttccgtcagatctctcccatcgttcaagctcatctcaagcaggtttatttgaccttatgttgtgcactgattgcctctgctgttggagcttatctccatattctttggaacattgggggttacctgaccacatttgcatgcttaggaaccattatttggctcctttccacccctccttgtgaagagcaaaagagggtttctcttctaatggcatcggcagtgtttgaaggagcttcaatcggtcctctaattgacttggctattcaaatcgacccgagtgtattggtagcttcatttgtgggaacagcattggcctttgcatgtttttcaggagctgctatgttagcaaggcgacgagagtacctttaccttggtggcttgctctcatctggtgtgtccgtgcttctctggttgcattttgcttcctccatctttggtggttccacagccctctttatgactgagatctacttagggcttttggtgtttgtgggatatatgatagtcgacacgcaggacataatcgagaaagcacacttgggtgatctggattatgtaaagcatgctttgactcttttcactgatttcggtgccgtattggtccgcattctgataatcatggtgaaaaattcagctgagaagggcgagagaaagaagaagaggagagactaaatcacaaagcaatagctgaggagctttacccatctaaccttgccttggagacatgaaagtttgttgctttttgtgctaaagcatcatgttaatataataagttaataaccatgtt

SEQ ID NO: 15184 - DNA, 448 bp, Gossypium hirsutum
  Clone ID: LIB3584-039-P1-K1-C9
caatttctttcaatttctctgttattttcgtcaaaatattgaaaaaaaaaatggattctttctcttcgttcttcgattatcaatcgagaacccattggagttactctactttcaagaatttcagccagatctctccgctcgttcaatctcatctcaaaagggtttacttgacgctatgctgtgcgttggttgcctcagcttttggggcttatcttcatatcctttggaacattgggggttatctcacaacatttgcttgcttcggaaccatgatttggctcctctctatccctacttatcaagaacaaaagagggtttctcttcttatggcatcagctgtattccaaggggcttcgatcggtcctctgattgatttggccatcaagattgacccaagtgttttggtagctgcatttgtggggacagcattggcctttgcatgtttttc

SEQ ID NO: 15185 - DNA, 417 bp, Gossypium hirsutum
  unsure (1)..(417): unsure at all n locations
  Clone ID: LIB3189-013-P1-K1-B1
ggcgacgagagtacctttaccttggtggcttgctctcatctggtgtgtccgtgcttctctggttgcattttgcttcctgcatctttggtggttccacagccctctttatgactgagatctacttggggtttttggtgtttgtgggatatatgatagttgacacgcatgacatattcttgaaagcacacttggttgacctggactacttgaagcatgccctgactcttttcactgattattctgctgtatatgtcctcattatcgatattatttattcaatatcatctatttttattttgataattaagtaaaggagtgactaactttcaaaccattatttttttaacttatttctatttatctttttcttttagtatatttaataatggngttctttttttttttatatcttttttt

SEQ ID NO: 15186 - DNA, 356 bp, Gossypium hirsutum
  Clone ID: LIB3135-057-Q1-K1-B3
attcattcaatttctttgcgaattttattgcaatttctgtttctttttcctccttcaacgaacgatgggcacgttctcggctttcttcgattctcaatcgagaagccagtggaattacaacactctcaagaatttccgtcagatctctccgattgttcaaacgcatctcaaaaaggtttatatgaccctatgttgtatgcttgttgcctctgcgtttggggcttatcttcatataatctggaacattgggggttccctcacgacatttgcatgctttggagccataatttggctccattctacccctccttgtcaagagcaaaagagggtttctcttctaatggcatcagcagttt

SEQ ID NO: 15187 - DNA, 831 bp, Gossypium hirsutum
  Clone ID: GOSHI-09MAY01-C4026_1
gttagggaatataccacttctccttgcaaccacgagacctttccgctcttcttcagaaacttcattcaggtgaaatggtgcatgaagcagtaactcggggatgcaaggaacagcaacgtcaaattgagatgaatctaatgttagggaatataccacttctccttgagcttatatggtcgtggatagcaccttcagaagatgatcaaaacatctccaggcctcgtgatcctcagatgattcggttcggtgcgcatgtagtgcttgttcttagatatctacttgctgaagaaattaaagataccttcagggaaaagcttatgactgttggtgatcgtattcttcacatgtattcattgtttctattttcaaagcatcatgaagaattggttggcatttatgcttctcagcttgcaagtcatcgttgcattgacctctttgtgcacatgatggaggttaggcttaatagcagtgtacatgtcaaatataaaatcttcctttctgccatggagtatttaccattttctcaaggggatgattcgaaaggaagctttgaagaaattattgagaggcttttgtcacgatcacgagaaaccaaagctggaaaatttgatgaaacatctgacgttgtggagcaacataggcttcagagtcttcaaaaagctttggttgtccaatggctctgcttcacacctccctccacaattaccgatgttaaagaatattagtgccaaacttcttatgcgagcattaatacacagcaatatattaattaggagtttgcttttgattctatgtggagagttctagcaatgccaataggtgcacatgaat

SEQ ID NO: 15188 - DNA, 1140 bp, Gossypium hirsutum
  Clone ID: GOSHI-09MAY01-C4376_3
ggcttctgcagaacatagcttcctctttggaacatgttatctgaaaagaatcctgcaaaagaaaatggtcctccaagtggctctgaccaggatgttgctatggctgacactagtccaagttcagtcaaagcctcaccaagtgtaaggagtccatgtttcattgagggggtctctaaatcatcttatgtaaagcaggcatctgatcttaaaaattcttctctgaaggtcatcaattgccatgattcagtcatttaccttctagcgcctttgagatatgccaccatttatggatgctctgatgctactatagtccttggagctgttggcaaggcagtacgagttgaacactgtgagcgagttcatgtgataatagctgcaaagcgagtctgcattgcaaattgtcgtgagtgtctattctttttgggagtgaatcagcgcccccttgttgttggtgataaccacaagctacaggtggcaccgtataatacattctactctcggttggaggagcacatgactgaagttggcatccaggccactatcaatagatgggatgatcctttggcacttggggcggttgatccacacgattcattatctcatcctgcaggtgtttctgatgcgcaagctgagtcagctgcacagttagatcctgatcagttcacaaatttcctgattccaaactggtttgaaggtgaatccgctgggtcgacaaaggataacccattccccttacctgatccatgcttgacatctcaactgagaaatcaaaacaatttaggtgagataaagcaaatattgagagaagctccccttgaagaaaatctaaaaagagaattatcatgtgctcttcatgtatacttcagagattggttatacgcctcgggaaatattcggcagctgtactgcctacaaagtgactgatactggcatccgcaggattatattacgcaatggtacatgatttaaatgagtggatgcggtttgtggttttgtttcatttcttcaacccttttgccagttccccaagctcagctcatctctttttgtcgtgggtgcccttcaacacccaacactcaacaggcagctgacaaatgagaacaccttccaatttggaacgtcacataaatttttatgcaa

SEQ ID NO: 15189 - DNA, 667 bp, Gossypium hirsutum
  unsure (1)..(667): unsure at all n locations
  Clone ID: AI728588.1
aataattattgtttggtatccaattattccaacaacttttattaatttcatgatgattatttgatatttatgtactttttggcataaaaatcctctaactgcacatgactttataatttcaggttattaattgccatgattcaactatttacattttagcacctttgagatatgccattatttatggatgctcagatgctactatagttcttggagctgttggcaaggtatcattgcctttgtgctgttagctatttgcattgcattaattttggaaccagtggaaacattctcttctactataataaagattttggatacagatttgttttcctctttttacatggtattggtatttgaattgttgaacatatctctggtgagatttgttttgatgtttcttctttagtgttattcttattcactgttccactgactggaaaatgtccatcactgttaaagaaattacccaattgtttcttttttaccaatgagactcaatcaaaaggtgatcaagcaccttactgttcgattccttatgtttttccttttagtatanggctctggtctatctttcctttaatcttcccttcacccgtgagtaatctatgaattgttcatggttggaatgtctgtangtgtaccataaagacattgatactctctt

SEQ ID NO: 15190 - DNA, 584 bp, Gossypium hirsutum
  Clone ID: LIB3828-019-Q1-N6-H3
ggcaacaactatgattatttaaatttataacactgctgtaaagacctaggctaacaaagggtacagtaggattaaatttattattgttgttttcttccgtccaaaatattacaaagagattagcagatgaataatatctgattgctttttttatctttttgggtgtgccggggcgcacgccaaaaagagcagagccaatcctgcataaaaatttatgtgacgttccaaattggaagggtgtctcagttgtcagctgcctgttgagtgttgggtgttgaagggagcccacaacaaaaagagatgagctgagcctggggaactggcaaaagggttgaagaaactgaaacaaaaccataaaccgcatccactcatctaaatcatgtaccattgcgtaatataatcctgcagatgccgatatcagtcactttgtaggcagtacagctgccgaatatttcccgaggctgccattttaagttttcacataaattaacaacacccgctaagattagactgtaaactcagaggcatacataaatgacgtcacaaaattagttttaacaaagaacaaaacaaacccaactatt

SEQ ID NO: 15191 - DNA, 671 bp, Gossypium hirsutum
  Clone ID: LIB3827-002-Q1-K6-B11
gtgcttttgcttctgtgcctccttgcaatcaatgccatcaatgtctttgtaattgtcatattaccgattaaaagcttaaagaagcacaattcatttgctatcttttcagtagcgattgccatccacccaattattgatgaatactcaccttcattacattaaaataaagaaaaaaatattttgataactgaaagtatggagatttgactctggaacttttcgggaaggtgtactctaattggataatgccagcgattatgtaattcttgattcttgtttgatattatgtactttgtggtctaatacacctcaaactctgcatgatcttataattccaggttatcaattgccatgattcagttatttacattcttgcgcctttgagatatgccaccatttatggatgctctgatgctactatagttcttggagctgttggcaaggcagtacgagtcgaacactgtgaaagagttcatgtgattatagctgcaaaacgggtctgcattgccaattgtcgtgagtgtgtattctttttgggagtgaatcaccgtccccttattgttggcgataaccacaagctacaggtggcacctttatatacatattatttctcgttggaagacacatgactgaagttggcatcgaggcaactatcaatagatgggatgata

SEQ ID NO: 15192 - DNA, 633 bp, Gossypium hirsutum
  Clone ID: AI725462.1
gtttgtttaggctgatcctggtattttcatgttctattccatcatttgtgagctattgttgctgtctattctgtctgtctgtcagcttgcaattgatgggtctgggggattttgttctggccatagtaatgcaaattgctctgacataaccatttatgtaacgcctcaagaaatagcatatttaacatctaactgtgcggcaaaatagaatatggaactcttccagaacatcagtggagaacaaccccaagaaggctttccctgttctttttctagttggcagaataacgtttgttattcatttttaacacagctttcacctttcagaaccatcttggtgttgttttgagttggttttttggtgctatcaaaattgactgttttgtaaattcttttattaaatttcatcaggtggcaccgtataatacattctactctcagttggaggagcacatgactgaagttggcattcaggccactatgaatagatgggatgaacctttggcacttggagcggttgatccacatgattcattatctcatcctgcaggtgtttctgatgcgcaagcagagtcagctgcacagttagatcctgatcagttcacaaatttcctgattccaaactggtttgat

SEQ ID NO: 15193 - DNA, 495 bp, Gossypium hirsutum
  Clone ID: LIB3584-045-P1-K2-A9
gaaaaacgtaaatgcactaagcccaactgatgaagaggaagttcgacttaatggtttgagtttaattctatttgcctgatagaagcaatgtttttgtctgttgctgtggaattagtgcttggtttgattgatctttctagtatagtattaacggaatttctgattccttgctaacgttatctacagcaaaataatttaggtgagataaatcaaatattgagagaagctccccttgtagaaaatctaaggagagaattatcatgtgctcttcatgtatacttcagagattggttatacggataatcaatcatatttctgatctgttaacttcatatgtggtggttctgtttggcgtgttaagacttattctcgggattagactgttgtactgtcctcgtccagagtgcatttgatgatataggatgatcctatcctgagaatctaaatatttaaacagcctctcgatgaacaaattgcgtattcctgatgattgtg

SEQ ID NO: 15194 - DNA, 360 bp, Gossypium hirsutum
  unsure (1)..(360): unsure at all n locations
  Clone ID: AW187329.1
atttttttttttttttttttttttttttttttttttttttttnntatgaaatggcagatctcgggaaatattcggcagctgtactgcctacaaagtgactgatactggcatccgcaggattatattacgcaatggtacatgatttagatgagtggatgcggtttgtggttttgtttcagtttcttcaacccttttgccagttccccaagctcagctcatctctttttgtcgtgggttcccttcaacacccaacactcaacaggcagctgacaaatgagacacccttccaatttggaacgtcacataaatttttatgcaggattggctctgttctttgcgcgtgcaccccagcacacccaa

SEQ ID NO: 15195 - DNA, 885 bp, Gossypium hirsutum
  Clone ID: GOSHI-09MAY01-C4326_1
ctcaaaccctagcaccaactcctaggaactcgtccttctataacacactctggcttccaatagagcaaaacacaactgatcctggctcgaactggcttaaccaactaacccatttctcatcaagctgttgggtctttgtttcaaggaagcaaggccctgataacaaatctagacttcccatttcctcgagcaacatagtcgcaaaatggtccctcggtttcacggctagtcctgaaggcaatggcatcacttccactcacagcagtccttgtccgttccccaaacgacagtccactcccgaaatcctcagccccaaacaacaatgcagcagcctcttcagctttgaatttcacagtggaagaagggttatctggaggcaatttcgtcacctcttctacagtcatttctttggttatgcgtcctgatgtttgatcctaacgacatgatcatcgaggaaaccactacatagcatatggggtggatcccaagttggcgagccaagtctgggatccaaaaccagaaatcataaaaaaccatatctggttttaaagcccctaggatgccttcaacttggtccctggtttgatctacagcaaaagcaaggtatttttgttggttcagaggaacaacagatgtagtttcagcacctggagggaggccatcgacatggggtataactagagggacgaattgaatcaagttggggtattggttcctgttttccagctttggttgcactcctttaggcaaaatgaaggaaattttatggcctttatgagccaacttatttgagagatgaaggaagcgcatgcaatgaccatatgcaacccagggaaacatggcgatgtgaagctttgagtagcctgattttcccatctttttttc

SEQ ID NO: 15196 - DNA, 782 bp, Gossypium hirsutum
  Clone ID: GOSHI-09MAY01-C4256_1
gtcatgccattgagagatggcagtctcaagcagctgctgctgatccagatttcttccatcctacaaattgcaaggatgaggaagattcaaatgcgagttcaaggcaaccaacctggaagcatgatggacgagcaaatgagagctccgtctcccaagtttctgtaaacaaggagcgatttgaaaatcatccccatggagctgatcgtattaaacaggctgtcgttgattatgttgcatcattgctaatgcccctttataaggcaagaaaaattgataaggagggatacaaatcgataatgaaaaaaactgcaacaaaggtaatggagcaggcaacagatgcagagaaaaacatggctgtttttgaatttcttgatttcaagcgcaaaaacaagattcgtccctttgtagacaaattgattgagaggcacatggcaatgaagccaaccatgaatctatgatgttgttaaggattgactagttatgctttattggttgcttctctgcaagatgtattaatgcctctccctgctttgagttcactgccttaagttatggtgatgcttggaaagagttatacattctgcaggtcatgacccaggtgtccatagaacagaaaaaacatggttctgtggtttgcagtcttgattgaccctcaaagaggaaagccaaagttgctcaaattgaagccctattgcatatttgatcagaactggtaccggaatgtggtagaagctttttggatgccgaattagtttctttattttatgtgacatcaatgaaag

SEQ ID NO: 15197 - DNA, 531 bp, Gossypium hirsutum
  Clone ID: GOSHI-09MAY01-C5986_1
tgagatatgattccagagggaccatccccagtgacttcatcaccacttcagttcttcccctggatgtcaccctctcctggtataggatcccctttcccatggctatgggagctcaaacctgaggagaggggtttatggttgattcgtcttcttgttgcatgtgcaaaccatgtagctgctggtagtcttgagaatgccaatattggcttagagcaaatatcccaccttgcttctcccgatggagataccatgcaaagaattgctgcttacttcactgaggcacttgctaatagaatgcttaaagcatggcctggccttcacaaagccctcaattccacgaaaatatcatcggtacccgacgaaattcttgttcaaaaactgttctttgagctgtgccctttcttaaaacttgcatatattatcacaaaccaggccattgtagaagctatggagggagagaagatggttcatattatagatctaaattcctgtgagcctgctcaatggatcaatctttttcaaacatttagt

SEQ ID NO: 15198 - DNA, 598 bp, Gossypium hirsutum
  Clone ID: GOSHI-09MAY01-C5916_7
aaagaaagggttgattgattccgttgcaagcaaaagtttgcttgttgtaaaaggtaatgcgattgaggacaagattgagggtcaaaaggaagtaaaggctaaagagcaggaagagaaggacgtgatcgcacaacagaacatgtatgctcagttgctacctcttgccttgcccgcaccgccaatgcctggcatgggaggaggttttgctccaccactcaccacccatgggaggaatgggaatgccgccttcgatgccaccttttggtatgccaccaatgggcagctattaagccttaagagcatggtttgttttttattgaaggttatttttaggagaaaaaaccgtagttcttatcaatttggaataatgtgctattttagtgtttttttttggagggatgtgataatgattttgtagtttgccctcattatttttctcctttttggtggtagcaaaagaggcattttttggctgctaatatactagagactagagaaagggtagtctaagggtttcatgaatatttgtatttttattatttcctttccatttccgaattgatctgagtatatatatgaaatgatacacttccatgtc

SEQ ID NO: 15199 - DNA, 752 bp, Gossypium hirsutum
  Clone ID: GOSHI-09MAY01-C5916_6
cccacgcgtccgggagttgcttgtttacttcattgagcagggcaagaaggaatgttttgcggcatgcctctttgtctgttatgacttaattcgaccagatgttgctcttgaaatggcctgggttaacaatgtgatagacttcacattcccgttcctgttgcagttcatccgtgaatataccggcaaagttgatgaacttatcaaggataagatcgaggctcaaaaggacgtaaaggctaaagagcaagaagagaaggaggtcattgcacaacagaacatgtatgcgcagttgctacctcttgccttgccagcacctccgatgccaggcatgggaggaggttttgctcctccaccacctatggggggaggaatgggaatgcctccgatgccaccatacggtatgccacaaatgggcagctattaagtcctaaccaagtctgttttgtcaaaaggttttattagcagcagggaatcccatggtgcattgaggttaaaaggctgacgtagttctattagtggcaatttttcacgcttcgaagctttcattttatttttcttgtccgtctctggtagggtgtgtgatatgtcttgtaatattcttttttttttatgtagcaagaggcatttttttggctgctgatagggggcaagccgaggatttaatgcatatttgtaattttccttcttgtagtattattttcttccggtctttggaagcgacttacgagtatatacgagcacacttgcacatt

SEQ ID NO: 15200 - DNA, 906 bp, Gossypium hirsutum
  Clone ID: GOSHI-09MAY01-C5916_4
cccagcgtccggtgttgctgcatacatttacaagaaggctggcagatggaagcagtccattgccttgtcaaggaaggacaaccattacagagatgcaatggaaacagcgtcacagtctggtgaacgtgaacttgccgaggagttgcttgtttacttcattgagcagggcaagaaggaatgctttgcatcatgcctctttgtctgttatgacctacttcgaccagatgttgttcttgagctagcctggataaacaatatgattgactttgcattcccgtatctattacagtttatccgcgaatacactggcaaagttgatgaacttatcaaggacaagattgaggctcaaaaggaagtaaaggctaaagagcaggaagagaaggacgtgatcgcacaacagaacatgtatgcacagttgctacctcttgccttgcccgcaccgccaatgccaggcatgggaggttttgctccatcaccaccaccaccacccatgggaggaatgggaatgcctccaatgccagctttcggcatgccaccaatgggcagctattaagtcataacaggtctgttcaattgaaacattttaggttacggatcaatggggctctatatagctgcaatttcgaggctttcattctttttcccctctttctttttcatttgtctgatgagtgaagatcaaaatttggaataatgccatttttgtgtttcaagtgtgtgatatatggccttgtaatattcttttatttagaagaggaattttttgaggtggtgatagagagcaaaccgaggatttcatgaatttgtaatttgtagtattatttcctgtcggtcattggaacgaccgagcatgtaccaaaaaaacttacacaccaatcatatttttggattttaatgttcttattt

SEQ ID NO: 15201 - DNA, 598 bp, Gossypium hirsutum
  Clone ID: GOSHI-09MAY01-C5916_3
cggacgcgtgggcggacgcgtgggggcacaactgagggaggggctggtgagcgatgccattgaatcttttattcgcgccgatgatgctacccagttccttgatgttatccgagcttccgaggatgctgatgtctaccctgatttggtgaggtatcttctgatggttaggcagaaggtcaaagagcccaaggtggatggtgaacttatttatgccgatgcaaagattgatagactcggcgaaattgaagaattcattctcataccaaatgttgctaatcttcaaaatgttggtgaccgcttgttcgatgaagccctatacgaagctgcaaaaataatatttgcgtttatatctaactgggccaaattggctgttacactggtaagacttaaacaattccaaggtgctgttgatgcagcacgaaaagcaaacagtgcaaagacatggaaggaggtttgctttgcttgtgttgatgcagaagaattccgattggcacagatatgtggtcttaacatcatcatacaggtggacgacttggaagaagttagcgaatactatcagaaccggggatgcttcaatgagttgatctctcttatggag

SEQ ID NO: 15202 - DNA, 591 bp, Gossypium hirsutum
  Clone ID: GOSHI-09MAY01-C5916_2
gacccacgcgtccggaaaccctagcaatattttcttcttaacgtttaagaagaacaaggggaaaatcctaaaagaaaatggcaaagtcgatgagatcgaagagagagaagaggctgagagccataaggagggaaatagtggaacctttctatcagaagaaagatgaagctaagatggttgccatagaggctgccctggctgcccctaagctgcccgcctcttccccaccctctggttctatgcagctcgaagaacaagttaccgcacccagttccgcaacaaccaatctgaactccatggaggtggagatggctgactgtgatgaaaacaagaccaaggcctccttgagagctattggtagaataggaaagatgtccaaaaagaaattgaagatcgccaaaaagaagcgccgcgccggtggtaagggaaagatcagggggaagcgtaatctttgattcttaactctctactcccaaatttttcttgcctttttatcctttttatgttgtaatactattatcgtcgagtttgtctagttgaacgagataacactgagttgttacgcttttcttttcttttttatttgaaata

SEQ ID NO: 15203 - DNA, 1783 bp, Gossypium hirsutum
  Clone ID: GOSHI-09MAY01-C5916_1
ttgacgcgtgggatcaaactgtttcacgcgtccgcccacgcgtccggggccaaattggctgttacactggtgaggcttaaacaattccagggtgctgttgatgcagcacgaaaagcaaacagtgccaagacatggaaggaggtttgctttgcttgtgttgatgcagaggaattccgattggcacagatatgtggtcttaacattattatacaggtggatgacttggaagaagttagtgaatactatcagaatagaggatgcttcaatgagttgatctctctcatggagagtggtttaggattggaacgtgcacacatggggatctttactgagttgggagttctgtatgccagatatcgtgcagagaagcttatggagcacattaagttgttctctactcgtctcaatattcccaagctgataagagcatgtgatgagcagcagcactggaaggaacttacctacttatatatccaatatgacgagtttgataatgctgcaactactgtgatgaaccactctcctgaagcatgggatcatatgcagttcaaagatattatagtcaaagttgctagtgttgagctatattacaaggctgtccacttctacttgcaagagcatcctgatctcatcaatgatatgctgaacgtgcttgcacttcgtgtggatcacactcgtgttgttgacattatgagaaaggctggtcatctgcgtcttgtgaagccatacatggttgctgttcagagcaacaatgtatcggcagtaaatgaggcgttgaatgagatttatgtagaggaagaagattatgatagattgagagaatctattgacttgcatgataactttgatcagattggccttgctcaaaagattgagaaacatgagctgcttgagatgaggcgtgttgctgcatacatatacaaaaaggcgggcagatggaagcagtccattgccttgtcaaagaaagacaaccattacaaagatgcaatggaaacagcttcacagtctggtgaacgtgaacttgccgaggagttgcttgtttactttattgaacagggcaagaaggaatgctttgcatcatgcctctttgtctgttatgacttacttcgaccagatgttgctcttgagctagcctggattcacaatatgatcgacttcgcattcccatatctgttgcagtttatccgcgaatataccggcaaagtcgatgaacttatcaaggataagatcgaggctcaaaaggaagtaaaagccaaagagcaagaagagaaggaagtcattgcacaacagaacatgttgtagtactactctgcttgcttgacgcatgcgcagttgctacctcttgccttgccagcacctccgatgccaggaatggaggaggttttgctcctccaccacctatggggggaggaatgggaatgcctccgatgccaccatacggcatgccacaaatgggcagctattaagtcctaaccaagtctgttttgtcaaaaaggttttattagcagcggggaatcccatggtgcattgaggttaaaaggctgacgtagttctattagtggcaaattttcacgcttcgacgctgtcattttatttttcttgtccgtctctggtagggtgtgtgatatgtcttgtaatattcattttttttatgtagcaagaggcatttttttggctgctgatagggggcaagccgaggatttaatgcatatttgtaattttcctttttgtagtattattttcttccggtgtttggaagcgacttacgagtaaaaaaataaaa

SEQ ID NO: 15204 - DNA, 450 bp, Gossypium hirsutum
  unsure (1)..(450): unsure at all n locations
  Clone ID: LIB3147-051-Q1-K1-E3
gcctaaggagggaaatagtggaacctttctatcagaagaaagatgaagctaanatggttgccatagaggctgccctggctgcccctaagctgcccgcctcttccccaccctctggttctatgcagctcgaagaacaagttaccgcacccagttccgcaacaaccaatctgaactccatggaggtggagatggctgactgtgatgaaaacaagaccaaggcctccttgagagctattggtagaataggaaagatgtccaaaaagaaattgaagatcaaaatttggaataatgccatttttgtgtttcaagtgtgtgatatatggccttgtaatattcttttatttagaagaagtattttttgggttgtgatagaaagcaaactggggatttcatgaanttgtaatttgaaggatatttcctgtcggcattggaatcgaccgagcatgtacc

SEQ ID NO: 15205 - DNA, 534 bp, Gossypium hirsutum
  Clone ID: GOSHI-09MAY01-C5926_2
ttgataaaaactaaaagaaatcctctgaaagttcctcagccctctgagctccggcccttggccggtttgctccgttcatcgggcctccgtgcccaccctcacacgccgtcaccgactccgccatacatgacggtgactcgcgaagatttcggtggctgggcttgctgtcatggattcgaatctctgcagatacccatatgaccatgaaagagtctcttttgcggagatctcggcgtcaacggaggtaccaaggtcggagatgaggcctgagatcacggtgctggacggtcgtgagagggacaagctactagacaacgcattgatggtgcgtcagtgtgcattgatggcctcgatttggggagttgaacagatgctcctcgggcttccagaagctgctgcggcgctgttgtcttcaggaaaccctagggtttcctggccctaagtcacttggtcttttgggccgttttggttttttggtcttctgtttgggtcccgggtgtttctgggtctgctgggtcgttttcggttttgctg

SEQ ID NO: 15206 - DNA, 1057 bp, Gossypium hirsutum
  Clone ID: GOSHI-09MAY01-C5926_1
cccacgcgtccggttttaaaaaaaaactaaaagaaatcctctgaaagttcctcagccctctgagctccggcccttggccggtttgctccgttcatcgggcctccgtgcccaccctcacacgccgtcaccgactccgccatacatgacggtcggtatctgaaaaacttcgtttttcttagccaatctaaaagctatatttctttcctctattttgatgtattatatgcaaactgtttgtaataaaataatgaaatagaagtagaaacgacagatcacctttgcttctctcgaaaaccttctgatatattattcaagaatattcagtgtacaatatcttttggggtgtatttatctcttttgtgtattctctctgtttctatctatgtatgcttttctctctgtctctctgctattgtccccccttctttacagatttgcgaaaggctttatagccttaaactactgcctattttggaaagaaatcggaagatttcttggcttctttgatttcctttccttttcttgctctgccttttttgtgtatctgctgcttgtttccttttcttgcaggtgactcgcgaagatttcggtggctgggcttgctgtcatggattcgaatctctgcagatacccatatgaccatgaaagagtctcttttgcggagatctcggcgtcaacggaggtaccaaggtcggagatgaggcctgagatcacggtgctggacggtcgtgagagggacaagctactagacaacgcattgatggtgcgtcagtgtgcattgatggcctcgatttggggagttgaacagatgctcctcgaggcttccagaagctgctgcggcgctgtagtcttcaggaaaccctagggtttcctgtttccctaaagtcacttgggcttttgggccgttttggtttattggtattctgtttgggtcaagggtgtaaatgggtctgctgggtagttttaggtttgctgtaacgggtatgaactatttgggcttgtgtttgggctcttgtaaggactttatatggactgttaaataaataaacatttattc

SEQ ID NO: 15207 - DNA, 813 bp, Gossypium hirsutum
  Clone ID: GOSHI-09MAY01-C5806_1
aataatagacatccatttcatctatcaaacaccctcctctctctctctctctctctctctctctctctctctctttcttggctcttaagaaaaaggcctttcttaaacaacaaatatcagaatcatgcctgaagcacctaagaacacacttaaacctactgcagattacaacctggaactgaagaacaagaaaacccttcagttcattgaggccgtgacttcaaacgctgatgaagttcaaaagaaagtccttgaggagatcctttcacgcaatgctcatgttgagtacctccaaacacgtggccttaatggtcacactgatagagagactttcaaaaaaaccatgcctgtcatcacctatgaggatatccaacctcatattgaccgtattgccaatggtgatacctctcccatactttcttccaaccccatttctgagttcttgacaagctctgggacatcaggtggggagagaaagctgatgccaacaattgaagaggagttaggaaggaggccactgctctatagcttactgatgcctggtatgagccaatttggccctggtctagacgaaggcaaaggaatgtactttttgtttataaaatccgaggccaagacacctggtggcctggtggcacgccctgttctcactagctactacaaaagcacccatttcaagaataggccatatgacccctacaccaactacactagcccaaatgaaaccatcctttgtcctgattcttaccaaagcatgtactctcaaatgctttgtggactttgccaacacaaagaggtcctcagggtcggtgc

SEQ ID NO: 15208 - DNA, 849 bp, Gossypium hirsutum
  Clone ID: GOSHI-09MAY01-C5826_2
ggcaagtctagttttaatgcacacttctctcctatttttatccactctttttatttgtgttcatctctcagaccagtttcaaccatttcaatacaatgctctcaagcaaatccagcagttcctcaattacccatcggttcttaccatctttgacagcacttgggatttctgcaacgtcgaatcatcgccatttttaactatagtttgttacgaagacaatgtaacccagcttcacatcacaggcaacaatggcgttttcccaccatcgttgccccaaaatttctccattgatgctctgttttcaagcatttcaagtttatcaaatctcaaagtcctttctttggtttcattaggtttatggggtcctttacctgctactatcggtaagctttcttccatggaaatactcaatttaagctccaattacatcgatggttttatccctttggaactttcatatttgaacaatttacagacacttgttcttgatcataacaagttcactggtcaaatccctcggcgggtttcttcttttaatgatttacctgttttgagttggaaaaataattcactatttgagacacttacaagctccattcgaagcttctgacaactctactaattgaggctatagccgatcttcataaatatggctggaataccccatcggaaaacattgccaaaactgacaaagagagactggagaattattacaggcgaaactacaaggattacttgaattccatgaagggacattgaaagggacggaccagcagcagctaagtgaagcagaaaaagctagccaacgtgttcccaaatgcgaggaaagctcgatttcctttaaggaac

SEQ ID NO: 15209 - DNA, 510 bp, Gossypium hirsutum
  Clone ID: GOSHI-09MAY01-C5826_1
cttttatctcattatcctgaaaacagaacgagtggcttccttgatagaatcgaaagaagacaatggtgtaagggtgtgcaatgggttcaattgcacaaagtgttttaatggcactgactgtggcagtcaaccagttggctccttcaaacgtgcatgcagttcataggaaacaaggcaaatcgccatcccccacttctaaacctaaaccaaaaccaacctatacaacaacaatcacagccgccgcagcaaacgttggtttcaccggaattgcaacgagaggtctcattttatccgccgtggctttcgctcctcaactcaatgattccagaaccgagcttctcaaaaagtacttgaagaaaacagaggagaacaaagccaagaatgacaaagagcatagaatggagaattattacaggcgaaactacaaggattactttgaattcgttgaagggacattgaaagggaaggacgagcagcagctaagtgaagcagaaaaagctagcaaacgtg

SEQ ID NO: 15210 - DNA, 642 bp, Gossypium hirsutum
  Clone ID: GOSHI-09MAY01-C5506_2
ctcttttttattttttcttttgaataatcccagttgtccaatccaatctcagctctccgtctctcttcattttcacactctctcaagttgcttcgctttttgcagatcgaatcctgaaattgaacttggatctctttcgcgtccggaaaaccagttgtctcttttaacaaaatcaaaataatgggtcaaattcaatactctgagaaatacttcgatgatacttacgaatacaggcatgttgttcttcctcctgaagtggccaaacttctccctaagagtcgcctcctctctgaaaatgagtggcgtgcgattggagtacagcagagtcgtggttgggtccattatgctattcatcgccctgaaccacacatcatgttattcaggaggcctcttaactatcagcagcagcaggagaatcaggctcagcaagctatgcttgccaagtaattaaaatagcttttggtattttgaaagaaaaagggaggaaaacccgaatatggttatatctgcataaacaggttggatgttatggaattctggattggtttctattatatagtctctattgtggagaattaccatgttaggctggtgctgtactgtcttttctgatgacctatatacgtcattggtactctctgc

SEQ ID NO: 15211 - DNA, 603 bp, Gossypium hirsutum
  Clone ID: GOSHI-09MAY01-C5506_1
cccacgcgtccgcccacgcaaaatcggaaaatggggcagattcaatactccgagaaatactttgatgatacttatgagtacaggcatgttgttctcccccctgaagtggccaaacttctccccaagaatcgcctactctctgaaaatgaatggcgtgcaattggagtacagcagagtcgtggttgggtccattatgcaatccatcgccccgaaccacacatcatgctcttcaggaggcctctcaactatcagcagcagcaggagaatcaggcccaacaaagtatgcttgctaagtaattacattagtattcagcatccaaaacaagaagggtgaaaccaaagctactttgttagtgtttatcctcttcctaaacagtttgggtgttgtggattcctggattgttttgtattttagttctccactttggagaattccatgtcaggattgctttcttactttctttatctgactacctagtcattggtactccgcatcttaaattgtttaaatagcatggatgaataattttttcttaaaccttaattagatcatcttaatttactggtgtttcttgccaattttgattatcttttgtgcaaaaa

SEQ ID NO: 15212 - DNA, 398 bp, Gossypium hirsutum
  Clone ID: LIB3829-005-Q6-N6-H4
tcgcgtatctatattgcagcattagaatagttgctttattgcgagaaagttatttacatttcatatatcatgaacaatcaagatcaaaatcaaaactcgtaaattaaggccataaataattaatttcctaaataggcaaccgacaaagcaaactattttagatgaaaacttgaggaaattattaaattaaacaaaactgcattaaaaagatggacatttctgtaaaaatacaaaaataagttacaaacagtgacatgtgtaaaaccctaaacaaaatacatcagagagtaggtgattcttggggagaagtttggccacttcagggtggagaacaacattcctgttctcataagtatcatcgaagtatttctaggagtattgaatctgccccatttttc

SEQ ID NO: 15213 - DNA, 928 bp, Gossypium hirsutum
  Clone ID: GOSHI-09MAY01-C5536_1
cggacgcgtgggctaatacaaaaaatcaaaggttcaccgcagaaagtaggaaattttggtaatactggaaatgttgtcgatcaaaaaccctaaccctagctccggtttggagcccttgaagaggttccatcgtgcttcttcttcttcttctccgatggcactttgctcgtcaccgtcgttacggctcagatcgccggcttacagagtctctctcgccgctcccaaaggatttgtagttggttttcgctcactccattcacggcttcccttccaccattccgtcgtcgctttcgcagcttctcacgaggaatctaaccattcagaaatggaagttgatagagaaaaggatgaattggaaactgagagcgaagaagaatcaaacgaagcatggaaacaagctttagcttcgtttaaggaacaagctttgaagttgcaaagcgtatcccttgaagcttacgaagttcactccaagaaagctttgattactcttaaagaaacttcggaggttctcaaggttcaagctgaaaaggcaagaaatgatttgactgaagtagtcaaagaaatgagtgaagaaggcaaagaatacctctcaacggctgccgagaattcccctcctgaagtccaagaaatcgttgagaccttctcttcctccgccgaagatttcaatgacgtgtccaaagttcacgactttcatgtcggtataccttatggttttattctttcagttgggggatttctttctttcatggtgacagggagtatatctgccattaggtttggtattattctaggtggagctcttttggcattaagcgtatcgagcttaaaatctcataaaagaggagagtcgtctcctcttgccatcaaaggacaagcagtgatctcatctgtactacttttgagggagttaagcttgctgattcggaga

SEQ ID NO: 15214 - DNA, 498 bp, Gossypium hirsutum
  Clone ID: LIB3585-046-Q6-K1-F5
cccacgcgtccgcccacgcgtccgtcattcaaaaatggaagttgaaggagaaaaggatgaattggaaatggggagcgaagaagaatcaaacgaagcatggaaacaagctttagcttcgtttaaggaacaagctttgaagttgcaaagcgtatcccttgaagcttacgaagttcactccaagaaagctttgattactcttaaagaaacttcggaggttctcaaggttcaagctgaaaaggcaagaaatgatttgactgaagtagtcaaagaaatgagtgaagaaggcaaagaatacctctcaacggattcctttctttcatggtgacagggagtatatctgccattaggtttggtattattctaggtggagctcttttggcattaagtgtatcgagcttaaaatctcataaaagaggagagtcgtctccccttgccatcaaaggacaagcagtgatctcatctgtactatttttgagggagttaagcttgctgattttg

SEQ ID NO: 15215 - DNA, 582 bp, Gossypium hirsutum
  Clone ID: GOSHI-09MAY01-C5486_1
gaaatgcagaggttcacggctaagattgtggaaatgatgaagcaagagaagttgtatgcatcacaaggaggacccattattttgtcacagattgaaaatgagtatggaaacattgattcagcatatggggctgccgcataaccctatattaaatgggcagctggtgtggctatttcattggatacaggagttccctgggttatgtgccagcaatctgatgctcctgatcccattattaacacctgcaatggattctactgtgaccaattcaccccaaattctattaagaaaccaaaaatgtggacagagaattggtctggatggttcctttcatttggtggcaccgttccctacagacctgtagaagacctcgcatttgctgttgcgcggtttttccaaagaggtggaactttccaaagctattatatgtaccatggtggaacaaactttgacaggactacattgggaccctttattgcttctacgtatgattatgaatcctccgattgatgagtatggacaagttagacaactaaagttggggtaacctaaatagatgttcattaatgctataaaatcttt

SEQ ID NO: 15216 - DNA, 600 bp, Gossypium hirsutum
  Clone ID: GOSHI-09MAY01-C5456_5
cttatgtcctcactttcttccctctgaaaccctaaacccgccgccgccgccgccgcccgtcaaacgccgacgaaaatggctttcgagggattagttctccgcggcaccatgcgagcccacactgacatggtcacagccatcgccactcccatcgacaactccgatatgatcgtcacttcctctcgcgacaagtccatcatcctttggcacttgaccaaagacgaaaagacctacggtgtcgctcgccgccgtctcaccggccattcgcactttgttcaagacgttgttctctcttctgactcccagttcgctctctccggttcctgggacggtgagcttcgtctttgggatttgaacgccggaacatccgctcgtcgtttcgtcggccacaccaaagacgtgctctccggtgctttttcaattgataaccgtcagatcgtttcggcttctcgtgatcgaagcattaagctctggaacacccttggagagtgcaaatacacgatccaagatggtgatgctcataccgattgggtcagctgtgttcgtttcagcccaaatactctccagcctaccatcgtttcagctttttgggataagacc

SEQ ID NO: 15217 - DNA, 758 bp, Gossypium hirsutum
  Clone ID: GOSHI-09MAY01-C5456_4
ccggaaacgcattccgggtcgacccagctttcggtgaagtttggacttgaccaatgcgggatcgtaacacattggccggacacactggttatgtgaacacggtggcggtttcgcctgatggttctttatgtgctagtggaggcaaagaggggtgattctgttgtgggatttagctgaaggaaagaagctttacagccttgaagctggggccgtaattcactcgctttgctttagtcctaataggtactggctttgtgctgcaacggagcagagcatcaagatctgggatttggaaagcaagagcatagtcgaagacttgaaggttgacctcaaggccgaggctgagacatctgcagccactgacaacgcaaacaaaaagaaggtgatatattgcacaagcttgaactggagtgcagatggaagcacgttgttcagtgggtatacagatggtgttatcagagtttggggaattggtcgtttttaagatgatgatggtgttgcaatcataatagcaactattcggcaaagatcagttgccttctggttcttagtctttttttaagattttgtttaaaaatgtttggaaggatctttgagtcgtttctttatctctatgtattcggatggggatattggtaggcgttggggcctaagcgctattttggtttcctagtattaagtttagatatatttaattacccgtttcaaagcttttgagttgaattctacaaaaccatttgaagaatatgttttcatcc

SEQ ID NO: 15218 - DNA, 592 bp, Gossypium hirsutum
  Clone ID: GOSHI-09MAY01-C5456_3
atgtgaacacggtgcggtttcgcctgatggttctttatgtgctagtggaggcaaagatggggtgattctgttgtgggatttagctgaaggaaagaagctttacagcctcgaagctggtgccgtaattcactcgctttgctttagtcctaataggtactggctttgtgctgcaacggagcagagtatcaagatctgggatttggaaagcaagagcgtagtcgaagacttgaaggttgacctcaaggccgaggctgagacatctgcagccaccgacaacgcaaacaaaaagaaggtgatatattgcacaagcttgaactggagtgcagatggaagcaccttgtttagtgggtatacagatggtgttatcagagtttggggaattggtcgttattaagatgatgatggtgttgcaatcataagcaccttctggttcttagtctttttttaagattttgttaaaaaatgtttgaaaggatctttgagtcgtttctttatcttaatgtattcggatggggatattggtaggcgttgaggcctatgcgctattttggtttcctagtattaagtttagatatatttaattacccgtttc

SEQ ID NO: 15219 - DNA, 1363 bp, Gossypium hirsutum
  Clone ID: GOSHI-09MAY01-C5456_2
tccacgcgtccgcccacgcgtccgcccacgcgtccgaccacgcgtccgcccaccggcctctcactgttttccttcaaaaccctaatagctgtcctcgcctcctgaacgtgttcgaaaatggccggttctgagggattgactctacgtggcaccatgcgtgcccacaccgacatggtgacagccattgctactcccatcgataactccgacatgatcgtcacttcctcccgcgacaaatccatcatcctttggcacttaaccaaggacgaaaagacctacggtgtccctcgtcgtcgtctcaccggtcactctcacttcgtccaagacgttgtcctctcttccgattctcagttcgctctctctggttcctgggatggtgagcttcgtctctgggacttatctgccggtatctcagctcgccgttttgtcggccacaccaaagatgttctctccgttgccttttcaattgacaaccgtcaaattggttcggcttctcgagatcgaactatcaggctttggaatacccttggagaatgtatatacacaatccaagaaagtgacgctcataccgactgggttactgcgttcgtttcagcccaaatactgtccaaccaccattgtttcaccttcatgggacaagactgttaaagtttggaacctgaccaactgtaagattcgtaacaccttggccggacactccggttatgtgaatacggtggcggtttcacctgatgggtctttgtgtgccagtggaggaaaagatggagtgattctgttgtgggatttggctgaaggaaagaagctttatagtcttgatgcaggttccgtcattcactcgctttgctttagtcctaataggtactggctttgcgcagccaccgagcagggtatcaagatctgggatctggagagtaagagcatagtggaggacttgaaggttgatcttaaggctgaggctgagaagtctgacgtcactgacatcggaaataagaagaaggtcatatactgcactagcttgaactggagtgccgatggaagcaccttgtttagtgggtacactgatggtgtaatcagagtttgggggattggtcgttactagatatgcttgtcttgagttaagattttgtttcaaatgtcggaaggttttttggtttattttcttaatatggttggatattgaggccttgccctcttctattctaatttggtttggtttatttaattaccggcttaggtttgaattgaatggagtataattttctcagttttgcttccttccttttttatatcatgattcaataataataataataatagtattatgtgaaaaaagaaaaaaaaaaaaaaaaagtcgacgcggccg

SEQ ID NO: 15220 - DNA, 1392 bp, Gossypium hirsutum
  Clone ID: GOSHI-09MAY01-C5456_1
cccagctgatctatcattttatcattcaaaaccctaaaggccgctcccgccgcaagcgccgacgaaaatggcagtctccgagggattggttctccgcggcaccatgcgagcccacaccgatatggtcactgccatcgccactcccattgataactccgacatgatcgtcacttcctcacgtgacaaatccatcatcctttggcacttaaccaaagacgaaaagacctacggtgtcgctcgtcgtcgtctcaccggccactctcacttcgtccaagacgttgtcctctcttcagattcccagttcgctctctccggttcctgggatggtgagcttcgtctatgggacttaagcgccggaacctccgctcgtcgtttcgtcggccacaccaaagatgtgctctccgttgccttttcaattgacaaccgtcagatcgtttcagcttctcgtgatcgaactatcaagctttggaatacccttggagaatgcaaatacacaatccaagaaggtgatgctcataccgattgggttagctgcgttcgtttcagcccaaatactcttcaacccaccattgtttcagcttcatgggacaagactgtgaaagtttggaacctgaccaactgtaagattcgtaacacattggccggacactccggttatgtgaacacggtggcggtttcacctgatgggtctttgtgtgccagtggaggaaaagatggtgtgattctgttgtgggatttggctgaaggaaagaagctttacagtcttgatgctggttctgttattcattcgctttgctttagccccaacaggtactggctttgtgctgccactgagcagagcatcaagatctgggatctggaaagtaagagtattgtggaagacttgaaggttgatctcaaagctgaggctgagaaatctgatgtcaccgacaatgcaaacaagaagaaggtgatatactgcacaagcttgaactggagtgcagatggaagcaccttatttagtggttatacagatggtgtaatcagagtttggggaattggtcgatactaagaccaacattcatgcatgcatgttgtgccttccaatgagtaatcatatagtattaaggaacatgtagtgatacttttagttgcttctcttagcattttcaaacctttttaaagattttgtttaaaatgttgtaaggattgcttttattttgtttggaggttttcattgagccctatgctcttatgttattttggtttggttgttacattagaagatattttacttatttacgtgagttgttcccctctataaaatgtgtgccgcagcttttgagaccgaattaaatctcactgagtattcagaaaaaaaaaaaaaacaaaaaaaaaaaaaaaaacaaaaat

SEQ ID NO: 15221 - DNA, 553 bp, Gossypium hirsutum
  Clone ID: LIB3825-005-Q1-N6-D12
ctcttacaaaatttattcacttttcattttatacaaacgttatacacttttcaacatagtagctgggctggctacaacagcatgtaactgatacttacaggaatgtaaataattataaataaaaaagtagaaaatataaaaagacactgccatgaaaaacccagaaaaaccatgtggttttcatggctattagctattgaatgtatagaaagactatggaacggctttcacatgttcgacgcagctagcaaagagctgatttagatttacatgcaccacggggtttgcaaggcatcccatcctgttgtatcgacaagactggtaccgaaaatgcttggatcatccatcactggaaaatccaatgacataacagcttctgcccaaatggagtcatctaaaacaggcaagttcatcgtcatattctcccaaaacccaccattttcttcttggttttgtccaaatttggcattgttcgccatcatgttcccttgagacatatctgattcactgttgctcactggtgttacttcatcgaccctgataataattggga

SEQ ID NO: 15222 - DNA, 531 bp, Gossypium hirsutum
  Clone ID: LIB3825-011-Q1-K6-B10
ttgcaaaccccgtggtgcatgtaaatctaaatcagctctctgctagctacgtcggacatgtgaaagccgttccatagtctttctatacattcaatagctaatagccatgaaaaccacatggtttttctgggtttttcatggcagtgtctttctatattttctacttttttatttataattatttacattcctgtaagtatcagttacattgttgaaaagtgtataacgtttgtataaaatcaaaagtgaataaattttgcaaaaaaaaaaaaaaaaaaaaaaaaaaaaaaaaaaatataaaaaaaaatgaaatggaaaaaataaaaaaataaaaactaaaacgcaggaacctccgctcgtccccctcgaaaaaaaaaaaaaaagatgggctttccgttgccttttcaataaacaaccgtgcgatcgtctcagcttttcgtgatcgaactatcaagcttaagaatacccttggagaatgcaaatacactctccaagagggcaatgctcatacagattggataagctggggtc

SEQ ID NO: 15223 - DNA, 440 bp, Gossypium hirsutum
  Clone ID: LIB3149-001-P1-K1-G9
ttggggaattggtcgatactaagaccaacattcatgcatgcatgttgtgccttccaatgagtaatcatatagtattaaggaacatgtagtgatacttttagttgcttctcttagcattttcaaacctttttaaagattttgtttaaaatgttgtaaggattgcttttattttgtttggaggttttcattgagccctatgctcttatgttattttggtttggttgttacattagaagatattttacttaaaaaaaaaaaaaaaaaaaaaaaaaaaaaaaaaaaaaaaaaaaaaaaaaaaaaaaaaaaaaaaaaaaaaaaaaaataataaaaaaaaaaaaaaaaaaaaaaaaaaaaaaattaaaaaaaaaaaaaaaaaaaaggggggccccttttaagggtcccaagttttcttccccgggcttgcaacgtaatagcttttt

SEQ ID NO: 15224 - DNA, 450 bp, Gossypium hirsutum
  Clone ID: LIB3135-061-Q1-K1-H8
tccacgcgtccgcaaagctgaggctgagaaatctgatgtcaccgacaatgcagggaagaagagggtgatatactgcacaagcttgaactgtagtgcaaatggaagcaccttatttagtggttatacagatggtgtaatcagagtttggggaattggtcgatactaaaaccaacattcatgcatgcatgttgtgccttccaatgagtaatcatatagtatgaaggaacatgtattgatacttttagttgcttctcttaacattttcaaaacccttttaaaagatttttgcttaaatatgttcgtaaaggaattgcttttcattttttgtttggaaggtttttcatttgaagcccttatgcacctttattgataattttgggtttgggcgttaacatttaaaaaaattatttttaaattaattttaaccatgaaattcgttttccctctctt

SEQ ID NO: 15225 - DNA, 355 bp, Gossypium hirsutum
  Clone ID: AI726162.1
gtcgactgagaagtctgacgtcactgacatcggaaataagaagaaggtcatatactgcactagcttgaactggagtgccgatggaagcaccttgtttagtgggtacactgatggtgtaatcagagtttgggggattggtcgttactagatatgcttgtcttgagttaagattttgtttcaaatgtcggaaggttttttggtttattttcttaatatggttggatattgaggccttgccctcttctattctaatttggtttggtttatttaattaccggcttaggtttgaattgaatggagtataattttttcaaaaaaaaaaaaaaaaaaaaaaaaaaaaaagtcgacgcggccg

SEQ ID NO: 15226 - DNA, 319 bp, Gossypium hirsutum
  Clone ID: LIB3149-001-P1-K1-G10
gcgatgggggatcgagaacatgctagagaccaacatctagtgcgtacatgttgtgccttccaatgacgaatcatatagtattaaggaacgagtgtagtgatacttttagttgcttctcttagcattttcaaacctttttaaagattttgtttaaaatgttgtaaggattgcttttattttgtttggaggttttcattgagccctatgctcttatgatatcttggtttggttgttacattagaagatattttacttaaataaaaaaatttatagtattaacttagtgacttttatttccttgacaaaatgcaatttttgc

SEQ ID NO: 15227 - DNA, 1104 bp, Gossypium hirsutum
  Clone ID: GOSHI-09MAY01-C5446_1
gttacagtacaatgtcttcatgctatgagtatcaggttatggagcaagtgatggttatccttctcagcatggaattattaacgatgctcaggctgccctggatcatctctcccagaggacggatattgacacagatagaatagtggtctttggaagatcacttgggggtgctgttggatcagtactcaccaaaaacaatcctgataaggttgctgcattgatattagaaaacactttcacatctattctggacatggctggagttttattgcctttcctgaagtggtttattggaggcccgggtaccaaaggtcccaaaattcttaattttcttgtccgttcgccatggagtaccattgacatcattgggcaggtcaagcagcctatccttttgctttctggattgcaagacgaaatggttccgccatcccatatgcaaatgctgtatgctaaagcagctgctcgtaacaggcaatgcatttttgtagaattccctactggcatgcacatggacacttggttatctggcggtgatcaatactggagaacaattcagcagtttttcgaaaaacatgtgccaaaaactggatatgatattgattcccagaggagaggtgactagcaggcgtgcaatcttttgagattttattatttggctcacacaccctggatctcaaacttttgtcccttttcttttgaagctgcagctggtagaagcactctataaacatacaccccgctgttgtcgtctttcattgtctccacgattttttttcttcttttactggcatacgaaacataagctgattaaaagcgataaagagaaagaacgcgaattcccgtttagtataccgtatgactgactttgacgaacaatcgtgtaataccatcccgattctgctggttccatttgtatgaaataagaaaactattataaggaaaaaaaatgaaaaaaggaatgttgcagatgtatggttggtgctgatatgtttgatctatttgcatctctggtttttttcgtctggggcagtttggtcttttaggtgtttcagcatttgttttgacaatttaggttgtttatgtgaacttttttctcttttaaaa

SEQ ID NO: 15228 - DNA, 577 bp, Gossypium hirsutum
  Clone ID: GOSHI-09MAY01-C5416_1
gcaagacccgagcagtttcggttggtggggcagtgaagggtttcaaaaagatcttagtgctctacaccaactatggcaggcaaaggaagcctgagaagactaactgggtgatgcatcaatatcacctcggcagcaatgaagaagagaaagatggagagttggtggtttccaaagttttttaccaaactcaaccgagacaatgcggtcccagtagtgtcatgtatacgctcggccgaaagcttatcacccgaagcccgctgcaccaaagtcctaatcctatggctaagagcagtggcagccggggtcttgttgagcataacaatccaccttttattccatacgatgatgggagtcaccataatagggaaagcccaccgcagctcatcccagatttggttgttcaaggtgatggatcctcgtttattcgattaacctctgatacaagcaaagggagagttgaaagaaaatagcaatggaaagatgagcagctacgacaaggacttatgcgggtgttgctggtgccatgtaacagtcaaaataattaaagagtccgatgctttgggaagatttgcccatg

SEQ ID NO: 15229 - DNA, 530 bp, Gossypium hirsutum
  Clone ID: GOSHI-09MAY01-C5786_1
cccacgcgtccgcccacgcgtccgcccacgcgtccgtccacgcgtccgcccacgcgtccggcggagggaaagaaagaaaaacaacagaaacgagtgaacggcatcggaaaatgagcggagaagaaggtcgtgaggccgccaccgctaccgtccccgctgctaattcttcaacaaagccatgggtggaggaattgccgacaatcgaaagccttatagactctaaagacttagcgattcgctctgctcaatcccttttccataactcctctacccatctacgctctttccaggattctctaccacaagcatcctctcactataaatcctatgaagatgcttttttcagcaaacttaaagagggggtgatgattgcaaaggaaaaccctggtgcagctgttgggattactttgactgctgctctctgtctcatgcgaggcccaagaaggtttctattccgtaatacgttgggtcgatttcagagtgaggaggcaaaattttctagggctgagaagaatgtaaaagtgttaagc

SEQ ID NO: 15230 - DNA, 658 bp, Gossypium hirsutum
  Clone ID: GOSHI-09MAY01-C5736_1
attagttctccagtaaccgagcaaaggtcccccacataaaaaacaaaaaaaaaaaaaagaggaagaagaagaagaagaagaagaggagatttaactatggcagaaacccagagccgtggccttgttttcgccgggaagaagagaggaacaggaaccgatgactttgacggggatgatattttcgtggctaagaaatcaatgttgcccacaatggcatcggaaagcgaccctgccgctgcattagccaacgctcgccatgaattcggtgaacatggtggtgttaacatgtccattgaagcctccgccaccttcaccgtcatggaacctgagaccatgcgccgtatgttcgccggtgaactcggtcctgatcgtgatttcttcatctatagccgtcattttaaccccaccgtcttaaatcttggccgtctcatggcagccctggaaggaaccgaagctgcttattgcaccgctagcggtatgtctgctatatcatccgtgctggtgcaactctgcagcagcggcggacacgtagtggcatcgaggaccttataccgcggcacccatgccctcttaacacatttcttttccaaaacctggtatatcacaaccacctttggggaccttggcgatcttcaagcttggaaaaatgccattggcc

SEQ ID NO: 15231 - DNA, 923 bp, Gossypium hirsutum
  Clone ID: GOSHI-09MAY01-C5686_1
ccgtccgtattcccgtcgccctcgcgtcggtcaggcgaattttggttctctattaaatcctagatataaaccgaactgtaaaaaggaaacacaagatttcaaagatcggagtaattgcaagcagcgcagtagcctaaccgcactgaaaaaataatggactatcctggaaattcgcaagatatggctgtgccgccagttgaaggtgttgcagggggagggacagcatatggatggaatgatggtggtttaaatgtttcaaatccactcaagggctcaattgaccccacagaagttccaactgctgatttagtacatgtgtggtgcctcccaagcacagcaaatgttggaccacaagaagtgcctagaaatttagagcctgtaaaccttctggcagctagaaatgagagggaaagcgttcaattagctatccgtccaaaagtctcttggagtggttctagtgtggctggagttgtgcaggttcaatgctgtgatttatgctcggcatctggtgatcggttgattgttggccaatcattaaaattgcgacgtgttgttcccatattgggtgtacctgatgctcttgtacctcttgacctccctattagccaaataagcctacaacctggggagacaactgctgtctgggtttcaatagatgtgccaaatgaacagcctcctggtttatatgaaggggagatcatcattaatgctacaaaggcagatacagaatcatcatcacaatgcttggggaaggctgagaagcatcaactattcacagaacttcgtaactgtcttgatgctttggagcctatagatggaaagccattggatgaagtggtggaaagagtgaaatcttcaactacatctttaagaaaagttcttctttcttcatccattttctgagttctttttcggataatggg

SEQ ID NO: 15232 - DNA, 576 bp, Gossypium hirsutum
  Clone ID: GOSHI-09MAY01-C5196_2
tcccacgcgtccgcttcgtttagctgtaagtaaagttttaaagatcattctctgagaaaagaaacccccccaaaaaaaaagagcaaatagttggcattctggtttctatgaatatgtcgtgttcaccggaatttatggttcacaaaccggcgaggtcaccggagaagacaagttttacccaaacttgtaacttattgagtcagtacttgaaggagaaaggtagctttggagatctaagtctgggtatgacatgcaacgttgaagctaatgagactcccgagatgctgcgtcccaccatgaatttgtttcctgtcaatgggaaatccggtgatgattgccatgcggcgcctcctcctcggaaactgagatccatggatttggtccctaatcaagctgctttttcatcacctaaagatgatgctctgaaaagcagcatgaacaaattgggttcttcagtggagcctcaaactgcacagatgaccatcttttatggtggacaagtgatttgtgttcaacgattttcccggccgacaaagctagggagatcatgcttttagctggcaaaggcagctctca

SEQ ID NO: 15233 - DNA, 713 bp, Gossypium hirsutum
  Clone ID: GOSHI-09MAY01-C5196_1
caaagataaaaaagaaaccattttctccttcccctcctcgcataaataagtactccaatattccttggctcaaaagcatctcaaattcgactagatcccttaatgaagttgtaaagtaagttcaaagatcgagagctaggtatttgatatccaaatcattctctgaaaacccaaaaggggggttggattctgtttcgtcggaactatgtcgtcttgctcggaatctacggctatgaaaccggctaggtcactggagaagccaagttttgcccaaacttgtaatttgttgagtcagtacttgaaggagaaaggtagctttgggggtctatctctgggaatgacatgcaacgttgaagctaatgggacaccagtggtgccgcctccgaccatgaatctgttccctgtcaatgacaagtccgataatgtttgtggccgaaacggtgggaatcctaagaacttggcatccatggatttgttcccccaacaagctggtttggcttctaaagatgatagtcccaacaagttggagcctcagactgcaccaatgaccatcttttatggtggacgagtgattgtgttcaatgattttccagcaaacaaagctaaggaaatcatgcttttagctagcaacagcagctcacaaagcaacgacagcttcaaccccatcccttttacttctagcatagccagaagtccaatcaaatcaagcatcg

SEQ ID NO: 15234 - DNA, 1189 bp, Gossypium hirsutum
  Clone ID: GOSHI-09MAY01-C5186_1
gtttgtgatgtccagaagtgaattcccggtttcattcaagcccttccaagtaccctttcatcaggtgaccttaagtgccgagaaggaaagccacaggctgctgttgaccgcacgccccacgcgtccgcttttagagggtggacagaaacagataatccctggacgtatgatgatgagactgataatgccgagatgacttatgtgaatcttcagctgaacccagagcgctatactggctacaatggtacatcggctagaaggatatgggatgctgtctactcggggaactgtcccaaatatccagctgaagagttatgccaagaagaaaaaatactatacaaattgatttctggtcttcactcatctatttcggtccatatagcttctgattatctgattgacgaagctacaaacttgtggggccacaatcttgaaataatgtattatcgggttttacaatatccaaatcgtgttgaaaacctgtacttcacattcctctttgttctccgagctgtgacaaagacagctgactacttggaacaagctgaatatgatacaggtaatccaactgaggacataaaaacgcagtccctaatgaagcagctactttatgatccaaaactgcaagctgcatgcccacttccatttgatgaagccaaattgtggaaaggacgaacaggaccagaactgaaacagaaaatacaagcacaattcaaaaatatcagtgcggtgatggactgtgttgggtgtgaaaaatgtcgactttggggaaagcttcaggtttctggtcttggaactgcactgaagattctgttctctgtaaatgacgaggagaatttgattcagatattgcagttgcaaaggaatgaagtaattgcgctgatgaatctactcaatcgactatcggagtctgtaaaatttgtgcatgaaatgggagcggcagctgaaatgggaaggatgcattattccagtaggttgaagagcctagcgcaaaggatattggcatctattgttaatacatagataaggatgagaaattcaactgcaaagacccacacatttcctttttggggaaaaaattagaattagggttttggagaaaatataaaatattggcagtgtacaatcagacagattaatgtcaaacaaaaccagaagttaacacaagttaaaattgagtgttattatc

SEQ ID NO: 15235 - DNA, 667 bp, Gossypium hirsutum
  unsure (1)..(667): unsure at all n locations
  Clone ID: AI054499.1
cagaaacagataatccctggacgtatgatgatgagactgataattccgagatgacttatgtgaatcttcagctgaacccagagcgctatactggctacaatggtacatcggctagaaggatatgggatgctgtctactcagagaactgtccaaaatgtgagttctcgttaatcttctttgatgcgtgtgggaatgaaagatgcctgtgcattttcttggtatgagtagaggcnatcggtccattaccttttaacaatttgattntggaagtagtaactaaatgttgaatgcctagtgatgaaccttcaatgacataaatcaatnattttctggttttgtgaacttattaatactgggganggcgtgtttntctgttctattgagtacatactaagtaacaagtatccttattggaagataggaatagtctaatgaacctcctttatttaaaaacaaaatctttatttgtttgtattctgtacacagatccagcttaagagttatgccaagaagaaaaaatctatacaaattggattcttgtcttcactcatctatttccgtccatatagcttctgattatctgattgacgaagctacatacttgtggggccacattcttgaaatatgtattatcggtttacaatatccaatctgttgaaaactgtcn

SEQ ID NO: 15236 - DNA, 918 bp, Gossypium hirsutum
  Clone ID: GOSHI-09MAY01-C5086_1
acaggagacgaccccactaacattaagcttttcatctataaatactatggcaaaacccttcagtttctgacattagaacctccgaaaaaagagttcaaatcattttgaatttgttttgagtttgaaaaaatgggtgatgaagatgtagtattgttggatttctggccaagtccttttgggatgagagtgaggattgctctggcggagaaagagataaaatacgagtacaaggaagaagatttgaggaacaagagtgatttgcttctgaagatgaaccctgttcataagaaaatccctgttctaatccataatggtaaacctgtttgtgagtccctcattcaggttcagtacattgatgagatttggccgcataaatctcccctactccctaccgatccttaccaaagagccatcgctaggttctgggctgattttgttgacaacaagatatacgatctagggaggaaattatggaccacaaagggagaagaacaagaagcagcaaagaaagagttcattgcgtgcctgaaattgttggaaggagaacttggaaacaaggattattttggtggggagaatcttggttacgttgatgttgtgttggttccattttacagctggttttatgcctatgaaaagtgtgggaattttagcattgaaacagagtgccccaagctgattgcatgggctaaaaggtgcatggagaaagacactgtttccaagtccctgcctgatcaagacaaaatctatgactttgttttgcatttgaagaaagtgttcggaattgagtaaaatattgtgcttacaatacatttcaagactcgcctaatatctatgtttcttaaataaatgggcacttcgttgtgccttgaatgttgatttgaattttgttttgttttaaggagtggattaattata

SEQ ID NO: 15237 - DNA, 323 bp, Gossypium hirsutum
  Clone ID: LIB3584-031-P1-K1-B11
aagaaaaagagttaaaatcattttgaatcaattttgagtttcaaaaaattgcagatacaacggtggtatggtgtggatttctgaccaagtccctttatcatcatagtaaggactgctttatctgttaaaggtataaaataccactacaacgaataatatttgcgcaacaagatttattcccttttaaagatgaaccctattcataacaaaatccctgttctaatccatacatctaaacctatttaacagtccctcattcaggttcagtacatttattaaatcttcccccatatatctcccttactccctaccgatccttacca

SEQ ID NO: 15238 - DNA, 1259 bp, Gossypium hirsutum
  Clone ID: GOSHI-09MAY01-C5076_1
tctgtacgttttgtcctagaacagatcaggttcttaagacagagataagcaaagctcgtataaggttgatggagccattgttaaagggacctgctgctttggattaccttatgaaagcttttactaactgccctggctcaccgtctgaggcgtgcttgtctttaccaatgaccatgcggtggctttcacctgtctcgaactgcaaagatgaagagtggggagaacatcaaaattctgtgtcaaatttgaaagcaaatgatagttcatctcaagagcttcttatgtccatcacccttaaaaccggtggaagctataattcaaaaaattcaacccaaattccatttgtcaatcctaattcttctaatgttacaggtcaagaacaaccagaatgcaagggagacaaagtcgatgtactggttaggctcggtttgctgaagctagtaagcggagtttctggtctaacaccggatgctttacctgaaaccttcatgcttaacttctctagattgcggggtgttcaggccgagattcagaagatcattgtaatatcaacaagcattcttatatttaggcaaatcctctcgagcgagcaagtctctgacatggaaagaacaatatcaaattgcactgaacagctctcggaattcttaaactgtgtcgaagatgcagatattgaagggattgttgacacaatcatcgggacctcaagacttggtgacaaagtaacagatgacaaaaaccttcagttaaggaaatctatgatggccaggatgctagcaaagagcttgcaagctgaggatccagtgttcaaaaaggtatcccttgccgtttatttagctttcagaggggttgtattcggcgggagcggtacccatggtagaaagttggcggaaactgctctccgccgagtcggggctgcttctctaaccgaaagggtcgtgaaagaagccaaggtgttggtggttgctgccacagtgtctatcggggtccacggaccatggtacgcaaccttgattggtacatgtgatttgtgaaaataatggcaatctgtaatgtaaataatgtgtgtttcaaaatatggttagaatggattctattatatttcctacggtcggttcaatagaacatatattgtaatgtaaatattttttaggtttattggaaaaaaagaagggatttgtgttggcttttctctcttttcattgggaataagccaaaatgtaagacgaagtattttaatattaataaatgtgtttctt

SEQ ID NO: 15239 - DNA, 866 bp, Gossypium hirsutum
  Clone ID: GOSHI-09MAY01-C5016_1
cccacgcgtccgcccacgcgtccgcgactcttagattacggtttttaattaattggcttgtaacgcgcagggctgcatcttaagttacctaatccagatggagacagcagagtgaatcttgtttacatttacggcccgaaaataaaatacgaaaggggtgcggctgttgcattcaacgtgagggatagaaacaagggtctcattaatccagagattgtacagaagttggctgaaagagaaggtatctctcttggtattggttttctcaatcacatacgaatattagatagtccgcgacaacagcaaggtgctctgagcctcgaggatactaccctgtgcaaacccatggaaaatgggcgacatgatgggaaaagcaggttcataagagttgaggttgtcacagcatctctcagcttcctaactaatttcgaggacgtctataaattgtgggctttcgtggcaaagttccttaacccgtcattcatcagagagggtacacttccaaccgtggccgaagaagaaccagagacataatgaatcaagcaattcaaaagccagtcgtgaaacaatccaggagtctgactggaagattcagaaagaccctgaagaggattttgcaggtgcactagtatatgcatgggcttgtccttcctcaagactctccgatgcaagtggggtgaattggttaattaatgttggtggtggctggaaaatgtcccttcctcttttggaggttcttgtagagttgttttagaaaaaaaaggtaccattttgggaagcgccatgaccctcaagcagaaactatatggacaactggtaccacttaaaagcatttctgctttggtaacattccatttttttcttgt

SEQ ID NO: 15240 - DNA, 1560 bp, Gossypium hirsutum
  Clone ID: GOSHI-09MAY01-C5356_1
cccacgcttccgattcttcttccttttcttttttctctctttcttcccctttcagctattgagatcgcgtttcactcagttctggaaaaaagatggggattattgagaggattaaagaaatcgaagccgagatggctcgaacccagaaaaataaggccacagagtaccatctcggtcagctcaaagcaaagattgctaagctaaggacacaattactcgagccaccgaaaggttctagtggaggtggagacggttttgaagttacaaaatttggtcatggacgtgttgcactaataggatttccgagtgtggggaaatctacccttttgactatgttaactggaactcattcagaagctgcatcttatgagtttacaacacttacatgcattcctggtatcatacattacaatgatactaagattcaactgctcgatcttcctggaattattgaaggtgcttctgaaggcaaaggacgtgggaggcaggttattgctgttgccaagtcatcggatcttgtgcttatggttctggatgcctctaaaagtgagggtcatcgccaaatattaacaaaggaactggaagctgtgggattgcgtttaaacaagagaccccctcaaatatatttcaaaaagaagaaaactggaggcatctctttcaacagtacattacctttaactcatgtggatgaaaaactctgttatcaaatcctacatgaatacaaaattcacaatgcagaggttctatttcgtgaggatgcaacagtggatgatcttatagatgtcatcgaaggaaaccgcaaatacatcaaatgtgtatatgtttacaacaagatagatgtcattggtattgatgatgtggataagttagcccggcagcctaattctgttgtaatcagctgcaacctgacgctgaacttagatagactactttcaaagatgtgggaagagatgggccttgtgagagtatatacaaagccacaaggccagcaacctgatttcagtgatcctgtggttctatctgctgataggggtggctgttcggtggaagatttctgcaatcacattcataggagtttgataaaggatgtgaaatatgttctgggtctggggctcaagtgcaaggcattatcctcaacactgtggccttggccattccttgcaggatgaagatgttgttcagattgtcaagaaaaaggaaaaggaggaaggagggagaggccgcttcaaatcacatacgacaggtcctgcacgaatatccgatagagagaaaaaggctccattgaagacctaaccatgacaaaagatgtcggcaggaagtaagagttgcccttttttgttgtataagtaatattatcaactagtattgtctggctgatttattctgtttcccgtttcttccagcttccctcatttttcacttcttaattatattgccattaagtagctgtattttagtacgtacttggatgcaaattttggtcatttacactataaaccactattctgaaagaaaaaacatgggcagtcttcaaagacaagaacgcctagattgtatacc

SEQ ID NO: 15241 - DNA, 535 bp, Gossypium hirsutum
  Clone ID: LIB3543-052-Q1-K1-B5
gttatgttgaagttggttgagggtgctatatgcctacattcaaagttcctactaagaaaaagataagattatgtctttttccttttcattacggttcaactatctgatctcattcttatgctcaatttgattgagtcgttttgttttttatctcaaaatattttatgagattgcttgtttctcaggttattgctgttgccaagtcgtcggatcttgtgcttatggttcttgatgcctctaaaagtgagggtcatcgccagatattaaccagggaactggaatctgtgggtctgcgtttaaacaagagacctcctcaaatatattttaaaaagaaaaaaactggaggaatctctttcaacagcacattacctttgactcatgtggatgagaaactctgttatcaaattctacatgaatacaaaattcacaatgcagagcttctatttcgcgaggatgctaccgtggatgatcttattgatgtcattgaaggaaaccgcaaatatatcaagtgtgtttatgtttacaacaagataga

SEQ ID NO: 15242 - DNA, 429 bp, Gossypium hirsutum
  unsure (1)..(429): unsure at all n locations
  Clone ID: LIB3147-051-Q1-K1-H7
caaaaggttctagtgcaggtggagatggttttgaagttacaaaatttggtcatggacgtgtagcactaataggatttccaagtgtggggaaatcaacccttttaacaatgttaacaggaactcattcagaagctgcatcttatgagttcacaacacttgcatgcattcctggtatcatacactacaccgatactaagattcaactacttgatcttcctggaattattgaaggtgcttctgaaggcaaaggacgtgggaggcaggtaaaaatttgcagattctaattttacctggtggtatgttctcgtctcttggtataaaatgtatcattaccaagtgagggaaatgctgataaaatttttaattgaaatgtgttgattaactgcttaacattctnctttaaatgttgtttgattaaatgcttaacat

SEQ ID NO: 15243 - DNA, 917 bp, Gossypium hirsutum
  Clone ID: GOSHI-09MAY01-C5376_1
cggacgcgtgggtggatacatcctatggagatcgctacttgttttcccatgttattgatcaattatcagtctcgtcagctgaagtatctgatcctggaagccttacactggatataatccaacaggccgaagctgaagttaagagattggatcaattaaaggcaagcaaaatgaaagagctatttctcaagaaacagaatgagcttgaagagatatgcaataaatcacacatggagattccttcaagatcagagatggaaaatatactaaatctgataaacacaggggagattgactatgccgagctcctcatgagcatagatgaacagatatcaagagcaaaggaagaagcctcaagtagaaaatcaataatggagaaggtggaaaaatggatactagctcgtgatgaggagcggtggctggaagaatatagcatggatgagaatagatattcggtcagcaggggcgctcacagaaacctgagacgtgcagaaagggcccgagtaacggtcaacaaaatcccagcattggtggattcactcatggcaaaaaccaagagttgggaagaagaaagaaggaaagttttcctgtatgatgaggtacctcttttggcaatgttggaagagtacaacctgtctaggcaagaaagagaagaagaaaagcaaaggcaacggatgaagaaggtccaaagccaggttgtagttgagcaagaaaacttcactacatctaggccatccaccagtaatcggcgcctttcaaacaagagcttaaatggaggttttggcaatgcaagccctttaaacaagaagctttccttgagtatccagcagctaggatcaaatggcaaaagctcggtggctcttggtacatccttcatcaaagaagggaagaaagaagcaggaaagaggatattttct

SEQ ID NO: 15244 - DNA, 529 bp, Gossypium hirsutum
  Clone ID: GOSHI-09MAY01-C5366_1
cccacgcgtccgatttgtcccaaatccaaacatcaaaattcttggaacaaaaaagatcccaaaatcgaagttcagttttatagggtttctctttgaaaaacaatggttggccatgaagctgtggaggttgccaagacggttctcgaagtcgccgacgtcgcttggaccgccatggaatgttgccaccacctccaccaccgtcacaaccccgacgatgattctcctgaaaatcatgacgctttcaagctcgaaaaagaattggaaaccctaaaatccgaaaatcaacgtctcaggaatcttctggaacagaacctcaaactcctcaacaatctctctgaatctcctgcttatttaaacgactgtcctcctgacctctatgctcggttggtatctaccgtggaatctaaagactttttgctccgactcaaatctcttaacggatccaatactaaaatcgagtttccattcaaggaagctacaggggatgataagcattctgctgaaattctgattaatgttaaccaaaatg

SEQ ID NO: 15245 - DNA, 520 bp, Gossypium hirsutum
  Clone ID: GOSHI-09MAY01-C5316_1
aaaacctattcctcgggatttcggatctgagatttcagttgggcagttgcaaggaactgatgtcaggcatggaggtcgccaaagatcaagaactagtagacggaactgttgcacaggagtctggaaaatccatgccgtcatctcaacaggaggaggcagttgtaaagaaaaaatacggagggattatgcccaagaagcctccacttatctctaaggaccatgaacgtgcctactttgactctgcagactgggcacttggaaagcaaggtgttgagaagcccaaaggtccacttcaagccctccggcccaaattgcagcctacacaacaacaaacacgatataggaagtctccatatgctccatcagatgtcgaagatggagggagtggccaaccataggatgggactgccaatgaatgagaaactgcgctcagtcttctggttttccgagaactatcgatcgctattcaaatggctagacaggtaatgagtaaatttcaattgatctcgcggataaacct

SEQ ID NO: 15246 - DNA, 672 bp, Gossypium hirsutum
  Clone ID: GOSHI-09MAY01-C5306_1
cacggagctaactttgagaaagtctgattcaacactgtttaaagaagcattagtgagtttggctacagagtcatgacttcatccattagttccttatttcacttactttatatctgatgaggtttctcgtggtttaaatgattactctcttctatttgctttaatgcgtgttgtttggagtcttctccaaaatcctcacatccacatagaaccttatctgcaccaattgatgccatctgtagtgacctgccttgtttctaaaaaattagggaacaggattgctgacaatcactgggaacttagagattttactgcaaagttagttgcttctatatgcaaaagatttggccatgtttataacactcttcagacgcgtcttacaaaaactttgctcaatgcacttctggacccaaaacgggcattgacccaacactatggtgcagttcaagggttggctgccttaggaccaaatgtggtttgtctccttattctaccaaatcttgagccataccttcgactccttgaaccagagttgttactagagaagcaaaagaatgagatgaagagatatgaagcttggcggatttatggtgtcttgctgcgtgcggcggtcaaagcatatttgagcgcctcaagattttttcacctttaccattaaacttcagcccatgc

SEQ ID NO: 15247 - DNA, 573 bp, Gossypium hirsutum
  Clone ID: GOSHI-09MAY01-C5326_1
ggctggtcttatgcgtggtgctgtctcaatggcacttgcttacaatcagtttaccagcttaggtcatacgcagttgcgaggaaatgcgatgatgataaccagcacaatctcggttgttcttttcagcacagtggtttttggattgatgactaaaccattagtgagactcttacttccttctccaaaacatctcatgaggacgctttcgtctgaaccatctactccgaaatcgttcattgtaccacttcttggcaatgaaggccaacccgaagctgaccaaaacaaccgtaatgcatgtcgaccgactagcttgagaatgctcttgacaactccttccaacactgtgcattactactggagaaaatttgacgatgccttcatgcgacctgtgttcggtggaagaggtttcgttccattcgttcccggatcacccaccgagcaaaatggtcatcaatggcaatgaaaaggtactagtagattttacattaagagtcaacaattaacgtattttatatgtatataaatattgatacattaataaagtcacattatatagattgatgatatttgttt

SEQ ID NO: 15248 - DNA, 536 bp, Gossypium hirsutum
  Clone ID: GOSHI-09MAY01-C5296_1
ttcatattggtcatcacctaattcagatggcacagcggagaccgggatgtaccgattcggttcggttggacaggacacacaattgctattgtgggacttggtaatggatgaaattgtggtgccattacgtcgatgccctcccggagggtctcctacttacagcaccgggagccagtcttcccattgggacaatgtatccccattgggtaccctgcaacctgcctcgagcattcgagatgttccaaaaatttcgccagtggttgctcatcgcgtacactctgaacccctctcgggtttgatttttacccaggaatctgtacttacggtttgtcaagaggggcacataaaaatctggatgagaccaggtattgcagaaagtcaatcaagcaacaccgaatcattaagtagcagcgccaaggataagctattacttcccagcaagattggtggttctagctacaagcaatgattagaccatcatcaagattcgagacaaaggtggtggtttcattctttctgtcattttgatttgcaag

SEQ ID NO: 15249 - DNA, 543 bp, Gossypium hirsutum
  Clone ID: LIB3584-036-P1-K1-G8
cccacgcgtccgcccacgcgtccgcccacgcgtccggaaaaggatgatatttttcatggttcacgaaacgcagaagacggatctaagctaaagtcaagggagggaaacaccagagcagaacccaaaagaaaaaagatgagaggaaagttcattaggaaggagactgatagagcaatatccagtgctacaaaaggattggtctttgaggtccattttaagtttgtaaatgaacctcatattttactggctcagattgctgagaagactgcaaagaaggtttacatccatagctttggaaagattgaccaatgtctagtgacagactgtagtgagaatcaagttttttactatggtgaggatccgaaacaaaggaagagtccatctggcaaagcaaatataccagcattgcacacagctggagtggattttggtgctttttggaagatggaaggtcaccttgatgttaggtatttatattacaataacatatattcaatgcttaataccttatggagtggaagcttgaagagaaaccattaatta

SEQ ID NO: 15250 - DNA, 400 bp, Gossypium hirsutum
  Clone ID: LIB3166-020-P1-K1-G7
cccacgcgtccgcccacgcatacacagactctttttagaaggtttacatccagagctgggcgaggattgaccaatgtcgagtgacacactgtagtgagaatcaagttttttactatggtgaggatcccaaacaaaggaagagtccatctggcaaagccaatcgaccaggattgcacacagctggagtggattttggtgctttttggaagatggaaggtcaccttgatgttaggtatttatattccaataacattcatgcaatgcttaatacttatggagtgcaagctgcaagagaaaccataattagcgagatcagttatgttttcacatcttatgcgatcggtgtcaatattcaccacctaacacttattgctgattttatgacccactctggaaggca

SEQ ID NO: 15251 - DNA, 524 bp, Gossypium hirsutum
  Clone ID: GOSHI-09MAY01-C5256_1
ctcttctctgcccttcgtagaataatactataaaaacctcattaaccctttatactcaaaagtctcaaacttttttttctctctctgtcgctgactgatcatcaaagttgaccatgaagaagctctaccgcagaggcacggttcatccatcacctctgagcacaaccgatcatctgtctttccttccggccaccatcttgaccctcgtggctgctctttccccggaagacagggaagtcttggcctatctcatctcttgtgctaacaacgatttcagcaacttctcaacccaccggaaaaacacccagaaacacccgactaaaagaagcatcagcttcagcagcggcagcgatcatgaccatccacctctttttacctgtgattgtttcaggtgctatatgagctactgggtcaggtgggactcatcgcccaacccgcagctgatacatgagattatagatgcttttgaagatgggctagctcaaagcaagaagactaagagcaagaaagacaggcaaaagaag

SEQ ID NO: 15252 - DNA, 685 bp, Gossypium hirsutum
  Clone ID: GOSHI-09MAY01-C5276_1
gcagtatatacacgccgtttcgtgatatatataaaggaaggtgtgtacgaagaacggtgagggtgccactggagaagaaaatgtggtctttttgggggatggaatgggtaaaaccatcattgcgggtgctttaaatgcagggatgcctggacttaccacttatgagactgctactggcggggttcttggggatggatttatggccagtggactcacaatccggaacacagcaggccctgatgcccaccaagccgtagcctttagatcagatagtgatctttctgtcattgagaactgtgaattcctaggcaaccaagatactctctacgctcactccctccgccagttctacaggaagtgccgtattcaggggaacgtggacttcatcttcgggaattctgcctcggtgttccaagattgtgaaattttggttgctccccggcaggtaaaacccgaaaaaggtgagaacaatgctgtgacagctcatggtagaactgatcctgctcaatcgactggtctgggtttccagaactgcttgatcaacggaactgatgaattcatgagatactattatagcaagcctaaagtgcacaagaactttttgggaaggccatggaaggaatattcaaagacagattttataaattgtgttatggaagcacttattaattccaaatggatggga

SEQ ID NO: 15253 - DNA, 472 bp, Gossypium hirsutum
  Clone ID: LIB3120-011-Q1-K1-A3
tcggtttaccgtcaaacttgaagacggacgtatcggtgtgtaaagactggatcggagggtgttacaagacggtgcaagaggccgtcaacgcatcaccggcaaatgcagagagtacacgccgtttcgtgatatatataaaggaaggtgtgtacgaagaaactgtgagggtgccactggagaagaaaaatgtggtctttttgggggatggaatgggtaaaaccatcattgcgggtgctttaaatgcagggatgcctggacttaccacttatgagactgctactgtcagtgagtactactaccctcctacactacttacgttaaacatttaactttgtttaagaattgtcagttttacatatatgaatgagcttgataagatactgtctatagactttcatggtttcccagagcttatatatagtagtagtacccataagcctatgtcgagtaaaagtctcttatgtaactcatc

SEQ ID NO: 15254 - DNA, 233 bp, Gossypium hirsutum
  Clone ID: uC-gsronu33b025c05b1
gttttgtgatatatataaaggaaggtgtgggcgagggaatcggtgagggtgccgctggagaagaaaaatgtggtctttttgggggatggaatgggtaaaaccatcattgcggttgctttaaatgcaaggatgcctggactcaccacttatgacactgctactggcggggttattcgggatggatattttacccccccctcttacaatcaggttccctgtattacatccccccc

SEQ ID NO: 15255 - DNA, 2485 bp, Gossypium hirsutum
  Clone ID: GOSHI-09MAY01-C5266_1
aattttgggagctctcattcttctaattcagctcagcatcagtcagtctctgtgaatgagcagttggaagagaagtggtatgctagtccagaggatatcaatgaaggtgtttgcacaattttatctaatatatacagtttgggtgtgctgctttttgagttgctttgtcaatttgaatctgagagaggacatgctgctgcaatgttggatctacgccataggatttttcctccaacttttctgtcagaaaatctcaaggaagctggattttgtcttagactacttcacccagaaccttctttgcgcccaacaaccagggatatcctacaatctgaagtacttaatggattccaggaagtatttgcagaagaattgtcgtcatccattaaccaagatgatactgaatcagaattattattgcatttccttggtttatcaaaagagcaaaagcagaagcatgcctcaaaactaatggaagatattgcttgcttggaagcagatattaaagaggttgagaaaagaaggcacttttctagaaaacctttaacttattcttccatcaatgcgagggaatgtaggcaccatagtaaagaacctccaatctcggagatgcattcaagtttatacccgttttccagtgacaatgaaatgaggttaatgagaaatatcaatcagcttgaatctgcttatttctctatgaggtcaagagtcccttttcatgagaccgattctatgagacggccagataaggatttactgaaaaatcgtgacaatgggcatttgacacaaaacaatgaagaaataccgaatcctcctgattgccttggagcattctttgatggtttgtgtaagtatgctcgatatagcaagtttgaagtccgtgggataatgagaagtggggagttcaacaactctgcgaatgtaatctgttctttaagttttgatcgtgacgaggattattttgctgctgctggtgtctctaagaaaataaagatattcgaatttaatgcactttttaatgactctgttgatgttcattatccagtcattgagatgttaaacaaatcaaagcttagctgtgtttgctggaataactatatcaagaactatctggcttcaactgactacgacggtctggttaagttatgggatgcaagcaccggtcaagctatctctcattacattgaacatgaaaagagagcctggtctgttgacttttctcaggtgtatccaacaaaattggctagtggcagtgatgactgttccgtgaaactatggagcattaacgagatgaactgcttgggaaccatcaggaacattgcaaatgtctgctgtgttcagttttctgctcactcccctcatttactggcatttggttctgcggattacaaaacgtattgctatgatcttcggaatgctagagccccatggtgtgttcttgatggtcatgataaagccgtgagctatgtgaagttcctggactcggaaactgtagttactgcttccactgacaacacattaaagctttgggatctcaataaaactagcagtgggggcctgtcctctaatgcttgcagcttaacattttctggacatacaaatgagaagaattttgttggattatccgttgttgatggttttatagcatgtggctcagaaacaaatgaggtttatgcatactataggtcactgcctatgccaataacttctcataaatttgggtccattgatcccatttctgggaaagacacagatgatgacaacgggctgtttgtatcaagtgtttgctggagagggaaatcagacatggttgttgctgcaaattctagtggatgtattaaagtattgcagatggtttaaggagaaggttaattgcttagagtcatcaattactggcgtcatttggttgccaagttttattctcgaggcttattcttaagcattgaagccatcttgggttcaggcaaatatgtcatacatggatgacttggtctgctcggtggctcattataataggcttggctttgattcatagaaaattatatacagagtagagtcgagccaaactggagttatggttccaggttatcaagattatccagagctaggttccagttattcttttacatgcttaagaatccagaatatcatgacacttcctgagtcttgagaaagaggatcaaaccgtaaatacgggaatgcaaaatcaagattgaggtaacttctgctaagaggctttccatctcggttgtgggagcgagagtgtatgctatattagtacgtgtctttacttctgctggtgatccttgaaactaaggtgcagtccttttaagcgttgtaatatatatatatatagagagagagagagagaggtataattcgtaatttactcaaatgtagggtattctttattgagatgtaagtaagcattctatgattctatgtaactgatgttttaccagtgtaaatctataaattttgatgt

SEQ ID NO: 15256 - DNA, 884 bp, Gossypium hirsutum
  unsure (1)..(884): unsure at all n locations
  Clone ID: AI054779.1
aaagatgttaatgatgtattatgtatggtatttagatcaacaccttctagtttgagggatttcatcaagtggattgtacagattcggagacaagatgatggcagtaccgttttaagtaaataggagaaaggaagggttgcactcaagacttgtctccaaactttgctcaagaggangactgagcaatgcctcctttacaggtcagtttcttgtttctttgtcatggatggatgtatttacaggactgagcaatgcctcccatacacaatttagcaattttggaagctctcattcttctaattcagctcagcatcagtcagtctctgtgaatgagcagttggaagagaagtggtatgctagtccagaggaaatcaatgaaggtgtttgcataattttatctaatatatacacgtttggtgtgctgctttttgagttgctttgtcaatttgaatctgagagagcacatgctgctgcaatgttggatctatgccataggatttttccttcaacttttctatcagaaaatctcaaggaagctggatttgtcttagactacttcacccagaaccttctttgcgcccaacaaccaaggattatcctacaatcgagtacttaatagattccagaagatttgcagaaaaatgcgtatncattaaccggatgatctgaatcagaatattatgcattttcttgttatcaaagagaaaagctagcatgcttgaattatgagaantgctgcttgagcgattttagagtgtnaaaaggtgaccctntatgtntcttgattatgggataatattttattcaataacctaatttgttatttaggaaatataaaattttttttctcatanacatatattattatagaaatcggtggggct

SEQ ID NO: 15257 - DNA, 436 bp, Gossypium hirsutum
  Clone ID: LIB3048-027-Q1-L1-B3
gtttcctgtttctttgtcatggatggatgtatttacaggactgagcaatgcctcccatacacaatttagcaattttggaagctctcattcttctaattcagctcagcatcagtcagtctctgtgaatgagcagttggaagagaagtggtatgctagtccagaggaaatcaatgaaggtgtttgcacaattttatctaatatatacagtttgggtgtgctgttttttgagttgctttgtcaatttgaatctgagagagcacatgctgctgcaatgttggatctatgccataggatttttcctccaacttttctatcagaaaatctcaaggaagctggattttgtcttagactacttcacccagaaccttctttgcgcccaacaaccaggtactacaaattgttcatcggtgctaaatgtgaagctctagaatcttat

SEQ ID NO: 15258 - DNA, 580 bp, Gossypium hirsutum
  Clone ID: GOSHI-09MAY01-C5206_1
gcaggcttacaatgactcttaagaatcaagcgctacatggtggttgaaaagattgataggaagaaagagtgaggtggcgcttgattggccgtacccttttccacagggaaggttatttgttctcacactgagtgctgcattggagggttaccatgtcaatgttgatgggcgccatgttacctcatttccgtatcgaactgtaagtaatcctcttgttattggctcatcaattcattgaataacataaagtcttcaaatttctgatgacatttacagggatttgtgcttgaggatgctactgggttatctctaaagggtgagcttgaggttcactctgtatttgctgctgctttgcccactccacatccaagttttgctccacaaaagcatcttgagaggttgagttaatggaacgcgccaccacttcctgatgggaacgtagagctttttatcggcatcctttctgctggcaatcattttgcagagaggatggactgtgaggaagtcctgggtgcaacataagttaataaagtcttcaaaagtagttgctcgttttttcgtagcgctgaatggaagaaag

SEQ ID NO: 15259 - DNA, 491 bp, Gossypium hirsutum
  Clone ID: LIB3584-034-P1-K1-G4
gatgacaatggctcggaagaatcgaagactacatggtggttgaacagattgatagggaggaagaagaaggtgacactagattggcagtacgcttttgcggaggggaagttgtttgttctaacattaagggctggattggagggctatcatgtcaatgtcgatggccgacacatcacctcatttccatatcgaaccggatttgtgctcgaggatgctactgggttatctctaaagggtgaccttgatgtgcactctgtatttgctgcttccttgccaaattcacacccgagttttgatccacaaaagcatcttgagagattgagcaaatggaaggcgccaccacttcccaacggaaatgtagagctttttataggcatcctttctgctggcaatcattttgctgagaggatggctgccaggaagtcctggatgcaccataagttaatcaagtcttccaatggtggtgctcgcttttttgtagcactgagtgg

SEQ ID NO: 15260 - DNA, 550 bp, Gossypium hirsutum
  Clone ID: GOSHI-09MAY01-C5236_5
cagtaaaaagcagcatacagtgactcgagaaaagaaagagatcgaactgttagctcgcggtcgtcatgatccttgtgttgtccctcgagctgtgccgatggtggaagccatggtagcaatggttctggtggaccagttgatggcacaacatggacagtgtaacttgttcccgatcaaccccgaattacaggagcccttgagctttagtttccccaactttgagccggcaaatatttaaacttgaatggtggcaaagtcagtgttaggtctccattgttatttgtctcgtgggtttgaatgagaatgttgtgggctctataccccattgccgcttctcttttttattcgttatgtggttttcttgataatttagtattatagatttactactatctgatttattctccccttagcttgtaaaagtaatcaatgtttagatttttcgtttcctcggtgtttatgtttgatatatttgaacaaaaagtgtaagatgtgcttatgtttcaatattgtgttcttgatgacataaaggtagttaaattctagagtc

SEQ ID NO: 15261 - DNA, 809 bp, Gossypium hirsutum
  Clone ID: GOSHI-09MAY01-C5236_4
cgtccgcacatcctgaattgctaggaatagggctaaaataaaactgttcgaacgagaggagattctattggtggtgttgtcacatgcatagtgaggaatgctccacgtgggcttggttcaccagtttttgataagctttaatcaagcttgctaagctaaatgtggggggggtggggctttttttttttaacaattcaacttttctaactcataacataataccattctttacttataacataacaataaacggacgcaaagtccgctccggtgggatacagggtggaatatccaatggggaaattatcaacatgagagtagctttcaagccaacacctgctattagtaggaagcagcacacagtgactcgtgagaaaaaagagatagaactactagtccacggtcgtcatgatccttgtgttgcccctcgagcggtgcctgttgttgaggccatggtagccttggtgcttgtggaccaattaatggcacaatatgcacaatgtaacctttttcctatcaatgcggagttacaagaaccgttgagcttaggtttccccaacttcgaaccagcaatgatttgaatggttgcagaatgttctggttttaaggttttatcaaccctaagtcgaagggcttattagcatttctgttttgccctactttgttgtttgtgtgttttctttgtaactgttcggagcttttattgcttctcatgttccaacagtagagaataacagtttcagtgtagttgaaattattgagttgacatgtttttaataatatggcttatgatttaatcttcttgagtt

SEQ ID NO: 15262 - DNA, 1132 bp, Gossypium hirsutum
  Clone ID: GOSHI-09MAY01-C5236_3
ccaatccatgtttttgtaccaaatactgatcagaggggacatgattacaaggaaatgtcgatagcttataggccctctcatgctgatgccacttatgacatgaaatatggtgtcagagcagtgcagggtggtggtagatcttctgccagagaaaccattggaagagttgcctctggagctattgcaaagaaaatcctcaagcatttctcaggaactgaggttctcgcttacgtctcacaagttcaccaggttgtgcttccagacggttcagtttaccatgatactgtaactcttgatcagatagaaagtaatattgtaaggtgcccacatcctgaatatgctgagaaaatgattgctgctattgatgctgttcgaacgagaggagattctattggtggtgttgtcacatgcatagtgaggaatgctccacgtgggcttggttcaccagtttttgataagcttgaagcagagcttgctaaggctgtaatgtcattacctgcaaccaaaggatttgaatttggcagtggatttgcaggtacttttctaactggcagtgaacataatgacgagttctttactgatgaacatggaacaataaggactaaaacaaaccgctccggtgggatacagggtggaatatccaatggggaaattataaatatgagagttgctttcaagccaacggccactatcagtaaaaagcagcatacagtgactcgagaaaaggaagagatcgaactgttggctcgcggtcgtcatgatccttgtgttgtccctcgagctgtgccgatggtggaagccatggtagcaatggttctggcggaccattgatggcacaacatggacagtgtaacttgttcccgatcaaccccgaattacaggagcctttgagctttattttccccaactttgagccggcaaatatctaaacctgaatggtggcaaagtcactgttaggtctccattgttgagttttcataataccaagtgttttgaatgagaatgttgtggtctctataccccattgccgttcttttgtatttgttatgtggttttcttgataattacatgataatttagtattatatatttactactatctgatttattttaaaaaaaaaaaaaaaaaaaa

SEQ ID NO: 15263 - DNA, 987 bp, Gossypium hirsutum
  Clone ID: GOSHI-09MAY01-C5236_2
cccacgcgttcgcccacgcgtccgcccatgcgtccgctcatgctgatgccacttatgacatgaaatatggtgtgagggcagtgcacggtggtggcagatcatccgccagagaaaccattggaagagttgctctctggagctattgctaagaaaattctcaagctgttttcaggaactgaggttcttgcctatgtctctcaagttcaccaggttgttcttccagatggctcagttgaccatgacactgtaactcttgatcagatagagagcaatattgtgaggtgcccaaatcctgattatgctgagaaaatgatcgctgctattgatgctgtgcggacaagaggaaattctattggcggagttgtcacatgcatagtgaggaatgctccacgcgggcttggttcaccagtttttgataagcttgaagcagagcttgctaaggctgtaatgtcactacctgcaaccaaaggctttgaatttgggagtggatttgcaggtactttcttgaccggtagtgaacataatgatgagttctatactgatgaacatggaagaataaggacaagaacaaatcgctccggtgggatacagggtggaatatccaatggggaaattataaatatgagagtagctttcaagccaacagctacaattggtaagaaacagcacacggtgactcgagaaaaacaagagatagaactactagcccgtggtcgtcatgatccttgtgttgtccctcgagcggtgccgatggttgaagcgatggtagcgttggtgcttgtggaccaattaatggcacaatatgcacaatgtaaccttttccctatcaattcggagttacaagaaccgttgaacttggaaccggcaaatatatagacttgaatggttgcagaaccggcaacatcggcccttgctttcatcaactcgaattttcttaaatactccatttttcatgagaatgttgtggtttaatgtttttgtcaacac

SEQ ID NO: 15264 - DNA, 1219 bp, Gossypium hirsutum
  Clone ID: GOSHI-09MAY01-C5236_1
ttccaattctaccctattttttctatcagtcgcttttcttctcgacgcgtctttttgttttctaagttttcaaagctttcatggcttcttccattacatccaagcctttccttggagctactaaacccaattcttctctttctcctgatcttcaaagactttctttttcctctcttcgcatctcaatcaaaccaagaacccacaaaaagcttcagatacaagcagctgggagcacatttggaaattatttccgtgttacaacttttggagaatctcatggaggtggtgttggttgtatagttgatggatgtcctcctaggattcctctctcagaagctgatttgcaaggtgatcttgatcgaaggaggccaggtcagagccgaattactaccccaaggaaagagacagacacatgccgaatatattctggagtttccgaaggagtgactactggaacaccaatccatgtacttgtaccaaatactgatcagagaggacatgattacaaggaaatgtcaatagcttataggccatctcatgctgatgccacttatgacatgaaatatggtgtcagggcagtgcagggtggtggcagatcttccgccagagaaaccattggaagagttgcctccggagctattgctaagaaaatcctcaagctgttctcaggaactgaggttcttgcctatgtctctcaagttcaccaggttgttcttccagatggctcagttgaccatgacactgtaactcttgatcagatagagagcaatattgtgaggtgcccaaatcctgattatgctgagaaaatgatcgctgctattgatgctgtgcggacaaaaagaattctattggcggagttgtcacatgcatattgaggaatgctccacgcgggcttggttcaccagttttttgataacccttgaagcaagaacctggctaagggctgttattgttccttaccttgccacccaaagggcttggaattttggggattggatttgccggtacttttcttgaaacgggtagttgaaccttaataatgaaattcctattcgtgatagaacttgggaagaatttagggagccggaacaaatctcctcccgcgtgggaataccagggttggaataatcccctgggggaagtttaataaatatgaggaattacctttctcagcccacagcctacaatttgggtaggaaaaccaccgcacgggtgactt

SEQ ID NO: 15265 - DNA, 457 bp, Gossypium hirsutum
  Clone ID: uC-gsronu33B113b12b1
cgctggcacgcccgggtgtcgcggttccggaattcgacggatcgggtcaggcgttcggtcaggcgtcgcgtcacgcgtctgggcacgcgtccgtgcacgcgtacgaccgcgcgtgcggacacacgtacgagatcatccgtcagagaaaccattggaagagttgcctctggagctattgctaagaaaattctcaagctgttttcaggaactgaggttcttgcctatgtctctcaagttcaccaggttgttcttgcagatggctcagttgaccatgacactgtaactcttgatcagatagagagcaatattgtgaggtgcccaaatcctgattatgctgagaaaatgatcgctgctattgatgctgtgcggacaagaggaaattctattggcggagttgtcacatgcatagtgaggaatgctccacgcgggcttggttcaccagtttttgataagcttg

SEQ ID NO: 15266 - DNA, 394 bp, Gossypium hirsutum
  Clone ID: LIB3493-021-P1-M1-D12
cggacgcgtgggcaaatctgacatttttattacctcaatctcttcttcatctctttcaacctctactctgtttctggtttctaagctttcatggcttcttccattatatgcaagcctttccttagagctactaaacccaattcttctctttatcctgaccttcaaagacttcattttccctctcttcgcatctcaatcaaaccaagaacccacaaaaagcttcagatacaagcagctgggagcacatttggaaattatttccgtgttacaacatttggagaatctaatggaggtggtgttggttgtatagttgatggatgtcctcctaggattcctctctcagaagctgatttgcaaggtgatcttgaccgaaggaggccaggtcagagccgag

SEQ ID NO: 15267 - DNA, 338 bp, Gossypium hirsutum
  Clone ID: LIB3145-007-Q1-K1-H5
actaaacccaattcttctctttatcctgaccttcaaagacttcattttccctctcttcgggggtcaatcaaaccaagaacccacaaaaagcttcgattactacattgtagggacctaagtagttattaacttcaaatttgtatgttttttttgtcgtaatttgcaatattactactttctagggacttaagtagttattaacttcaaatttgtttttttttgttgttgttgtaatttgcaatattactctttttatctatattatttattaactgttttaatgaaaaaaaaaaaaaaaaaaaaaaaaaaaaaaaaaaaaaaaaaaaaaaaaataaaaa

SEQ ID NO: 15268 - DNA, 1663 bp, Gossypium hirsutum
  Clone ID: GOSHI-09MAY01-C5226_1
cgggtcgacccttgcgtccgctgattttttccaatccggtattgagggagagtgggggagcaggagcagaagtgcgagtcctaagaggaccatgagtaagagtatgagtattagtccatggaggactcatagccggagcccaagtcttagccgaagccgaagtgtgagcaggagcccagtagcattgttgaatcccggggggtttctagaaagaagtttaagcaggagtcctgctagaagcatcagaataagcccatcgaggacgagaaaagatagaagcatcagtaggagcccagttagaggacatcctcgaagaaccattggcaggagccctgtaaggtccctgttgcggtcccgaagaagcccaagtaggagcccacccaggtcaacatgaaaatcaactagtagaagcccggttagactttcaaaaagaagcacaagtggaagtcctgcaagatcttttcggagaagcattagcagaagccccagaaggtctaggagaagcactagcggaagtcctgtaagatcttctaggagaagcataagtaggagctctgctagggctcctcctaggagaagcatcagcagaagtcccttaagggaaccaagtaggaattatcggcgtagttattcaaggagccccaccaccgtgcggcgggtaaggtcacctcctggtcgaggtagaagcttgtcaacaagtgtttctcctgacgcatcacctaagcgtatcagaaggggtcggggtttcagtgagcgctactcttatgcacgaagatacagaaccccttctccagatcgttctcctgtgaggtcctatcgtttcagtggtaggattgatcgtgagaggtattcaagttacaggcggtattcacctaggcgctatagaagccccccaagaggaagaactcctccaaggtatagaggcagaagaagccggacaagaagtctgtctgtatcaccgagcccgaggtatagaaatcgtcgctatggtcatagccgcagtcgtagcccaagtcgtagtcgaacctctattcgcagccgtagcccaagtcgaagtcgaacccctgttcgcagccgtagtccagttgattctccaagggctggacggcgaaggtccccttcacagagcaggagccgatcagaatcaaggtcttcgttgaactctcagtctccaaagaaggtgagcaaagcgaagtcaaggtcatcatcaggaagtccagacggtggaaggggactggtctcttatgatgatggttcacctgattcaggaaggtgaaatagagtgaaagttggttgaagatttttgtttagtgtttgatgagccccatcttctgttgatgcactgaactgtgcagttttacgaacttcttgtctctgatttgtggtgctgccagaggttgtggtcagtaattacattaatccgattctaagtattttcatttaaatggttgttgttgtagaaggccggggaggggatttaggataattttacttcgttataaataaaaataatgaataatgtgaggcaatgttgctgttaggggttaggaagagtctctgtatttgttagtgcagtagcatcatccccaagaatcttgtgtagctttatcgagtctgttgttatttgtagcttttaattaatgtgttggacaaattttccttc

SEQ ID NO: 15269 - DNA, 398 bp, Gossypium hirsutum
  Clone ID: LIB3584-036-P1-K1-A4
gccctgtaaggtccctgttgcggtcccgaagaagcccaactaggagtccactcaagtcaacaagaaaatgagatgggtagaagcccggttagactttcaaaaagaagcacaagtagaagtcctgcaagatctcggagaagcattagcggaagtcctgtaagatcttctaggagaagcataagtaggagctctgctagggctcctcctaggagaagcatcagcagaagttcattaagggaaccaattaagaattatcgtcgtagttattcaaggagccccactgctgtacgacgggtaaggtcacctactgatcgaggtagaaatatgtcaagaagtgtttctcctgatgaatcagctaagcgtatcagaaggggtcggtgttttcagtgagccgctac

SEQ ID NO: 15270 - DNA, 367 bp, Gossypium hirsutum
  Clone ID: LIB3147-027-Q1-K1-C1
aaggtgaccaaagcaaagtcaaggtcatcttcaggaagtccaaacgggggaaaaggactggtctcttatgatgatggttcacctgattcaggaaggtgaaatcgagtggaaagttggttgaagatttttgcttagtgtttgatgacccccatcttctgttgatgcactgaactgtgcagttttacgaacttcttgtctctgatttgtgttgttgccagaggtttgtggttagtaattacattaatccgattccaagtatttttctttgagatggttgtttgttgttggttggccctgtcatgcctcggtttaggataaatttttactttcggttataaaattaaaaattaaatgaaatttagtatgc

SEQ ID NO: 15271 - DNA, 931 bp, Gossypium hirsutum
  Clone ID: GOSHI-09MAY01-C6996_2
cgccgtccggaaaagtttgggtaatcaaataggagcgaaggtgaaagagcactgatacaactgttctgaattgaattcagctgaaatgaacacaatggctagctcgaagaaactgatttccagggaagagtgggagaagaagttgaataatgttaaaatcagagaaagaagatatgaataaattggtgatgaattttcttgttaccgagggttatgttgaagctgctgagaaattccgaatggaatctggaactcacccagatatcgatcttgcaacaatcacggatcgcatggctgttaaaaaggctgtgcaatgtggaaatgtcgaggatgccatcgagaaaattaacgatctaaatcccgagatattggatacaaacccgcaactctttttccatctccaacagcagagattgatagaattgattcggaatggaaaagtagaggaagccttggagtttgctcaggaagagcttgcaccgaggggagaagagaaccaaacctttctagaagaattagagaggaccgtttcgctcctggcgtttgaagatgtttcaaactgcccgcttggagagcttttggacatatcacaacgcattaagacagcaagcgaagtgaatgcagccattcttactagccagtctcatgaaaaagacccgaagcttccaagcttactaaagatgctgatatgggctcagaatcaactcgatgagaaagctgcttatcctcgcataaacaatttgtcaaatgccacgctcgaagatcccacggtttgaaacaaaggttcgaaaaacactatggatgaatctgtagttgctttgaaattgaaacatagatagaactgaatggaatccagttaggaatttggtggatgcattgctattttgctatgacgtatttgacgtatttgatgtcttatcttcatttttag

SEQ ID NO: 15272 - DNA, 1161 bp, Gossypium hirsutum
  Clone ID: GOSHI-09MAY01-C6996_1
cccagcgtcccccccgcgtccgatcgcaacgagaacagatttggaaacccaagaaaaagaaaacctttttttattagtatttttcaatttcatataagtatatacaatcattgcaatttcaatcattttctcaatccatctttctcaaagggatagctgagcaatttgggaataaaatgggagtgaaggtggagcactgatgtcactgttctggtttgtgattcgtcaactagctgaaattgaagaacaaatggctacctcgaagaaagtgattacacgggaagagtgggaaaagcgattaaacgatgttaaaataaggaaagaagacatgaataaattggtgatgaattttctcgtcactgagggttatgttgaagctgctgaaaaattccaaatggaatcgggaactgagccagatattgatcttgcaacaatcacggatcgcatggctgttaaaaaggctgtacaaagtggaaatgttgaggatgcgatcgagaaagttaacgatttaaatcccgagatattggatacgaatccgcaactctttttccatctccaacaacagagattgatagaattgattaggaacgggaaaaatagaagaagccttggagtttgctcaagaggagctcgcacctaggggagaagaaaatcaaagctttttagaggagttggagagaactgtatcgctcttggcttttgaagatgtttcaaactgcccagtcggagaacttctggacatatcacagcgacttaagacagcaagtgaggtgaacgctgccattcttactagccagagtcatgaaaaagaccccaagcttccaagcttgctaaagatgctgatatgggctcaaaatcaactcgatgagaaagctgcttatcctcgaataaacgatttgtcgaatgccactcttgaagatcctacggtttgaaaggcttgcaagtcattttcagggaatcaagttgccttgaacgatcctctagatcgtgacgaacgaagtggttttatgcttgtaacctcttcataatgactagctaggaatttgttggatttcatttgctaagatgtgattgatgttttattttcagcctttgattgatgtttactttgttcttaggtgaaaatccagtccccttaagccattgtacaatttgctgttc

SEQ ID NO: 15273 - DNA, 545 bp, Gossypium hirsutum
  Clone ID: LIB3828-006-Q1-N6-E5
gtgaagggataaatcataaatgcgtgattacgaattgtacaatggcacaagggcactgagttcaactaagaacaaagtgaaaacaccaaccacaggcaactaaattcttctacaacggaaataaacaccaaccgcatcttaacaaatgacatccaacaaattccctgttaaagtcagtgtgtagagtttacaagcataatagctgcatttggttcggttctatctctgatgaatccgaggccactcgcttcctcagcaataacttgcaattctttcaaaaagtggggtcttcaagtctggcatttgataaatcatttatgcagggataagcagctttcttatcaagttgattctgcgcccatatcagcatctttagcaagctgggaagctttgggtctttttcatgactttggctagtaagtacggcagcattcacctcggtcgctgtcttaaggcgctgtgatatgtccaaaagctctccaactgggcagtttgaagtatcttcaaataccaggagtgaaatggtcctctccaactcttctaaa

SEQ ID NO: 15274 - DNA, 452 bp, Gossypium hirsutum
  Clone ID: LIB3148-021-Q1-K1-F5
cccacgcgtccgcccacgcgtccggaaaaaatataagaagccttggagtttgctcaagaggagctagcacctaggggagaagaaaatcaaagctttttagaagagttggagaggaccgtttcactcttggttttcaaagacgtttcgaactgtcccgtaagagagcttttggatatttcacagcgccttaagacagcaaacgaggtcaatgcagccattcttactagccagagtcatgaaaaagacccaaagcttcatagcttgctaaagatgctgatatgggcacaaaatcaactagacgaaaaagctacttatcctcggataaaagattttttgaaagccacacttgaaaatcccgctgtttgaaaggttagcaaaatcattataacctcttcattgtgattatagctccaaatttattggatgtcattgattaagacatggtttctttt

SEQ ID NO: 15275 - DNA, 512 bp, Gossypium hirsutum
  unsure (1)..(512): unsure at all n locations
  Clone ID: LIB3493-049-P1-M1-E12
gcggcaagaattcttttgaaacccaaatactaataaacccaaatctttttatcgtttattaattaatattctaagttagctacgccttgcaatttcagttatttctaaatctatctctctaaggtttgggaaatcaaatgggagtgaaggtagagcactgatgtcactgttttggattgtaattcgtcgattagctgaaattgaagaaagaatggcaacgtcaaagaaagtgattacaagggaagagtgggaaaagagattgaatgatgttaaaatcaggaaagaagacatgaataaattggtgatgaattttcttgtcacggaggggtatgttgaagctgcttgaaaaattcagatggaatctggaaccaaccagacattgatcttgcaacaatctcggatcgcatggctgntaaaaaggctgtacaatgtggaaatgttgaggatgctattgagaaagttaacgatctaaatcctgagatattggatacaaacccacaactcttttttca

SEQ ID NO: 15276 - DNA, 395 bp, Gossypium hirsutum
  Clone ID: LIB3165-008-P1-K1-F6
taaatctatctctctaaggtatcttttttttgctaatttctgcaaaattaagggtattttttgttggctaattgttcggtggattcgggagattaaaaagttgaaatctttttaatgtaaaattctgggtttttattttttatatttgagaaggtttgggaaatcaaatgggagtgaaggtagagcactgatgtcactgttttggattgtaattcgtcgattagctgaaattgaagaaagaatggcaacctcaaagaaagtgattacaagggaagagtgggaaaagagattgaatgatgttaaaatcaggaaagaagacatgaataaattggtgatgaattttcttgtcacggagggttatgtcgaagctgctgaaaaattccagatggaatctg

SEQ ID NO: 15277 - DNA, 438 bp, Gossypium hirsutum
  Clone ID: uC-gsflmaxxa091c11b1
ccctctcgttcgcccacgcgtccgcgagaacggctgtggtaaactttagaaaaagatttccttttttattactatttttcaatttcatataagtatatacaatcattgcaatttcaatcattttctcaatccgtctttctcaaagggatagttgagcaatttgggaataaaatgggagtgaaggtggagcactgatgtcactgttctggattgggattcgtcaactagctgaaattgaagaacaaatggctacctcgaagaaagtgattacccgggaagagtgggaaaagagattaaacgatgttaaaataaggaaagaagacatgaataaattggtgatgaattttcttgtcaccgaaggttatgttgaagttgcttaataattccaaatggaatctggaactgagccatttattgaaccttggacaattacggatc

SEQ ID NO: 15278 - DNA, 299 bp, Gossypium hirsutum
  Clone ID: LIB3135-044-Q1-K1-C6
caattctttcaaaaagtggggtcttcaagtctggcatttgataaatcatttatgcggggagaagcagctttcttatcaagttgattctgcgcccatatcagcatctttagcaagctgggaagctttgggtctgtcatccagcaagcatatttaagccaaaacttactatttcttgaagattggagaaataatctcaagttttaaatcaaactgcccaatgtacgtataaacttaaataagtaaaaaagctagaatttgacaaaaaaaaaaaaaaaaaaaaaaaaaaaaaaaacaaacat

SEQ ID NO: 15279 - DNA, 1592 bp, Gossypium hirsutum
  Clone ID: GOSHI-09MAY01-C6956_1
cggacgcgtgggcaacaccacactctatccttttgctccttttgggtatcatggcaacttcctccacttccctagtgctcaaggttcaccgacatgaacctgaactaatagctccagctaagcctacccctcatgaatacaaactattatccgacatcgatgatcaagaaggtcttcggttccaaattccggttatccaattttacaaatacaatccttccatgcaaggaaaagaccctgttagggtgatcagggaggcacttgcacaagcgttagtgttttattacccatttgccggtaggctaagggaaggacctcagcgcaagctgatggtggattgcacgggtgaaggtctaatgtttatcgaagcggatgcggatgttacgctcgagcaattcggtgatgtacttcaaccaccattcccatgcttggaggagctcctttatgatgttccgggttctactggggtgttgaattgccccgtaatacttattcaggtaacgcggcttagatgcggtggttttatcttcgcccttcgcctgaaccacaccatgagtgatgctgctggcctagctcaattcatgtctgctgtaggagaaatggctcgtggtaggcttaccccatccattccacccgtatgggaaaggcatctgttgggggctagagatccaccgagagtcacatgtaagcattgtgagtacgaagaagtagagggaaccattgtcccctacgacgacatggtccatcggtcctttttctttggccccacggaagtctcagcacttcgcaaacttgtgccaaaacaccttcgtaagtgttcaacatttgagctattgactgcttgtttatggcgttgtcgaaccatcgcaattcaagctaatcccgaggaagaggtacgtattatatgcatcgtaaacgcacgttccaggtttaatcctccattaccttcggggtactatgggaatgcattcgcgttcccagtggcagtagcacaagcagggaaactttgtcaaaacccattagggtattcattagagctagtgaaacaagcaaagaatgatgtaacagaagaatacatgaaatcattagcagatttaatggtgattaagggtcgaccacatttcacggttattcgatcttacctggtgtcggatgtgacacgtgcccggtttggcgatgcggatttcgggtggggcaaggcagtttatggtggtccagctaaaggtggagtaggggcaatacctggagtagcaagttttttaataccagtcaagaacaagaaaggagaggctggagttgtgctaccaattacgttgccagcccgagctatggaaatatttgtgaaagaattagatggcatgttaaagggaaagccaatagaacgtaaacccggtttcatttcgtcttccttgtaaaagtaataagtgaaaatctaaagttcagcattggtaaggtagtttataagtcatctctaggcgtgggactccttttatatgttcactatattatagaactatatacatttggtatgcatggtgtgtaaaatatttcatacttgtatttttacattttagtggaagaatcttttcgat

SEQ ID NO: 15280 - DNA, 217 bp, Gossypium hirsutum
  Clone ID: LIB3146-019-Q1-K1-E10
ccctaatggttagtgttggacggcattttatttggaaataataaaataatatgaaatggatggttaagcagtttatggtgctccagctaaaggtggagtaggggcaatacctggagtagcaagttttttaataccattcaataacaagaatggagaggctggaattgtgctaccaattacgttgccagccgaatctatggaaatatttgtgaaagaa

SEQ ID NO: 15281 - DNA, 568 bp, Gossypium hirsutum
  Clone ID: GOSHI-09MAY01-C6946_1
caggaactgcggggatattttctgtgacaagtgtacccatgctagaattgctcgagacgtgctgatgagaatgctccacaagttagggtttgcgaccgatgcatggctgaaggcactcagaggctgaataatgctaagcaaataccaagtaaacctactgtattgcagagccacgaggatcttgctaggaagcttcaggaagagatggggagaagtcgcagagcatcatcaggctccatgtctgatggctctggtaggcggatgaaggaagttgcctgtcctacatgcacagttcatttgcaggttcaagttccaagctcaggttctgagaccattgaatgtggggtgtgccagcatccttttctcgttagtgcccattgatcaatgcgcttttgtcaccagtgaattgctctttttctctattaatttcttgttgaggtcgtgtttataataaactaatacggatgagctctctattatctcttttgtcatctcttcaagttattgtgaatatggaacttatctcttgatctttaatcaagtcttttgtgtttgatttatgtaacat

SEQ ID NO: 15282 - DNA, 814 bp, Gossypium hirsutum
  Clone ID: GOSHI-09MAY01-C6546_1
cccacgcgtccgagggtaagcagaaggggaaagctgtttgtaaaagggaatttgccacttagaacaagtgaggcatccctgggtgataaagttgacttgaaatgtgaatttcttgaagtacgggcaaagaacattctgagtgggcaggttgacactcagttgcagattactggttcaatactgcagccaaacatctcagggaatattaaattgagccatggagaggcatatttgccccatgataagggtagtggacctgcaccttttaataggttgacatcaaaccagtccaggcttccaggtgctggaatcaaccaagcagttgcttccagatatgtctcacggtttttcggttctgaacctgctttttcaagaaccaaactccccctactctctgccaaatcagctgatgtagagaaggagatggaacaagtaaacattaaaccaagtcttgatgtccgccttagtgatttgaagcttgttttaggaccagaactgaggatagtttatcctttgattctaaactttgctgttagtggggaactcgagttgaatggccaagctcatcccaaatggattaaacccaagggcattttaacatttgagaatggtgatgtgaatcttgctgcaactcaagtgaggcttaagccggaacatctaaacctagcaaaatttgaacctgagtatggtttcgatccaatgctggacttagctttgggtggatcagaatggcaattccggattcaaagtcgagccagcaattggcaggacaagttgttggtgacctcaacacgttcagtggagcaggatgttc

SEQ ID NO: 15283 - DNA, 774 bp, Gossypium hirsutum
  Clone ID: GOSHI-09MAY01-C6576_1
gtccactgcttctgaagctgttaatggtcattcattggttcacgggcataccatcatcatggaattgatatggatcaccctattctacattgaatatgaccattatagcaatatgtattaaagaagggctttattggataacaaaaagagctggggaaaggcaaggtagtgcactgatgatggcaaatgcatggcatcaccgtgcagatgcgatttcatcggtagttgcacttattggggttggaggctctattcttggagtaaagtttttaaatcctcttgctggactggttgtctcaggaatgattctgaaagctgggctggaaactggataccaaagcgtccttgaactcgttgatgctgccttacctacagaacaattggagcccataaatcaaacaattctacaagttaaaggagtcaagggatgccatcgaatgagaggaaggagagctggttctaatctgtaccttgatgtacatattgtggttgatcccttttctagtgttagtactgcacatggcattggcgagaatgttcgtcaccaaattcataaatcccaccctgaagtaaccgaagttttcatacacattgatcctgcctatgtagagttctcccctgatttaatggaccaaaatgaaggtttgaagacaatcactgaacagaatagtaacatgtctgtcggtgaagagaatgtccaagcaattgtttctcatcttctctcatcaaagttttcaaagaaatttaaggtcgagcgcatcacccaacacacct

SEQ ID NO: 15284 - DNA, 869 bp, Gossypium hirsutum
  Clone ID: GOSHI-09MAY01-C6476_1
atttccaccacttattctctatggccaattctttgatcccatcatcttcacaaaaccgagcgttgtaagcacaaacaagcaaattcactagccacccatctccctattctcaatggcaatggcaacccaagcctccctcttcactccatcaaccctctgcaccccaaaatccggcgaccgcatcgccgccgtgttacggaaacaaccaccgttcctaaccgtccctagcttcaagtccccaaaaagcatcatcgccccacgcaccatcaaagcccaagcaaccgaagagaaagccgagacaaccgccacaaaggaagcaccagtcggtttcaccccaccagagctggacccaaacaccccatcaccgatcttcggcggcagcaccggcgggcttttacgcaaagcacaattggaagagttttacgtcatcacatgggagtcacccaaggaacaaatcttcgagatgccaacaggtggtgcagccatcatgagacaaggtccgaacctgctgaaattggctcgtaaagagcagtgcttggctcttgggactaggcttaggtctaagtacaagatcaagtatcagttttatagggtgttccctaatggtgaggttcaatatttgcaccctaaagatggggtgtaccctgagaaggtgaaccctggtcgacaaggtgtggggcagaactttaggagcattgggaagaatgttagccctatcgaggttaagttcactggcaaacaagtctatgatctgtaataaatttatgttcatgttttgacatgttttattttaatggtgattgttgcaatctaaatacactttttcaaatagttgcatgattttgcatgtttcttgcttgatgcagaat

SEQ ID NO: 15285 - DNA, 271 bp, Gossypium hirsutum
  Clone ID: LIB3165-056-P1-K1-H1
tcgtccacgcgtacgccatctccctattctcattggcaatggcaacccaagcctgcctgttgactccatcaaccctctgcaccccaaaatccggcgaccgcatcggcggcgtgttacggaaacaaccaccggtcctaaccggccctagctttaagtgcccaaaaagcatcatctgcccacgcaccatcaatagccaaggaactcggagagaaaggccggggacatacccgccacaaaagggaaggcacccaggttcgggtttttaacctcc

SEQ ID NO: 15286 - DNA, 481 bp, Gossypium hirsutum
  Clone ID: GOSHI-09MAY01-C6466_2
cccacgcgtccgcgtttgtttgaaatgattgataaacaagtttcaggggaatcgccaattaccagaagagagatccaaccaacagggaccaataagcacccacaatcatgaaaccaaagtgatcccaccccgcatagaacccttgttaatggatcacatgaaactcatcgaaaagaccagaaatcttaaaattctgaagtgggcagctgctcatgtgtgtcgggggcgatgaagaagacttcatagacgatggctgcaatggcagagccgacaaagggaccgagccagtagacccagtggttgtcccatgtccagctgacaacggctggtccaaaggagactgcagggttcatggaagctccatcaaaggcaccaccagccaagatgttggcacccacaatgaaaccgattgcaatgggtgcaatgatcccaatgttacccttctttgggtcaacagcggacgcgtgggcggacgcgtggg

SEQ ID NO: 15287 - DNA, 1040 bp, Gossypium hirsutum
  Clone ID: GOSHI-09MAY01-C6466_1
aagaaaaaccaagttcacaggaaccagcacttgccaatagagagatccaagcctgggataaacacccacaacaatgaaaaccaaagtgatccacccggctttcaaacccttgtttaagtacatggaagaaggccataaatcttaatattcagtagtgggaagctgttcgtgcgtgtctgggccgatgaagaagacctcatagacaatagctgcaatggcagcgccgacgaatggaccgagccaatagacccagtggttgtcccacgtccagctgaccacggctggtccgaaggagactgcagggttcatggatgcgccatcaaaggcaccaccagccaagatgttggcacccacaatgaaaccaattgcaatgggtgcaatgatcccaatgttacccttcttcgggtcaacagctgtggcgtatacagtgtaaaccaaaccgaaggtcatcacgatctcgaaaaccactgcgttccatgctcccacaccagatgacaagccaaatgctgatgttgtcagtccaccagttgaaaacttgaggagcaagcaagcgacaacggatccgagcaactgagcaatccaatacaaaatacttcggaccaaggtaatgtggccaccaacaaaggcaccgaaggtgacggcagggtttacgtgcccacccgagatgttagcaccgacagaaacggccacaaacagagcgaaagcatgggccaccgatgcagctacaagaccagccggtgttgtagagccattgtcagtgagcttgttaaaagccatgcccgagccttcaccagcaaaaacaaaaatgagcattgaaataaactcagctaaagctgctttgagggcatcagcttggccagcctcagctgcagatcctactgcaatgcgagaaatcggcattttttaattgttttgccaatcgcatgagcggtcgcgagggtggacctccacccgaaaagtgaaaatctagctggacttagagcttcaaacctaaaaaagaaaataaaagccaattcgtcgatacccttcggacgcgtgga

SEQ ID NO: 15288 - DNA, 685 bp, Gossypium hirsutum
  Clone ID: GOSHI-09MAY01-C6416_1
atcgattccactgctgattctctctcttatattttgaattttcttgataagttcccttcgaagcaaagccaaattaacagatcttatcgattttacttctccttcgcctctacttttttgcttacagtatgccagaagacacagagtaccgctgttttattggtaacctttcatggtcaacatctgataggggcctaaaagatgcatttgaaaagtttggaaatcttcttgaggctaaggtagctactgacaagttttctggccgttctcgtggatttggatttgtcacttttgatgagaaagcagcaatggaagaagctattgaagcaatgaatggaatggatttggacgggcggaatataactgttgatagagctaaacctcaacaagggtcagggagagattatgatggtgaccgtagccgtgatcgtggacgtgatcgtgaccacgatcgtagccggggctatgatggcagtcgtggatctaatggtggggagtgttttaagtgtgggaaacctggacactttgctagggagtgtcctagtgatggggctagggggggcaagtatggtggtaggggggatcgctatggcggtggtagcgttggtcgccgttatggtcctgaccgatttggagaccggtttggtgggcgcaatatatatgcaggtattcgatgggtgtctgt

SEQ ID NO: 15289 - DNA, 568 bp, Gossypium hirsutum
  Clone ID: GOSHI-09MAY01-C6406_1
gaaaagcagaggaaacaagaaatggaaaaaacagcagctctgaatgcttctgttacttcatattctttgtcttttaacaagattttaactcctaaaaattccatggcagcagttagttttttggcttctttttcaccaagaattcactccttatcttcaccttttccttcacctgccatcaaaccaaagcgacccacaaacacttttcaagtgagatcagtggctgctccaacagaagatgttgcagggtttgatgacatggtttccgggacgcaacgtaagtactacatgctaggcggcaagggaggtgtaggaaagacatgttgcgctgcttcattagccgtaaaattcgcaaataatggacatcacactcttgttgtctcaaccgatccagctcattcgttgtctgattctttcgcgcaggatttgactggaggaatgctagtaccagttgaaggacccgactttcccttgtttgctcttgaaataaacccggagaaggctagggaagaatttagggatgcagctaagaacaatggtggaactggggtcaaagatttatggatgg

SEQ ID NO: 15290 - DNA, 397 bp, Gossypium hirsutum
  Clone ID: GOSHI-09MAY01-C6436_1
aaattattcttttaaacgaaggtattcgtgcttgtatggcggctcaaggtccgcccccgcgtacccttatattccctgaggaggttctaccccggggaaacgctctttaatggaactttagctttagccggtcgtgaccaacaaaccaccggattcgcttggggggcccgggaatgccccggcttatcaatttatcccggtaaactattggggggctcatgtagcccatgccggattaatcgtattctgggccggagcaatgaacctatttgaagtggctcattttgtcccagaaaaacccatgtacgaacaaggattaattttacttccccacctaagctactctagggctgggggggtggtcctggcggagaaattatagacaccttttcatact

SEQ ID NO: 15291 - DNA, 635 bp, Gossypium hirsutum
  Clone ID: GOSHI-09MAY01-C6676_1
caacaatgaaacaccattgttttctcctctaaatcttctccccactatctctcttcttttactttatttctctctttttctcatttcttttgtgtataattgttactcgctgaattatatatacaaatatatatataattgaaaacatttcattcgttaatttatatagctagccatgagatcgtttttaaagtttgtttcacgttgcgttaaaaaccctgaagtgtccacgacagaagagatggtggtgacggctcctgggagggaggaaacaaggtcttttatggctcctaaaatggtggcactgaagaagaagaagaagagggtaaaggtggggacgccattctctacgactcctgagtggaaaccttcgttgtatgtaatctcggaggataacgttttggcggagaagagagagaaaacaacgccggaagcttcaacaacgccggctgatagagcggtgaagaggaagagtggagcagggtcacgctccaaagttcacgttcgaagctacagcgacgacatcgggcgaaatcaagaaccagtggtcatcccaacattttctccgactccttttatgttttgataaccttttatttccatgtatcaaatttgtgttaaattagtaatatata

SEQ ID NO: 15292 - DNA, 754 bp, Gossypium hirsutum
  Clone ID: GOSHI-09MAY01-C6196_1
cagaaaaaaaaaatggacaagctctcttgttatcttctcttgctattgtcgttcttttgttttcgtttggatctttcatggagtctagaaactaggtttaaccgagctcccaataatcagggttcttcagacctggctaaccttgtgtaccacatgggtccagtcctttcatcgcctatcaagctgtacataatctggtatggtaactggaattcaacccaccaagctactattagggatttcttaaattccttttcttctccagctctttctccttctgttgctgattggtggaaaactgtgaggctctacaccgaccagacaggatccaacatcaccgatagcctttccctttcgggggaattctttgattcaagactttccaatggtgttcgtctaaatcgtttatcaatgcaacacatcatcaaaaacgcagtcacttccaagccaagcccactgcctctcgatcctcgcagtggtctctatttggtgctgacttcatctgatgtccaggttgatgaattctgcagggcagtttgcggctttcattacttctccttcccatccattgttggtgccacggttccttatgcctggattggttacagtgggactcagtgtccaggcgtgtgtgcctatccatttgcccggcctttgggggcgccaccggcgagtgcgatgggaggaacgacatcatgcgcccaccgaatggagatgcccgagtcgaccggatgaatagtgttataagctcacg

SEQ ID NO: 15293 - DNA, 395 bp, Gossypium hirsutum
  Clone ID: LIB3585-048-Q6-K1-E1
gcgtccgttttactcggatcttgaaattcagtgttcacagtcaccatatcgaataacttgaaccaaggaccagcatgaaatgcttttctatctctaaactcaccaccaaatctttgtctttgaagcttcccctatccttattccccaaccaccccgcatcatcggcgcatgccactgctaccccatcttcaaactctactccatcactcactactgcttgccaaggctccaaacgccactccatcatcaacacaacctgaatctgtactgcaatattaaaacacctaaaaatctcctacagatattatcatgccacgcaaactttgtaaaatactagcgatccaacttcaaatcaaataattcttaccttgcttccctaacaaccacttcattcc

SEQ ID NO: 15294 - DNA, 402 bp, Gossypium hirsutum
  Clone ID: LIB3149-028-Q1-K1-E11
agtcaccaaggcgaaaaacttgaaccaaggaccagcatgaaatgcttttctatctctaaactcaccaccaaatctttgtctttgaagtttccgctatccttattccccaactaccccgcatcatcggcggttgccgctgctgcccgatttccaagcctttctcctcgttcaatccggttctctatttgcagtgacgcctcgaggtcgtcgaggggaggtgtttctttatctagtcgtgatcggaacttgttcaccatggctggtgctgatgagtttgtcaaaggaaatgttcacccgaacggcgttgctgtcatcactctagatcgtcccaaagctctcaatgccatgaatttagatatggatatcaagtacaagcaaattcttgatgaatgggaatcggat

SEQ ID NO: 15295 - DNA, 532 bp, Gossypium hirsutum
  Clone ID: GOSHI-09MAY01-C6106_2
tccacgcgttcgtgcaaacggtggcctggttttgttgcttaaaaatggagtccacagagttgtaacccacgcgcccggtggttttcattttgcctttggcttttatttttctggactttttttgtaaagaggggggctttggtttcttatttttgaagcttaaaacagcagcagtttctgggggtaaaagttttaatctttccagctctgttaaaaaaatttttcttcttcatgtaatgttatattattattattattattattattatttgttcttctattgtttacagttacaacaataataccaatcccaagaagcagcaagtgaaggtataaggttttaataatggcagattgtgattctactcttcaatctcccacgggtggggtgcaaaagaagcccacttcattccctaaattgcttactggttttactttacaagcgttttccgataatactgagtctattatgagtccaaaatctatacttgatagcaagccctgttcagctttgaaaaaccctttttggtct

SEQ ID NO: 15296 - DNA, 947 bp, Gossypium hirsutum
  Clone ID: GOSHI-09MAY01-C6106_1
ttgtattttccacttcactccccactatacacaccatcagtatttgcagatgatcaaagcatgcagaggaagaagaagaagcagaagaacacgaagtagtttgcattattcatttctcatctaaaactttaatcagattttgattaacatagaaaaaaaaaaaaaaaaaaactgttcaccaccccacaacatttcataattcacttagtcttctttagttttcttagttgggcttttctttctaaatgggttttctttgccattttggggttttatgttaaaggtctttttcttttctttttttcccctttccctggttttgttgcttaaaaatggagtccacagagttgtaacatagggacaaagtggttttcattttgcctttggcttttatttttctggactttttttgtaaagatggttgctttggtttctggttgctttgggttcttatttttgaagcttaaaacagcagcagtttctggggttacaacaataataccaatcccaagaagcagcaagtgaaggtataaggttttaataatggcagattgtgattctactcttcaatctcccacggataaggtgcaaaagaagcccacttcattccctaaattgcttactggttttactttaaaagcgttttctgataatactgagtctattatgagtccaaaatctatacttgatagcaagccctgttcagctttgaaaaaccctttttggtctgaatcaagtactcctaaaaccccagaacctgaagccaaacacaagcttgattccaaagggattggtcttgccattgttgattctttcaaagatgattactttgatcccaacttaccaaaacctgtcctttttggttcacaacttaggatccaaatcccatctttgcctcatgttttttcaccagcagaatctccaagaacaccacctgagtttagtac

SEQ ID NO: 15297 - DNA, 806 bp, Gossypium hirsutum
  Clone ID: GOSHI-09MAY01-C6136_1
cttccctgattctctcttcaaacccttgaagaccaaataacatagtgggttcagtcctttcagttttaatccaaaattcaatgtcctcaatcctgaaaatgccactctcaatcccagttccatctcaagccctttccttctcaaaatctcttgtttccccaattccccttttcctttacactaaactttcaaccctctccctccacaactcagccccaccacccaacaccataatccgcatggggggtggccccagaacttacccaggtggagtctcgaaatggcaatggaaacgcatgcaagccaagaaagccaagcagctactcaaaactcgacttgcccgtgaacgtcacatctatgaaatgcgcaaaagggccgagctcaaagcccccgtatctgaacttgaacgcccttgggaagtcgttgaaaaagcacccaacttgttctccgtttcagctgatgaccaagttaaagttttggctgacagattccagaagcctggcggtttcgatatgtggagcgacagagatggacctcagctgtttgatgctgttgatgagttgccttccgccaggtttttccctaaaggggttgttcatagtgttaaaccgtatctgagaagcagagagagtagtgaaaacactaagcttttgacttgaaacaaggggagaggagagtgagagtgaagtggctattgtttcagatccaaatggtaaaaagaccggtgtcaaatgaagaaggaaaggatttagaagaagatttggtgctggtgctgctgggaaggctaattctgaagccaagataag

SEQ ID NO: 15298 - DNA, 1246 bp, Gossypium hirsutum
  Clone ID: GOSHI-09MAY01-C6056_1
cccacgcgtccgcccacgcgtccggtacatcttcgctttgagattagatccaaaattcccctttcatcttatttccgattccccaatttttcctgaaaccctaatcctaatcccggattcctctcgtctacatcgtctagcaaatggcaaccgaggagccggcagtcgtggcagaccccgcaccggagacggaggaggacaagactgctgagaccaaagctacttcaaaatctggcagagcaaagaaaaccaaagaacccaaaaccaagaaagctgcagctcctcggaaaccacgggctgctcctactcatccaccttacgaagagatgatcaaagatgcgatcgttactttgaaagagaggacaggttcaagtcagtacgccattgctaagttcattgaagagaaacagaagaatcttcctgggaatttcaagaagcttcttcttgtccatttgaagaagcttgtggctgctgggaagttggtcaaagttaaggcttcgtataaacttccttcggctaggtcttcgaagacggctactgctgcttctgctcctgcaaaaaagaaaccggctactactaagtcgaagtctaagcctgcctcaaagcctaaggaagggaagagtacaaaaactactcctaaagcgaaggccaagacaaaaactacttcgaaggctaagagtaagccggcggctaagccaaagcctacttctaaggcgaaggctgctccagccaagactaaggcagtggcttctgtgaagccgaagactactgcagctacaaagtcaaaagctgcagccaagcctaaggacaagccggttaaggcttcgaggacttcaactaggacgtctcccggaaagagggctgctgctcccaagcctgctgcgaagaaggctcctgcggctaaaaaagctcctgcgaagagtgtaaagccgaagagtgtcaagtcaccggcgaagaaagccccgtcgaggaggggaaagaaatgagagaagagagggtggtcaacataggggtagttttgtaaattcgagtgaagcttagtggctgtatttgggtccatacccaggaaaatatgacatcggatcttatctgttcttgaacttttcttcgaggggttgttttttttttgttgttgttgattgacgctaaatttctaaattccttagtttttaaagcagattttagatgtaatttttcagttgaatggattatgagatgaaatcagagctccctgatattttatcaa

SEQ ID NO: 15299 - DNA, 455 bp, Gossypium hirsutum
  unsure (1)..(455): unsure at all n locations
  Clone ID: LIB3583-060-P1-K1-H2
gcgcggacgcgtgggcggccgcgtggggcctgcctcatngcctttggttggggggagtcctnnngcttctcctgaagcgaatgccaagacaaaaactacttcgaaggccaagagtaagccggcggctaagccaaaggctacttctaaggcgaatgctgctccagccaagactaacgcagtggcttctgtgaagccgaagactactgcagctacaaagccaaaagctgcagccaagcctaaagacaagccggttaaggcttcgaggacttcaactaggacgtcccccggaaagagggcttctgctcccaagcctgctgcgaagaaggctcctgctgctaagaaagctccggcgaagagtgtaaagccgaaaagtgtcaagtcaccagcgaaaaaagccacgtctaggaggggaaagaaatgagagaagagagggtggtcaacgtaggggtagtttt

SEQ ID NO: 15300 - DNA, 353 bp, Gossypium hirsutum
  Clone ID: LIB3048-034-Q1-L1-H8
gggcggcgtctaaaactgtgggtcccccgggcttggaggattccggcccagggaaaatctttctgggaatttccagaaacttttggttgggccttttaaaaaacctggggcttgttggaaagttggtaaaggttaaggtttggattaacctccttttggttaggcttcgaaaaccggttacggttgttctggttcttgcaaaaaggaacccggttactactaagtcgaagtctaagcctgcctcaaagcctaaggaagggaagagtacaaaaactactcctaaagcaaaggccaggacaaaaactacttcgaaggctaagagtaagccggcggctaagccaaagcctacttct

SEQ ID NO: 15301 - DNA, 1714 bp, Gossypium hirsutum
  Clone ID: GOSHI-09MAY01-C6296_1
cggccccgcgccctttgccttcacaacttacaactcagcctctcctctctctttctctcttcgcctccaaatggcttctgccaccacttccaccactctttccctcctcaaaaccaccgcctccaccacctcttcctccgcctcccgctcttctgcatccctcatccgccttccttccacgcgccgccacctcaagtcctctcctctcatccacagcctaggcttctcctccgctgcttctggggactctctgctttccctccatgtctcctccaaagttcgatctttcaagggaaaagggtcaagaggggttgtttcaatggccaagaagagtgttggggacttgactgccgctgatttgaaagggaagaaagtgtttgtgagggctgacttgaatgttccattggatgatagccagaacatcactgatgacaccaggattcgtgctgctattcccaccatcaagcatttgattcagaatggagctaaagtcattctctctagccacttggggcggccaaagggtgttactccaaaattcagcttggctcctcttgtacccaggctttctgaattacttggcattcaggttgtcaaggctgatgactgcattggtccagaagtagaaaagttagttgctgcacttcctgaaggtggtgttcttcttcttgaaaatgttagattttacaaggaagaggaaaagaatgaacctgaatttgcaaagaagcttgcttcgttagctgatctctttgtcaatgatgcatttgggactgcacatcgagcacatgcatcaacagagggtgttacaaaattcttgaagccatcagttgctggtttccttttacagaaggaactagactaccttgttggtgctgtttcaagccccaaaaggccttttgctgccattgtgggtggctcaaaggtctcttccaagattggagtcattgaatcactccttgagaaatgtgacattctccttcttggtggtggtatgattttcacattttacaaggcacaaggcctatcagtcggttcatccctggtagaggaggataagcttgaacttgcaacatcacttcttgtaaaggccaaggcaaaaggagtgtctcttttgttacccactgatgtggttatcgccgacaagtttgcccctgacgcaaacagcaagattgtgccggcatctgctatccctgatggctggatgggattggatattggacctgattctgtcaagacattcaatgaagctttggatactacccaaaccatcatctggaatggaccaatgggagtgtttgaatttgagaaatttgcagttggaactgaggctattgcaaagaagctagctgaacttagtggcaagggagtgacaacaatcattggaggtggagactctgttgctgctgtagaaaaggttggagttgctgatgtcatgagccacatatcaactggtggtggtgccagtttagaattgttggaagggaaggagcttccaggtgtgattgccctggatgaggctgttccggttgctgtgtaagatcgaatcaaattttccacatcctcactgcggagtggctttttcacgcaagagatccttttggatgtgtacaacattaaatcactagtagagcccttttctgcctcttcctttcttgctccttcctaaatggttgtcagaagagtgttgcttaaataaattgctttatttttatcc

SEQ ID NO: 15302 - DNA, 907 bp, Gossypium hirsutum
  Clone ID: GOSHI-09MAY01-C6286_1
cccacgcgttcgtccacgcgtccgctcccacccgtccgcccacgcgtccgcccacgcgcacgtgaaactccatttctctgccacaaaaagctcccccgccccgactcccctggcatcaacagcacaattctaaacccaaaaacataaaaaaatggcagcaagtgtagcaacaatggcgatgctcaatgcaaaatgcctaagcatcagctcaactaagatgagcagcccaacaaagccaaccccaaagcccttctcccttctctccatgcagaacctccccaaaggcctcaccatctcaaaaccagccaacaactcaaacctaccttcttcactcgctggcagcgccattgctggagctatcttctcaaccttaagttcatgtgaccccgccttagctgcacaacagattgctgaaatagctgaaggagacaaccgtgggctagctctattgcttcccataatcccagcgatcgcttgggtcctcttcaacatcctccagccagcacttaaccagctgaatcgaatgaggagctccaaaggggttatcatagggctagggctcggaggattggctgcatcagggttcatgtcaacaccggaagcatcggccagtgagatagctatggtagctgatgctgcatctagtgacaataggggtacccttctcctcttcgttgtagcaccagctcttctttgggtggcctacaacattctgcaacccgctttgaaccagcttaataggatgagatctcagtgagattgtggatcttgtatggggtgtaatggcatgtaaattacctgtaattgcaccttatgttaatgaagctttctcgttatttactttaaacaaaaaaaaaaaaaaagggcggcccccacgcgtccgaaaaaaaaaaaaaaaaaagggaaa

SEQ ID NO: 15303 - DNA, 339 bp, Gossypium hirsutum
  Clone ID: LIB3135-035-Q1-K1-G3
tcgcccacgcgtccgcccacgcgttcgcccacgcgttcgcccacgcgtccggctcaatgcaaaatgcctaagcatcagctcaactaagatgagcagcccaacaaagccaaccccaaagcccttctcccttctctccatgcagaacctgcccaaaggcctcaccatctcaaaaccggccaacaactcaaacctaccgtcttcactcgctggcagcgccattgctggagctatcttctcaaccttgagctcatgtgaccccgccttagctgcacaacagattgctgaaatagctgaaggagacaaccgtgggctagctctattgcttcccataatcccagc

SEQ ID NO: 15304 - DNA, 454 bp, Gossypium hirsutum
  Clone ID: GOSHI-09MAY01-C6256_1
aaccccgccacctgacttaactcatccgataactaaacctctcaaatccttttcttttcctgttttctcttccactgccaattgttcaaccatgtcatcagctgtgattgcaggtgcctcttcttcttgttctgccgccttcaccagcaggaagaactactccaacaaaactacctccaccccttctcccaaggcattcaatacttcacagaaaaccgcactccaaggcttgtctcttcaagaggccaaagggggtatctcagatttcttcatagctgagaaaaagagcagtgtctgttccagtcatgtaggaagaggacttgagatcacttgcaagaactgccggtgcttcaaaaactatagaggttgaggttgacaagcctttaggtttgacattaggtcagaagcaaggaggtggtgtagttatcactgcttgtgatgggggtgggaatgc

SEQ ID NO: 15305 - DNA, 1128 bp, Gossypium hirsutum
  Clone ID: GOSHI-09MAY01-C6246_1
cccaagtagtggcttagattgacccttatttcctgccttagtttcattgaaggcgggactctcagactactctttcgaaccagctccaccatcacccccaaaaaacaaagcaaattgtagaagatggcaacacaagcacttgtatcatcgtctcttacctactcagtggagactgcaaggcagattcttggagctaaacgacaaattgggccttcaaggaaaggatcctttgttgttaaggcagcttcgactccacccgttaagcaaggagctgatagacctttatggtttgcatctaaacaaagcctttcatacttggatggcagccttccaggtgattatggatttgaccccttgggactctcagaccctgaaggtccaggagggttcatcgagcctaaatggctagcctacggtgagatcatcaacgggcgttatgctatgttgggtgcagtaggtgcgattgcccctgaaatacttgggaaggccggtcttatcccagcagaaacagccctcccttggtttagaaccggtgtgatcccaccagcaggaacatacagctattgggcagacccttacactttgtttgtgttcgagatggcactcatgggatttgcagagcacagaaggttccaagactgggccaaaccaggttcgatggggaaacaatatttcttggggttcgagaagtaccttggagggtctggtgagccggcataccctggaggaccactgtttaacccacttggttttgggaaagatgagaagtcattgaaggatttgaagctgaaagaagtgaagaatgggagattggcaatgttggcaatcttgggttacttcatacaagggctcgtgacaggtgtaggaccataccagaacctgttggatcacttggctgaccctttcaacaacaatgtcttgactaacctcaagttccattagatgaaagtgcctatatttgttccatggaactaccctccccccccggctaaaagctccattgccaaatccctttctgctcctttcttgatctcagtaaaacatgtgtaaatttattctgtaatctgcgagaaagaactgaaatagactttgttaatgccactgtaatatcatgagtttctctttcaa

SEQ ID NO: 15306 - DNA, 423 bp, Gossypium hirsutum
  unsure (1)..(423): unsure at all n locations
  Clone ID: LIB3165-057-P1-K1-C1
caggaanggaanaaccggggcgacccacgcgtacgcccacgcgtacgcccacgcgtacgtttttttctctcagactactctttcgaaccagctgcaccatcacccccaaagaacaaagcaaattgtagaagatggcaacacaagcacttgtatcatcgtctcttacctactcagtggagactgcaaggcagattcttggagctaaacgacaaattgggccttcaaggaaaggatcctttgttgttaaggcagcttcgactccacccgttaagcaaggagctgatagacctctatggtttgcatctaaacaaagcctttcatacttggatggcagccttccaggtgattatggatttgaccccatgggactctcagaccctgaaggttcaggatggtttaattgagcctaaatggctagcctac

SEQ ID NO: 15307 - DNA, 385 bp, Gossypium hirsutum
  Clone ID: LIB3165-007-P1-K1-C12
cccacgcgttcgcccacgcgttcttccacgcgtccgcggacgcgtggggcagggggtgctattgcggctgaaatacttgggaaggccggtcttatcccagcagaaacagccctcccttggtttagaactggtgtgatcccaccagcagggacatacaactattgggcagacccttacactttgtttgtgttcgagatggcactcatgggatttgcagagcacagaaggttccaagactgggccaaaccaggttcgatggggaaacaatatttcttggggttcgagaagtaccttggagggtctggtgagccggcataccctggaggaccactgtttaacccacttggttttgggaaagatgagaagtcattgaaggatttgaagc

SEQ ID NO: 15308 - DNA, 417 bp, Gossypium hirsutum
  Clone ID: LIB3165-007-P1-K1-E1
gggcggaccaacgcgtccgccaacgcgtccgcccacgcgtccgactttctccaccatcacccccaaaaaacagaggaaattgtagaagaatggcaacacaagcacttgtatcatcgtctcttacctactcagtggagactgcaaggcagattcttggagctaaacgacaaattgggccttcaaggaaaggatcctttgttgttaaggcagcttcgactccacccgttaagcaaggagctgatagacctttatggtttgcatctaaacaaagcctttcatacttggatggcagccttccaggtgattatggatttgaccccttgggactctcagaccctgaaggtccaggagggttcatcgagcctaaatggctagcctacggtgagatcatcaacgggcgttatgctatgttgggtg

SEQ ID NO: 15309 - DNA, 340 bp, Gossypium hirsutum
  Clone ID: LIB3120-006-Q1-K1-B7
acgattgacccttatttcctgccttagttacattgaaggcgggactctaaaactactgggttgggccaactccagcgaggaggcggaaaaaacaaagcaaattgataaaatggcaacacaagcacttgaaaaatcatctcttacctactcagtggagactgcaaggcagattcttggagctaaacgacaaatagggccttcaaggaaaggaacctttgtcgttaaggcaggttcgacttcacccgttaagcaaggaactgatagacctttatgggttgcatctaaacaaaagcctttcatacttggaaggcaagccttcaagtgaataaggaatttgacc

SEQ ID NO: 15310 - DNA, 545 bp, Gossypium hirsutum
  Clone ID: GOSHI-09MAY01-C6276_2
ctccgtcagagagatttaatcaatctgagcgatagaggaaaatcacgaattcctgataaagtgacggaaaatatatacaatgcatagatcgcgatctccattgctaatagctttatcatttctcttcacatccttcaccatctctaacgctctttacgggccgtcgtcgccagtggttcagctcactccatctaatttcaagtccaaggttttaaattctaacggagttgttttggttgagttcttcgcgccttggtgtggccattgccaaactttaacacctacatgggagaaagccgccaatgtcttgaaaggtgtcgctacagtggcagccctcgatgctgatgctcataagtctcttgcccaggaatacgggattagaggatttcctacaataaaagtgttcgcccctggaaagccacctgtagattatcagggagctagagatgtcaaacctattgccgaatttgccctcaagcaggtaaaggcacctttgaaagaccgtctcgctggggaaacatctggaggatcaagtgagaaatctg

SEQ ID NO: 15311 - DNA, 1575 bp, Gossypium hirsutum
  Clone ID: GOSHI-09MAY01-C6276_1
ctccatcagagagatttaatcaatctgagcgatagaggaaaatcacgaattcctgataaagtgacggaaaatatatacaatgcatagatcgccccctcccgtccgcccacccgtcccatttctcggcacatccttcaccatctctaacgctctttacgggccgtcgtcgccagtggttcagctcactccatctaatttcaagtccaaggttttaaattctaacggagttgttttggttgagttcttcgcgccttggtgtggccattgccaaactttaacacctacatgggagaaagcctccaatgtcttgaaaggtgtcgctacagtggcagccctcgatgctgatgctcataagtctctttcccaggaatacgggattagaggatttcctacaataaaagtgttcgtccctggaaagccacctgtagattatatgggagctagagatgtcaaacctattgccgaatttgctctccagcaggtaaaggcacttttgaaagaccgtctcgctgggaaagcatctggaggatcaagtgagaaatctgagtctagtgcatctgtagaattgaattcccacaactttgatgaattggtgctcaaaagtaaagaactttggattgtggagtttttcgctccttggtgtggacactgtaaaagacttgctcctgagtggaagagggctgctaataacttgaaggggaaggtgaagcttggtcatgttgactgcgattctgagaagtctctcatgagcaggttcaacgttcaagggttccctaccatcttagtatttggtgctgacaaagacagcccagttccttacgagggtgctagaaccgcctctgctattgaatcatttgctctagagcaactagaaactaatgtcggaccggctgaagtgacagagctgactggcccagatgtgatggaagagaaatgtagttcagctgccatatgcttcgttgctttcttgcctgacattctagactcgaaggctgaaggaaggaacaagtacttggatatgttattgtcagttgcagagaaatttaaaaggagtccttacagctatgtttgggctgctgctggtaagcaaccggatctcgagaaccgtgtaggtgttggtggatatggttatccagctcttgtagccttgaacgtcaagaaaggagcatatgctccactcataagtgcatttgagctcgagcatatcattgagtttgtgaaggaagcagggcgcggaggcaagggaaatttaccactggagggcacacccgagattgcaaagacagaagcatgggacggtaaagatggagaaatcatggaagaggatgagttctcacttgaagaactcatgggagattttacagcaagtaaagatgagttgtaataaaattggaattagtttaggataaaaagaagggttttgatgtttggtcgtgtcgtttattttggtttttactgattgaaacaattatcccaagtgaaacagattattagagatgatccaaatatttaaggagtctgatttcatctaccaacaatggttaataacctgggttggtagatatactattaaaa

SEQ ID NO: 15312 - DNA, 285 bp, Gossypium hirsutum
  Clone ID: LIB3189-047-P1-K1-H3
gcaactttgacgcagctgctatttcttttttgtggttttcaccagcaacttgtacttgcaataatgcgcgagctccatcgctaatagcggtagcatctctatccacatccttcaccatctctaacgctctctacaggccatcatccccccttgctcaaatcactccatctaatttcaagtccaaggttttaaattctaacggagttgttttggttgagttcttcgcgccttggtgtggccattgccaaactttaacacctacatgggagaaagcctccaatgtct

SEQ ID NO: 15313 - DNA, 480 bp, Gossypium hirsutum
  Clone ID: GOSHI-09MAY01-C6216_2
ctcgctcccatcaattttgttcaatttccttttctttgaaaccccatttctataaattctccttctctgaatcatccaacatcaccatgtaaatgccactcctcccctttctttctttacccacttccaaccttcacgtttcccttttttttcctgatcttttttgttgaagaaaactgctgctaacaatgacttcggctaatggcaatgcttcacaagtgaccaacaatggcgatgtaaggaaacccttcaaaatctttattggttacgatccgcgtgaagatcaagcgtatgaggtctgccgccattctatcttgaaacgcacttctatacctgttgagatcacacccattgttcagtcggatcttagggcaaaaggcctttattggcgcagcagggatcagttcgagagcacggagttctcctttacacggttcctaacacattgcccagccatcgtaattcgctaagtatggtgtt

SEQ ID NO: 15314 - DNA, 1134 bp, Gossypium hirsutum
  Clone ID: GOSHI-09MAY01-C6216_1
gaaaaaacgaataactggctccctttccctcgtttcatttcaccgctaaatcctcgccacaacacattcatacaaaaatttctattgaatctaaaataaaaattggataatttcgaaattttagagattaattttctattctttgagttctcatttctataagtagtcttccaagagtctacctcttcccctttattcttaagaaacttttagttctctttcttctttcttcactgtcaagaatttcgagatcccgcgttttcttcattttctcagatctttgttatagaagaaaaaactgctgctaacaatgactttggctaatggcgaagctcatcaagtgactaacaatggcgatttaagcaaacccttcaaaatctttgtcggttacgatccgcgtgaagatctagcctatgaggtctgccgccattctatcttgaaacgttcatcggttcctgtcgagatcactcccattgttcaatcagatctccgggaaaaaggcctttactggcgcgagcggaacaagctcgagagtaccgagttctcgttttcccggttcctgactccctacttggcgaattacaatggttgggcgctgttcattgactgtgatttcctttacttagctgatataaaggaattaatggagttgattgatgataaatatgcgatcatgtgcgttcatcatgattataccccgaaagagaccacgaaaatggatggtgcagtgcagactttgtatcctcgaaagaattggtcctcgatggtgttgtacaattgcggtcatccgaagaacaagggtctgactccagaagttgtaaacaatcaaacgggcgcttttcttcataggttccagtggctcgaagatgatgaaatcggatcgatcccgtctatttggaatttccttgaagggcataacaaggttgtcgagaatgactcataaacgtttcctaaagccatacattatactcgtggagggccatggtttgaggcatggaagaattgtgagtctgccgatctttggctgaatgagatgcttgactacatccaagacacgaagttgaatgccagttaatcagaatcggcatggtgcagtggtaatgtcctaattacatgtcaattgacccatgctcc

SEQ ID NO: 15315 - DNA, 760 bp, Gossypium hirsutum
  Clone ID: GOSHI-09MAY01-C7986_1
cccacgcgtccgatttctttcccttcttttatcccccacctccattatcactctgcgggcaagctttttttattagttttatttcatatcccaaaaaccagccacgcccccactctcaccctcatttctcctccctttcccatccccatacccacaccacctttgccatgtctctagtccccttccctttctttctcttcttcatctccctcttctttgccactttttccttcactatatccagccctgacgccctcaatgtccaatccctccctctatccacatccccacctgcaacgatccctgcatttccagagcaatccaatgtcgttggttgtccacttgacttacctgaacaactctttcacagcgttaagaacgcttgtggcactaagataaacaatggggtggcgagtgagctccaccgcagccgctgctgtcctgttctcgctgcatggctttacgccgcttactccgccaccgcccttggtggggttggaagagtagtgccagcggttgcggggcgtacccaatcttatgacatgccattgctgccggatgactcggaaacctgtgtggatgacttagggaaagctctgaaacagagaggcgtggagttggctaaaccgaacgagacatgcgatgcggtgtattgctattgtggcatcaggcttcacccattgacttgccctgatgctttctcagtggaccaaaagggcaaccttgtaggggatgacagtgtggagagattggagagaaa

SEQ ID NO: 15316 - DNA, 427 bp, Gossypium hirsutum
  Clone ID: GOSHI-09MAY01-C7946_1
tctccgttgaaaacaataccgtttgcagccgattaaatggtagttgcagggccaggttagggtggtggcgccatgtcaaactccaagagcttagctgttcagattctaaagggcccatggctcatggttttcggctcactgttgatcatgtctgccgctggtgcaacctacatgtttagtctatactccggcgacattaaagaatcgctcggctatgaccaaaccaccctaaattatctcagtttcttcaaggatttaggcaccaacgttggggtcctttcgggtctcatagccgaggtaacacccccatggttcgtgttatctgttggtgcaggccttaacttctttgggtactttatggattgggttggccgtcaccaaaaggatccccaccaaagtgtggcaaatgtgtttgtatatttgcata

SEQ ID NO: 15317 - DNA, 728 bp, Gossypium hirsutum
  Clone ID: GOSHI-09MAY01-C7976_1
gtcattgtagagaagggtatgcagaatggacaaaagataacattccctggcgaagctgatgaagcgcctgagactgttactggggatatagtctttgtccttcagcagaaggaccatccgaagttcaagaggaagggagaagacctatttttggaacatacgttgtctcttactgaggcattgtgtggctttcaatttgttattacccatcttgacggtcgacaacttctaatcaagtcgaaccctggggaggttgtgaagcctgattcttgcaaggcaatcaatgatgaggggatgccattataccagaggccattcatgaagggtaaattgtacattcagttcactgttgaattccctgattcccttagccctgatcaggttaaggcacttgaggccatcctgcctccaaaaccaacctctcagttgagtgatatggagctagatgagtgtgaggagaccacgctctatgatgtgaacattgaagaggagatgaggaggaagcagcagcaggcagcgcaggaagcttatgaggaagatgaagatatgcatggcggtgcccagagggtgcagtgtgcccagcaatgatgatgaagcaaaaaagaaaaaagaaagtgatatatggtttcaaaagtattctcgaggatacagaaagctggtttctctagtaatgtagagtggcaaagcatgtcttgctcagtggtggatgagcggtgttattattgtta

SEQ ID NO: 15318 - DNA, 658 bp, Gossypium hirsutum
  Clone ID: GOSHI-09MAY01-C7906_2
gcagagtgggcagcctgaggatcttcataagacaaaactgctggcggtttctttcacaatgatgggatgagaggctatacaatcggagtggctatggcagagaagactgcgcccaaagtatatgatcatggaggtggtaaaggtggctacggaggtggtggcgacaggcgcagggatagttacagagatggtggttctggtccagataggcatcaccatggcggaaatcgttcgcgcccatactgagaggctctcagcttcaagtattttatgcactaagaatgtggtctaagggttctagttgtgttgtattgaagggagtgttcttgaacaggagactaagaggtaggttgttcacttgtctgggcaatacccctttgttctccttttcctcctttgtctagtgttagcctgggggttctttctttctagttgtcgcatatgattgaattcgcctcaatgttttatatgaggcaagtggattaactcctaattgcttgctgctacggtaggttcacaatattcaggtgagtgcggctctgtcaaaccacacattcacctttggtagttaacccttcgtgggggacttgattgtggctcctgtctgctcagcatgttggcacaagctggctgtttatttgcatgaatgggttttttt

SEQ ID NO: 15319 - DNA, 1087 bp, Gossypium hirsutum
  Clone ID: GOSHI-09MAY01-C7906_1
gccgacgcccgcccccgcacccaattcttatggtgggaattatccacctgctcctaatacatatggtgggaatgcaaattatggaatggattcagtccctccacctacaagctatactggtggacctacatcataccctccatcttatggtggccctgcgggtggctatgctggtgagggtttgagtgatgcacggactggtggtcgtggtggacctcctggtggatatgacggtgggtatggttctggtggtcctcgaaatcagggaggtggttatggtggtcctcctgttgaagcaccagctaagatcaagcagtgtgacggcaactgtggggattcttgcgacaactcaagaatatacataacaaatttgccacctgatgttactattgaagaattaagagacctttttggcggcattggacaagttggaagaattaagcagaagcgtggctataaagatcaatggccatggaatattaaaatatacacagatgagaaaggaaaccagaaaggtgatgcagttttgtcttatgaagatcctcaggctgcccactctgctggcggtttctttcacaatcatgtcatgagaggctatacgatcggcgtggctatggcagaaaagactgcgctcaaagtacatgatcatggaggtggtaaaggtggctacggaggtggtggcgacaggcgcagggatagttacagagatggtggttctgggccagataggcatccccatggcggaaatcgctcgcgcccatactgagaggctctcagcttcaagttttttatgccctaggaatgtggtctaagggttctagttgtgttgcattgacggcattgttcttgaccaggagactaagagaggcaactggattaactccaaattgcttgctgctaaggtaggttgataatttcaggtgagtgcggctctttcatttcccccttttccccttttgtttggtagttaacccttgatgctgcccctcattttgtttcctgtctgctcatcatggtggaacaagcttgttatttatatgcatgcatgggtatctcttatattaagtctttatgccttaatgttgtc

SEQ ID NO: 15320 - DNA, 353 bp, Gossypium hirsutum
  Clone ID: LIB3493-015-P1-M1-B1
ttcatggacttaggggtgttttatgtacgtggttctattgacaatttctttttctattttgcatgaatatttttttatcctcactagtgtttctaacaattcacttcttgtttaggttggaagaattaagcagaagcgtggctataaagatcaatggccatggaatattaaaatatacacagatgataaaggaaaccagaaaggcgatgcagttttgtcttacgaagatcctcaggctgctcactctgctggcagtttctttaacagtaagtactcacaaacttcttagtttagtttgttgccttaaatattttacctcatccttgtggaatcttctctcaaatcatgtcatg

SEQ ID NO: 15321 - DNA, 1414 bp, Gossypium hirsutum
  Clone ID: GOSHI-09MAY01-C7566_1
cttttccgggattggaacattgggcaggccaaatccacagttgctgcttctgctgcagcatcaataaatccctgtttaaaaattgaagctttgcaaaaccgtgtcggtcctgaaactgaaaacgtattcgatgataccttctgggagaatttaacagtggttattaatgcattggataacgtgaatgccaggctttatgttgatcagaggtgcttatatttccagaaaccgcttctcgagtctggaactcttggtgccaaatgcaacacacagatggttattcctcacctaactgaaaactatggtgcttcaagagacccacctgagaaacaagctcctatgtgcacagtgcactcatttcctcacaatattgaccattgtctgacatgggctcggtctgagtttgagggtctactggagaaaactcctgctgaagtgaatgcttatctgtccaacccagttgagtataaaactgcacaaaggactgctggcgatgctcaggcaagagataatttggaacgtattcttgaatgcctcgagaaagagaagtgtgtgacattccaggattgcatcttctgggctcgtctaagatttgaggacttctttgtgaatcgtgtaaagcagctgatttatacgtttcctgaagatgctgcaaccagtactggggctccgttctggtctgccccaaaaagattccctcagccatttcagttctcagtagctgatccaagtcatctgcaatttgttatggctgcttctatcctgagggctgaaacatttggcattcctattcctgattggattgagcatccgaagatgttggctgaggctattgagaaactaatagtcccagactttgagccgaagaaagatgtaaaaattgtaacggatgagaaggctactacactctctgttgcatctatagatgatgcagcaggtatcgatgaactcatcttcaagttagagctttgcacgaaaaatttgccactagggttcaagatgaaacctattcagtttgagaaggatgatgatacaaactaccatatggatctgatagctgggcttgcaaatatgagggccaggaactacagcattccagaggtggacaagctgaaagccaagttcattgctggaagaattatccctgcaattgccacttccacagctatggccactggtctcgtctgcctggaactttacaaagctctggatggaggacacaaactggaagactaccgtaacactttcgcaaaccttgcactgcctctattctctatggcagagccggttccacccaaaaccatcaaacacggtgacatgagctggactgtttgggaccgatggatcctgaaaggcaacccaagtttgagagaactcatccagtggctgaaagataaggggttgaatgcctaca

SEQ ID NO: 15322 - DNA, 455 bp, Gossypium hirsutum
  Clone ID: GOSHI-09MAY01-C7416_2
gttctttctttcactattagctgaacctcagcggagctcacataaacacaatagccaaaatggcatctccaacttctgctctaaccaattccccgttttgcccccatcttctcccccaattctctcctctacccgtcctctccttcactcacagcctcaaacctatcctgccaaagctcaagtctctgatttccctcaaaagagacaaccacccctcaaccttaaccgtcaaagcccagaccttggacttctccggctcattctttgagggtggtttcggctccgatgatgacccgccttcccaacccggctctggcataaccgccttggaggataaagaggaaccccaatgcccaccgggcctccgacagtacgagacaatggccgtcttgagacccgacatgtctgaagatgaaaggctttgctcttacccagaagtacgaggagcttcttgt

SEQ ID NO: 15323 - DNA, 726 bp, Gossypium hirsutum
  Clone ID: GOSHI-09MAY01-C7416_1
ttcactaatcgctgacctcaggggggggggggggggcgcaataaccaaaatggcatgctccaacttctgctttaaccaattccccgttttgcccccatcttctcccccaattctctcctctacccgtcctctccttcactcacagcctcaaatctatcccaccaaagctcaagtctggggggggggggatttttttttccacccctcaaccttaaccgtcaaagcccaaccttggacttctccggttcattctttgagggtggcttcggctctgatgatgacccgccttcccaacccggctctggcataaccgccttggaggataaagaggaaccccaatgcccaccgggcctccgacagtacgagacaatggccgtcttgagacccgacatgtctgaagatgaaaggcttgctcttacccagaagtacgaggagcttcttgtcgccggtggtggcatgtatattgaggtatttaatagaggggtcatcccattagcttacagcatcaagaagaaaattttagctggggaaaccaacgcttacttggatggcatttacctcctctttacctactttacaaaacctgagtcaataacggctctcgaagcggcgttgaatacagacgatgatgttatccgctcaaccagcttcaagataaggaagaggaagtataattagattggtatgtacctacatgtctgtatcttgagatgaatatgattagga

SEQ ID NO: 15324 - DNA, 530 bp, Gossypium hirsutum
  Clone ID: GOSHI-09MAY01-C7796_1
cccacgcgtccgacaaaccgaccatggcttctataaaacccagtttttattttgaacccagtaatggagtcgacacctccgtggctttattcacatcagcattgttaaagcccaactccttacctttttcacctcttcaaagagtaacaccaacagccaaaactagacgtttctcttgcaaagtcctaaactctggccatccagactcggaattaaatcaaatacagagaaagcagagtcctttggattcaagttttgtaactcaattacgtaggaagttgcagcaatgggaaagtgtcggctttgggctaatggggtgtcagttgtagcaaaaagaaccagaccattgatttgaaaaccccagggtagaaattttgttcttctgaatggtggtggtgcaaaaagagggaagggaaggtgttttgggagggggaactggaacgctttggatatagcctctgcaggtattgtcttggccatgcatttactcagcctttgcgcacctttttacttcaattggcctgcttttt

SEQ ID NO: 15325 - DNA, 920 bp, Gossypium hirsutum
  Clone ID: GOSHI-09MAY01-C7786_1
gtttgaacgaccggataagcctgcgccacaaacagtctcacaggctgacagtcaacttccgatggcctccgccgccgcacacctttccttcagccttccctttccgcctttctcttctccaggccaccgcccagtaactgcttttccttacccaaccactcagagtcagaatcagagtcgagtctccctcagaactcgagctttaggtcctgactttttgggtgatttcggggcacgtgaccctttcccagcggagatagctagtggatttgctgagaaagtgttgggaaacgtcgacacagagccgcggccgcccacccctccggcatcagctctctctcttgctaagcaagattgctctccgatgtctcctttacagcctcccttgtcggtggatgaagctaaggctctaataaagaaggttgttggatggaggctgttagatgaagaaggtggacttaaactgcagtgttcatggaaattacgagatttcaaatccggagttgaactcatcaatcggatttataaggttacggaagctaccgatcatttcccgagcctccatttggaaggaccgaatcaagtccgagctgaactgtggactgcttcgattggagggttgagcatgaatgatttcattgtagctgccaagatagatgaaataaaaacatcggatcttgcgcctcgtaaacggatttgggcataaatcggagcactgattttcttttttccggcaagttatcggagcatatccgatgaaaccatggaagtcataagactcagggaacttcaatgcttttgatgaaagattcgaacatttttcgacacatacactccttttttatccttctaagcttttgtatatggaattatttgttgttagtaacatcattttttaacaataaaatggtgattctatc

SEQ ID NO: 15326 - DNA, 420 bp, Gossypium hirsutum
  Clone ID: GOSHI-09MAY01-C7756_1
cttttatcgtctctgctgtttgatgtattgctcttgtctctcagactttcccatgtgtgtatatcttctttgacccaaattcattgcctctaaatctttgtcttaaaatcatgtttcttcttgttttctagttttccgcaaaaaagataacacacacccaattttgtcgttgtttttgttgttactttcccatctttgttttgtttgagggagagaattactttcgttgaaaaaaaataaaaccaaggagatggtgtcacgaagtttttgtaagagaagggaaatggcggcggttcttcccgcctggatcatggtagcgattttggttttggaggctagtctggtcatgggtggttttcaagcgagtttgaaactggagaggaggattccactggtgagtcatgaagtggagctgggtcg

SEQ ID NO: 15327 - DNA, 424 bp, Gossypium hirsutum
  Clone ID: GOSHI-09MAY01-C7776_1
cggacgcgtgggccacaaccatcttattttgtgaccactggcgcacatttgatgaccttttcagtggagcatgcctccaccatggaaagatcagttggaggtttccaaattcctgcaggttccctcactgtcttctttgtggcagctatattgatcactctggctgtttatgaccgtctcgttatgccattttggaacacctggactggaaaaccaggtttcagcagcctacagagaattgccttaggcttagcactatcaactatgggaatggcatctgccgcagtagccgaggtgaaaagactggaagtggctcgagccacgggtgcaagtgcaacgactggaaccctgcctgtaacagtgttcatattgatcccacagttcttcctagtgggtgccggtgaggctttcatttacacaggcc

SEQ ID NO: 15328 - DNA, 457 bp, Gossypium hirsutum
  Clone ID: GOSHI-09MAY01-C7706_1
tcggaaatacatgtctcttcttttattccttcgcatctaactctctaaaccttggatccttcaatcttgatcgttggatccatctttttccttccattcaacccaggactatatttggtgacagcgatgtctcctgcatccaaagtcgaagtccaaagataaaaaatccagcaaggactctcagaaggcttctgcaaggccttctggacctgctaatgcagctagtggtgctccagctagtgcttacaatccacttttgggaacattccataccattgaaacagcaccatcatcatctgcttcacctcttcagagcaatggtcgtttccgaaacatagacgacacagatgagcatttgggaggctcacttggagctggggttgactttgattcaatatctaataatggtagctgggtcaggtgaatcagaagagcacaaagagaaaacttcaaatct

SEQ ID NO: 15329 - DNA, 476 bp, Gossypium hirsutum
  Clone ID: GOSHI-09MAY01-C7736_1
acaaaccaaaagatatgcttactcacaacgtgtctgcgccgtcttctctatgcccaattctttccaatgactggcatttccatgtatctgatcagcttatatttcctcacaatctaaacccaaatctattttggagagcaagcagaaagattaagggatgccgactcaaggctagcttttgggagtccatcagatctgggattttgaagaacaacacaacacaaatcgttgaaccaccctctacacttgaagaagaggaagaacccttacctgatgaatttgtgcttgttgaaaagtctcaacctgatggtgaagttgaacaaataatattctcttctggaggagatgtggatgtctacgagcttcaagccctatgtgataaggttggctggccgaggagaccattgtcaaaactagcagcggctttaaaaatttgtttcctggttgccgcgttgccttccgccttgaatttgcct

SEQ ID NO: 15330 - DNA, 623 bp, Gossypium hirsutum
  Clone ID: GOSHI-09MAY01-C7686_2
ctccaaaacactcttgtcaaacaaaacacgcttcagccagcggccctcctcttccctccttcactcgtttctcgattttgtttccctcagcttcacttcctcttaagaaattcctctctttttgtcgcctctaatattgttaatttctagggttacgttgagtaatggattggggaaacgttaccgccgaggatctgatcgacgctcttcgtgaagttgactggtcatcaccgccgcgacctctctccgaattcttctcccgcttcaccatccctcggtcatacgtcaaatggaacagccgcattaaatgcaatctctactactatcgcactaattatttcattctgattgttctcattctcggtttgggattcttgaggagaccgcttgctattttagctgctattttgacggctcttagcattgcttttctgaatgatacctttgctagttcttttagtgagaaggtgacaagaactgtgaggctgttctctccacatttaccagctaagatgaggcctccctttacacctgttattcgtgggcgtccttcagcaaaaagagcgatttacatatgtggtccacctcgttgggtgtgtgtcttcatattttcttctgtgagt

SEQ ID NO: 15331 - DNA, 1318 bp, Gossypium hirsutum
  Clone ID: GOSHI-09MAY01-C7686_1
caatcaacttccgttttgcctttcacaatcgctgaaaccaaaccttccaaattcctgcacagttaagcatttttcagggtggaaacaccattttgtttttctgtccaaaaaaccctctccaataacaatctgtaaagcttccttcacgtagaaaaatcaactctccctttccctcacgaaacttcgatttctttctcctcagcttcacttcctcgtaaaagtttcctttttgccgctccttccccctagggtttcgtatagtaaggaacgaggggatcgaacataatcaaatcgaatggattggggaaacgtaaccgcagaggatctgatcgacgcgcttcgtgaagttgactggtcatcaccgccacgacctctccccgaattcttctctcgtttcaccttccctcgatcatatgccaaatggaatagccgccttaaatgcaatctctactactaccgaaccaattatttcatcatgattgttgtcattcttggtttgggattcttgaggaggccggttgctgttttagctgcgatgttaacagcgctttgcatcgcttttctgaatgatagtttcgctggtacttttagtgagaaggtgactagaacagtgaggcaattctctccacatttagcagctaaaatgaggcctcccttaactcctgttattcgtggacgtccatcatctaaaagaacaattcacatatgcggtcggcctcgttgggtttttgtcttcatattctcttctgtgagtttcatcctttggtatgtatcttgtggtctcttgactgtgctatgggcacttgccattgcacttcttgccaccgtccttcatgcaagttttagaacaccgaacctgaaggctcgtcttaacactttccgtgaggagtttcgtgcagtttggcgcaattacagtgagctctagctcatatagcctatagcatcctcaggcagtgaaggaaggttgtgataatgtggaaactcgtacaacgtgttattgtaaggttggatgggtgctgttgatgtttctaaaaagatagcttgtttggctgaaggctgctaatctttgcaatagtggagaagttgtaaattgtcagttcctcatttgtttctgtaaagcagaccatttctgtgttgactccttattggagaatatttttactcgatacccctttcttcgagaagaaaaagaagtgcagaattacataagcaatgatagttgctgggacaggatttagtacacttgattcataattacttgtagttccttttgcgggtgaatttattgctaagatagtgtaaaacctcgtgccttgag

SEQ ID NO: 15332 - DNA, 418 bp, Gossypium hirsutum
  unsure (1)..(418): unsure at all n locations
  Clone ID: uC-gsflnu33B061c01b1
tcggacgcgtgggcggacgcgtgggcggacgcgtgggcggacgcgtggggtcggcctcgttgggtctttgtcttcgtattctcaactgtgagtttcatcctttggtatgtatcctgtggtctcttgactgtgctctgggcgcttgccattgcactccttgccactatcctccatgcaagttttagaacacctaacctgaaggctcgtcttaacactttccgtgaggagttccgtgcagtttggcgcaattacagtgagctgtagctcatatagcctatagcatctcttgaacatttggtgtagtaaatcatgggactgcttcaaaaattttcttgtcatgggantggtgttcctcaggcagagaaggaaggttgcgataatgtggaaactcgtacaacatgttattgtaaggctggat

SEQ ID NO: 15333 - DNA, 428 bp, Gossypium hirsutum
  Clone ID: GOSHI-09MAY01-C7656_1
ctttttcatcacttttatccatggttataacctgagcagctgcagcagtcccagcactgtcttccctctcccatcgagctccaattccttccatttccttcctcttccccgactccaccagacccttttctctttcccgctcattccgctccttttccctcactccccaagccaaagcctcagacatcgaaatctcctttttcgacgacctcaaccccgaagacgaacctgtcgcctttgacccgccaacacccccagaagggttcatccctccacctgctttcgacgatggccccgaggaaaccgaggacgaagtcgccgctgcctatgaggagctctacggcccagcctacagtggggtctccgttctaggcaacgatgtttatgtaatggactctaaagtgaagaaaacgagtgcatttggaaaa

SEQ ID NO: 15334 - DNA, 632 bp, Gossypium hirsutum
  Clone ID: GOSHI-09MAY01-C7606_1
cttctgccatcactctcccaaccctttatggttctctatttcaatctcatttcctaggaaaaagccccatcacccatcgtccttataaaccatttttctcggttgccaaacagcctaaaaaggccttctatgccaagtttgatctatttgaaatcttgggaggtagggggctctgcaatggagaaaaaggcattgaagttgagctaaagagaaacgtggttgaagcttcatcagttggtaacacagatgttgaaagttctgacagcacagcaatctcagttcaagatgatgctttcgaaaaggagatgatggggctaaccggggggttccccggtggtgaaaagggattgaaaaagttcattgaggaaaacccaccaccggcgaagcaatcagtttccgattcggtaagtattgctaggcttgggaagccaaaatcaccggagttgccactgttaatgccgggaatgatcgcgattgttaagaacccgaacaaccccttctacatgtactgcggcattgtgcagcggatcactgatgggaaagcaggggttcttttcgaaggtggaaactgggatagattgatcacgtttcgactggacgagcttgaacgcagagaaaaaagcccttcaatg

SEQ ID NO: 15335 - DNA, 419 bp, Gossypium hirsutum
  Clone ID: LIB3165-018-P1-K1-F10
gaatctacaaaagggctacttctccacttggtctctgaaccaaaccatgggttctgctgggatcactctcccaacccttcaaggttctctatttcaatctcatttcctaaccggggggttccccggtggtgaaaagggattgaaaaagttcattgaggaaaacccaccaccggcgaagcaatcagtttccgattcggtaagtattgctaggcttgggaagccaaaatcaccggagttgccactgttaatgccgggaatgatcgcgattgttaagaacccgaacaaccccttctacatgtactgcggcattgtgcagcggatcactgatgggaaagcaggggttcttttcgaaggtggaaactgggatagattgatcacgtttcgactggacgagcttgaacgcagagaaaaaggccctt

SEQ ID NO: 15336 - DNA, 498 bp, Gossypium hirsutum
  Clone ID: GOSHI-09MAY01-C7196_5
tttacgcgtccgcccacgcgtccgcccacgcgtccgcccacgcgtccggtcaagtacggcgagtttttaactacctgggctaagaatgtcgatacttaccttcttaatgtctaattaaataacgaaggaaactacatatatgaataatttgatcatatgtctcgggcttaaataagttactccaaataatcataataaacatgcatttaaatattttataatagctgattaagcattagcttagttggcatcgtttgctgagttcaaacgtacttatgaaagcacaagtatgtatgttattgtcatgaaaattaatgtaacctttgctttgtgtatgaaagtacatgcttctcctatgttatatgataattttcgtggtaaacacaaaaataaataaaaatatgctctctttttttgtcacaaaaaaaaaaaaaaagaaaagacaataaaataaaaagactataataaaaaaaagaaaacaaaaatataaaactatcg

SEQ ID NO: 15337 - DNA, 1341 bp, Gossypium hirsutum
  Clone ID: GOSHI-09MAY01-C7196_4
cggacgcgtgggcggacgcgtgggcggacgcgtccgcccacccgtaggaaaatgtcgaaggctggtgcattggatctggcatccggtctcggcggcaagatcgagaaaaccgaagtcctttccgctgttgaacagtatgagcgatatcatgtcttttatggaggcgaagaggaagagagaaaagccaactacactgacatggttaacaaatactatgatcttgttaccagcttttatgagtttggatggggtgaatctttccattttgctcccagatggaaaggggagtctctcaaagaaagcataaagcggcatgaacattttcttgctttacaacttgggttgaagcctggacacaaggtgttggatgttggatgtggaattggtggaccacttagagaaattgctcgattcagttccacatcggtcactgggataaacaacaatgaatatcaaataacaagagggaaggaattaaaccgcattgctggagtggaaaagacttgcaactttgtgaaggctgacttcatgaagatggcatttcctgacagcacctttgacgcaatttatgcaattgaagctacttgccatgctccggatgcgtatggctgctacaaggagatttacagagtactaaagccaggacagtattttgctgcatacgagtggtgcatgacagattcatttgatccaaataactcagaacatcagaaaattaaggctgaaattgagattggtgatggtcttccggatatcaggttgactggacagtgcctggaagctctaaaacaggctggttttgagataatttgggagaaagatcttgctgttggctctccactcccttggtacttgcctttggatacaagccacttctcattgagtagcttccgtctaacatctgttggacgcttcatcaccagaaatatggtaaaggctctagaatttgtgggattagctcccaagggaagtcaaagagttcaagattttctagagaaagctgcagaagggttggttgaaggtggtaggaaagagatatttacgcctatgtatttctttttggcccgaaagccactttcggagagccagtgatgcatcgatgtagggggtgaaaactgggtgaatctatcaaatatgaacttaagctggttgtttggttccatcgtctgtaacagttttagagacttggtgtttattagctagttgatttccgttattttcatttatagaagttactggattatgtgaaacatataaatttatccttattccatgtttttaagaagatgacatctctagcggaatgttcaatattttgaaaaaatttgttggaaaattatt

SEQ ID NO: 15338 - DNA, 452 bp, Gossypium hirsutum
  Clone ID: GOSHI-09MAY01-C7196_3
cccacgcaccccccaagtttgatttaagttagtgagtttcttagtttccctagaagttaagcatggctcaaattaagaggatggagtgccaactcgagatcaagtcctcagctgataagttctttgatgcctacaagaccaaagcccagcttatgccaaaaatggccaatcaagtcgttagagatgtaaaacttgttgagggtagtggttgggattccgagggttcggttagacaatggtattttgttgccggaggtaagcttgagacttgtaaggaaatgatggaaaaggtgaatgataaagacaggactattgtttacaaattggtggaaggtgaaatcatgaaagctttcaaaagctggaactccatcctcaacgtgatgccgataggggagggaagtttggtgaaatggactatggaatttgaaaagcaaaatgatgatgtccctgat

SEQ ID NO: 15339 - DNA, 771 bp, Gossypium hirsutum
  Clone ID: GOSHI-09MAY01-C7196_1
ttttgtttcttagtttccctagaagttaagcatgggtcaatttaagaggattgtgtctcgcctccgcccccgcgccccccctcgcgtgcgctttgatgcctacatgaccaaagcccagcttatgccaaaaatggccaatcaagtcgttagagatgtaaaacttgtcgagggtagcggttgggattccgagggttcggctagacaatggtattttgttgccggaggtaagcttgagacttgtaaggaaatgatggaaaaggtgaatgataaagacaggactattgtttacaaattggtggaaggtgaaatcatgaaagctttcaaaagctggaactccatcctcaacgtgatgccgataggggagggaagtttggtgaaatggactatggaatttgaaaagcaaaatgatgatgtccctgatcctgtcaagtacggcgagtttttaactacctgggctaagaatgtcgatacttaccttcttaatgtctaattaaataattaaggaaactacatatatgaataatttgatcatatgtctcgttcttaaataaattatacaaataatcataataaacatgcatttaaatattttataatagctgattaagcattagcttagttggcaacgtttgctgagttcaaacgtacttatgaaagcacaagtatgtatgttattgtcatgaaaattaatgtaacctttgctttgtgtatgaaagtgaaaaaaaagaaaaaagaaaataaataaaaaaaaataataaaaaatattgagat

SEQ ID NO: 15340 - DNA, 505 bp, Gossypium hirsutum
  unsure (1)..(505): unsure at all n locations
  Clone ID: uC-gsflnu33B144b12b1
tcgggataacatataatttgggtggcttggtttgatgttaaactcagttatatatatatacatactttattcatagtatgtttatttctttgtgtgtgtgttttgttttaggtttttattctaggaatacacaccttggaagggaggcaatgcatgaatttccggcaggggacaaaaaaacaagagatatggtttaccagtgttttaaaagaagtagaagaagaaccccagaccagggtcatggtaccgaaatccaaacccaagtcaacggtagcatcaacagtggtggaaggtgaaatcatgaaagctttcaaaagctggaactccatcctcaacgtgatgccgataggggagggaagtttggtgaaatggactatggaatntgaaaagcaaaatgatgatgtccctgatcctgtcaagtacggcgaagttttaactaccttggctaagaatgccgatacttaccttcttatgtctaattaagtattaaggacacttcttatat

SEQ ID NO: 15341 - DNA, 404 bp, Gossypium hirsutum
  Clone ID: LIB3145-040-Q1-K1-B4
gatggtcttccggatatcaggttgactggacagtgcctggaagctctaaaagaggctggttttgagataatttgggagaaagatcttgctgttggctctccactcccttggtacttgcctttggatacaagccacttctcattgagtagcttccgtctaacatctgttggacgcttcatcaccagaaatatggtaaaggctctagaatttgtgggattagctcccaagggaagtttggtgaaatggactatggaatttgaaaagcaaaatgatgatgtccctgatcctgtcaagtacggcgagtttttaactacctgggctaagaatgtcgatacttaccttcttaatgtctaattaaataattaaggaaactacatatatgaataatttgatcatatgtctcg

SEQ ID NO: 15342 - DNA, 297 bp, Gossypium hirsutum
  Clone ID: uC-gsronu33B139g06b1
atattattcaaataatcataataaacatgcatttaaatattttataatagctgattaagcattagcttagttggcaacgtttgctgagttcaaacgtacttatgaaagcacatgtatgtatgttattgtcatgaaaattaatgtaacctttgctttgtgtatgaaagtacatgcttctcctatgttatatgattaataacaaaaacttttactgttattattatagaatataatgctcatttaagataactttaatacttaataataatcctatggggcgtccgttctaaaggttcc

SEQ ID NO: 15343 - DNA, 264 bp, Gossypium hirsutum
  Clone ID: LIB3120-054-P1-K1-C5
agctagcgagcttcttagcttccctataagttaagcatcgttcaaattaagaggatggagtgcgaactccagatcaattcctaagctgataagtactttgatgcctacaagaccaaagcctatcttatgccaaaaatggccaatcaagtcgtttgagatgtaaaacttgtagagggtattggctggcattcaacgagtacactaaaacaatgatgttatgaacccgatggtaactttgaaacttgaaaggaaatgatgcaaaag

SEQ ID NO: 15344 - DNA, 690 bp, Gossypium hirsutum
  Clone ID: GOSHI-09MAY01-C7186_1
agacattatacaaccctaacttctacattaggcaagaagctcctaaggtttgagagagatggcttcaaaaagatcggcatcggttgccctcttttttgcactcaacattctcttcttttcacttgtcagtgctaattgttcttgcccttcccccaagccaaaaccaaaccccactccctccccaactcctgctgcggaaggaaagtgccccataaatacccttaaactaggtgtatgtgctgaggtgcttggtttagtcaatgtaactgttgggtcacccccagttcaaccttgctgcacccttatcaaaggccttgctgatcttgaagctgctgtttgcctttgcacagcgatcaaaggcaacattttgggtatcaatcttaatatcccagtttccctcagcttgcttctaaatgtctgctcaaaaaaagttccatccggcttccaatgtccctgatcactcttccaaaatctttcttttctcagtgtttttcatgcttagttcgcaacggtaactgtctgtttccctgttgtagtgtttgtttggttgcgaattgatactaaataagtgtagtgctttttatttattcaagtgtttatttttgggtttatgtttttttggaaaagtgaaagtgtagtattattggtatgttggatttgaataaaccatccattgttataagtttgtct

SEQ ID NO: 15345 - DNA, 499 bp, Gossypium hirsutum
  Clone ID: GOSHI-09MAY01-C7166_1
ggcatacggtgtgtctgtctatcgcagccgagaagactccgtagttatactctatggccgcccaaggtcttcctcaggcactgcatatgattccaagaaaccaagtacagccatttaacccagtgaagaatcgtgggttctctgcatttctgtctcgtggcccttctccattaactacttccaaggtttcggtttctgggtttcattcaaaattccctgtggggtcgagtttcagttgttttgctcgaaggggtttcgttgtgagggcagaatctaaccctgaaggtgaaggtgaagctgaagctgaaagaaatgaaaatggtggtgcagaacccgaaacgaaagctgtagccgaagctgaagctgaaggtgaaggtgaaggagacgatgacgctggagaacagaaacccaatgagcctagaataccaaggattaagcttggtgatattatggggatattgaataaaagagcaattgaagcatcagataaggaaaggcc

SEQ ID NO: 15346 - DNA, 364 bp, Gossypium hirsutum
  Clone ID: uC-gsronu33B098d09b1
gttcattcggtgtgtctgtctctcgcaaccgagagggggcctttgttatacaccatggtctcccaagttcttcctcagccatttaacccagtgaagaatcgtgggttctctgcatttctgtctcgtggcccttctccattagctacttccaaggtttcggtttctgggtttcattcaaaattccctgttgggtcgagtttcagttgtttcgctcgaaggggtttcgttgtgagggcagaatctaaccctgaaggtgaaggtgaagctgaagctgaaagacatgaaaatggtgttgtagaacccaaaacgaaagctgaaactgaagctgaatgcgaaggtgaaggcgaaggttaagatccggctg

SEQ ID NO: 15347 - DNA, 1314 bp, Gossypium hirsutum
  Clone ID: GOSHI-09MAY01-C7136_1
tgggtttatgcatagaaacaacaatagcattattgagcttatagattttgttgtcttttttctcttttcctgactaaataagaagaaaaatatcagtcatgtatttataaattattaaatttacaatgtgttgatcgtaatctgctagtaaatggtaaaatgcttctctattctgaattgtccagactcaggtttgattgttagatatggagtgtctgagatgggtacttcaggaaaattgaagaatcgaagtaatattaggtggccagcatggccttaatacgaacctgcagtgatgttgagaagcgaggaacaggaacaagatttgcagaaaaggagatttatttgctgcaaatactacgatgaatcaagacaatgaacaagacaataaccctgatgcgttagatgattttctgctaaagcgcaaacgtggtcgcccaagaaagcacccaaaacatgatttaaatcagggggagaatgctcagatgccttggaatcagaacctgaaccatgctgagaatgcccatgtcccacctggatttggagcagtgaatggaaaccgaccccaccaagtgaatcctgatgcaaatgacgtaatggttggtcaggctgctagtggtgttattgaggcagcattcgatgccggatatttgcttactgttagggttggcaactctgacaccactttaaggggcgtggtcttcaggcctgggcattatgttcccatttcagctgaaaatgatgttgctcccacgcgcccgcccacgcgtccgaacgagattcccttcccacgggagaggactggaacagctcatccactcaacggaccagctctcaccaaccaggtgccacgagcccgggcttcgaatcttggagccataaaaaacaagaatgtgcagccagcggcaacacagttcaattcactactgtccaggggcacggtggtgcctgttgtgctccaacctgctagtttatcaaatgggaaagtttccagccaacaattaagccaaccccctcatttggtctctaaaggcaaacaagtgtctggagctgccaatgcaacaaatgaggaaaaacctgtcaaccagatgccaacagttggaaacccgatatttcctactcaacctcaacctcggagtagtaaccacaccgtgcccaaaggcatacaaagtgaaactgtttcatatagtcaacttccagcagacggtttacaggataaagatgcaaagtcgatgactggcatgccatttgagaaactgctatctgaggtcatgaaaagaggtcaagtccccctacaaccaccagaagttcaag

SEQ ID NO: 15348 - DNA, 427 bp, Gossypium hirsutum
  Clone ID: LIB3165-011-P1-K1-E4
cccacgcgtccgattttccttatccttgaagttgacgaaaatgctctgaaaaggaaaggaacagtaacaagatttgcagaaaaggagatttatttgctgcaaatactacgatgaatcaagacaatgaacaagacaataaccctgatgcgttagatgattttctgctaaagcgcaaacgtggtcgcccaagaaagcacccaaaacatgatttaaatcagggggagaatgctcagatgccttggaatcagaacctgaaccatgctgagaatgcccatgtcccacctggatttggagcagtgaatggaaaccgacctcaccaagtgaatcctgatgcaaatgacgtaatggttggtcaggctgttagtggtgttattgaggcagcattcgatgccggatatttgcttactgttagggttggcaactctga

SEQ ID NO: 15349 - DNA, 1574 bp, Gossypium hirsutum
  Clone ID: GOSHI-09MAY01-C7046_1
gagatattttagggttagaaggttcgaggagtggttttcacgccaataaggctcacttgccattgcaatttgccgacacatcacaagttactgaattcaactgcgatacacaatccctcctcaccactcgcccttctttttttgttgtcttcttcctgcaagactccacgtgtcaaaaacatggacatgacaagcataaaatctcccccaagatgctcattgacaattatttaggacattacgtcgtggttttcttttaatttggtcactgttgaaattgtatggtcatacttgcatatatcgatctcccctgttttcttctctgtaaattttataacttggaacctagacacccatggctactgtttctcaattgaataactttccatgcaagaccttcttaataaccccacaaaacagtaactttacctcaaaacttccggttctgcctctaaactctacaaaaccaactcagaattcgatcaagaaatctcaatttttgacccagaaatcagtccagccaaggcctgttttccaggtccgtgcttcggacgccgacgacgaatggggcccggacaaggaggagccagttgtaatcgagagtcctggagtggccgtggcggaagagaagaagcctgacgatgcgggggaaatagagagcttgaagaaagctttggtggattcgttttatgggacggatcgtggcttgaaagctagcagtgagaccagagctgagattgttgagcttataactcagctcgaggccaagaacccgactccagcaccaactgaggctttgcctcttctcaatggcaaatggattctcaagtacacatcattcccgggtctgtttccactgttgtcaaggggtcaatttccattagttaaggtggaggaaatatcacagaccattgatgccgaaagtctcactgtgcagaactctgttcagttcgctggaccattggcctcaagttctattagcaccagtgctaaattcgaggttcgaagccccaaacgtgtgcagatcaagtttcaagaaggcataattggaactccccagctgacagactccatagtgttaccagaaaatgtggaatttctaggacaaaaaattgatctcactcctattaagggcttgctgacctctgtgcaagacacagcttcatctgttgcaaagaccatttccagccaaccgccattgaagatcccattatcaaacagcaatgctgaatcatggttgcttacaacataccttgacgatgaactgcggatttcaaggggagatgctgggagtgtgtttgtgctcgtcaaggagggcagcgctctcttgaactaaactctgggttccggttcttcttcttcctcagctatttattagagttatctgttgtcttggtttttattaagacagaatgtaagaactatacacttatatgggcaatacatggtcatggactctatttgttgtaacacttggttccaacttgctgtttcaagcaagcaagagttggtatatactacttgaaacatttatacatatcatctatatatatgcctatacatgtttttcgccc

SEQ ID NO: 15350 - DNA, 451 bp, Gossypium hirsutum
  unsure (1)..(451): unsure at all n locations
  Clone ID: LIB3165-014-P1-K1-A5
ccggnccggaaannccggggcggaccaagccgtcgcccaacccttccgaccgatctcccttgtttaattttttgtaaattttataacttgggaacgtggacacccatggctactgtttctcaattgaacaactttccatgcaagaccttcttaataatcccacaaaacagtaactttacctcaaagcttccggttctgcctctaaactctacaaaaccaactcagaattcgatcaagaaatctcaatttttgacccagaaatcagtccagccaaggcctgttttccagatccgtgcttcggacgccgacgatgaatggggcccagacaaggaggagccagttgtaatcgagagtcctggagtggccgtagcggaagagaagaagcctgacgatgcgggggaaatagagagcttgaagaaagctttggtggattcgttttatgggacggatc

SEQ ID NO: 15351 - DNA, 520 bp, Gossypium hirsutum
  Clone ID: GOSHI-09MAY01-C7016_1
caaaaccatggctgccactcactctcttagaacccttccccaccaccatcagttcctctgccttcaaacgcctctccacccctcctcctcctcctcctccaccctcctccttcttcctcaaacccccctcctccttcacctccacctccaccacaaacactctttcctctctctcctctgccaccaccttctctcttccttcttccaccacatccaccactacttcccaagctatctcctttgacaccctccaacaccacctttccaatcaaaacttccgccaggccgacgaagaaacccgccgtctgctcatccttctagccggcgaagcagctcagaagcgcggctacgtcttcttctccgaagtccaattcatctcccaaaatgacctcaaagccattgacgaactttggaaaaaacacagcgacaacaaattcgggtacagcgtccaaaaaaagacagtggcaaaaagtaaaaaaggacttcaccaagttgttcctcaaactgggatggatgaaaa

SEQ ID NO: 15352 - DNA, 626 bp, Gossypium hirsutum
  Clone ID: GOSHI-09MAY01-C7356_1
atccattcaccgcttaatggctcgttcactgggccgggccggaatcaagctacgacccggcaccaaaccttgcacatcttcctctcgtctcgtttcgttgcgaacccaatcgagccaacccaatcatttcgatcagtccgatgcttcttccgagtcttcctccgatccgctcctgcgaaagcgcggggacgccatccatcggatcattgttcgccgttcggcgcccgattggctccctttcctacccggatcctcttattgggtcccgcctcccacgtcgcaatcatacggccttgctcagattgttgagaaattggctaatcctttgaccccggaggagtccttgtccaccaccaccatacgaggttggccttcttccgagtatttcatcaaaggtggatccccccatccggtggaggtagagatgaaatcgaatgcttcatctaaatccgaggaagaaggatgaaaccattctcattgcactaataagagcatctgggctcaataagaagtagatttgttgacgaggagagctttttcagtcaagattggaggagctgtacagatgcaatataaaaatggaactgaaataaaaaccttcttttttccttttcattttaacagct

SEQ ID NO: 15353 - DNA, 269 bp, Gossypium hirsutum
  Clone ID: uC-gsflnu33B099b03b1
tttattttcattcaccgcttaatggctcgttcactttgccaaaccgcaatcaagctacgacccttcaccaaaccttgcacattatcctctcgtctcgtttcgttgcgaacccaatcgagccaacccaatcatttcgatcagttcgatgctttttccgagtcttccttcgatccgtctcttgcgaatactagttgatgccatacattggatctttgtctgccatatttttcttctttttttacttctattactttcactcttcctccatc

SEQ ID NO: 15354 - DNA, 498 bp, Gossypium hirsutum
  Clone ID: GOSHI-09MAY01-C7316_2
ccggccgaattccggtcaccagcgcgtccggacctgggcgacctggcggacctgggcttttcttcagccctttttcctcccatggccgccaccaacacattgatgagctgtggcatcgccaccgctttcccttcagtgctttcctcttcaaagtccaagttcgccaccgctacgccgttgcctagctttggcgccaatgttggccaccgtgttagcatgtcggctgactggatgcctggtcagcctaggcctccttatcttgatggttcagcacctggtgactttggatttgatccacttagacttggtgaggtgccggagaaccttgagaggtacaaggaatctgagttgattcactgcagatgggctatgcttgctgttcctggtatattggtgccagaggcattggggtatggaaactgggtaaaggcacaagaatgggcagccgttcctggtgggcaagccacttacttaggcaaccctgttccatggggaact

SEQ ID NO: 15355 - DNA, 617 bp, Gossypium hirsutum
  Clone ID: GOSHI-09MAY01-C7316_1
cccacgcgtccgcaaaaacaaaataaaataaagaacacacaacaatggccgccaacacactaatgagctgtggcatagccaccacatttccttcacttctttcctcatcaaagtccaagttcagtggcgccgccgtatcgttgcctagtgctgttggtaccaatgttggccaccgtgttagcatgtcagctgattggatgcctggtcaacctagaccaccttaccttgatggctcagcaccaggtgactttgggtttgacccactaagacttggtgaggtccctgagaaccttgagaggtacaaagaatctgagttgattcactgcagatgggctatgcttgctgttccaggtatattggtaccagaggccttagggtttggaaactgggtaaaagctcaagaatgggcagcaattccaggtggccaagccacttacttagggaacccagtcccatggggtacccttccaaccatcttggtcatcgagttccttgccatcgccttcgtcgagcaccaacgcagcatggagaaagataccgagaaaaagaagtaccccggcggtgctttcgaccccttgggatactccaaggaccctaaaaagtttgaggaatacaaa

SEQ ID NO: 15356 - DNA, 374 bp, Gossypium hirsutum
  Clone ID: LIB3166-028-P1-K1-H10
cacacatgtccccccacccatactttaattcccccaactttcttttctttgcaggcacgaccccttaaactaaaacccattttccttccatggtcggctccaacacattgatgagctgtggcatcaacaccgatttcccttcagtgctttcctgtacaaagtccaagttctccaccgatacgcctttacctagctttggcgccaatgttgctcaccgtgttagccatgtcgctgactggatgcctggtcagcctatgcctccttatcttgatggatcaacacctggtgactttagattttactcacttagacttgctgaggcgccctagaaccttgagagatacacggtatgtgctacgattcactgcagattg

SEQ ID NO: 15357 - DNA, 362 bp, Gossypium hirsutum
  Clone ID: LIB3120-044-P1-K1-C2
gcgtccggtcgcgcgttcggtatgcggtgatattgtaatatcatctatgatgctctcgtcatttacttgagttctttcctaataaaggtacaagttaaatagacaccgacgtatcgttgcctagtgctgttggtaccaatgttggccaccgtgttagcatgtcagctgactggatgcctggtcaacctagaccaccttaccttgatgggtcagctccaggtgactttgggtttgacccactaagacttggtgtggtccctgtgaaccttgagaggtacaaagaatctgagttgattcactgcagatgggctatgcttgctgttccaggtatattggtaccataggccttttggttaggaaac

SEQ ID NO: 15358 - DNA, 682 bp, Gossypium hirsutum
  Clone ID: GOSHI-09MAY01-C7246_1
agcatattttatttatttaagtccttcaagctttatttcatgttcttcatcttcttcttttagttgttcatcaattaagcaagcttatagattccagccatggcggaaaagaaatggattctgatactttttttaactttcatcattgcagtgtctcaagttcaccatttatacatgggggaactagcaagcataatgcttgaaaagcttcaacaatggcggaaaccattcaacaatggtggaaagaacttagcaattggacctaacttaacagcttgtcattcatcgtacggtcgaccagatcttctggtttattgttgtccaccggggtttcagactccagtaccctttaccgattttaagttccctgacccatcaccggtccgggtccgacgaccggcgcatcttttaaacgaaagttttatagctaaatataataaagctttatcaataatgaagtcactaccatacgatgatccacgaagctttctccggcaagctaatttacactgtcagttctgtaccggcgcttacgagatgttgaaccgttccggctcggagctgaacatccaccgtacgtggatgttctttccctggcaccggatgatgatatactttcacgaacgaatccttggtagcctcatcggagacgatactttcgcgttgccgttttgggcttggg

SEQ ID NO: 15359 - DNA, 1125 bp, Gossypium hirsutum
  Clone ID: GOSHI-09MAY01-C1996_1
gtctgctgaagctgggagtctccaacgaagtcaaactataggtcaaagaatcatggataacatatttcttagaggttttacctcaaaaccaaagagtcctacatcagagactccagttccatcttcacctctgaagcttcccgagtctctggagcctgatgccagggatgaggaggaaagtccactgatggcaacagttaggggcaagtgcatcactcagttattacttcttggtgctgttgatagcattcagaaaaaatactgggataatttgaaagcaactcagaagattgccataatggacattttgttatccttactagagtttgctgcttcatataattcgtattctaacctcagaacacgtatgcaccatactcctgcagaaaggccccctctaaatcttctccgtcaagagttagcaggaacttccatttatctggatgtcttgcaaaaagtgacatcaggatttaatgacaataatagacaaaacctagaatctaatggttctcaggacactgaagattcgaaactggaaggaatagcagaagagaggttgatttctttctgtgaacaggtactaagggatgccactgatctccagtctacaataggggaaactaccaatgtggatatgcatcgagttttggaattgcggtctccaatcatcattaaggtgcttagaggcatgtgcttcatgaacaataagattttcaggaaacacctcagagaattttatcctttgcttacaaaacttgtctgctgtgaccagttgggtgttcgcggagcactgggtgatcttttcaggatacaattgaaagctctcctaccatgagttatgatgtctatttttgagctgtttttggaggactggggtttcggcattgttgcgaagattccatcggatcatggccttgttgtgttattgcttaccgggcgagaaaaaagaaattagatggtttaaaattgacattctattttttttcccttgcaaacgcttgttattttacaggtagcatagaattcaaatatattgaggtaaaggttgtttcagtgatttacatttatacctgagttacaactagcgaaattttctgtgttatagaatgaatatatttgaatttc

SEQ ID NO: 15360 - DNA, 898 bp, Gossypium hirsutum
  Clone ID: GOSHI-09MAY01-C1986_1
cattgtattggagtgcaactgggcctaaacaaagtcgaatctttagcaaggcagtttttaagcaacccatataaggttatcattggatcacctgatctgaaagcaaaccaatctattaaccaagttgttgaagtcataacagatttagaaaagtacaacaggctaatcaagttgctgaaggatctgatggatgggaaccgaatactaatattcatggagacaaagaagggatgcgaccaagttactaggcagctcagaatggatggatggcctgccctgtcgatccatggtgataaaaaccaggctgaaagagattgggtcctggctgaatttaaaagtggcagaagtcctataatgactgccactgatgtggctgcacggggtcttggtaggatcactgtgttttaggagtcttagcatattcatgtaggtcttgaaatggtgaagataagcgagtctgccggctgctttccagtttcctgagacagtaatttgtggcttgggtgcgagttgccatgatgtacatttatatttttgactgataggcatgatcctccactttaggggagttactggacacaaggagcataatttgcttagacagctgaggtggtgatctataatttggatggttgtgcaatacaaagctcaggcaactctgttcctttgtttgagaagttttatatcccgattttaggttgagggaaaaggaaaattagaaaagctctgttatgtctagttgtatgtacttgcttgaattgtctgaattggcacgactccttataatcaagtgtaagtaatatggttgaagttgtagtgtcgcccatccacggttatggagctggtctttgtggcagcctggttgactcagatttgcttatgttccttgattgggtac

SEQ ID NO: 15361 - DNA, 2267 bp, Gossypium hirsutum
  Clone ID: GOSHI-09MAY01-C1956_1
gcgcccacgcgtccgcccacgcgtccgatttaaaggaaaaaaaaagaacataataaaataacgctgcagaaactgagtgcaaatcttactaagccccagctcgaactcctctgtcccattaactgtatgagagagaggaaatctgattttcaatttcatcactgcatcttctctttgcttttggcctcaccttcagaaaggtaagtcaagttctttagattgcttgccgctttttgagtttcaagatctatgaaccccagatctgtagagccttgatcttattgctgaattcttgaattttagtagtttgggttcttttgctttttccttaataactagatttagtttattgtaaggtcattttagctcattcaggatgttgggtcgtcctgggttatctagaactggaagctttaggcctgagaatctaggacaaaatgctttgcatatgattggcaatctttgtttcactatatttgtaattggtgtcctagttttcaccattatagctgctacttatgagcctgaggaccctcttttccacccttccaccaagctcacggctttcctcacgtccacatcaaatgccacctttcaatcggataacacggttgttaaaaccggagaggactttatggccgccaaccagactgcatttgccacttttatcaatgtgacggatgtagtagaaatcaaggaggagcgtactgaccaaactagttcatccgaatgcgagggtgattcgagaaaaccacttaattgtagggacccagaagtgttccatttgatgatgaaggaggcgattgagcgttttaaggatatacatttttatcggtttggaaagccagcaccagggcctgaggagaatacttgtgatatggcctggcggtttaggcctaaggaagggaagacagctgctttttataaggattataggcggtttgtgattaatagatctgagaattgtacacttagtgtggtgagcattggggattatcattcaggtgtgaatgcaaggaagaggaagaataagaatcaaaagctgggatttgagaagacatctggtaagcaggagcaagttgttgcggctttgcctgttgttggggaagcagtgaatgattcgcttccagtggtcgagtctgaaaatgcatttagtcgtgggaagtatttgatttatgtgggtggtggagataggtgcaagagcatgaaccattacttgtggagcttcttgtgtgcattgggtgaagcgcaatatttgaatcggactttggttatggatttgaaactttgtttatcttcaatttatacttcctcaaatcaggatgaggaagggaaggatttcaggttttactttgattttgagcatctgaaggaggccgcatcagttttggatcacgagcagttttggcaagactggaataaatggcaaaagaaagatggcttgagtcttcatcttgttgaggattttagggtgacgccaatgaagctttctgaggtaaaggattctttgattatgagaaagtttggattggtggagcctgataattactggtacagggtttgtgaaggagagactgagtctgttgttcaaaggccatggcatctggtatggaaatcaaggaggttgatggatatagtgtcggcaattgcgtcaaagttgaactgggattatgactctgttcacattgtgagaggggagaaggcgaggaacagggacctgtggcctaatcttgcccaagatacctcacctgatgcccttatctcaaccttgcagaataagattgaagatgggaggaatgtttatattgcaacaaatgaacctgatacatccttctttgatcctcttaaagacaaatattcaactcactttcttgatgaatataaggatctttgggatgagaacagtgagtggtattcagaaacaaaaaaccttaacaacggagtaccagttgaatttgacggttacatgagggtctctgtcgatacagaagttctcttgagagggaagaaacagattgagactttcaacgaactgaccaacgattgcaaagacggtatcaacacttgcaatactgcatccagttaaaaccctacgaatccagtccgagacttcatcacaacatcaaggcatatccacgtgtatttttaactatctttgctgcctttaataaaatttatgccttacgtagtaccgtattatcatctggtggcatttttgaattttgtacttgtacaatatttattatcagtgtttgaggacttacatc

SEQ ID NO: 15362 - DNA, 1070 bp, Gossypium hirsutum
  Clone ID: GOSHI-09MAY01-C1946_1
attcagactccctccatttcaacttctccctcgcccgcgcgggctggctctctcactctatccctttcctcttgttcttctgcataggcagggacgcctccaaccagctatactactaagtcattactcatcgtttctgttgctaaagtatgcgcaagactgggtcctgctattgggatatattcaaatctgcactccttatactttaatagtcgctcatgaatatcatgaatgtaggcacataccttcgatttatctgggatacttgtcttacaccttcttatgattgatcaagagtctacttcaataacgacttttttccaacgcatgtctatgccgatttgggtcgctctccggcacgcaggggccgcagctgcaaaggctgatgcaacccgttgatatatctccgagcatgataaaagaacctttccctcactctctctggacacaatccccacagccgctagattaaacttttcgtcgtatgctgcatcaaaattaatcttcacgacctggtcagattgcccatagtgcacaacaaaatatcctacactgtgatgctgagttcttcacaaatacccaggacatttacggaaaagatggtccatgttctctgttcctactctacaacgggggcatactgttgtgtttgttaactttattagtagcatattaactcgtgtagataggaaattccatgatatcttccagattgtaatttttatttttgaaggaaggttcagaagccataattttttgtagaactccttatagtcagcttgtaaagagtaagctctaggatcattttccgacgcctcagcactccagacccaaaaatcttcatgaggttcttctgccaacggaatgcaaataatcttctcggcaacatcctccggaaaggtagaagctatcaactctttcttccatgttctattactttgatcaattaatttggcaactttaaaatcattgaaattcgtaattaaagctgatcacctgttctttttcaaatgacaaaaccaacataaaaactaagacgggggagcctctttaaaaaagcaaccttaaaa

SEQ ID NO: 15363 - DNA, 509 bp, Gossypium hirsutum
  Clone ID: LIB3583-017-P1-K1-E8
gtctatgccgatttggatcgctttccggcacatgagtacctcagtcgcaaaggctgatgcaatcggttgatagatcttcgagcatgataaaagaaccttgccctcactctctctggccacaatccccacagccgcttgattaaaattttcgtcgtatgctgcatcaaaattaattttcacaacctgatcagatttactcacttttttgtgcactctatcattcttatctccccaaattgcccataatgcacaacaaaatatcctacactgtgatactgagttcttcgcaaatacccaggacattcacagaaaagatggtccatattctctgttcctactccacaacgggggcatactgttgtgtttgttaactttcttagtagcatattaactcatgtagatagaaaattctatgatatcttccagattgtaatttttatttttgaaggaaggttcagaagccataattttttgtagaatccctcatagtcggcttgtaaagcgtaagc

SEQ ID NO: 15364 - DNA, 335 bp, Gossypium hirsutum
  Clone ID: LIB3493-005-P1-M1-F1
gcactgcgtactgtgtattagcccaacgcctcagcactccaaacccgaaagtcttcatgaggttcttctgccaacggaatgcaaataatcttctcggcaacatcctccgaaaaggtattatctgagtacaatctttatcccatgccccattcttccacatccaaaacaaaacatcggtaaattctcatgcttaaaaggaacacacactttattaacattatcactagagacaaaaatacctcggcgaattggtttctgaacatccaagttaattctgagctgacaaaagacttcattaatttcaaatctgagaaccccacccaacgtaacaccga

SEQ ID NO: 15365 - DNA, 465 bp, Gossypium hirsutum
  Clone ID: GOSHI-09MAY01-C1916_8
ctttctcgtccgaaagatattaccccaattggtgggttccctcactatggtgttgtgaaaagtgattacctgatgatcaaaggaggtgtgttggacctaagaagagggtggttaccttcgtcagtctcttattaaccagacatctcgtgtggctctggaggaaatcaaactcaagttcatcgacacctcctcaaagtttgggcatggacgtttccagacaacacaggaaaaacagaagttctatggtcgactcaaggcataagtttgggaagtggtcaggaattttgggctattgtatgtttaggttttgctttacttcatgcttagtatgtcttattctctattcctttttgaaatggaacagtttgggtttcttttgttctgtcagtctggattggatgtttgaacttctgaggattctcaacagtttttgcattatatattggtcttaaaccacacaccctc

SEQ ID NO: 15366 - DNA, 384 bp, Gossypium hirsutum
  Clone ID: GOSHI-09MAY01-C1916_7
gtggcttccctcaatatggtgttgtgaagagtgtcgcgatctagaactagggaggctgtgttggacctaagaagagggtggttacgcttcgccagtctctgattaacctgacatctcgtgtggctctcgaggaaatcaaactcaagttcatcgacacctcctcgaagtttgggcacggacggttccagacaacacaggagaaacagaaattctatggtcggctcaaggcataatcttggaaaaaccggtcggaaattcatggttggattttgttttgcattttatcaatttgatgaatgtttgaatttgctgagttggttcagtttttgcgctatagattgttcctagttttgaaccaaatatacccaatatcgtacttgtttt

SEQ ID NO: 15367 - DNA, 459 bp, Gossypium hirsutum
  Clone ID: GOSHI-09MAY01-C1916_6
ccacgcgtccgaacaaaaccaaccccaacctcccttctcccccaccaaataaagccccacgcgtccgaaaaaaaaccagagagtctccgtttcgagttgggttttttaatatttgtttcactttttcagtttcgtccttgtgtctcccctcctttcggtttctctccgccccccccccaataaaaacgaaattcagggaattaaattccctataaaatcgtttctcgtaaatttccttttcgtttttaatcaaacccgatttcctggtttctttttcttcatcgatcgtcgccggcgtaaaaacaagaaaaatcaaaagcaaaaagcttgccgaattagaaaaagaaattatgggttctgaacagaatgaaggaacaagctttccaccatcggagccaaagctttgtgccaacggttgtgggtttttcgggacggcggcgaatatgaatttatgatcaa

SEQ ID NO: 15368 - DNA, 678 bp, Gossypium hirsutum
  Clone ID: GOSHI-09MAY01-C1916_5
gttatcaagaaagatataacgagcaccctgatgatgatttcgacccaaaagcactcccaatagttaaagacataagcttcacggggatacatggtcaaggagtccgtgttcccgttcgtatacatggtagtgaagatattcctatcagaaacgtgacgtttagggatatgtccgtggggttaacgtacaagaagaaacacatattccagtgtgccttcattcaaggccgcgtaatcggtactatcttcccagctccatgtgaaaaccttgatagatataatgaagaaggacaacttgtgaaacgctccacggcccagaacataaccgatatagattatgacatatgagaagacatcgtttcaccagcagttagccattcttttgtaggatcaaaatctcaaaggcttagaactgtatgtcttggagaaatggggcttggttatttttctttggtccctttctcggctcgctattacttgtttgattcatggagagaggggaagattttaaagtagttttatacatttttcatcatcttgctgaaattcatattcatggtatgttgattcccctgctattgaaaacaaggttgattttgcttacaagttctttgagaagcaagttcgcatcgatgcttttttcctgaaggatgaaatgattgatatcattggtgtcact

SEQ ID NO: 15369 - DNA, 641 bp, Gossypium hirsutum
  Clone ID: GOSHI-09MAY01-C1916_4
tttctctccgcccccccgcgtccgcccacgcgcccggaattaaattccctataaaatcggttctcgtaaattgccttttcgtttttaatcaaacccgatttcctggtttctttttcttcatcgatcgtcgccggcggaaaaacaagaaaaatcaaaagcaaaaagcttgccgaattagaaaaaaaattatgggttctgaacagaatgaaggaacaagctttccaccatcggagccaaagctttgtgccaacggttgtgggtttttcgggacggcagcgaatatgaatttatgttcaaagtgttaccgggacctccgtgttggggaggagcaagcggcgaaggcgaaagctgttatggagaaatctctcagtatcaaaacgaagcatgaacctgtcgttgtggagacttttaagcctcatgtgggttcttcgtctacatcgattgagcaacaacaaccggctgttgttgccgttaatcaacaaccggaaccaaaggcggcgaacaggtgttttatttgtaggaaaaaggttgggttaactgggtttaagtgcaggtgcgagaatacattctgtggggagcatcggttcccagaaaaacacgagtgttcatttgatttcaagggtattggacgtgatgccatt

SEQ ID NO: 15370 - DNA, 907 bp, Gossypium hirsutum
  Clone ID: GOSHI-09MAY01-C1916_3
cccacgcgtccgcccacgcgtccgcccacgcgtccgcccacgcgtccggtgcgagcagccgcagccagcaagcagcagtagcaacagcaggagcggaagaatgtctcacaggaaatttgagcacccaaggcatggttcccttggatttcttccaaggaagcgagcctctcgtcacagaggaaaagtgaaggcattcccaaaggatgaccctaccaaaccttgcaagctcactgcctttctggggtacaaggctggtatgacacacattgtcagagaggtcgaaaaacccggatctaagcttcacaagaaggagacatgtgaagctgttacaatcattgaaacccctcctatggtgattgttggggtggttggatatgtgaagacaccacgtggccttcgctccttgaacaccgtctgggctcagcatctgagtgaggaagtcaagcgccggttctacaagcactggtgcaagtccaagaagaaggcttttgtcaagtactcaaagcagtatgaaaggtgaagaagggaagaagggtatccaagcacagttggaaaagatgaagaaatatgcaactgttattagggtcttggctcacactcagattaggaaaatgtagggattgaagcagaagaaggcacacctgatggagatccaagtcaatggtggaacaattgctggcaaggttgattttgcttacaagttctttgagaagcaagtccccatttgatgctgttttccagaaggatgaaatgatcgatattattggtgtcacaaagggtaaaggttatgaaggtgttggacgtgatgccattgctaaggcaaatcccgttgttaaagctgataagggcaagaggttctgaaaggggcggaagttgttcgttccgatgcttgttttttagagtcttt

SEQ ID NO: 15371 - DNA, 710 bp, Gossypium hirsutum
  Clone ID: GOSHI-09MAY01-C1916_2
cgcgtccggaacttgcccgcgatcccaccgcactccgtgcacattgctatgaggaggactcattgccatgtgattcctgtctctatctcgtacaattacagtgggcggaaccttttccctctttgcactgttgtcagctatttctgttctctttgcttacaaatgtgttccggagactttgaagcctcatgtgggttcttcgtctacatcgattgagcaacaacaaccggctgttgttgccgttaatcaacaaccggaaccaaaggcggcgaacaggtgttttatttgtaggaaaaaggttgggttaactgggtttaagtgcaggtgcgagaatacattctgtggggagcatcggtacccagaaaaacacgagtgttcatttgatttcaagggtattggacgtgatgccattgctaaggcaaatcccgttgttaaagctgataaggtggagaggttctgaaaggtgggggagttgtttgttggatgaatgtgtttcttcccttttcttactgcctatctcggggttatcgagagagcagttagatttagggtcaatggaaatattgtggggtgatttactgatttatgttgttactggtgtttttgttggggttggggttggggttgtgggatatgatttgggagggggagggggatgttttaagggtgattgaaaaatggatcaatgaatgtttctagttttcattttt

SEQ ID NO: 15372 - DNA, 1465 bp, Gossypium hirsutum
  Clone ID: GOSHI-09MAY01-C1916_1
cggcgcgtggggaagcagccagccacagcattcgccgcacggcatcagtctcatcaggcggggaagaatgtctcacaggaagtttgaacacccaaggcatggctcccttggatttcttccgaggaagcgagcttctcgtcacagagggaaagtgaaggcatttcctaaggatgacccaagcaaaccttgcaagctcactgcctttttgggctacaaggcaggcatgacacacattgtccgagaggtcgaaaaacctggatctaagcttcacaagaaagagacatgtgaagctgttacgatcgttgaaacccctcctatggtgattgttggggttgttggttatgtcaagacaccacgtggtcttcgcagcttgaacaccgtttgggctcagcatctgagcgaggaagtcaaacgtaggttctacaagcattggtgcaagtccaagaagaaggctttcaccaagtactcaaagcggtacgagagtgaagaagggaagaagagtatcgaggctcagctggaaaagatcaagaaatatgccactgttgttagggttttggcccacactcagattaggaaaatgaagggattgaagcagaagaaggcacacctaatggagatccaagtcaatggtggaactattgctgacaaggttgattttgcttacaagttctttgagaagcaagtccccattgatgctgttttccagaaggatgaaatgattgatatcattggtgtcacaaagggtaaaggttatgaaggtgttgtcactcgttggggtgtcacacgtctgccccgtaagacccacagaggtctgcgtaaggttgcttgtattggtgcctggcatcctgccagagtctcctttacagttgccagggcaggtcagaatggataccaccaccgtactgagatgaacaagaaggtctacagggttggcaaggttggtgatgagacccactctgccataactgattatgacaggactgagaaagatattaccccaattggtgggttccctcactatggtgttgtgaagagtgattatctgatgatcaaaggtggctgtgttggacctaagaagagggtggttacactccgccagtctttgattaaccagacatctcgtgtagctctagaggaaatcaagctcaagttcatcgacacctcatcaaaatttgggcatggacgtttccagactacacaggaaaaacagaaattctatggtcggctcaaggcataaatctgcaaattggtcaggaatttccggctatcgtatgtttaggttttgctattctctgagcttttagtttatgttgattctctattatgttttgaaatgcattggttggattaattttgttttatcaactctttttgaatgtgtggataactggggttttgcaccagttagaaaaccaattatacccaatgttttactttttatcagagttttccttttgatttgatt

SEQ ID NO: 15373 - DNA, 354 bp, Gossypium hirsutum
  unsure (1)..(354): unsure at all n locations
  Clone ID: uC-gsflmaxxa009c01b1
tgctgcagccagccacagcattcgccgcacggcatcagtctcagcaggcggggaagaatgtctcacaggaagttgaacacccagctgtgtcctagtatttctttcatgctcttggcttgtctcatttcctgcactacagcacgggattccagcagagaagctctacaagttacaattggtattggcaatggcaacttaagcaagggctgtaatgataaacaccataatcttccattcaaactcaattgtaagttgccaacaacccccttagcaaatgaagtattgaagtttgctgatcaaagactggctttagtgcatcccataatccanaaatttaagtctttaatcacttca

SEQ ID NO: 15374 - DNA, 315 bp, Gossypium hirsutum
  Clone ID: uC-gsflmaxxa009d09b1
cagctttcaaaatagttccccactttctttctctcatggtttcatttcaatcacataacaagtaacatataggtttaaacatagtaaaacaatgagcatcattatttctttcatgctcttggtttgtctcatttcctgcactacagcacgggattccagcagagaagctctacaagttacaattggtattggcagtggcatcttaagctggaggctgtttatggtttacatcaacatggtggatgggaaccggtttgaaaggagaccaccactttgggaaaccagttgggttcttctataaccttccatggtttt

SEQ ID NO: 15375 - DNA, 167 bp, Gossypium hirsutum
  Clone ID: LIB3146-058-Q1-K1-B6
tcgtaacataataaagcacacctaatttttatttttatcaatgttcaaacaataacctgcgaggggtatttttcttacaagttctttcaaaaacaaatccccattgatgcttttttccaaaatgataaaatgatcgatattattggtgtcacaaagggtaaaggtta

SEQ ID NO: 15376 - DNA, 365 bp, Gossypium hirsutum
  Clone ID: uC-gsflmaxxa009c07b1
aaaataatacttgatttttagttttgggtgaattatgaatgtaataataatgtatcacttgaagattgaacacccaagcatgtttccctggtatttcttccgaggaagcgaagcttctcgtcacagagggaaagtgaaggcatttcctaaggatgacccaagcaaaccttgcaagctcactgcctttttgggctacaaggcaggcatgacacacattgtccgagaggtcgaaaaacctggatctaagcttcacaagaaagagacatgtgaagctgttacgatcattgaaacccctcctatggtgattgtggggttgctgtttatgtcaagacaccacgtggtcttcgcagcttgaacaccgtttg

SEQ ID NO: 15377 - DNA, 346 bp, Gossypium hirsutum
  Clone ID: LIB3147-001-Q1-K1-E8
cgtttcaccagcagttagccatttttttgtaggatcaaaatctcaaaggcttagaactgtatgtcttggagaaatggggcttgtttatttttctttgttccctttctcggctcgctattacttgtttgattcatggagttatgcaggggaagattttaaagtagttttatacatttttcatcatcttgctgaaattcatattcatggtatgttgtttcccctgcaaaaaaaaacaaggataattttgattaaaagcactatcaaaagaatagtacctatctgatgctgatttccagaatgattatttgcttgaaatcatcgtcatcaataaaaaaggggcggccct

SEQ ID NO: 15378 - DNA, 1196 bp, Gossypium hirsutum
  Clone ID: GOSHI-09MAY01-C1816_1
tagggtttgtggagtacttcgtttttggttttgttcgctctttaactagaaaaaaaaataaaaataaaacatcaatcaattcccagccatggaaggagacttactagattgggaggtgctccacaactcggattctgactctaattctatcctggttaactcgccgcagttgaggaatcttgagggaatcgaaggtgatactggagggatgataaggtctgattacttttctcttgataatcagagtatgtatgcgaaggaaggggatgcaagtgaagaaggctctattgagtcagataatccgagttggattgatcccaagccggagactcagtttaggaggaataattcgggtgatttttggtccgattcgggtagtgatcggtcagatgatcgtaaattaagtgatttctctgtgaaaaaagacttggagtccgctgagaatgaggtttgtttacaagggattggtaaaccggaagctagggctgacggattgggtacatttaagcctgatggtgccgaacttactgaattggataggataaaggaattagattttggtgggtttggcgatattcaagatcagaataaggatttgggcgagttgtggcctgatgctggcggagatggtttggtttcaatgaagtttaaggatgttgaaaaagaggctagcattgattttggtgattgtatggaaaagggagcggagatggagaattcaggcgagcttgataataggaatagctcagctttggatttgggagtaggacacggtactacggctggtaatgaaggttctaccattgatgaaatgaagttaagtgcgaaatcagttaatgaggaggagaagaagaaggtagtatggtggaaagttccttttgagctcttgagatactgtgttttaagggttagccctgtttggtccttctctgtagcggcggctgtgatgggttttgttatattgggacgtagactgtataagatgaagcggaagagcagtaacttgcagctgaaggttaccatggatgataagaaggtgtcccagtttatgactcgtgcagctcgtctgaatgaggctttttcagttgtaagacgtgtcccaattatacggccttcgcttcccaccgctggggtgaatacatggtctgtgatgagtatgagatgaaggtgatactgtgtaaaaaaaaaaaaaaaaa

SEQ ID NO: 15379 - DNA, 379 bp, Gossypium hirsutum
  Clone ID: LIB3165-009-P1-K1-E4
cccacgcgtccggtggagttctttttttttggttttgttcgccctttagcagggaaaaaaaaacatcaatcaattccctgccatggaaggagacttactagattgggaggtgctccacaactcggattctgactctaattctatcctggttaactcgccccaggtgaggaatcttgaggtaatcgaaggtgatactggagggatgattaggtctgattacttttctcttgataatcagagtatgtatgcgaaggaaggggatgcgagtgaagaaggctctattgagtcagataatccgagttggattgatcccaagccggagactcagtttaggaggaataattcgggtgatttttggtccgattcgggtagtgatcgg

SEQ ID NO: 15380 - DNA, 436 bp, Gossypium hirsutum
  Clone ID: GOSHI-09MAY01-C1836_2
gttgctcctgatggcaagcctgctagcgtaagctactcgtcaacaatggacattgcaatcataagagaagtattctctgaaattgtttccgcagctgaggttctgggaagaaaggatgatgctcttattggaaaagtccgcgaagctctggcgaagttaccaccaacaaaaattgctagagatggttccattatggaatgggcagtagattttcaggacccggaggtgcatcaccggcatgtatcacacctttttggcctgtttccagggcacacgattactgttgaaaagactccagacctttgtgaagctggtgattttaccctctttaaaagagaggggtggagggtccaggatggtcaacaacatggaaaactgctttgtgggcacgtcttcataatagtgaacatgcttatcgcatggtcaagcatttaat

SEQ ID NO: 15381 - DNA, 467 bp, Gossypium hirsutum
  unsure (1)..(467): unsure at all n locations
  Clone ID: LIB3582-048-P1-K1-H6
ccgatcgggcacgctcgctatgaatcgagttgcagtcaccacaaatgctgagatgtcatatggatggcagagatttcaggacccggagtgcattacggcatgtatacacctttttggcctgtttccagggcacacgattactgttgaaaagactccagacctttgtaaagctggtgattttaccctctttaaaagagtctgaaacaggggtggagggtccaggatggtcaacaacatggaaaactgctttgtgggcacgtcttcataatagtgaacatgcttatcgcatggtcaagcatttaataagtttggtggatccaactcatgaatctgactttgagggaggactctacagcaacttgttcactgcacatcctccttntcaaattgatgccaattttggtttttcagcagcagtagcagaaatgctggttcaaagcaccacgaaagatctatacttactccct

SEQ ID NO: 15382 - DNA, 412 bp, Gossypium hirsutum
  Clone ID: GOSHI-09MAY01-C1596_4
cccacgcgtcgcccacgcgtcgaaaagtctctgacacttgcaacactataaactacacataaaatctgtgcctgccctttgctctgcacacctcgggatatcagtttcaactccactcatcccacgggttactctcgtttacggagttttttttctgttctgcacttccctgtttagttttaagggtgaactgtttggattttctggttgagtaccgagtccatatattggtaagttcaaggaaggaacttgggcatcatgggtcttaaggcattagactatgagacaatgaatgaaaacgtgaagaaagttcaatatgcagttagaggtgagttgtatcttcgagcttctgagcttcagaaggaagggaagaagattattttcacaaatgttggcaatcctcatgctcttg

SEQ ID NO: 15383 - DNA, 853 bp, Gossypium hirsutum
  Clone ID: GOSHI-09MAY01-C1596_2
ttcaaacttctaaatgcatttctatgcctggattttctagtattctggcttggctccttattcactgataattgcattgatcgcatcgcaagaagctctctttcactttatgattttccttttaatccttttcattaatgcatgttttcctatcatatgaaccttagagccgatgtttttttttcttttcaaatgtttagacccgattttaagatttaggattagagcgaatttatagtgattatattataacgttcgaactgttttgctgattgttactctcgtatcggaactggaaagccaactaataaacttatatgcaaaaccaaaatgttaaattggacttatgctttgtagttcttttacaacaggttgagtaccgagtccatatatcgttaagttcaaggaaggaacttgggcatcatgggtcttaaggcattagactatgagacaatgaatgaaaacgtgaagaaagttcaatatgcagttagagattattttcacaaatgttggcaatcctcaagctcttggacagaagccactgactttccctcgtcaggtggttgctttgtgccaagctccatttctgctagatgatcctaatgtaggacttatatttcctgctgatgccattgcaagagcaaaacattatctttcgttgacttctggtggtctaggtgcatatagtgattccagaggtattccaggcgttaggaaggaggttgctgaattcattgagaggcgtgatgggtatcctagtgacccagagctcatatttctcactgacggtgccagcaaaggtgtgatgcagatcttgaattgtattatccgtggtcaaggggatggggttttg

SEQ ID NO: 15384 - DNA, 1382 bp, Gossypium hirsutum
  Clone ID: GOSHI-09MAY01-C1596_1
cgacccgtccgcccacgcgtccggaaaaagtctctgacacttgcaacacaataaactacacataaaatctgtgcctgcccttttctctgcacacctcgggatatcagtttcaactccactcatcccacgggttgagtaccgagtccatatatcgttaagttcaaggaaggaacttgggcatcatgggtcttaaggcattagactatgagacaatgaatgaaaacgtgaagaaagttcaatatgcagttagaggtgagttgtatcttcgagcttctgagcttcagaaggaagggaagaagattattttcacaaatgttggcaatcctcaagctcttggacagaagccactgactttccctcgtcaggtggttgctttgtgccaagctccatttctgctagatgatcctaatgtaggacttatatttcctgctgatgccattgcaagagcaaaacattatctttcgttgacttctggtggtctaggtgcatatagtgattccagaggtattccaggcgttaggaaggaggttgctgaattcattgagaggcgtgatgggtatcctagtgacccagagctcatatttctcactgacggtgccagcaaaggtgtgatgcagatcttgaattgtattatccgtggtcaaggggatggggttttggttcctgttccacagtatccactttactcagctacaatatctctctttggcggttcacttgttccttactacctagaagagactgcaaactgggggctggacgtaaacaatcttcgtgaatcagttgcacaggctcgcttcaaaggaataactgtgagagcaatggtaattattaaccctgggaaccctactggtcagtgtctcagtgaagctaatttaagagaaatattgaacttctgttaccaagaaaacttggtattacttggagatgaggtttaccaacagaatatataccaggacgagcgcccctttatcagttctagaaaggtgttgatggatatggggccaccaattagcaaggaagtccagctcgtttctttccacactgtgtctaaaggatattggggtgaatgtgggcagcgagggggatactttgagatgaccaacattcctccaaagacagttgacgagatatacaagattgcatcaatatccctcagtcctaatgttcccgctcagatatttatgggattgatggtcaacccactcaaacctggagatgtttcatatgatcaatttgttagggaaagcaaaggaatccttgaatcattgagaagaagagcaaggataatgactgatggatttaacagctgcaagaatgtggtttgtaatttcactgaaggtgccatgtattcttttcctcaaatacacttaccaccaaaa

SEQ ID NO: 15385 - DNA, 399 bp, Gossypium hirsutum
  unsure (1)..(399): unsure at all n locations
  Clone ID: LIB3165-005-P1-K1-G3
gtgatacccatcatatatatgtgtgtatgtatggattagtatctactgtcagtgtaggtgttttaacttcacaagcagagttgaaaaacatgttatattatatttgaaaaaataaaataagaataagaatagagataatgacagtttttttattccatttgtagagctaaaaaaaaaacctttactagcagtggatatgataaattatcttttttcaagattttggttttaactgcgggtaaaaaaacaaatgtaggcaatactaaagctcttggacagaaagccaactgactttaccttgtcaggtggttgctttgagccaagctccatttctgctagatgatcctaatgtaagacttatatttncttgtgatgccgttgcacgagcaaaagattatc

SEQ ID NO: 15386 - DNA, 272 bp, Gossypium hirsutum
  Clone ID: uC-gsronu33B101b08b1
tcgtcacgcgtccgcccacgcgtccgctacacataaaatctgtgcctgccctttgctctgcacacctcgggatatcagtttcaactccactcatcccacgggttgagtaccgagtccatatattggtaagttcaaggaaggaacttgggcatcatgggtcttaaggcattagactatgagacaatgaatgaaaacgtgaagaaagctcaatatgcagttagaggtgagttgtatcctcgagcttctgagctttagaaggaagggaagaagat

SEQ ID NO: 15387 - DNA, 1679 bp, Gossypium hirsutum
  Clone ID: GOSHI-09MAY01-C1556_1
aaacatccaaaagctttgttgggaaagcccttggacaacctggtttgaaactatctgtccgagtaggggagacaggttttagagaagttgtggcttaccttctggactacggtcattttgcgaatgtgcctccgactgctctggtgaagattactcactcagtcttcaatgtcaatgatggggtgaatgcacataagcctctcaagaagaatctggttagcaagattgcgtctttccaacaatttataccacatgattttgatgctagcgatcatggaacctcaagcttccccgtttctgctgtgcaccgcatagggatacttgatatacgaatatttaacacagacagacatgcaggaaaccttttagtgcggaagcttgatggcattgggaggtttggtcaggtagaactcattcctattgatcatggcctttgcttgccagaaactttggaggatccatactttgagtggattcattggcctcaggcttcaattcctttctccgaggatgaacttgagtacatagagaagcttgatcctgttaaagattgcgagatgctgcgaagggaactccccatgatacgggaagcttgcctacgtgttctggttctctgcacaattttcctcaaggaagctgcagccttcggtctctgtcttgctgaaattggtcagatgatgagtagagaatttcgagctggagaggaggaacctagtgagctagaagttgtttgtcttgaggcaaggaggttgattgcagagcgggagctgtcatctcctaagtctgaagtgggagatgcagagttccagtttgaaattgactgtgaggagccagaattggagttcatcccaaaaatggtaactgatgattctatgaccagagcatcattccaatttggaaatggatttgtgaataaccaccaccgtttaccactttcgaagctggaggaatgctttgaggaagatgaagaaagtgaattggaagctgagcagaatggtttttctcctttcgaagctcttgaaaggatcccatccatttcgaagctttcaatgtcacttagagatacttgcttatgtgacaagagccagaaatattccaaattttcaggaacaaaacaagaaaatgggtatcttacaagctcatccgggcataggagtgcaaatgagcaacttcctgcaagtgtgagctttgtgaagctggctgacttgaatgaagaggaatggatcttattcttggagaagttccaggagttgctgaagccggctttcagtaaacgaaaatctgttaccataggtcaaaagcagatgcagaggcttggtacatcgtgccagttttgagatttgaggtgataccaaaagaggcaagttgagttgagtgaagaagaaataagagattgtaggtttgttgggagttgagatgcatggattgttaggatagatacagtgatatggattttgcatggaatgttgtaggatgaattcccctgtaaatattctttggcttcagccaagtggagagggagatgaggttagtagaattgcttggatttttttttccttaaaccctttagctttgattttcttcctttggtcccctttgactttccaccttaactttgtttgataaataatctgtagattgaagttaaaaaggaaatgaatatttatgtgactttgggc

SEQ ID NO: 15388 - DNA, 1110 bp, Gossypium hirsutum
  Clone ID: GOSHI-09MAY01-C1516_1
ctcagtttcaatagtcctctttaacccacgcggccgtgccaacctccaaactcttcatcatgctcgcagtactcatatgtatggctccaatcaacacttgcagcagcgccgccgcttctaccgcctccctggcaacaagaccgccatcgccaaagtttccagccatttttgtatttggtgattcaactgtagatacaggcaataataactatgtcaaaacgttgttcaaagctaacctgccgccgtatggcgaaagctttcccggccacattccgacggggaggttttccgacggaaaacttgtccccgatttcctcgcatcgtttctagggatcaaagacgatgtcccgccgttcctgaagccaaatctgtcggaaaatgagctccgaactggcgttacgttcgcgtcagctggatcaggatatgattatttaactactaggttatccaatgccatcccagtttcaaaacaagttgagatgttcaagagttacataaacaagcttatgggaattgttggaaaagataaggccaacaacatcattggcgaagctctggtaatcattagtgcagggactaatgatttcgttttcaatttccatgatattccgaccagacgattggagttcgacattgttggataccaacattttctgcttcagaaactagaagattttctcaaggaattgtatgaactcggatgccgaaaaatgatcgtagccggactgcctcccatcggttgcttaccgattcaaatgacggcgaaatttcaaattccaacaaatcgaaaatgcttggaagatcagaactcggacgctgaatcttataacaagaagcttgccaaactgttgcctgaactacaagcaaagcttccagggagcaagcttgcatatgcagacgtttatgaaccattatttgacatgattaattatcctcaacaatatggatttgtagaaataaagaggggttgttgtggcactggaatcatagaggcattattcttgtgcaatgcaatgactccaatatgtagaaatccttcagaatttttgttttgggattgcattcatccctcccaacaagcttatatttaccttgccaattacattatcg

SEQ ID NO: 15389 - DNA, 409 bp, Gossypium hirsutum
  Clone ID: GOSHI-09MAY01-C1496_3
ggcgggaccggcccggacgacccacgcgtacgaccacgcgtcggccgcaagaaacatggcgttgtcgacagtgttgatgatgatgaagagacgcgtcaccacacaccgctataaggcccgccaccataagcagccatgatgactatgacgactagtcagactggccgttccctctacaaatggaaatctgcagtaatagctattaaataaatgatcgaggcatgccacctttgatcgtttcttctaccatttccgtgtgttttttgtgtgtgtgtcagtgtttgatcgtcattaaaatgcccgaccaattatggttttgcgcatctttcttgttttattactaatcatatctatcatatcttatttaggtcgttctattttttagatctaatgttatctttatcttttc

SEQ ID NO: 15390 - DNA, 739 bp, Gossypium hirsutum
  Clone ID: GOSHI-09MAY01-C1496_2
gtcattttacccattttgagcagcaacgttgttttcgatactttttcatccttgtttcgcggttgtagcttgttggtgtattttataactagattttgaaacaaaaaaaagtgagaatcatggtggtttcgagtttcgtttttcggactataatatcctaagcttgataattctgccctttaatttgctatctgactttgtcgagatcattaagctacgtttgttacttaccattcggattattttgcagatacgcgcacttagcttatgccgacgaagcccttgaaactgaatacaagagctatcttaaacccaagccccgacctggacgtttcgaacctgcacctgcttttggtgactagggaaggaagcctgaatatgagcaattcgaatctggtcatggacgcaaaccggagttcggacgacccggctccgaatttgaatctgattttggccgtagacttgatttcgagcagtcttctgaggagttcggatttgtacattgtatttttttttctttattttattttttacatttcttgttcttttattcacttttttttattattcatttatttttatttttttttatttttttttctctttttatttttatttttttatatttttttttttttttatattttataattttttattttttatttatactttttattttattctattcaataatttttttttttcttattatttttttattattatttttttattt

SEQ ID NO: 15391 - DNA, 1624 bp, Gossypium hirsutum
  Clone ID: GOSHI-09MAY01-C1496_1
cggacgctcagtgcaccctcccgtcggttttgcccattttcagcagcaactttttccttttggcagttaagtgaaacgatgccatactactcgaggggtggcgaagatgacgttgacgagttcgacgaattcgatccgacgccttacggtggtggatacaatctcgaactaacttatggtcgtcctttggaaccctccgatgagacttgctacccttccgctacaccctccgatggcgactttgattacgcacgtcccgatttctcttccggttacgcgcacttagcttatgccgacgaagccctcgaaactgaatacagtagctatcttaaacccaagccccgacctggacgattcgaacctgcacctgcttttggtgactatggaaggaaacctgaatatgagcaattcgaatctggtcatggacgcaaaccggagttcggacgacccggctccgaatttgaatctgattttggccgaagacctgaattcgagcagcctcctgaggagtttggatctgggcatggccggaggccggcatatgagcattcacatcaaccggatttcggatccggccgtagatcagaatttgagcagcctccgccgcctgagtttggaactgggtatcgacggagacccgaatttgagcagcctccgcctcctgaatttgaatctgggtatggccggagacccgaatatggcgaacaagagtccgagttcggatctgagtatggcagcaaaccagagcacggagaatatggatccgaatatgggaggagacccaactatggggaacccgaatctgaatacggatctgggtttggccgaaaggcagagtatgaaggaggcggatccgaatatggaaccggatacggacggaggactgagggcgagtatggatcgggttatggaggtaggacagagactgaatacgggtccgggtatgagaggaaaccaagttatggtagatccgaggaagaggaagaaggatataggaagccaagttatggtagatccgaggaagaggcagaaggatataggaagccaagttatggtagatccgaggaagaaggatatggccgcaagaaacatggcgatgacgacagtgatgatgatgatgaagagaagcgtcaccaccaccgctataaggcccaccaccataagcgccatgatgactatgacgactagtcagactggccgttccctctacaaatggaaatctgcagtaatagctattaaataaatgatcgaggcatgccacctttgatcgtttcttctaccatttccgtgtgctttttgtgtgtgtgtcagtgtttgatcgtcaataaaatgcccgaacattagggttagcgcaattgcgcttgttgattatcaatctgatgatgataatatactgccatgatctacttgcatgttaactacttaatgcttatgatataataaaatgcttacgcatgtgatgttcttgcttaaaaaaaaaaaaaaaaaaaaaaaaaaaaaaaaaaaaaaaaaaaaaaaaaaaaaaaaaaaaaaaaaaaaaaaaaaaaaaaaggggcgggccccttttaagaggatccaaatttactgttcccgggcctgggaaaggataactttttttttgggg

SEQ ID NO: 15392 - DNA, 398 bp, Gossypium hirsutum
  Clone ID: uC-gsflnu33B092c05b1
cccactcgatcgcccacgcgtacgcccacgcgtccgagcgaattcgtatttggtcatggacgcaaaccggagttcggacgacccggatccgaatttgaatctgattttggccgaagacctgaattggagcagcctcctgaggagagtggatctgggcatggccggaggccggcatatgagcattcacatcaaccggatttcggatccggccgtagatcagaatttgagcagcctccgccgcctgagtttggaactgggtatcgacggagacccgaatttgagcagcctccgtctcctgaatttgaatctgggtatggccggagacccgaatttggcgaacaagagtccgagttcggatctgagtatggcattcttatcatagcacggtataatttgga

SEQ ID NO: 15393 - DNA, 415 bp, Gossypium hirsutum
  Clone ID: LIB3166-038-P1-K1-B1
ccggaaaacccggggcgaaccaacgcttcggttggcaatttaagggaaacaatcccttattattcgaggggtggcgaaaatgacgtggacaagttcgacgaattcgatccaacccctaacggtggtggatacaatctcgaactaacttatggtcgtcctttggaaccctccgatgagacttgctacccttccgctacaccctccgatggcgactttgattacgcacgtcccgatttctcttccggttacgcgcacttagcttatgccgacgaagccctcgaaactgaatacagtagctatcttaaacccaagccccgacctggacgattcgaacctgcacctgcttttggtgactatggaaggaaacctgaatatgagcaattcgaatctggtcatggacgcaaaccggagttcg

SEQ ID NO: 15394 - DNA, 394 bp, Gossypium hirsutum
  Clone ID: LIB3272-053-P1-K1-H2
cttgcgacagataagtgaaaagatgccggactacttgaggggtggcgaagatgacgtttacgagctcgacgaatttgatccgacgccttacgggggcggatacaatgttgacctaacttacggtcgagctttggtaccctacgatgagacttgattcccttacggtacaccctacgatggcgactttggttatgcacgcaccgattattcttgcggttacccgcacttagctgatgccgacgaagctgttgaaactgaatgcagcttgtatgttaaacccaagccccgacctggacgactcggacctgcacctgcttttggagcttgatctggtgtctatggagggaaacccgaatatgagcaatttgaatttgtgtatggacgcaagccggat

SEQ ID NO: 15395 - DNA, 344 bp, Gossypium hirsutum
  unsure (1)..(344): unsure at all n locations
  Clone ID: LIB3083-116-Q1-L1-F11
gtgatgatgatgatgaagagaagcgtcaccaccaccgctataagcaccaccaccataagcgccacgatgactatgacgactagtcagactggccattccctctacaaatggaaatctgcagtaatagctattaaataaatgatcgaggcatgccacctttgatcgtttcttctaccatttccgtgtgctttttgtgtgtgtgtcagtgtttgatcgtcaataaaatgcccgaacattagggttagcgcaattgcgcttgttgattntcaaanaaaaaaaaataaaaatattattataatttttatatttttttttttttatatatttattttttatttaatttt

SEQ ID NO: 15396 - DNA, 309 bp, Gossypium hirsutum
  unsure (1)..(309): unsure at all n locations
  Clone ID: LIB3189-043-P1-K1-A2
cccacgcagtacgaaacactagttgtaaggctaagtaatacaaacatggctagactactcgagctgaggcgaagatgacggtgactagttcgacgaatgcgatccgacgccttacggtggtggatacaatctcgaactaacttatggtcgtnctttggaaaccctcgatgagacttgctaccctttcgctacaccctccgatggcgactttgattacgcacgtcccgatttctcttacggtacgcgcacttagcttatgccgacgaagccatcgaaactgaatacagtagctatcttaaacccaagccc

SEQ ID NO: 15397 - DNA, 219 bp, Gossypium hirsutum
  Clone ID: uC-gsflnu33B099e06b1
ctcactcgtccgcccacgcgtccgctcattttcagcagcaactttttcctttcgacagttaagtgaaaagatgccgtactactcgaggggtggcgaagatgacgttgacgagatcgactaattagaaccgacgccacacggtggcggaattcttatatagcgctacattaaccctgctgtgatggatgctccagctgataaccattgcaagatgcaagt

SEQ ID NO: 15398 - DNA, 1137 bp, Gossypium hirsutum
  Clone ID: GOSHI-09MAY01-C1486_2
cccacgcgtccgcaagcttcaatgagttcaatcaatcagcccaagctttaaaaaagaaacttcgttttatcctttctgtagtaattattttatctgcaaaatcctatctgccaaattcttaaatttatattttatttatatattaagctaataataagctttaccatttaacattgctataaaggcaagaaaagaacgagaaatctccaatttttttccctttttctggtaaattgatcctttgcttcgtctttcagtctttgccttctagggtttatcacttgttcctaagcttcctttacgccgttttcgtctttacagagtaacgaatgaaactgtatgctattcagagtcactgctagcaaggaaaagaaccgaaataagcagagatggctgctgagctggtcaattttgccacaagtgagaaattggctgagatggactgggcaaagaacattgaaatttgtgagttagttgctcgagatcaaaggcaagctaaagatgttgttaaagcaattaagaaacgattggggagcaaaaacccaaatactcaattatacgctgtattgctattggagatgttgatgaacaatattggtgaaaatgttcataagctggtgattgatacaggcattctcccaattcttgtgaagatagtcaagaaaaagtcggacttaccagtgcgagagagaatttttttgcttttggatgctacacaaacatctcttggtggtgcttctggaaagttccctcagtactattcagcatactacgatctggtgagtgctggagtagaatttcctcaaaggcctcatgcaacaccatcaaatccacctacttcgcaaccaattaaaagtaatacgcttaatggtgaacttgcctccgccagacaagaggcagttgccaaggaagcagagccccagattgttcccgagtccagtattattcagaaggctagtaatgcgttagaggttttaagagaagtccttgatgcagttgatgctcaaaatcctgaggctgcgaaggatgaatttacacttgaccttgtggaacagtgttcattccagaagcaacgagtgatgcatcttgtgatgagttctagggatgagaaggtggtttctcgagcaattgaattga

SEQ ID NO: 15399 - DNA, 933 bp, Gossypium hirsutum
  Clone ID: uC-gsronu33B004f05b1
cccatgcgttcggaaatctccaatttttttcccttggtctggtaaattgatcctttgcttcggctttcagtctttgccttctagggtttatcacttgttcctaagcttcctttacgtcgttttcgtctttacagagtaacgaatgaaactgtatgcaattcatagtcactgctatcttggaaaagaaccgatataagcatagatggcttctgagctggttcaattcttccatcatgtgacaaattggctgagattggactgggcttagaacatttgaaatttgctagttatttgctctgtgatcaaatgcttttcttattattgttgttaatgtctttttttatcttctcgtttatctattttcctatatcttaattttttctcttttttatgttctttttggctttttcctttcaatgtctgtcctatttctcttcctattccttgttattttttttttgcttcttcttcatgttttctcattgtttttttctcttttttccttttttttttttttcttcttgttattcctttttcttcttcttgttttttttttcattgttttttatatattattttttatctttcatttttattatcttccttttctatctgttttgtcactttctttttttttattctttctttttattctatttttctactttcgtctcttcttatttcttttctcttctacttattttctttcttttcttttctttttgtttttcttctttgttctctttcttctcttttttctttatctttttctttttttttacttctctttcttccttttctattttttcttcatatctttttcttcctttttttctatttttttacttccttcttttcttttttctctgtttgtttctttttttttttctttttttttcttttcttttttctttctttcttttattttcttat

SEQ ID NO: 15400 - DNA, 436 bp, Gossypium hirsutum
  Clone ID: LIB3585-024-P1-K1-E9
ggaatgctgtgtatctattagatatatatatatgtacacgatgatgctgaggatgattatgatggattggcttgtcatatctgctacatgtaatagtagtatcctggaactcgagtattctgctgttaagcagagtaacgaatgaaactgaatgcaattcaaatcactggagcggggaaaagaaccgaagcagcagagatggctgctgagctggtcaattcatgccacaggtgacacattggctgagatggactgcgcaaagaacattgaaattggcgagaaagaggctcgagagcaaaggctagctcaagatgtcgttaaagcaattaagaaacgatgggggagcacaaacccaaatactgaatgatacgctgcattgctataggagatgtcgatgaacaatagtggtgaaaatgtgcataagctggtgatcgat

SEQ ID NO: 15401 - DNA, 482 bp, Gossypium hirsutum
  Clone ID: uC-gsflmaxxa006e05b1
atataaatagcatctcaaatcaaagcatcccgaccagacaaaacaatgaatctttcgtcgtggtttcgccgcagtgtttcaaggaacagtaaaaaccacaaaaacccaccagatcaacctcaaccccaccaccaagaacaagaagaatttcttggaattacccaacaattaatcgatcatgtcaagtcttttactttagaaaccttcaagaatttccctatccaagatgatggtgacattgaagcccaaacttcttataatgtgcgtaaagatctttctgattggcaagagcgtcatgctgtcttagtgctttctaaagtgaaggaactttcacagcttagattcaagctatgccctcgtcatttgaaggaggaaaaattttggaggatatatttcatgcttgtcaatagctacgtggctgaatatgagctgcatgctatacagcgtgctaaactgcaaagcattgctatgaaggatgagaa

SEQ ID NO: 15402 - DNA, 438 bp, Gossypium hirsutum
  Clone ID: LIB3585-024-P1-K1-D11
cccacgcgtccgagaatttccctatccaagatgatggtgacattgaagcccaaacttcttataatgtgcgtaaagatctttctgattggcaagagcgtcatgctgtcttagtgctttctaaagtgaaggaactttcacagcttagattcaagttatgcccccgccatttgaaggaggaaaaattttggaggatatatttcatgcttgtcaatagttacgtggctgagtaagttttacatttttttcatgataattagtaatttagaacaaggaatctgtgcatatattgttgctttgtggatttgaatctgagcttgattttagatgcctatatgatattgccattctctcatcagatatatccttcaaacatttgccaacacattctttgtattgacctttcgtttagtgaaaaattatttcttgaaagaaattctt

SEQ ID NO: 15403 - DNA, 682 bp, Gossypium hirsutum
  unsure (1)..(682): unsure at all n locations
  Clone ID: LIB3582-055-P1-K1-C3
ccccgcgtccngattaccaacttatcaatttaaatttttttaatcccatttcctcccaaccctgtctccctttgacaaaccgtaacaaggccttcaatctcagaaccgcttttctaactccaaatgccctcaacaaggccttctcttgcttttgattgaggtggaaacttgagaagagaaacaaccagatagtggtttaatgtgaggcttcaactgtacctgagaaggaggccgaagagaccttcagggagaattttgagtaccaagcagaggtgggttcttttgcttttcctgggttttgctcttctgtttctgcttttggtggaatatttagggatttacatggtggtgttggattgggcgatttagtgttgaatcctattctgtttttcttggtgctgagaaggtaacatgctgtcagcttaatataacctgcattctcatcttttgcttcatgtatgaagccttttcgttcaataattttcaagctaattgggttgattgtttatatgtttattgaacgggttgttgtgtttacaaagagtccaaaatcagacaagcaatacgtntgggaagttgtagcagacagtagctcctatgtgaatagggaggaaactaatctagaaaatcttcaagtccgtggtacacagattacactttatttaaggtcagatgacaagta

SEQ ID NO: 15404 - DNA, 533 bp, Gossypium hirsutum
  unsure (1)..(533): unsure at all n locations
  Clone ID: LIB3585-023-P1-K1-F4
cccacgcgtccgattttatcttcttggccttctctctatttctctagggctttactttgatggctccagttctaagcagaagcttagctactccatctttagcctctctccctttgacaaaccccaacaaggccttcaatctcagaaccgcttttctacctccaaatgccctcaacaaggccttctcttgctctcgattgaggtggaaacttgagaagagaaacaaccggatagcggttcgatgtgaggcttcagctgtagctgagaaagaggccgaagagacctccggngagaaatttgagtaccaagccgaggttagtcgcttgttggatttgattgttcacagtctatacagtcataaagaggtctttttgagagagcttgtaagtaatgcaagtgatgctttagataagcttagattcttaagcgtgactgaaccctctctgcttggagagtncggagaactagagatacgcatcaaacctgatccagattatgggactatcactataacggatacgggaattggaatg

SEQ ID NO: 15405 - DNA, 720 bp, Gossypium hirsutum
  Clone ID: GOSHI-09MAY01-C1436_1
cccagcgtccgggcggtgggagtgggggtgaagggtatccagcggaggatatggtagtgaaattacctggtcagccgccagttgggtttaagcagtatgctgggtatgttgatgtagatgtaaaggctgggaggagcttgttttattacttcgttgaagctgataagaaccctgagaagcagcccctcactctctggctcaatggagggccagggtgttcctccgtgggagggggtgcttttacagaattgggtccattttatcctagaggtgacggccgaagccttcgaataaattcaatgtcatggaacaaagcatcaaatctcctgtttgttgagtcccctgttggtgtaggctggtcttactcaaatacatcttcagattatatccgtggggatgcttccactgccaaggatatgtatattttcatgatgaaatggtatgagaagttcccagaattcaagtccagagaactgtttcttactggagaaagctatgcaggacattacataccacagttggctgaagttctactggatcataatgcacgatcaaagggttttaaagtttaacatcaaaggagttgctattgggaatcctcttctacgacttgatcgggatgttcctgcaacatatgaattcttctggtcacatgggatgatttctgatgaagttggccttaccatcatgaatgaatgtgatttcgatgactatgtcttt

SEQ ID NO: 15406 - DNA, 1690 bp, Gossypium hirsutum
  Clone ID: GOSHI-09MAY01-C1426_1
cccacgccatcacacttacctttttcccatttcgtcaatcgcggcattcaatcaaaatcaacctttgtttagttacatggaaatcgggtctttcacatttctttctcccgaagatttttcttttaacaacaactacaacagcgatttctcttggtttctggatatggaaactgggttcaacaggaacaccaagaagaggggtagaaaagactttgaggaatctcttgttagcgaaaagagtgggtttggtgatatactttcctcgattttgatgttggatgaggaagcaaagcaagagcagtatcaatgggtgactaactctgatcaagatggtgctttcttccaagccaattacaagggaaatgttcaggaaatgaatgggtattttgaaaaccagttttctgaaatgaaccagttggataattccagtaacaaacgcgcccgcaaatctggttcacccgctgcggctgcgacggtttcagccgggtccgataatgtgggtccatcgcaatcgggtagcggatccggtcagcaaaggcggttatgggtaaaagaccgatccaaggactggtggactaagtgtaaccacccagatttccccgatgaggagtttaaacgcgctttccgtatgagcaaagccacattcaatatggtctgcgaggagctcgaacctgcagttacgaaaaagaacacgatgcttcgagatgcgatcccagttcgtcagcgcgtggcggtttgtatttggaggttggccacgggtgaaccgcttcggatgccctccctgccccccgcgcggccgttttcaacttgtcataagctggttctagaggtgtgtgccgcaattaaaactgttttaatgcccaaattcgttcaatagcctgacgaacacaaaatgaagagtatcaaacaagcattcgagtccgccagtgggatccccaacgtgggcggttcaatgtacactactcacgttcccatcattgcaccaaaagtcagcgccgcagcgtatttcatcaaaaaacacacggagaggaaccagggagattcgtattccattacccttcaaggcgttgtcgaccaagccggagctttcaccgacttatgtattgggtggcccggttcgatgtccgatgatcaaattttagagaaatcagcgtttcaccaaagagccacatggggacatttgaaggacgtttgcgtcgtaggcaacaaagggtacccattaatggactgggttttggttccttacagccaccaaaacctcacttgggctcaacatgctttcaatgagaaaatcggggagattgaaaaggtggccaaggaggcattcgcgaggctgaaagggcggtggtcgtgtttacaaaagagaaccgaggttaagcttcaagagttgccgatcgtgcttggagcttgctgcgttttgcataatatctgtgagatgagaaacgaggtgatggatccggagcttaaattcgagcttttcgacgatgaggtcatccctgataataatataaggtccatggcttccgcacaagctagagatcacatcgctcacaatttgttgcaccatgggcttggcggccgtggtacatcttccactgcttttctatagtgttgatttaggaatcttttctgtagtttgcttgttattcttttggggtatggcaataaagattattcctgatttaatttc

SEQ ID NO: 15407 - DNA, 880 bp, Gossypium hirsutum
  Clone ID: GOSHI-09MAY01-C1796_1
cgctcccccgttgcttaaggttttagcacactttgtttctctctctaaaccagtaacagtgaaaccttctcttgagtcccgacaaatggcagaggaggcgcacggtaaccccgccgccgaaaaagaagccaagggagcggcggcggagatggacgatatcgagtcacgaattaccaccgccatgcgctctcgcgttggccacttcaaggaacaatccgactcattgactttcgagggagttcggagattgttagagaaagacttggggctagaaacgtttgcactggatgttcacaagagatttgtcaagcaatgcctgttaaagtggttagatgatggcaatgacaatgaaggctctagtggaacggtggagaaaaatgtaagtacaaccactgaaggaacagaatctcccaaaggacgacaacctaagaaagaaataaaggaaccttgctctgaagatgagaaattggaagaatctccagttttgggccttctgtctgacaataaaactgtgaaaaatgataataaagaaaataaagaagtttctgagagtaagataaagaaagctatcaccaatagagcttcatatctgaaagctaattcggaaaaagtcacaatggctggactccggcggcttttggaggaagatcttaaacttgataaatatacacttgatccatacaagaagtttatcgctgaacaattagatcagctattgaagtctgctgaagtttctgcacctgcaagtgaggttaagaaaaaaaacctcaagaaaaattctcagagcaaaacttctgaaaagcttagcaagaaagtgatttctgcttcatcacgaagcgagaatgatgaagtgggagatgaagaacgagatggtgatgat

SEQ ID NO: 15408 - DNA, 483 bp, Gossypium hirsutum
  Clone ID: uC-gsflmaxxa067f11b1
cccacgcgtccgcggacgcgtggggtaacagtgaaaccttctcccctatcaaatggcaaaggaggcgcacggtagcctcgcctccgacgccgacgccatagaagcgacggcggaagatatcgagtcacgtattaccaccgccatgcactctcgcgttggccacttcaaggaacaagccgattcgttgaccttcgagggagttcggagattgttagagaaagacttggggttagagacctttgctttggatgttcagaagagattcgtcaagcaatgcctgctaaagtgtttagatggtgcaaatgaggatggctccaagagttcttgtgaaacagtggagaaaaatgtaagtacaaccactgaaggaacagaatcacccaaagaacgagaatctaagaaagaagtaaaggaaccttgctctgaagatgaggagaaattagatggctctccagttttgggccttctggctggatataaaactac

SEQ ID NO: 15409 - DNA, 694 bp, Gossypium hirsutum
  Clone ID: GOSHI-09MAY01-C1786_1
cttcttccctcctatttcccttaaaaaccacacaccaccaactcaaatttcacctcttaattctaaaatcaacacaaccccatcacatcccctcagatccatcaaacaaagagcagcgaaaaattgatcttaagttgcttgtgattaagagaagatgacttgtgataagagagggcagttcggtgataccactttcaccaaagtgtttgttggtggtttagcttgggaaacccagaaagatacaatgaagaagtattttgaacaattcggtgatatcttggaagctgtcgtcattactgataaagctactggcagatctaaaggctatggatttgtcacgtttcgtgaaccagaagcagccatgagagcttgtgttgatgctgctcctgtgattgatgggagaagggctaattgcaatcttgggtttttgggtgctcaaagatctaaaccctctactccaaagcatggaggaaggaatttgaggggaatgaggtgttttcccacagcaatagctttttcttcagcagcaaccttccctcctcattattatggcatcccacaaggacttccttttaatctttatgggtactctccatgctcacctgactcctcttgttatgccacgaactactatattctgtatggaggggccactggccatatccaatgtatggtggtggcttgatgactggtc

SEQ ID NO: 15410 - DNA, 425 bp, Gossypium hirsutum
  Clone ID: GOSHI-09MAY01-C1746_2
cccactctactttccacgcgtccggttacccaaatttaaggatggattcacaaattaagtttgctgtggtggtgaaaattatgggaaggacgggatcgagaggtcaggtgactcaagtgagagtcaagtttttggatgatcagaaccgttttattatgaggaacgtgaagggaccggtcagggagggagatattctcaccttgctcgagtctgagagggaagctaggaggctccgttgataacttcctcttatctccgttttgttacgttattaatggatgagttgtttttaaagtataatcattatgtttaaatgaactaagttggtttttgagattatgattttcatgtcccgttaatttctgctatttcaaaatgttaattcttttctaaaagttgcttgaacgtgactagaaccttttcct

SEQ ID NO: 15411 - DNA, 476 bp, Gossypium hirsutum
  Clone ID: GOSHI-09MAY01-C1746_1
ccctcccgtccgctgaaattcacaagaagcagccgctaccgtgtcgttggcctcgtacttagccaaatttaaggatggattcacaaattaagtttgccgtggtggtgaaaattatgggaaggacgggatcgagaggtcaagtgactcaagtgagagtcaagtttttggatgatcagaaccgttttattatgaggaacgtgaagggaccggtcagggagggagatattctcaccttgctcgagtctgagagggaagctaggaggcttcgttgatcacttcctcttatctccgttttgttactttattaatgtttatgttgcgcaagtagctagctgtttcttatttctgaaaggtatccaaattttcaaatctagacttggattttgggagactgatttaaatggatgagttgtttttaaagcataatcattatgtttaaatgaactaagttggtttttgagattataaacacacaa

SEQ ID NO: 15412 - DNA, 676 bp, Gossypium hirsutum
  Clone ID: GOSHI-09MAY01-C1706_2
gagaaacgcagcgccacatctccgcctactttgttgggtccccttatacaatagtggatcatacgtatgatgcagttgtggttggtgctggtggtgcggggctgagagcagccattggtctttcagagcatggatttaatactgcttgcataactaagcttttcccaactcgttcacatactgttgcggctcagggtggcataaatgctgctttgggaaatatgactgaagatgactggcgatggcacatgtatgacacagttaaaggaagtgattggttaggtgatcaggatgcaatgcaatatatgtgcagggaggcaccaaaagccgtgattgaactcgagaattatgggctgcctttttctcgaacagaagatgggaaaatatatcagagagcatttggtggtcaaagccttgactttggaaaaggtggacaggcttatcgttgtgcatgtgctgctgatcgaacagggcatgctctactgcacactctctatggccaagctatgaaacataatacccaattctgtgtggaatattttgctttggatctattgatgaacagcaatggaagctgccaaggagtgatagctttaaacatggaggacggatcactacatcgtctgcacgtcttcttaaacaactcgtggcctttgggggatatggtagagcctac

SEQ ID NO: 15413 - DNA, 678 bp, Gossypium hirsutum
  Clone ID: GOSHI-09MAY01-C1706_1
cccacgcgtccgcccacgcgtccgctcgcaaaaggaaaaaaagcatccaacaaagtaggcggagatgtggcgctgcgtttctcgtagccttcgagctccatattccaacagatcagttgccgctaactctcttagatctaacatttccagtttcttctccactcatgctgggtccccttatacaatagtggatcatacgtatgatgcagttgtggttggtgctggtggtgcggggctgagagcagccattggtctttcagagcatggatttaatactgcttgcataactaagcttttcccaactcgttcacatactgttgcggctcagggtggcataaatgctgctttgggaaatatgactgaagatgactggcgatggcacatgtatgacacagttaaaggaagtgattggttaggtgatcaggatgcaattcaatatatgtgcagggaggcaccaaaagccgtgattgaactcgagaattatgggctgcctttttctcgaacagaagatgggaatatatatcagagagcatttggggtcaaagcttgacttggaaaggtgacaggctatcgtggcatggctgttgtcaacgggcatgcttactgcaactttttggcactttaacctatcccattctggggaattttcttggactatgggacacatggactgcgggg

SEQ ID NO: 15414 - DNA, 630 bp, Gossypium hirsutum
  Clone ID: GOSHI-09MAY01-C1726_1
cgcttccgctttctctccaattcctctcctcaaagccaaaaacacaaggaaatggcttctccctttctctccaacactatcatctccttctcttcttccctttcttcttcttcttctcttcctcgtcttgccccttcaattcctttctctgcaattcgttccaagtcaaccccaagacgaatcctgaccgtccgttccaagatcagggagatcttcatgcctgccctcagttctaccatgaccgagggcaagatcgtctcttgggttaaatccgaaggtgatgtactctccaaaggtgaaagcgtcgtcgttgtcgaatccgacaaggctgacatggatgtcgagactttctacgacggcattctcgctgctatagttgttggggaaggcgaaactgctcctgttggtgctgccattggtgttctcgctgagactgaagatgaaattgctgaggctaaagccaaagctgcctcaaaatcaggtgcttcaaccccatctgctcctcctcctgctccagctccagctgctgcctctactccagctcctcccaaatcgacgcctgctcccgcggctccaacagttgcggaagggccgacaaaaactgttgccacaccatatgccaagaagtta

SEQ ID NO: 15415 - DNA, 734 bp, Gossypium hirsutum
  Clone ID: GOSHI-09MAY01-C1686_1
atttgaagaaattggtgggaacccatttgagatttcagtcaaatcacgtgtgcctcgaattctctgtgctcaaatgtccgagtcctactatccacctcttcgagaatggcttcatctagatcttattgatggaaaagtctccataagtgacatgaaaccacagattcacttgcagtgtgaagatgggcagataatctcctctatagaatttgctagctatggaactcctcatggaagctgccagaatttttctaatggcaattgccactctccaaattcattgtctgtggtatccgaggcttgtgtaggaagaaacagttgttctgttgaagtttcaaactctgggtttggaagtgacccttgccggggtgttctcaagacattggctgttgaagctagatgtgtgtcaacatcaactattggagtctcccagttctaattcgacaagagggtgatgcaatgaagatagttgttaactggtaaactacctctgcttagttgcaaaccagttgcaatgagcatttcagttacatcgtttgtacaagatttcagaagcttgtatgttcagacatgttttctgaataatgctggtatcaagcaattcctgtactatatgtatgtaataatgcggtgaaccctatatctgaagtttaatgttgtaaatcaactgtatatactttatatcatggcaatctgaaacacaataaacactggccttcctgcttctttcccta

SEQ ID NO: 15416 - DNA, 1712 bp, Gossypium hirsutum
  Clone ID: GOSHI-09MAY01-C1646_1
cccacccgtcccatttctcaaaaatgagctccattgctttcaagcccttccacggcctccgccgtagctccgccgtccccacccctacttccactaccaccaccctttacaaacctgctgtcaaattccatgtctcagccgccaaaacttctccaaaactaagcaaccgcaacctcagggtagccatcatagggggtggtccggcaggaggctcagccgccgaaactctcgcgaaggctggcatagaaacgttcctaatcgaacgaaaactggacaactgcaaaccttgcggcggagccatcccgctttgcatggtgggtgaatttgacttgccgttggatatcatcgaccggcgagtcaccaaaatgaagatgatttcgccctccaacattgccgtcgacatcgggcaaacgttgaaaccgcatgaatacattgggatggtgagaagggaagtgctggacgcttacttgagagacagagctaaggagaacggagctaacgttataaatgggctgttcttaaagatggatatgcctaaacattgggatgaaccctatgttttgcattacaccgagtatgatgggaagaaaggagctatgggagccaaagccactttggaagtcgatgctgtgattggagctgatggcgctaactctcgtgttgctaaagccattaatgctggcgattatgattacgccattgcatttcaggagagaatcaaaatccctgatgacaaaatggtttactacgagaatcttgctgaaatgtacgtaggagatgatgtttcaccggatttctatggttgggtttttcccaaatgcgatcatgttgcagttggaaccgggacagtgactcacaagaatgatatcaagaagttccagctagccactagaaacagagcaaaggacaagatccttggaggtaaaattatacgagttgaggcacacccaatccccgagcatccccgtccacgcaggttatccgggagggtagccttagttggggatgcagctggatatgtgacgaaatgctcaggtgaaggtatctactttgcagctaagagcgggagaatgtgtgcagaggcgattgttgaggggtcacagaatgggaagaagatggtggatgaaggggacttgaggaagtacttggagaagtgggacaagaaatactggccaacctacaaggtattagatgtgttgcagaaggtcttctacagatcgaaccctgcaagggaagctttcgtggagatgtgcgcggatgagtatgtgcagaagatgacatttgacagttacttgtacaagacagtggcacccggaaatccactggaggatctcaagttggcagtgaataccattgggagcttggtgagagccaatgcactgaggaaggaaatggaaaagttaaacgtatgagttttttataattggtcttccatttctgttaagttaaaccttaaaagaatgatgttcaatccttgctgcttgtatttagaagatctaattgcactttaatgcaattcgttatcacataattatggtcagcagagatcggttcggatgtcctgcattacctaatttggttcagtatttagcctttagtccttttatcaacatggcgatgttcaactgttcatgatactcattggattgaaacttgaaaatggtagtaaacaagaacctaaatatggtatttcatggtattaacgtaggttt

SEQ ID NO: 15417 - DNA, 628 bp, Gossypium hirsutum
  Clone ID: GOSHI-09MAY01-C1676_3
cccacgcgtccgtttgaagaatgtcagaactcaagtactacttaagcttataaaaccatatacgagaatccggatccctttcatatcaaaggaactcaatgtgccagaaaaagatgtagagcagttgttggtttccttgatcttggataatcgaatcgatgggcatattgatcaagtgaaccggctgttggagcgtggtaacaggtcgaagggtatgaagaagtacactgctatcgataaatggaacacacaactgaggtccctttatcaaaccgttaacaacagggtttattgagaaagcaaaaatgctatatgatataatccctttggctaaggtactcccctttctttttggggctacaagaatatgcttgctctcttgtgtcaggtgactttagataatctagattcgaaagtttatgttttgttttggttagtcaaagttttattcttattcaatgacagaaaaaagaaaacccgatatatttgcctgtttgcaagaattttgattccgggttgacgcttgtatatgaagtgatgatgttgtgtagatctgacatgaaaaaagtgatactagcactataaatatatgatggaatcaaaatctacggtaaaaaaaaaaaaataa

SEQ ID NO: 15418 - DNA, 1647 bp, Gossypium hirsutum
  Clone ID: GOSHI-09MAY01-C1676_2
cccacgcgttcgtccacgcgttcggaaacagactctgaaggagcacttgttggtttgggtgaggtagttagcatggagcctgaaaaggctgaatggggattcaaagctttgaagcaaactgtaaagctctattaccgtttagggaagtataaagaaatgatggactcatacagggagatgctaacatacatcaaatcatcagtgacacgaaattacagtgagaaatgtatcaacaatattatggactttgtgtctgggtcagctagtcaaaattttgggctcctgcaagaattctatcagaccactcttaaggcccttgaagaggcaaagaatgagagactttggtttaagacaaatctaaagctttgcaagatctggtttgatatgggcgagtatgggcgaatgagcaagattttgaaggaacttcacaaatcgtgtcaaagggaagatggtacagatgatcagaaaaagggaagtcagcttctggaggtatatgcaattgaaattcaaatgtatacggagacaaagaacaacaaaaagctcaagcaattataccagaaagcacttgctgtcaagtctgcaataccacatcctaggatcatgggaataattcgtgaatgtggtggcaagatgcatatggctgagcgtcaatgggctgaggcagccacagatttctttgaagctttcaagaactatgatgaagctggaaatcagagacgtatacaatgcctaaaataccttgttctagctaacatgctgatggaatctgaagttaatccttttgatggccaggaagcaaagccgtacaaaaatgaccctgagattttggcgatgacaaaccttatagcagcctatcaacgaaatgagataatagagttcgaaaaaatcctcaagagtaaccgaaggacaatcatggatgatccgttcatccgaaattatattgaagatctgttgaagaatgtcagaactcaagtgctacttaagcttataaaaccatatactagaatccggatccctttcatatcaaaggaactcaatgtgccagaaaaagatgttgaacagttgctagtttcattgatcttggataatcgtattgaggggcatattgatcaagtgaaccggctgttggagcgcggtgacagatcaaagggtatgaagaagtacactgctatagataaatggaacacgcagcttagatccctgtatcaagccgtcagcaacagggtttcctgagattgcaagtaaatggttatatgatatatctgatttcatcgttcattgaggccataataatatgcattctcaattctcatattaggtgatttagataagcaattcggaaaaagaaaatggtgtacctagaatcggatgttatatgtttggttagccaaagttgtagttttgttgaatgagccaaaagaagaaaacatatttgcctggttgcaagaattttgattgagtttgacagtcgtaatgtgaacaatagaatatggattctctgcattaagtgcatattaaatgtggaatgttgatggctggctgctgttgtcaatgcttgcttggtagtatgttattgggatttttcatatttgctaatgaacttgtgtgtgaaataattttttgcaatagactcggtttttttattct

SEQ ID NO: 15419 - DNA, 691 bp, Gossypium hirsutum
  Clone ID: GOSHI-09MAY01-C1676_1
acaaggttgtttttgtagtttagtttaatttcccacgcctccgcggccgcggcaactcgacaccgacaccgacaccgtcaccgtcgcctctctatattccggaaagtttctactttagccgattttttctcccagtaactatggcttcagatgcagatatggaggattatggattcgagtactccgatgaggaacctgaggaacaagacgttgatatcgagaatcaatactacaattccaaaggtttggtagaaacagaccctgaaggagctctagctggttttgctgaagtggtcagcatggaaccggaaaaggctgagtggggattcaaagctcttaagcagactgtaaagctctattaccgattagggaggtataaagaaatgatggaggcttacagggagatgctaacatacatcaaatcagcagtgacacggaattacagtgagaaatgtataaataatattatggactttgtgtctgggtcagctagtcaaaattttgggctcctgcaagaattctatcagaccactctaaaggcccttgaagaggcaaagaatgagagactttggtttaagacaaatctaagctatgcagatctgtttgatatggtgagtatggcgaatgacaagatttgacgaactcataattctgccaaaggagatgaacggccatcatagatggagtcact

SEQ ID NO: 15420 - DNA, 556 bp, Gossypium hirsutum
  Clone ID: GOSHI-09MAY01-C1666_1
cccacgcgtccgtgaaaacgccgaccagtgcagagcagagagagaacgagcgagagaatggggaagccacttggatcaacaggggaattcttcaagaggagggacgagtggaggaagcatccgatgctcagcaatcagctccgccacgccacccctggcctaggcatcgccctcgttgccttcggcatttatctggtcggggagcaggtctacaacaggatttatgctccttcctcctctcatcatcaccaacaacaatcttcttctcactcccattgagatcaggtagatgctctatggaaagaacacagtttggacatggtcatgtttcagtttccctctgtagtttgctgtaataagcttcgtactgacataaaacggacttgcttcaagtttgattattgaaaccttgtattggagctattctatggatgctttatctgtttcctcctcatgttggtatgtttaatggactcattaatgtcatatctttcgaacttaaaaaatcttatagtaagtgaattccagtcgtactgcgtagtttgcgatgcttaag

SEQ ID NO: 15421 - DNA, 519 bp, Gossypium hirsutum
  Clone ID: GOSHI-09MAY01-C1606_11
gaatagcattttctcaaacatacagtgttgtcagttttattcttagagcacctgatctctgtccttaatcagactcgtgtcactaaaagtagtgatccaggaaaaggagaaaattctagtcttgtttctgaaactcaattggaggatgaaattctgcaagctgctatttttgctcttacttccttctttaggcatgttgaccaattgcatttattgaaatttatcttatttttatggtcttcataattttatgatgtttcatcttaatttcaaaggtggaggtaaagttggaaagcgagctgttgaacatggttactcttcagttcttgctgcacttgtactgcaacttggcagttgtcatggtctggctacctctggtcgacatgaaccactacgtgcacttttaactgcatttaaggcattttgtgaatgtgttggagatcttgaaatgggcaaggtacatgaactttttgataatatgaacacctgctactgctaggacaacgggaaacacttcac

SEQ ID NO: 15422 - DNA, 995 bp, Gossypium hirsutum
  Clone ID: GOSHI-09MAY01-C1606_6
accaaattaacttagaattaatgagtcacatgtcggaatgagtagcccggagccaatgattaacacatacgccaactttagagatgatgttcttccccgtattaaaagacttgggtacaatgctgttaagatcatggctattcaagagcactcatattatgctagcttcgggtaccatgtgacaaacttctttgcacctagcagccgctttggaacccctgatgacctcaagtcactgatagataaggctcatgaattgggtatacttgttcttatggatattgtgcacagccatgcttgcaataatgtgttagatgggctgaacatgtttgatggaactgatggtcattacttccacatggggtcaaggggtcagcactcggtgtgggattctcgcctttttaattatggaagctgggaagtactaaggtatcttctttcaaatgcaagatggtggctggaggaatataactttgatgggtacagatttgatggtgtgacttcaatgatgtacatccatcatgggttgcaggtaggatttactggaaattacaatgagtactttggatatgcgactgatgtagatgctgttgtttatctgatgctggttaatgacatgattcacgggctctatcctgaggctgtcaccattggtgaagatgtgagtggaatgcctacattctgcattcctgtccaagatgggtggtgtgggatttgattaccgtcttcacatggccattgctgataaatggattgagattcttaaaaagagagatgaagactggaaaatgggtgacattgttcacacgctcgccaacaggaggtggttggaaaagtgtgttgcttatgctgaaagccatgaccaagctctagttggcgacaaaacaatagcattctggctgatggataagggtatgtatgagtttatggctctggatagaccaagttctccacttatagatcgtggcattgcattacacacaatgattaggctc

SEQ ID NO: 15423 - DNA, 1207 bp, Gossypium hirsutum
  Clone ID: GOSHI-09MAY01-C1606_5
cccacgcgtccgctcagaaatctcttcttttttccccattttatttttcccaaaccatttctaccctaccccgattccctttattttcccccccccaatttccccaaattggtagccctctgcatctcctcaaagggtacagattcatggataccccacgccaccacaatctgcatctcctcaaacggagtttatagagaggtgagaccaagtaattttaggttacaacatagaaaccaaagtaacaaaaaaggtggatatagatgggatcttgggtaaccgagattcgaagctaggcaaatcaagcatacccaggagacgacaatgggttaaaagaagagaaacagggctggttatacttggtgtcatcctccataccgtttacataaattcatatgttggcaatctttctcttttctatgaaatagagtagagcctttggcggtgtcgggaggcttgttcatattgattttggtttcatcttggaaacatcacctggtggaaatatgcggttcgagagtgcacatttcaagttgagccatgagatgactcaattactagatccatcgggagttatgaaaagtgaaacctgggacaactttgtaagctggtgtgaagggataccttgccgctcgccgacatatgaatgggatcatcaacactggctgcttatgcttgacagtggattgccttgtttcagcaggggtgatcccattggaaatcttcgcaagagatttcatcctgagatgagcgagcgtgaggccgcctatttcatgaaaaatgtctgcaccgatgcttacaacaagtggacaactgctggctatgacctaatacagtatctgcagcaaggcattgagaagtggaggcacgggtaattatcctttggggtacattatcgtttgtaattgataaatattcttttacccccatagttacagttttctcgaggaaatcccacctaagcaaggctcggaagtataaaatatgtggcacaagcaattgatttgataagagagaaaatgagttgagttctttgtaacccagtggtggacatccttgttagttaggtttgtaaacgatacgccctaaaaaaattgtttgggaaagtaatagtttgaatgaacgtgggggatagtttctgtttgaaacaaaaattctattgaattcttaatgtttatgaaccgagcctgagttccaaggcttatta

SEQ ID NO: 15424 - DNA, 753 bp, Gossypium hirsutum
  Clone ID: GOSHI-09MAY01-C1606_3
tcgcggacgtggcgaagccatccctcccctccccccacgcccccgatttttccccccaatttccccaaatcggcagccctctgcatctcctcaaagggtacagattcttcttctcttatagttaaaaagctgtcatttttcaaccaaatccaaaccctaaattgcgtctctcccaatttcttcttcactttgaggttttcttgcaatagtttatagagaggtgagaccaagtaattttgggttacaacagagaaaccaaagtaacgaaaaaggtggatatatatgggatattgggtaaccgagattcgaagctaggcaaatcaagcatacccaggagacgacaatgggttaaaagaagagaaacatggttggttatacttggtgtcatcctccatgccgtttacatgttaagcattttcgacatctacttcacgaccccctttgttcatggcttggatcttgtctcctatcgcttctctcctcctgctaaacgccttgttcttcttgttgccatgcgctcgacaatgtgttagctggaactgatggtcattacttccacacggggtcaagggctcaccactcggtgtgggattctcgtctttttaattatggaagctgagaagtactgaggtatcttctttcaaatgcaagatggtggctggaggagtataagtttgatgggtacaaaattgatagtgtgacttcaatgatgtacaagatttccttgataaataaatgtattatatcttttat

SEQ ID NO: 15425 - DNA, 974 bp, Gossypium hirsutum
  Clone ID: GOSHI-09MAY01-C1606_2
cggacgcgtgggttcttcttcactttgaggttttcttgcaagagttgagaggtgagaccaagtggttttggattacaacagagaaaccaaagtaacgaaaaagatggatatatatgggatcttgggtaaccgagattcgaagctaggcaaaatcaagcatacccaggagacgacaataagctcaagaccctttttaccctttcgccttcttctcttacactcttttttcgattcaatagttaaatttatagctggaaaagagaatcgattcaaatttttcaacaaattcatgatttttacagaaaattttatttaaagttctctcttttccccctttttacctcattttctttttctgtgttttgagatattataacaagaataataataatttgtcatagtagagataaaatttgggttcgtgtttgattgatcgatctgtcgatggaggattctgcgagcagcgatgaagattactaatattcttccaatcgagattccctcgacagtctcgagaatgaggattctaatttacaatgggccccttcaaagggtcccactaccaaggcagaggagctgctagtcctcgaatttgatcgactcgcctgccgctgtatgccattcagacaatccaaaaggaactgctgaaatctcttctgcaaattatcctactcgagcttatggataggagcaaatggtttggagaactccgttgggaagaaagtttgcgggatgcacacgagtttggaaaacttattctgtttcagaacttggatctagcttactcatcagcagaagtggaggtaatatctattatgaatcacaattaagttgtgtttgaagcattttgtatttacacgcataaatttatgttttctatcacttttcctctccctacatgtgtggtttggaccctttatctttttatgagtaatgcatgtttatattgcaagatatagtttggaatgccttca

SEQ ID NO: 15426 - DNA, 1396 bp, Gossypium hirsutum
  Clone ID: GOSHI-09MAY01-C1606_1
cttccatatccaacaagagcatttgatatggctcagtgttctcgatgcctaataccatggactgcaaatgatggaatgtacttaatggaagttgatagagtcctgaggcctggtggatactgggtgttgtctggccctccaattaattggaagacctactaccaaatttggaagcgaactaaggaagatcttaaggctgagcaaaaaaagattgaagagttagcccacccgcccggctgggagaaaaaatatgagaagggagatattgctatttttaggaaaaaagttaatgacaaatcctgccgcaggaattctgccaatatgtgtaaacctaggggttcagatgatgtttggtacaagaaaatggaaacatgcataacccctttccctaaggtaagtagtgcaagtgaagtggcaggaggggaactgaagaagttcccagctaggctttttgctgtccctcctcgtatatccaaaggacttgttgagggggtctcagttgaaacttaccaagaggacaataagctttggaagaagcatgtaaatgcttacaaaaggataaatagattgattggtactgcaagatacagaaacgtgatggacatgaatgctggtcttggaggatttgcagcagctctcgaatcacccaagtcttgggtgatgaatgttgtgcccacaattggcaaggacaccttaggtgtgatctatgagagaggtctaattggaatatatcatgactggtgcgaaggtttctctacgtatccaagaacatatgaccttatgcatgctaatggtgtctttagcttgtatcaagataagtgtagctttgaagacatccttctggaaatggatcgcattttacggcctgaaggggctgtgatattccgggatgatgtcgatgtcctaaacaaggttaggaaaattgctggaggcatgagatgggacaccaagatgaatgatcacgaggatggtccccttgtgccagagaaaattctagttgcagttaaacagtactgggttggtggtatcaaaggaaacagtacatccagtgctgaataaaccaacatcaacaggtcaagtatttcaaggtaaaactaaaaagcaaaggttaaaatctcgaactgatggtgaagttggttcagacagagggactgaagagttccgatcaacaaccctcaaaaagatacctaagttgctacattgtgttatgcaccatgtagagaatatacacaattatgttagcttgtaatcctgtgtgttattttgggaggaaattgtgttttttacattatttgtgtagctgcccaaataattatgtcaagatacaagaaagcatagtgatgaatgacaataaacaattctatttatcatcacaaggaaaactgatttgtaaaac

SEQ ID NO: 15427 - DNA, 537 bp, Gossypium hirsutum
  Clone ID: LIB3582-025-P1-K1-A9
gtaggcctgattctgataggagcaaatggtttggagaactcccttgggaagaaagtttgccagatgcacacgagtttggaaaacttgttctgtttcagaacttggatccagcttactcttcagcagaagtggaggatatagtttggaatgccttcagtgaaacttgcagagcaaagatggtgcagcagactgcatattctagccctcattttggacaagcttttgctatattcaagtcaagggaagttgcagaggatgttattaaaaaattggatgagagatgcctgttgctaccaaatcggaggccgcttgtagccagcattccgaatccttgcttctcaaggaagcagtcaatgtttgcaggccatcttattgttgataaactcaaatcccaaagggagatgaaagaagcagtatctacttcacattcttcccagcctaacacagttgaatatgatatggccatggaatggtttttaatgactgaaagatccaatcagttctggaaaaaattatacgagcaacaagggaaagagc

SEQ ID NO: 15428 - DNA, 518 bp, Gossypium hirsutum
  Clone ID: LIB3829-033-Q1-N6-H8
aaaataataaattaataaaggaattaaaataaaaaattagaactcaagttgtcgtaaatattaaagtaaaaataagaatttagaatcaaaactaaaataaataatacattatgagaaacagactaactagttgaacctgcctatgactatacacattacaaggtaataaaaaatacattgcagtctgctgcaccatctttgctctgcaagtttcattgaaggcattccaaactatatcctccacttctgctgaagagtaagctgtatccaagttcttaaacagaacaagttttccaaactcatgtgcatcccgtaaactttcttcccaagggagttatccaaaccatttgctcctatcttatcttgatacaagctaaagacaccattagcatgaataaggtcatatgttcttggatacgtagagaaacctttgcacctgtcacaaatctctcacattgattagactcttcaccctttgcagccaagcacctatgaaattcaatgtagcaggtgaaaca

SEQ ID NO: 15429 - DNA, 431 bp, Gossypium hirsutum
  Clone ID: LIB3145-011-Q1-K1-C5
aagatacaagaaagcatagtgatgaatgacaataaacaatttcctcccaaaatcacacaggattacaagctaacataattgtgtatattctctacatagtgaataacacaatgtagcaacttaggtatctttttgagggttgttgatcggaactctttagtccctctgtctgaaccaacttcatcatcagttcgagattttaacctttgctttttagttttaccttgaactacttgacctgttgatgttggtttattcagcactggatgtactgtttcctttgataccaccaacccagtactgtttaactgcaactagaattttttctggcacaaggggaccatcctcgtgatcattcatcttggtgtcccatctcatgcctccagcaattttcctaaccttggttaggacatcgacatcatcccggaata

SEQ ID NO: 15430 - DNA, 533 bp, Gossypium hirsutum
  Clone ID: LIB3829-015-Q1-N6-B4
aaaatccaaaagttagaactcttaagtaaaaaaaaaaatttagactcaaaactaaaataaataatacatatgcaaggtaataaaacatacaatgcattttcttaatcaaataaataatacatttacttaatcaaggaaatcttgtacatcattgaagtcacaccatcaaatctatacccatcaaacttatactcctccagcatttgaaagtagatacctcagtacttcccaacttccataattaaaaaggcgagaatcccacaccgagtggtgaccccttgaccccgtgtggaagtaatgaccatcagtttcatcaaacatgttcagcccatctaacacattattggaagcatggcttgattagctttggattattttcaacgacacgcttaagaccttcatcagtaatcctttggcaatcaaccaggctcaagcattgcaagctaccttggtctcaaccagttattttgtaaaagaacatcatccgtaatcttctcattcggtggcggatttatgagaatatccctccataa

SEQ ID NO: 15431 - DNA, 586 bp, Gossypium hirsutum
  unsure (1)..(586): unsure at all n locations
  Clone ID: LIB3543-033-Q1-K1-F8
tggngccggnaacccttgntgagaagaaaccggagaagagaggtgaaagagagactgaaacttcccattgaataagaaatcaatagaaggaaaaagaaatcagatctttctgaataagaagaagaaaatcagtactttctttccattgaagaacaagaagtgaaagaggatatcaaggggaaaatgtcaacagaaaaactaagaagagccgcacttcctcctgttcaagagaatattgataaattagaaaaagctataaatgagggtaatttttatggagctcagcagatgtacaaatcaataagtgcacggtatgacactatgactgcttgccatcaccaattttattttattatttttaagagttaaaaatttctagaactgttattgttctatgtttctcgggtgtatgtctggttggaatgccatgcccattgtacatgtcaaacagagggacttcacaaatgaagtaaaagaaaagagcctgagcaacaaaggatttaactgtacttagtcttggatggggcttaatagggtaaatccccttatggttagataaaaggcttgtaaaattgagtaggttagc

SEQ ID NO: 15432 - DNA, 535 bp, Gossypium hirsutum
  Clone ID: LIB3582-051-P1-K1-B1
cttgaaataggtttacttagtactagttaaattgggcttgattttagataaatctaattattatctttaagcatgatatgttctaatactttgatttaagccgttgatgtatgtattctgactatggaatatcatgttcaaatattctacaaagaagctaattaggagattctgcaattgttgatggtaattggaatttaaggatataggcttaagggtttaattggaatttaagcatgatatgttttaatattttaaatttatattgatgaatgagaagattacggatgatgttcttttacaaataactagtagaggccaaggaagcttgcaatgtttgagcctggttgattgccaaaggattactgatgaaggtcttaagcatgttgttgaaaataatccaaagctaatcaaggtaatttatttgcccatacccttatgcttaaatatgctggttggtcttcatttgggttaatcatattatatctaataattatattaactggaatatgatggatcatgcattaatgggata

SEQ ID NO: 15433 - DNA, 559 bp, Gossypium hirsutum
  unsure (1)..(559): unsure at all n locations
  Clone ID: LIB3825-028-Q6-K6-B1
cactcaccatcgctactccttttctctcgatctgttagggtttcttttaacgtacagtttccttttaatttctggtgatttctatggcgacggaaaccctantggcaagaaaccggaggaagaggaggtgaaagagaagactgaaacttcccattgaataagaaatcagtagaaggaaaaagaaatcagatccttctgaataagaagaagaaaaatcagtactttttttccattgaagaacaagaagtgaaagaggatatcnaagggaaaatgtcaagagaaaaactaagaagagccgcacttcctcctgttcaataggtgttcttttttatttctattgctttcagtatattttttttgagattattttcagtgaaagaaaaaaaattggaaataacccatcattttttttcgtggaaaactagaaaaaaaaacaaattaaatgataagcctatagctgtatgccattcagacaatccaaaacgaactgctgaaatctcttctgcaaattatcctgctcgagagtatggttggtttttatctaagctatatttctaca

SEQ ID NO: 15434 - DNA, 595 bp, Gossypium hirsutum
  Clone ID: LIB3829-014-Q6-K6-F11
gcttttctggaaaacaaaagcgaagtacgagaaaaattgacaaagtgttaaagaaaaatggttgatttctgtgatttgctgaatattccatttatgaggaccagtgtaagaaaggaggaagtcactgccaaattattggaatttttggaatcccctcatgctacaacaggcgttcttcttgctgacaaggaacagaagggtaaaaggcgtaaggctacaccaagcaaaaacattggttctgcggaggcatcggatacatcagccaagaagcgacgaaaaacaccccaaggtgtagaaaagcgcaagcgttcatccaaagctgaggaggaggaagatgatgataaagttgaatcccctgttactagagatgattctcatgaagatgatgctgacactgcgccaaaagaagagaatgatgatgaggagactaaatcagaggaggaagaagaagaacccaagaagtcaagcaaaaagggcacatcaaaaaaggttgcaacagagagtccggagtcaaaaagcaaggataaatttgaatctgaaaaaaatctcacccctgcaaaatctagcaaaaaatcttctggatcaacttcaaaac

SEQ ID NO: 15435 - DNA, 385 bp, Gossypium hirsutum
  Clone ID: LIB3148-054-Q1-K1-B11
gtttagatcacgagcggcaccctttacaaatttatatataaattgatagaagcttcctgaggcgagaggctatatggacatgaatgccggtctaaaaagatttgcaacatctctcaaatcacccaacccttgggtgattaatgttgtgcccacaattggcaaggacaccttacgtgtgatctatgatagaggtctaattggaatatatcatgactggtgccaaggtttctctacctatccaagaacatatgaccttattcatgctaatggtgtctttaacttgcatcaagattagtgtagctttgaagacatccttcttgaaatggatcccattttactgcctgaaagggcttagatattcccgcatgatggcgatgtcctaaac

SEQ ID NO: 15436 - DNA, 411 bp, Gossypium hirsutum
  Clone ID: LIB3146-048-Q1-K1-D12
aagggattgaggaagcagcaagcaattgccccataagctatcagaaaatctaagaagcttggcactgaagggacttcattattttcaaacttttgaggattcacttcagctttctcttctgcttttgcttctttgattcagctaatagtagaggccaaggaagcttgcaatgtttgagcctggttgattgccaaaggattactgatgaaggtcttaagcatgttgttgaaaataatccaaagctaatcaaggtattgaggtatcttctttcatatgcaagatggtggctggaggagtataagtttgatgggtacagatttgatggtgtgacttcaatgatgtacaagatttccttgattaagtaaatgtattatttatttgagtaagaaaatgcattgtatgttttattac

SEQ ID NO: 15437 - DNA, 521 bp, Gossypium hirsutum
  Clone ID: LIB3829-033-Q1-K6-H8
cgccaatcacacttctttttccttttcatttcactgcactgaattcactcaccatcgctactccttttctctcgatctgttagggtttcttttaattttaggctttcaagggaacatacagtttccttttaattttaatggtgatttctatggcgacggaaaccctagatggcaagaaaccggaggaagaggaggtgaaagagaagactgaaacttcccattgaataagaaatcagtagaaggaaaaagaaatcagatccttctgaataagaagaagaaaaatcagtactttctttccattgaagaacaagaagtgaaagaggatatcaagggaaaatgtcaagagaaaaactaagaagagccgcacttcctcctgttcaataggtgttcttttttatttctattgctttcagtatattttttttgagattattttcagtgaaagaaaaaaatttggaaataacccatcatttttttgtgtggaaaactagaaaaaaaacaaattaaatgacaagcctata

SEQ ID NO: 15438 - DNA, 382 bp, Gossypium hirsutum
  unsure (1)..(382): unsure at all n locations
  Clone ID: LIB3148-030-Q1-K1-C12
ttatgatgtttcatcttaatttcaaaggtggaggtaaagttggaaagcgagctgttgaacatggttactcttcagttcttgctgcacttgtactgcaacttggcagttgtcatggtctggctacctctggtcgacatgaaccactacgtgcacttttaactgcatttaaggcattttgtgaatgtgttggagatcttggaatgggcaagattttggctagagacagtgagcataatgaanagtggattaatcttattggagatttagctgattgcatttccatgaagagaccaaaagagccatgcttccaataatgtgttagatgggctgaacatgtttgatggaactgatggtcattacttccacacggggtcaaggggtc

SEQ ID NO: 15439 - DNA, 350 bp, Gossypium hirsutum
  Clone ID: LIB3083-110-Q1-L1-D9
ctttctttccgttgaagaagtagaagtgaaagaggatatgaagggaaaatgtcaagagaaaaactaagaagagccgcacttcctcctgttcaagagaatattgataaattagagaaagctataaatgagggtaatttctatggagctcagcagatgtacaaatcaataagtgcacgatatgtatctgctgaaagatattctgaggccttggatctgcttgagtcgggtgcatgtctccagttgaagcatggccaggttacttgtggggcagagctcgctgtcttgcttgttgatacacttgtcaaagggaaaatctccttttatgaaaacatctctgtccgtgttaggaa

SEQ ID NO: 15440 - DNA, 473 bp, Gossypium hirsutum
  Clone ID: uC-gsflmaxxa042b02b1
ctgaataaaagtttgtacttaattatttttcccttttaatctcaaaatttgcccccaaatttcccagttctttttccttttcatttcacggcaccgaattcactcaccatagctactccttttctctcaatctgttagggtttctttaattttagattttcaagggaacgtacagtttccttttaattttgctggtgatttctatggcgacggaaaccctagatgacaagaaatcggaggaagaggaggtgaaagataaagaaaacgaagagggaagtaaggaggaagtcactgccaaattattggaatttttggaatcccctcatgctactacagatgttcttcttgctgacaaggaacagaagggtaaaaagcgtaaggctacaccaagcaaaaatattggttctgcggaggcattggatacatcagccaagaatgttaagacatttaaagatgtcaaaggctgtgatgat

SEQ ID NO: 15441 - DNA, 416 bp, Gossypium hirsutum
  Clone ID: uC-gsronu33B089h09b1
ccatttcttccctaccccgattccctttatttggtcgcgccaatttaaacaaattgggaggcctctacatctcctcaaagggtacagattcttcttctcttatagttaaaaagctgtcatttttcaaccaaatccaaaccctaaattgcgtctctcccaatttcttcttcactttgagggtttcttgcaatagtttatagagaggtgagaccaagtaattttgggttacaacatagaaaccaaagtaactaaaaaggtggatatatatgggatattgggtaaccgagattccaagctaggcaaatcaagcatacccaggagacgacaatgggttaaaagaagagaaacatgggtggatatacttggtgtcatcctcaattccgtttacatgttaagcattttccacatctacttca

SEQ ID NO: 15442 - DNA, 409 bp, Gossypium hirsutum
  Clone ID: LIB3147-011-Q1-K1-B9
ctctcgcgtacgaagatttggtttttgttgttcaggaaaatgaagaatttcaggggtgaggggttctttcttagggacatgaaccaacccctaatgaaactcttattttgccccttggctatctcgctgtgcgccatctctttcttattgtgaatgcttgcacatctatgcgattcgtagatcaaaatgatcctctattatgaagggatattcacataaatctgccactgaatgagaaaattaccgatgatgttcttttacaaataactgaaagaggccaacgtagctcgcaatgctcagacctggttgattgccaaaagattactgatgaaagttttaagcgtgtcactgaaaataatccaaagctaatcaaagtaatttatttgcccatacccttatgcttaaatat

SEQ ID NO: 15443 - DNA, 344 bp, Gossypium hirsutum
  Clone ID: uC-gsflmaxxa049e08b1
tcttccacgcgtccggttgctgttattttctttgttactattctcttagtattatcaactctctgatgtaggagccaatgattaacacatatgccagatttagagatgatgttcttccccgtattaaaagacttgggtacaatgctattcagatcatggctattcaagagcactcatattatgctagcttcgagtattacctccatcgtaatattagctcaaatctatttgtttctgtgtatgtttgtaagtttgtaaacttgtactaactgctatgtggcagatataagtagacacatttttctacttaaaacaagttgcatttaatattttacaggtaccat

SEQ ID NO: 15444 - DNA, 395 bp, Gossypium hirsutum
  Clone ID: LIB3196-031-P1-M1-A2
atttctatggagacgaaaatcctagatgacaagaaaccggaggaagaggaggtgaaagagagactgaaacttctcattgaataagaaatcaatagaaggaaaaagaaatcagatctttctgaataagaagaagaaaaatcagtactttctttccattgaagaacaagaagtgaaagaggatatcaagggaaaatgtcaagagaaaaactaagaagagccgcacttcctcctgttcaagagaatattgataaattagaaaaagctataaatgagggtaatttctatggagctcagcagatgtacaaatcaataagtgcacgagaaaccgaaggaaacctgaagaacttaatgcgggaaaaaaggtgaacagtaggaaagtgaggaaagaaaaatta

SEQ ID NO: 15445 - DNA, 1092 bp, Gossypium hirsutum
  Clone ID: GOSHI-09MAY01-C1636_1
cccacgcgtccggaggggacgagatttcgtggtacgctgacggggataagactgtgagaaatgagtataatccagccacagcttacgcatttgatagagtattcggacctcatgcaacttctcaagaggtttatgaaatagctgctagacctgtagtgcaagctgcaatggaaggtgtaaacggaactgttttcgcttatggtgttactagtagtgggaagacgcacactatgcatggagatcaaaatgctcctggtatcattccgttggcaataaaggatgtgttcagcatcatccaagatactccagggcgggaattcttactccgtgtgtcatatcttgaaatctacaatgaggtgataaatgacttacttgatccaactggtcagaatttgcgtgttagagaagatgcccagggaacttacgtggagggtataaaggaagaagtggttttgtctcctggtcatgttctttctttcattgctgcaggggaagagcatcgtcatgttggctcaaataacttcaatctgtttagtagccgaagtcacactatattcaccctgatgatcgagagtagtgctcatggtgacgaatacgatggagtggtcttctctcaacttaatttgattgatttagctggatctgagagttcaaaaactgagacaactgggctaagaaggaaggaaggatcttacataaacaaaagtcttctgactcttggaactgttataggaaagctaagtgaaggaaaagcatcccatgttccgtatagagactccaagcttacccgccttttgcaatcttcactaagtggtcatggacatgtttctcttatttgcacagttacacctgcatctagtaatatggaggaaactcataatacccttaagtttgcaagcagggcaaagcgggtggaaatctatgcctcacattattgacgaaaaatcattaattaagaagtatcagagggaaatttcagtcctcaaagaagaacttgatcatctaaggcagggaatgcttattggtgttaatcacgaagaacttatgaccttaaggcaaaagttggaggaaggtcaggtgaaaatgcaatca

SEQ ID NO: 15446 - DNA, 616 bp, Gossypium hirsutum
  Clone ID: GOSHI-09MAY01-C1196_3
cccacacatccgccctcccgtctgtgttaatgcaacataattatggctgccttcgcgttaatgtcctccgtcatctttctgctatgctgcctcgcctcagcatcaaccttcgaggacacgaaccccattcagatggtatccgatggtctcgactcctctgttcttcgtgtcatccgtcatactcgtcgtgctatctcctttgctcgctttgcttacaagcatggaaagaggtacgaggatgttgaggagataaagctaccgtttcagattttcaaagataatatggatttaatcagatctactaacaagaagggattgccttattctctatctgtgaatcagtttgctgatttaacatgggatgagtttcgaaaacacaggcttggagctgctcaaaactgctctgccaccaaaaagggcaatcaccagctcactgatgtcgtccttcctgaatcgaaagactggagggaatcaggcatagttagcccggtcaaaaatcaggggtcctgtggatcttgctgggcattcagtactactggagctcttgaagctgcttaccatcaggcatttgggaaaggaatctctctttcggagcagcagcttgtggactgtgctc

SEQ ID NO: 15447 - DNA, 718 bp, Gossypium hirsutum
  Clone ID: GOSHI-09MAY01-C1196_2
aacagccattgggaatcccctgctttaaatttctatattccacaaaaatagcgtaacagagcaagaaacacagagaaaaagaaaaccccataatcatggctcgattaacattggtctcctccatcatccttatgctatgctgcgttaccgcagcatcaactttcgaggattccaaccctattcggatggtatccgacggtctccgtggctacgagtcctctgttcttcgtgtcattggccatacacgtcacgctatctccttcgcccgctttgcttacaagcatggaaggaagtacgagacggtggaggaaatgaagcttcggtttcagattttcaaagagaatttggatttgatccgatccactaacaagaaaggcttatcttacactcttgctgttaatcggtttgctgattggagctgggacgagttccaaaaacacaggcttggagctgctcaaaactgctcagccaccacaaagggcaatcaccaactcactgatgtcgtcctccctgaatcgaaagattggagggaagcagacattgtcagccctgttaaagaacaaggctcctgtggatcttgctggacattcagtaccactggggcactagaggcctgcttatcatcaggcatttgggaaagggatctctctatcatagcaacagctagtgtactgtgctggagcctttaaaactttggttgacacggagggttgccgtc

SEQ ID NO: 15448 - DNA, 1406 bp, Gossypium hirsutum
  Clone ID: GOSHI-09MAY01-C1196_1
cccacgcgtccgcagaaacagaacaatagcagcaaccggaaaacaaagaagaaaaacttaatcatggctcggttgacgttggtgtcctccatcatccttctgctatgctccgtcgccgccggatcaactttcgaggactccaaccccatccagatggtatccgatggcctcagcggcttcgaatcctccgttcttcgtgtcatcggtcacactcgtcatgctctctccttcgcccgttttgcatacaagcatgggaagaggtatgaaaacgtggaggagatgaagctacggtttcagattttcaaagacaacttggatttaatcagatccactaacaagaagggactgccttacactcttgctgtcaatcagtttgctgattggagctgggaagagttccagaaacacagattgggggctgctcaaaactgctctgctaccacaaagggcaatcaccagctcactgatgtcgtccttcctgattcgaaagactggagggaagcgggcatagttagcccagtcaaagatcaaggctcctgtggatcttgctggacattcagtaccactggagctcttgaggctgcttaccatcaggcatttgggaaagggatctctctatctgagcagcagcttgtggactgtgctggagcttttaacaactttggttgcaacggtgggttgccatcccaagcctttgagtacatcaaatacaacggtggcctcgatacggaggaggcatacccttacactgcaaaagatggtcaatgcaaattctcatctgaaaatgttggtgttcaagtccttgactctgtcaacattaccttgggtgctgaagatgaattaaagcatgcagttgccatggtccggcctgttagtgtggcatttgaagttgtcactagtttccgtttttacaaaagtggggtttataccagtaaaacatgtggcagcacacccatggatgtgaaccacgctgttcttgcagttgggtatggagtcgaaaatggcgttccatattggctcattaagaactcatggggtgcagaatggggtgacaatggctacttcaagatggagatgggcaaaaacatgtgcggtgtggcaacttgtgcatcatacccaattgttgcttgatccaatcgatgaaccgtgttggatcatgtcatttctgtgttatagaaggcttctagttatggtctacaaatgttgttgtagttgttcggggttatggtctagttgaaaccgatgggttcatgtacaataaggatccaaagacatgtaagatgcaaatctgatgtacacaacaaaggtgtaaatttttatgttgtaatgcttgttgtgtaatagcttgtccacattggaccccaataggggttttaatcacaacacacacgcccctttgcgggtac

SEQ ID NO: 15449 - DNA, 549 bp, Gossypium hirsutum
  Clone ID: LIB3828-031-Q6-N6-B3
caaaaataatattactttactggctcttgcgtgaacaacatatgatgtctttgcaatatttgggtatcaaaccaagctccttaaacatgtaccatgacatggtccccttacattattagaccattttttataacacaaggcattgtcagaagccatgacagacactcatgaccaagcatcaacagggtatgatgcacatgctgccacacctcacatgatttttccccatctaacatgttgaaatacccattagtaccccattgagcttccaatgagcttttgctgagccattactgaacaccgtacagaacaccatctgccaactgcctgaacgcgctggttcacatactgcgtagtggacccacattagccactggtgaaaaccccactcttgtaaaatccataactaactgataacttgaaacgcaacactaaccggactgaccaacatctactgcatgcttcaatttttgttcgacacccaaggtcatggtgacagagtcaatgacttggacacccacattttcaggtgagaatttgcattcacca

SEQ ID NO: 15450 - DNA, 437 bp, Gossypium hirsutum
  unsure (1)..(437): unsure at all n locations
  Clone ID: LIB3165-052-Q1-K1-B8
cccacgcgtccgcccacgcgtccgcccacgctttctcccacgcgtccgaaaaacttatgggggctcggttgacgttggtgtcctccatcatccttctgctatgctccgtcgccgccggatcaactttcgaggactccaaccccatccagatggtatccgatggcctcagcggcttcgaatcctccgttcttcgtgtcatcggtcacactcgtcatgctctctccttcgcccgttttgcatacaagcatgggaagaggtatgaaaacgtggaggagatgaagctacggtttcagattttcaaaggcaacttggatttaatcagatccactaacaagaagggactgccttacactcttgctgtcaatcagtttgctgattggagcttggaagagttccagaaacacagattgggggctgcttanaactgctctgctacc

SEQ ID NO: 15451 - DNA, 350 bp, Gossypium hirsutum
  Clone ID: uC-gsronu33B041h08b1
tttattaagatggtcaatgcatattctcatccgaaaatgttggtgtccaagtcattgactctgtcaacattaccttgggttctgaagatgaattaaagcatgcagttgccatggttcgaccagttagcgtggcatttgaagttgtcccaagtttcaatttttacaaaagcggggtttacttccagtgacaaatgtggcaacacttcctcggatgtagaaccacgctgttcttgcatgtggatatggacattagatcaagtttctggtattggctcattaaaaactcagttctaatcgatctgcagcactcagttctatgttcatgttgtatatgggcattttaaggatgc

SEQ ID NO: 15452 - DNA, 272 bp, Gossypium hirsutum
  Clone ID: LIB3147-046-Q1-K1-G3
caacttgtgcatcatacccaattgttgcttgatccagtcgatgaaccgtgttggatgatgtcattcctttgtgttatagaaggcgtctagttatggtctacaaatgttgtagttgttcagggttatggtctagttgaaacccatgggttcatgtacaataaggatccaaagacatgtaagatgcaaatcttatgtacactttttctgtttaatttttaattatttcatgttagtgtgttttttattttttttttttcttttgtttattattt

SEQ ID NO: 15453 - DNA, 176 bp, Gossypium hirsutum
  unsure (1)..(176): unsure at all n locations
  Clone ID: LIB3148-016-Q1-K1-H5
gaaggcttctagttatggtctacaaatgttgttgtagttgttcggggttatggtctagttgaaaccgatgggttcatgtacaataaggatccaaagacatgtaagatgcaaatctgctgtacacaacaaagacaggtgtaaaatttttatgttttaatgcttgtaacaatacanaa

SEQ ID NO: 15454 - DNA, 564 bp, Gossypium hirsutum
  Clone ID: GOSHI-09MAY01-C1186_4
ccctagcgcagcagtgatgatcatgcacaggggatctattttttcagctaaaataatagtccctagcgcagcagtgttgttccgccacgggcggctgtttgcgctgacaaaatccaccttggaagcatactgggagccattatcatagtctcaggcctttacactgtggtttggggcaaaagcaaagatgtgaaaactccagaacttgaagagaaaagcaacggcctgcaggaattgccaatcacagacaatggtagatcaatgaatgttgttgatggagctgcgaaagctgttaacattccggattcaaagaacactttcagcacacgaggaacataaaacaatatagatatttccttcaaaatgctgatatatttcaagcagagtttgttctttccaaggcgataaaaactactatgtaacccacccctcccagaaactattttctacctttaataatcatcttttgattgtacttttgaggcttatttggtgagtaaaaaccatgaatcatccgcggtttgcttaaaaaaatttttgtattaaaaaatataaattatattt

SEQ ID NO: 15455 - DNA, 920 bp, Gossypium hirsutum
  Clone ID: GOSHI-09MAY01-C1186_3
cccacgcgtccgcccacgcgtccggtgagtactctctatagagaaaaaaactaaaagagagagtaagagactgctattagagaaacaatgggagaccaaatgccatgtgcagctttgtctaatgtatggaacaaagtgaaaccattcttggcaatcatctccctgcaatttggatatgcagggatgtatatcatctccttggtttctttaaagcatggaatgagtaatttcatcctttgtacctatcgtcatgttgttgccaccattatcattgctccctttgcctttgttctcgaaaggaaaatccggccaaagatgacccttcctatcttcctcaggattgtggttcttggtttgctcgaaccagtacttgaccagaacttatactatctgggaatgatgaagacaactgcaacatattcatcggctttcgtcaacatgcttcctgctgttactttcatattggcaatgatttttaggttagagaagatcaatttgaaaaagatatacagtgtagcaaagatcattggaacagcaatcactgtgataggggcaatggtgatgacttgggacaaaggccccattattgacttcgtcaagtcaggaggagccacacaccatagcactaacactgaatctgcagatcaacactgggtttctgggaccattatgcttcttggaagtatcgctggctggtcaagcttctttattttgctatcctgcacatcgaagaagtacccagcacatctgccttttatagtttcaatatgggtcacattttcgcctctttttgccatactgcctttttgattatgactatcatttgtttacttaattacttactttatttcaagaaaatttaaattttcgagattagtcatttaaatatctcttttcatatttttttcttcttctctttt

SEQ ID NO: 15456 - DNA, 1208 bp, Gossypium hirsutum
  Clone ID: GOSHI-09MAY01-C1186_2
cccacgcgtccgcccacgcgtccgcccacgcgtccggcctttgtccttgaaaggaaaattaggccaaagatggggctgccaatcttcctcaggattgtggttcttggcttcctggagccagtgcttgaccaaaacttatactatctgggaatgaagttcacaacagcaacatattcatctgctttcgtcaacatgcttcctgctgttactttcataatggccatgattttcaggttggagaaaatcaatttgaagaaaatacacagtattgcaaaggtggttggaactgcaatcacagtgggcggtgcaatggtgatgacattgtataaaggccccattattgacttcgtcaagtcaggaggagccacacaccatagcactaacactgaatctgcagatcaacactgggtttctgggaccattatgcttcttggaagtatcgctggctggtcaagcttctttattttgcaatccttcacattgaagaagtacccagcagagctgtctcttacagcttggatatgtttcatgggaacggtgcaagatgcagggctgtcatttatcatggttcgtgacctaagtgcctggaaaataggcttcgactccaggcttcttgctgcatcttactctggaatagtgtgctccgggatagcctattacgtgcaaggcatcgtgatccggcaaagagggccggtttttgtaacagctttcagccccctgtgcatgatcatcactgctgcgctagggaccgttattttagctgaaaaaatccaccttggaagcatactgggagccattatcatagtctcaggcctttacactgtggtttggggcaaaagcaaagatgtgaaaaccccagaacttgaagagaaaagcaacggcctgcaggaattgccaatcacagacaatggtagatcaatgaatgttgttgatggagctgcgaatgctgttaacattccggattcaaagaacaccttcagcactcgaggaacataaaacaatatagatatttccttcaaaatgctgatatatttcaagcagagtttgttctttccaaggcgataaaaactactatgtaacccacccctcccagaaactattttctacctttaataatcatcttttgattgtacttttgaggctaatggtgagtaaaaaccatgaatcaatcgcggtggcttatgttttccttcaattaatatttaaaa

SEQ ID NO: 15457 - DNA, 1213 bp, Gossypium hirsutum
  Clone ID: GOSHI-09MAY01-C1186_1
caagtagtggagaggtaaaagagacagaaaaatgggagaccaaacatcaagtgcttcagctttgtctgatgtgttgaacaaagcgaagccatacttggctatcatatctctgcagtttggatatgccgggatgtacatcctctccaccatttgcatgaagcatggcatgagtaatttcatcctcgctacctaccgtcatgttgtcgccaccattgtcattgcaccctttgcctttgtccttgaaaggaaaattaggccaaagatgaccctgcctatcttcctcaggattgtggttcttggcttcctggagccagtgcttgaccaaaacttatactatctgggaatgaagttcacaacagcaacatattcatctgctttcgtcaacatgcttcctgctgttactttcataatggccatgattttcaggttggagaaaatcaatttgaagaaaatacacagtattgcaaaggtggttggaactgcaatcacagtgggcggtgcaatggtgatgacattgtataaaggcccaattattgacttcgtcaagtcaggaggagccacacaccatggcactaacactgaatctgcagaccaacactgggttactggcaccataatgcttctagcaagtatcttaagctggtcaagttactttattttgcaatccttcacgttgaagatgtacccagccgagctctctcttacagcttggatatgcttgatgggaacgatcgaaaatgcagtagcgtcccttatcatggtccggggtataagtgcttggaaactaggttgggattcaaggctccttgctgcgtcttactctggaatagtttgctctgggattgcgtattacgtgcaaggagtggtgatccgggaacgaggaccggtgttccttacgtcattcagccctctatgcatgatcatcactgctgctctcggtacctttgttttatcagaacaagtccaccttggaagcattcttggagccattatcatagtctcagggctttacactgtggtgtggggtaaaagcaaagatgggaaaagcccagaaagtgatgagaaaagcaaaggcctgcaagaattgccaatcacaaacaatgctaaatcaatcaatgttgatgagagcattgatggagatgccaaaattgttaagattccagcttcaaacagaccctttagcacttaaggaaacatataacatttccttaat

SEQ ID NO: 15458 - DNA, 322 bp, Gossypium hirsutum
  Clone ID: uC-gsronu33B046b01b1
ctttaagataaaagcaacggcctgcaggagctgccaatcacagacaatggtagatcaatgaatgttgttgatggagctgacaatactgttaacattccagatttaaagaacaccttcagcactccaggaacataaaacaatatccaatatttcccttaaaattgatatgtttcgagcagagtagttcttcccaaggcggtaaaaactactatatatgtaatccaccccctccctattaagcacttttgtaactcaataatcatcttttgattgtactctttttttttctttaataatctaattaatttactcttgaggcttt

SEQ ID NO: 15459 - DNA, 317 bp, Gossypium hirsutum
  Clone ID: LIB3146-015-Q1-K1-B11
ggtacctttgttttatcagaacacgtccaccttggaagcattcttggagccattatcatagtctcagggattgcgtattacgtgcaacgagtggtgatccgggaacgaggaccggtgttccttacgtcattcagccctctatgcatgataatcactgctgctctcggtacctttgttttatcagaacacgtccaccttggaagcattcttggagccattatcatagtctcagggctttacactgtggtgtggggtaaaagcaaagatgggaaaagcccaaaaggtgatgaaaaaagcaaaggcttgcaagaatggcc

SEQ ID NO: 15460 - DNA, 242 bp, Gossypium hirsutum
  unsure (1)..(242): unsure at all n locations
  Clone ID: uC-gsflnu33B024a06b1
aaagagatggaacatatgtcacttgagganttcggatgtggtggatacatccacatatagtgttgacgtaggaatgtgatgacccggttattctgcaaggtgcttacagtctttgggtttttggttccttttggttctgcaagtatcttaagctggtcaagttactttattttgcaatccttcacgttgaagattgacccagccgagctcttttttacagttttgatatgcttgatgggaac

SEQ ID NO: 15461 - DNA, 568 bp, Gossypium hirsutum
  Clone ID: GOSHI-09MAY01-C1156_3
caacattatgctttggaatgctgttatatttggacttgatgacaccccatgggatggaggtcagcagggtacatgagggttgggtaaccagggatgtagcagatgtagtttgcattgtattttttattaccaagatttacttgattaagaaaatgcattgtattttttattaccttgcaatgtgtatggtcataggcaagttcaactagtcagtctatttctcatatgtattatggattttagttttgattctaaatttttatttttactttaatatttgcgacaacttttctaaaaaaaaaaaaaaaaaaaaaaaaaaaaaaaaaaaaaaaaaaaaaaaaaaaaaaaaaaaaaaaaaaaaaaaaaaaaaaaaaaaaaaaaaaaaaaaaaaaaaaaaaaaaggggggggcgggttttaaaggatcaattttttcttccgcgggcttgcaaggtaatagtttttttttggggcccccaaaattaaattaacgggccggggtttaaaaacgtggggacgggaaaaaccttggggttcccaaattaaatgcctttggagaaaatccccttt

SEQ ID NO: 15462 - DNA, 1123 bp, Gossypium hirsutum
  Clone ID: GOSHI-09MAY01-C1156_1
cccccgcgtccgccccgctctttatttatgttataataataaaaaggaaaataaaatcttctccttcggatctattggcttataattaattgagagaggaagaaattagataaagaaaaatggttctctgataaaaatttccgtttgtttcctgagcaaatctcgggaaggaataccctttttttccccctgttgttaactcgttgtgattgtgaagctttctttaaaagaatcctagttaactcgacgcgtttacccagaaagaggtgaagatgtcaactcctgcaaggaagagattgatgagggattttaagaggttgcagcaagatcctcctgcaggaattagtggtgcacctcaagataacaacattatgctttggaatgctgttatatttggacctgatgacaccccatgggatggaggtacgtttaagctgactcttcagtttacggaggattatccaaacaaaccaccaactgttcgttttgtatcccgaatgttccatccaaatatttatgctgatggtagcatctgtttggacattctacaaaatcagtggagtccaatttatgatgtagctgcaatactgacatctattcagtcattgctttgtgatccaaatcctaattcccctgcaaattctgaagctgctcggatgtttagtgagaacaagcgcgaatacaataggagagtacgtgagatagtcgagcagagttggactgctgattgatctctcatgttggatttccatagtcagaacaaagcgtggatacattaggagagcatgtgagactgtcaagcatagttggactgctgattgatagctcaacgtttggtttggtttctatggaacgtcaaaaatagtccaatgtcgtgtctaaataacattgaacaccgcaaatgtgttgcaaactactttgtctttattatgttgtttgtgttaagaaaatgaacgctgttccttgggcagcatatttcatctagtactccaagcataaataaaccctaagtcccaagtaaatcaaacttgaaacttccattgggaagcttcttggtgatgatttgtgtaaatactaagtttatttttgctacagttattaaaactatactgctatataatgg

SEQ ID NO: 15463 - DNA, 614 bp, Gossypium hirsutum
  unsure (1)..(614): unsure at all n locations
  Clone ID: LIB3543-055-Q1-K6-B2
ccctgtcgacccagcgtccgatactgtggccttttttatcatttattttgtgcaggaattagtggtgcacctcaagataacaacattatgctttggaatgctgttatatttggacttgatgacaccccatgggatggaggcaacaaggtgaataatatcgatgattattactttgattatttatggtgcaaagattataagtatatcaaggtgatcttttctgattgtcgtgaaacttctgcatctcagccgagggtacatgaagattggataaccaggaatgtagcagatgtagtttgcattgtattttttattaccaagatttacttgattaagaaaatgcattgtattttttattaccttgcaatgtgtatagtcataggcaagttctactagtcagtctatttctcatatgtattatttattttagttttgattctaaatttttatttttactttaatatttacaacaacttttctaacttttggattttaattgtgttattaatttattattttaaattctaaaattaanttcnnnananaaaaannaaaaaaaaaaaaaaanaanaananaaaaaaaaaaaaaannnnnaanannnnnnnnnnnnnaa

SEQ ID NO: 15464 - DNA, 564 bp, Gossypium hirsutum
  Clone ID: LIB3585-051-P1-K1-H10
cccacgcgtccgcccacgcgtccgcccacgcgtccgggagaaattagataaagagaggtgggtctctgataaaaatttccgtttgtttcctgagcaaatctcgggaaggaataccctttttttccccctgttgttaactcgttgtgattgtgaagctttctttaagagaatcctagttaactcgacgcgtttacccggaaagaggtgaagatgtcaactcctgcaaggaagagattgatgagggattttaagaggttgcagcaagatcctcctgcaggaattagtggtgcacctcaagataacaacattatgctttggaatgctgttatatttggacctgatgacaccccatgggatggaggtacgtttaagctgactcttcagtttacggaggattatccaaataaaccaccaactgttcgttttgtatcccgaatgttccatccaaatatttatgctgatggtagcatctgtttggacattctacaaaatcagtggagtccaatttatgatgtagctgcaatactgacatctattcagtcattgctttgtgatccaaatcct

SEQ ID NO: 15465 - DNA, 462 bp, Gossypium hirsutum
  Clone ID: uC-gsronu33B032d07b1
cccacgcgtccgcccacgcgtccggctttggaatgctattatatttgggtatattatgaaataagactagagaatctttatgtacttgctttttagattaaagttctattaaattgtgctaatgtctttacttgatggatttgcagactaatgctaatgtctattaaattctggtgttttggtttgaagcatcaatttttctatgttcgtttagttgatttgttcgattttctctttagaaggttgccatgctcaatatatgttgatgtaatctatttaaaatttctgagcgggtttaaaatttattttgattattatgtgtggctaggtaacaaggggaataatatcgatgattattactttgattatttatggtgcgaagattataagtatatcaagggtgatcttttctgattgtcgtgaaacttctgcatctcagccgagggtagtcttaattgatct

SEQ ID NO: 15466 - DNA, 466 bp, Gossypium hirsutum
  Clone ID: uC-gsflnu33B101h07b1
aatatatttccgtttgtttcctgagcaaatctcgggaaggaataccctttttttccccctgttgttaactcgttgtgattgtgaagctttctttaagagaatcctagttaactcgacgcgtttacccggaaagaggtgaagatgtcaactactgcatggaagactgtgccccttgagaattgatacaaatagggtgagccttctgcaggaattagtggtgcacctcaagataacaacattatgctttggaatgctgctatatttggacctgatgacaccccatgggatggaggtacgtttaagctgactcttcagtttacggaggattatccaaataaaccaccaactgttcgttttgtatcccgaatgttccatccaaatatttatgctgatggtagcatctgtttggacattctacaaaatcagtggagtccaatttatgatgtagcttgcatactgacatcta

SEQ ID NO: 15467 - DNA, 430 bp, Gossypium hirsutum
  Clone ID: uC-gsflnu33B101h01b1
atctaattttacttaaaaaatctaaagacgagagaaaagggagagggtaaaggaatcggaatcggagccggcgtcgtcggattgggaagctttctttaagagaatcctagttaactcgacgcgtttacccggaaagaggtgaagatgtcaactactgcatggaggactgtgccccttgagaattggtacaaatagggtgagccttctgcaggaattagtggtgcacctcaagataacagacattatgcttaaggaatgctgttatatttggacctgatgacaccccatgggatggaggtacgtttaagctgactcttcagtttacggaggattatccaaatgaaccaccaactgttggttttgtttccggcatggcccatgcaaagatttatgctgatggtagcatatgcatggacattctacaaaatca

SEQ ID NO: 15468 - DNA, 528 bp, Gossypium hirsutum
  Clone ID: GOSHI-09MAY01-C1146_2
tcgtttgattttagcttccgcaagcaaaccctaaccctaaactttcttttcttcatctttttttttcctctcaatcgcgataatgtctcacttcggaaggtcaggcccgcccgacatcaccgacacctactcccttctcgtcctcaacattaccttccgcacgactgctgatgatttgtttccgctcttcgacaagtacgggaaggtcgtcgacatcttcattcccaaagatcgaaggactggtgattctcgaggctttgcatttgtgcgctacaagtatgccgatgaggctcagaaagctgtagataggctcgatgggagagttgttgatggtcgggagataactgttcagtttgcaaaatatgggcctaatgcagagagaattcagaaaggaaggattattgaatcatttccaaagtcaagaagccgcagtcctcgcagaaggcaccgcgatgaccatcattaagataaggattgtggagagtcgagtagagttatacgattaacgtgatcgattctggaagacaa

SEQ ID NO: 15469 - DNA, 1160 bp, Gossypium hirsutum
  Clone ID: GOSHI-09MAY01-C1146_1
gcctaaccctagcccattatcttaatttctcccttgcccacgcgtccgcccccccccccccttccattgctcttcttctccaccgccatgtctcacttcggaaggtcagggccgcccgacattagcgatacttactctcttctcatcctcaacatcacctttcgcaccagtgctgatgatttgtttccgctcttcgacaagtacggcaaggtggtcgacatcttcattcccaaagatcgaaggaccggtgattctcgaggttttgcatttgttcgctacaagtatgcggatgaggcacaaaaagctgtggataggctcgatgggagagttgttgatggtcgggaaataacagttcagtttgcaaaatatgggcctaatgcagagaggattcacaaaggaaggatagttgaatcagcaccaagatcggggcacaggtcaagaagccgcagtcctcgcagaaggcaccgtgatgaccattacagagatagggattatagaagaagtcgtagtagaagtcacgacaggtatgaacgtgatcgctatcgtgggaaagacagagattctcggcgccgtagcaggagtcgtagtgctagtcctgactattctaaaggccgaggaagaggccgctatgatgatgataggcggagtgttagtcgatcgataagtgcttctcctgctcgccgcagccctagtcctcggaagagcccttcccctcgtaagacatctccccctaggggtgaaagtcctggtagacggagccgtgatggacggtctccaagtcctcggagtgtttcaccgcgagcgccgccctgctgattctcggagcccatctcctcgaaactcagaggtcgatgaatgatcttgctgatggcatcggaattcctggagactttgacttagcatggttcctgttgctatgttgctagtgttgacgacatccaagtatcatgcattttctagtattggtaggactggggtgtcggtgttttaattgacttcagctttgttatggtatctgaacttatgtagtttttagcttgatgtttcattactcatcaaaggttttgtgatgtaagtttgttattgtaatttgttgccatcctctcttcagatctcatatttggctctgattttgctttatattttgctttctaattatg

SEQ ID NO: 15470 - DNA, 869 bp, Gossypium hirsutum
  Clone ID: GOSHI-09MAY01-C1176_1
gtacagcagcatacccagcagcaatacgactctggagaactctcaagggaacttcagaaggatggaggtccgtttcctggtcggttgcatgcttctttcctggaattgtgtttgttatcctcgcagtattgaattttattctgtggggcagcaaaagcactggtgcaattcccatttctctgtattttgtactcttgtctctctggttctgcatttctgtgcctctcactctcgtgggaggattcttagggaccagagctgaagctatacaatatcctgtacgaaccaaccagattccaagggagattcctgctcgcaaatatccatcttggcttcttgttcttggtgcagggacccttccatttggaaccctgttcattgaactcttcttcatcctttctagcatctggcttggcaggttctattatgtatttggcttcttgcttatagttcttctactgcttatcattggttgtgctgaagtttcggtggtccttacctacatgcatctctgcgttgaggactggcgatggtggtggaaggctttctttgcttcgggttcagttgcactctatgtgttcctctactccatcaattacttggtctttgacctacagagtttgagtggtcctgtgtcagctattctttatctcggctactcaatgatcatggcgattgcgatcatgctgtctacaggcaccattggcttcatcacatcattctattttgtccattatctcttctcatccgtcaagatcgactaaaagggtcccttggcgatcttcagctaccatcctgaagaagactttggcctgtaagaggatgatttctctcaagttgcctttggtagccgatcatgcatcactgta

SEQ ID NO: 15471 - DNA, 601 bp, Gossypium hirsutum
  Clone ID: GOSHI-09MAY01-C1106_5
gggaaaaacaggcgcgacgcgcacgcgtgcggaaactcatacgaacacgctttcaattcattcttcactgacattgaacacacgggattatccgtacccgctatcagaatactcagacccaaccattgctcaaggataatctcttgccaaaacggctaattctttcattcatgacacacttcttcaatgactatctggaggataatagccttgatgatttaatttctcttctgaagcgagggaaaattgaggatgatctcctgcaatttttcccctccacaaagcgatctgctgaaagtttctcttagcattttaccaaggcatgtttgttacccttggttgaatacaatgagaaaaaaatatttgacgtataactgaaggagaatgaactctgctgtgtcaacccaaattgctgaggaatctgatatttctgcagtcattcagactgtcaaacaacgtgttaagggtgctaaattacctgatattgagggtggactaattctttgggatgtgataatggatgctgttcaatggtttggaaacacataggagcagaatgcccacccccccttatacaggtgaaaacatggggaaagctgtg

SEQ ID NO: 15472 - DNA, 636 bp, Gossypium hirsutum
  Clone ID: GOSHI-09MAY01-C1106_4
tttacgcgtccggtacgaattctttgggatgtgataatggatgctgttcagtggtctggcccgcgcctccggcagaatgccaattcagctttacgacaggtcaaaacatgggcaaagctgttaaattcgttctgcagcagtggaaaacttgaactggagcttatgtataaggttcagatgcaatgctatgaggatgcaaaattgatgaagctattcccggagattgtgaagtctctctatgaccaggatgtccttgcggaagacacgattctttactggttccgcaaaggattaaacccaaagggcaggcaaaccttcgtgaaagccctggagcccttcgtgaattggctggaggaagccgaagaagaggaataagcgcgtggataataatagtgttatcaacaatcaagaagttatgataattaaccttgttatcttttccttgtctttattgagctatatgtttgccgaactcttttgacatttggtgtgtgcctgctaaaatatttgctgcgctcgtatgctcagcttaatggattattagcttaaataaagaaatatggtgctctttgtaccatctctgttgtaaaaaaaaaaaaaaaaaaaaaaattaaaaaaaaaaaaaaaaaaggggcg

SEQ ID NO: 15473 - DNA, 680 bp, Gossypium hirsutum
  Clone ID: GOSHI-09MAY01-C1106_2
gcatactctctctctttattttctgtcaggtttcttttttctctctcaaaaatctctcaaatccaatactctccgctcctctgatcttttcttcgacttggtttatgagctcgaaggagaaacccactcttggcggtacgcggattaagacccgcaaacggaatattgctgcacccctggacccttcagcatttgctgatgcagtagtccagatctatttggataatgctggtgacctggaacttgttgccaggagcattgaatcttcagatcttaacttctcaagatacggtgacaccttctttgaggttgtttttgctggaggccgcacacaacctggcacacttaaacctgatgaaggggagtgccacccttactctatcatagagtgtgaggctaaacgtgatgccattttaccatctgtgatttacattcagaaaatcttgcgccgaagaccttttctgataaagaatcttgaaaatgttatgcgaaggctcttgcagtccttggagcttttcgaggaaaatgagaggaagaagcttgcaattttcacagcacttgctttctcccagaaattatcagggttgccacctgagactgtgttcccgccattgctcaaggataaccttgtggccaaagggctagttctttcattcatgacagacttcttcaaggactat

SEQ ID NO: 15474 - DNA, 1831 bp, Gossypium hirsutum
  Clone ID: GOSHI-09MAY01-C1106_1
ttatatacgaaaatttcacatacataaataacaaggactcataaatataagatctttttctaaaacccagcataccccaattcctattcctctttccctcccccccccacaaaaaaaaaaaactccaaatctaaagagagactttcctctcctccgatcctttcttcgtcttggtttatgagctcgaaggagaaacccactctcggtggtacgcggattaagacccgcaaacggaatattgctgcacctctggaccctgcagcatttgctgatgcagtagtccagatctatttggataatgctggtgatctggaacttgttgccaagaaccttgaatcttctgatcttaacttctcaagatacggtgacactttctttgaggttgttttcaccggaggccgcacacaaccaggcacaatcaaacctgatgagggggagcgccacccttactctgtaatagagtgtgaggctaaacgtgaagccattttgccatctgtgatctacatacagaaaatcttgcgtcgaaggccttttctgataaagaatcttgaaaatgttatgcgaagattcttgcagtccttggagctgtttgaggacaatgaaaggaagaagcttgcaattttcacagcacttgctttttcccagaagctatcagggctgccacctgagactgtgttccagccactgctcaaggacaatcttgtggtcaaagggctagttctttcattcataacagacttcttcaaggactatctggtggataatagccttgatgatttaatttctcttctgaagcgagggaaaattgaggacgatctcctgcagtttttcccctccacaaagcgatctgctgaaggtttctctgagcattttaccaaggcagggttggtacccttggttgaatacaatgagaaaaaaatatttgaggtaaaattgaaggaaatgaagtctgctttgacaacacagatagtagaggaatctgatatgtctgaagtcattgagactgtcaaacaacgtgttaaagatgctaaattacctgatattgaggttatacgaattctttgggatgtaataatggatgctgttcagtggtctggaaagaaccagcagcagaatgccaattcagctttgcgacaggtcaaaacatgggcaaagctgttaaattctttctgcaccagtggaaacattgagctggaacttatatataaagttcagatgcaatgctatgaggatgcaaaattgatgaagctgtttcccgagattgtgagatctctctatgatcaggatgtccttgcagaagacaccattcttcattggttccgcaaaggaaccaacccgaagggcaggcaaacctttgtgaaggccctggagccatttgtgaattggctggaagaagcagaagaagaggaataagctggccaataataatagtatggtcagcaatctatagaaatggtgataaaccttgtacttgttccttgtttttattagctatctgtttgtgagacaaccaactcatagttaccagatccttaagactcatggtgtggctattaaaatatgagatgctaaaattgatggagtaattaatgttaatatatgatggttcaataaacaaaaatcttcctttgtacccgctctcgctgtctatatatatgtatggggtagatgcatgtggttgtggttggattcagtttatttgtcctttgatttgggtggtgattttagaatttggattttggtatgcatgttttatggtttcaatctttgtattatttctgatttcagttgttgcatttgttagttaaggacatggaatggccgatttcgt

SEQ ID NO: 15475 - DNA, 539 bp, Gossypium hirsutum
  Clone ID: LIB3584-014-P1-K1-A4
taccggccggaatccggtcgcccacgcgtcggcattgctgatgcagtgtcaactattggatatgtgggactggaactgtgccagaacctgatctttgatctactctcagatcggtgcacttctttgagtgtttcaccggggccgccacaaccagcacaatcaacctgatgaggggagcgccaccctactctgtatagaggtgaggtaacgtgagccatttgccatctgtgatctacatacagaaaatcttgcgtcgaagggcctttctgataaagaatcttgaaaatgttatgcaaagattgttgcagtccttggagctgtttgaggacaatgaaaggaagaagcttgcaattttcacagcacttgctttttcccagaagctatcagggctgccacctgagactgtgttccagccactgctcaaggacaatcttgtggtcaaagggctagttctttcattcataacagacttcttcaaggagtatctggtggataatagccttgacgatttaatttcaattctgaagcgaggggaaatg

SEQ ID NO: 15476 - DNA, 461 bp, Gossypium hirsutum
  Clone ID: LIB3120-026-Q1-K1-C5
cactctctctttattttctgtcagatttcttttttctctctcaaaaatctataaactggtgtgctctacagtcctctgggcgtgtcttcaacttggtttattacctctaatgaaaaacccactcttggcggtactcggattaagacccgcaaacggaatatttctgcacccctggacccttcatcatttgctgatgcactaatccacatctatttggataatgctggtgacctggcttcccaatcaaacacttcttgtgtcttgcaggaacttgttgccaggagcattgaatcttcacatcttaacttctcaaaatacggtgacaccttctttgaagttgttttttctggatgccccacacaacctggcacacttaaacctgaataaagggaatgccacccttactctatcatagaatgtgaagctaaacctaatccctttttactatctgtatttacatt

SEQ ID NO: 15477 - DNA, 369 bp, Gossypium hirsutum
  unsure (1)..(369): unsure at all n locations
  Clone ID: LIB3196-059-P1-M1-E2
cggacgcgtgggtttgtctaagggctgggatacccgaattgctgtttctctcccccccccacaaaaaaaaaaactccaaatctaaagagagactttcctctcctccgatcctttattcgtcttggtttatgagctcgaaggagaaacccactctcggtggtacgcggattaagacccgcaaacggaatattgctgcgcctctggaccctgcagcatttgctgatgcagttgtccagatctatttggataatgctggtgatctggaacttgttgccaagaaccttgaatcttctgatcttaacttctcaagatacggtgacactttctttgaggttggtttcaccgggggccgnacacaaccaggcacaa

SEQ ID NO: 15478 - DNA, 514 bp, Gossypium hirsutum
  Clone ID: GOSHI-09MAY01-C1126_1
ttcacgcgtccgcccacgcgtccgctatgtagttccccccacatcatcccaattctccttgcatcaagtcactctaaatccttcccattttcttctcaaacttcttcttcttcacaaggcagtaatggcgatttcctttgggatttatcttctttttctactgaatttcttctcatttggggcgatattttcttcagcaacaagctttacactcgaaaatcgttgtagtttcacagtatggcctggttccctgaccgcaaatggccctccccttggtgatggtggttttgcattggctcctggttcatcatcccggctccaccctccacctggttggtctggtcgcttttggggtcgaactggctgcaatttcgacaactctggctcaggaaaatgtgtaaccggtgactgtggtggcgcgttaaagtgcaacggcggtggcatcccacccgtttccctgatcgagttcaccctttatggacatgacaataagggactcttatgacattagtct

SEQ ID NO: 15479 - DNA, 391 bp, Gossypium hirsutum
  Clone ID: LIB3585-044-P1-K1-C1
cccacgcgtccgcccacgcgtccgtattttcttcagcaacaagctttacactcgaaaatggttgtggtgtcacagtatggcctggttccctgaccgcaaatggccctccccttggtgatggtggttttgcattggctcctggtttattatcccggctccacccttcacctggttggtctggtcgcttttgggttcttactggctgcaatttcctcaactctggcttctgaacattgtactcccgtttttctgtgtatgctctatatggagaactttcagataggttttatcagaatggttcttgttttgcatgttatcagtcatatataagggagttctggctcagtcttagaagctaattggcataattcaataaatattggttcttttt

SEQ ID NO: 15480 - DNA, 1929 bp, Gossypium hirsutum
  Clone ID: GOSHI-09MAY01-C1096_1
gtccggcccggtatcccctcgaccgcacccacgcgtccggaaaaaaaaaaggtggggagagggtgtgacagagagagaaataattcaatttggattctagtcggaaagtcaggaaaaatcacttcttcaaagtttaagggacttttaagggttcaattcagctccaactttctccttcgctgcttttggtttatggttgtcgataccgctgcttgaaatctaaccaccctacactgcacgaggggtgcttaggatatcgagcattagaccatacagaaacccggcgtccgccctcgccgtccggcaagaaaaaaaaaaatgagggatgtgcattttagcagagagaaggcaggaaaaggagtggtgctattttttttctggatgctgagtttgatctcgctatcttgcgcggctaggctaagtgtgtcgagacagaagctccaagtgcaaaaccacttgaaccgtttgaacaaaccggctgttaaaaccatccagagtccggatggggatattatagactgtgttcacctctctcgtcagccagcttttgatcatccttttctcaaagaccacaaaattcagatgaggcctagttaccacccagagggtctttttgacgagaacaaggtctctgacactgagaaacccaaaaagggctcgaaccccattactcagttgtggcacatgaatggtaaatgtcctgatggaaccattcccatcagaagaactaaggaagaagatgttttgagggcaagctcagttaaaagatatggtaggaagaagcatagggccatccctcagcccaagtctgcagatcccgatctcatcaatgaaagtggtcatcagcatgcaatagcatatgtggaaggggataagtattatggagctaaagcaaccataaacgtttgggaacccaaaatacaacagcctaacgagttcagcttatcccagttgtggattctgggaggttcttttggtgaagatcttaatagtattgaagctggttggcaggttagcccagatctctatggtgacaacaatacaagacttttcacctattggaccagtgatgcatatcaagctacaggctgctacaatctcctctgttctggtttcattcaaattaacagtgaaatagcaatgggagcaagcatatctcctgtttctgcttatcgaaattcccaatatgacatcagtatacttgtatggaaggatcctaaggaagggcattggtggatgcagttcggtaatgactatgtgttgggttattggccttccttcttattctcctacttggcggacagtgcttcgatgatcgagtggggaggtgaggttgtgaattcagaaccagatggacatcacacttccactcaaatgggcagtggccgtttccccgaagaaggttttggcaaatctagttatttcaggaacatacaggttgttgatgactccaataatctcaaggctcccaaagggcttggcacctttacagaacaatcaaactgctatgatgtacaaacagggagcaacggggattggggccattacttttattatgggggccctggtaaaaaccccaattgtccttaagagcaagagggaaaagcacctttttctttttggcgttgtgttttctacctttgttcccgtgtatcattcaaaccctagtgtactgtctcctcttatatatctttttggtttttactattaggttgggttagtaacctctctagcggaaaatttagttttgattctggttgttttacttgaaaaagatcccatcccatgtaagtggtctggaattcggccaagtttctgaaaaagccaaagaggaactggcctttgttgctactctttgtaattctatttctttgtttactactttctcggagttttggtttgttattgttaatgaatggagctctttaa

SEQ ID NO: 15481 - DNA, 461 bp, Gossypium hirsutum
  Clone ID: uC-gsflmaxxa060e11b1
taaagtttaagggacttttaagggttcaattcagctccaactttctccttcgctgcttttggtttatggttgtcgataccgctgcttgaaatctaaccaccctacactgcacgaggggtgcttaggatatcggagcattagaccatacagaaaacaggaaaatagtttgggtttttagcaaaaaaaaaaaaaatgagggatgtgcattttagcagagagaaggcaggaaaaggagtggtgctattttttttctggatgctgagtttgatctcgctatcttgcgcggctaggctaagtgtgtcgagacagaagctccaagtgcaaaaccacttgaaccgtttgaacaaaccggctgttaaaaccatccagagtccggatggggatattatagactgtgttcacctctctcgtcagccagcttttgatcatccttttctcaaagaccacaaaattcagatgag

SEQ ID NO: 15482 - DNA, 880 bp, Gossypium hirsutum
  Clone ID: GOSHI-09MAY01-C1056_1
cgttttcctagttgtctctaattttcccgcattttctcgggcggccgcgcgggtttctctctcttccggcgagattggatctaagtgctctgacatatatatatttttactccaacctcacttggtcccttcaaaccggaagagaaacggaaaccccaatttcttaacttccgaggggtttccagttagggttttactggatctaccactattggaatatttggtttttggataattcgtgatatttacggctttgggttgcttttgtttttcttggaggggttttatttgttagatttctggagctccggcttagttttaaaagggaagaatttgaatagccaatgccatatttgggtaattggtatttgaaaggtgtatttttagcgtaattttttttggagagaccgaaaaaacaagtgatcaatgtcttgggcaggccctgaagatatctacctttctacttctcttgccagttatcttgacagaaaacttttagttctgctgcgagatggacggaagctcatgggaacattacgttcatttgatcaatttgccaatgctgttcttgagggtgcttgtgaaagggttattgttggtgacctttattgtgacatccctttaggtctctatgtaatccgtggagaaaatgttgtcttgattggtgaactggacttggagagagaggaacttcctccgcatatgactcatgtgtctgttgcagaaattagacgggctcagaacgcagagaggcacgcaacagatcttaaaggtacactgaggaaaagaatggagttccttgatttggactaactcacgtgtcctgcatcccgttttagtgatccgcaagttttttggcggctgatggtgtacgagatgt

SEQ ID NO: 15483 - DNA, 532 bp, Gossypium hirsutum
  unsure (1)..(532): unsure at all n locations
  Clone ID: LIB3828-027-Q6-N6-G2
aaattaaaggcaggtacattgtttgcaaatgttacagaaccgatgttgagaacggaatgagaggaacaaanagagatggaccatcttctagcctacacatctcctacaccatcaaccgccataaaacttgcggatcactaaaatgggatgcaggtaacttgagttagtccaaatcaaggaactccattcttttcctcattgtacctttaagatctgttgcttccctttctgctttctgagcctgcataagttacaatgctatttattaatgaaaatatccaactacaaaatacttaacatataaatctatttagtaaactttttttttttggccagaaaacagaataattaattgtgttcagacatttagtttaattgatacgtaaaatgtactagaaatctgtatatgtatgtatgcatgtatgtataatgggcatccggtgaaacattattactcatatcattaggaaccatgccaatccctcccaagaaactgggttcagagatgaagcctggtacaatgaatttcttt

SEQ ID NO: 15484 - DNA, 432 bp, Gossypium hirsutum
  Clone ID: LIB3165-050-Q1-K1-B12
atatatttttactccaacctcacttggtcccttcaaaccggaagagaaaccccaatttcttaacttccgaggggtttccagttagggttttactggatctaccactattggaatatttggtttttggataattcgtgatatttacggctttgggttgcttttgtttttcttggaggggttttatttgttagatttctggagctccggcttagttttaaaagggaagaatttgaatagccaatgccatatttgggtaattggtatttgaaaggtgtatttttagcgtaattttttttggagagaccgaaaaaaaagtgatcaatgtcttgggcaggccctgaagatatctacctttctacttctcttgccagttatcttgacagaaaacttttagttccgcatatgactcatgtttctgttgcagaaattaga

SEQ ID NO: 15485 - DNA, 918 bp, Gossypium hirsutum
  Clone ID: GOSHI-09MAY01-C1046_1
ccccttactgcacttcaaaatattaaaagcggaacaaaaaaaaaaaaaaactacccattttttctgttcaccaagttctagataatcggagaatatggcttggataacacgattcttaacggcggtagctttcttggctgtcggcataatattctcgccggagactttcggatcaaaatcggatggtacaaaatctccaaatctctcctcattcattaagctggctcatctcctgagcttctcaaccgcctggggcgctgccctttgggtcactttcatcggcggtatcatcatgttcaagaatctgcctaggcatcaatttggtaatctacaaagcaagatgttcccggcttatttctcgatggtgggggtttgttgtgccatatcggtggcggcatttggttatttgcatccatggaagtcagcgacgatgccggagaagtaccagcttgggtttttagtctctgcatttgccttcaatctatccaatttgttcgtttttactcccatgaccatcgagatgatgaagcaaaggcacaaagtggagagagaagcaaacattggtgatgaaattggatggtcgaagaatcaggaagctgcaaagactaatccaaagcttgcagccatgaacaagaaatttggaatgattcatgggttatcttcacttgctaatattatgtcctttggcagcctggccatgcattcgtggttcttagccggtaagctcaatctgtagtttgcagttaatttagacatagaaagtccaagttctaaatttgccttctggatatatagattgaagtgattacctgtattttatgtttcccccttggatgaactgttccaactattcctgccataattatgtaaaactcaaccatatggtaataaacagaatctagtcttattagtgcactt

SEQ ID NO: 15486 - DNA, 511 bp, Gossypium hirsutum
  Clone ID: LIB3829-023-Q6-K6-F5
gcggtagctttcttggctgtcggcataatggggcgccggagactttcggatcaaaatcggatggtacaaaatctccaaatctctcctcattctttttttttttttcatctcctgagcttctcagggggggggggggctgccctttgggtcactttcatcggcggtatcatcatgttcaagaatctgcctaggcatcaatttggtaatctacaaagcaagatgttcccggcttatttctcgatggtgggggtttgttgtgccatatcggtggcggcatttggttatttgcatccatggaagtcagcgacgatgccggagaagtaccagcttgggtttttagtctctgcatttgccttcaatctatccaatttgttcgtttttactcccatgaccatcgagatgatgaagcaaaggcacaaagtggagagagaagcaaacattggtgatgaaattggatggtcgaagaatcaggaagctgcaaagactaatccaaagcttgcagccatgaaca

SEQ ID NO: 15487 - DNA, 424 bp, Gossypium hirsutum
  Clone ID: GOSHI-09MAY01-C1076_10
cccacgcgtccgatagtaaatgtgctgagaaaagccgacctttctttttgtttgcagttgaatagggttgccctgtgttgttgttttttaatttttcttttattacggttagaacatatgttatcgggaatttctattcaaatgagtttagcacaagaagaatcaactgattcctagttcctagggctagtaaacttgactgaaacaagtaatgctaggagtggattaagtaatattacagtgatggggtgtcaattttgaaatttgacacttatgattgtattgttatgttatgttgatagagttggtgagtcgttatatgcatactacattgcattagatgtgattgaagttagggatgaaaaaccctagactagactctgaggcttaccagccttataaatgaaggagcttttgttttttt

SEQ ID NO: 15488 - DNA, 682 bp, Gossypium hirsutum
  Clone ID: GOSHI-09MAY01-C1076_6
tcgcccacgcgtccgcccacgcgtccgaagaagatgaggaagcaatcgctgctcctgattatggaatggtttctttagcaactgaccaatggcccgcacaaataggtgatcaatggtctgctgatatggttcagccacctatctctggtgtacctgctggtaattggggtgatcaagttgcagttgccgttacttctgatgtgtgggatgctgcagctcccccagcacaaacccctggtgctcctgtcgatgtgtcggcccctgctgctactggctgggaatgagagggatttattatgattttgacaaaaaatgttttggtttgcttttgaaaatatgagctatgtcgaacaatggaattgtgtgttctggcacgatttagttgaatagtttttttttatagacattatttagggatttttcttatttttggtttggaatcaaaagtgatgaatttattggtttatgcggcaatggtttcttgatatcagaaatatgctttgcgtttcttcctactgcataagttagtcttctcgtgggaattttttaaaaaattatagttatctgttttcgcaagtatattattttggtcaaatagagttaaatttaagtatttaatgtttaattgaatattgtttatgtactttcaattataaaagccaatgaaatggaatatagtccc

SEQ ID NO: 15489 - DNA, 733 bp, Gossypium hirsutum
  Clone ID: GOSHI-09MAY01-C1076_5
gtagcagctcttggaaatattcctaccattgctttttgtgacacagactcaccaatgcgatatgttgacattggtattcctgctaataacaaggaatgttctatggtgccccggcagtaattactttccgcattcccacaaaggctgctttgcaggaggcatattcaactccaatcttgccattagatgttcttgcagaaagacctcctgagaagaagtttgactgggctaagaggttgctggctaagtatggatctcaaatctctgtgatatcaattgtggttctattcatctacctgatcgtgacaccatcaaaatccagtgctgcaaaagcaagcaagaagaagcgctaagtatagtagatgtgctgagaaaagccgacctttctttttgtttgcagttaaatagggttgccctttgttgttgctttttaatttttcttttattacgggtagaacatatgttatcgggaatttctattcaaatgagtttagcacaacaagaatcaactgattcctagttcctagggctagtaaacttgactgaaacaagtaatgctaggagtggattaagtaatattacagtgatgggttgacaattttgaaatttcccaaacaaaggaaaagtaacaataccttacccgatcagcacttacactaactgcaaaaatgtgaagtgcgaattggatgaagagagggttttgcagcggccttgaaggaaatataatataaag

SEQ ID NO: 15490 - DNA, 577 bp, Gossypium hirsutum
  Clone ID: GOSHI-09MAY01-C1076_4
accggcgcggagaccccgccccgccgcccacgcgtccgatttgtttctcgtcctcttaacgatatcctctgtttgcagttaagaaaagcaaatcatggctgctaccacggtcccagccgccgcaaggcagctatctcctaaagaagccgatatccagatgatgttggctgccgaggtccatctcggtaccaagaactgtgatttccaaatggagcgttacgtcttcaagcgtcgcaatgacggaatttacatcttcaaccttggcaagacctgggagaagcttcagcttgctgctcgtgtaattgtcgctatagagaaccctcaagatatcattgtccaatctgcaagaccctatggtcagagggctgtcttgaaatttgctcagtacactggttgtcatgccattgctggaaggcacactcctggtacattcactaaccaactccagacatctttcagtgagcctcgccttcttatcctcacagatcctaggaccgaccaccagcctatcaaggaagcagctcttggaaatattcctaccattgctttttgtgacacagactcaccaatgcgatat

SEQ ID NO: 15491 - DNA, 643 bp, Gossypium hirsutum
  Clone ID: GOSHI-09MAY01-C1076_3
gctttctcagcattggttgccttttctccctgttagctaggatggttcttcagatgcgtggaacgattgctcctggacagaaatgggatgtcatggttgatctattcttctacagggagcctgaggaagctaaacagcaagaagaggaggaagcaatcgctgctcctgattatggactccctgctgctgattatggaatgggtgctttagcagctgaccaatggcccgcacaaataggtgatcaatggtctgctgatatggttcaggcacctatctctggtgtccctgctggtaactggggtgatcaagttgcagttgccgttacttccgatgtgtgggatgctgcagctcctccagcacaaacccctggtgctcctatcgatgtgtcggcccctgctgctactggctgggaatgagagggatttattatgattttgacaaaaaatgttttggtttgcttttaaaatatgagctatgtcgaacaatggaattgtgtgttctggcacgatttagttaaatagtttttttttatagacattatttagggatttttgttatttttgttttggaatcaaaagtgatgaatttattgttatacccaaaaaaaaaaaaaaaaaaaaaaaaaaaaaaaactcgagactag

SEQ ID NO: 15492 - DNA, 1204 bp, Gossypium hirsutum
  Clone ID: GOSHI-09MAY01-C1076_2
cggacgcgtgggcggacgcggccgcttttgctttcttctctttcttctccatattttcctctgtggagaacccatccccctcctttagggtttagcagttaaaaagagaaaagcaaaagtatggcgaccgccactgtccccgccgccgcaaggcagctttctcctaaagaagccgacatccaaatgatgttggccgccgaagtccatctcggtaccaaaaactgtgacttccaaatggagcgttacgtcttcaagcgtcgcaatgacggaatctacatcatcaaccttggcaagacctgggagaaacttcaacttgctgctcgtgttattgttgctatcgagaaccctcaggacatcattgtccaatctgcaaggccctatggtcagagagctgtactgaagtttgcacagtacactggttgtcatgcaattgctggaaggcacactcctggtaccttcactaaccagctccagacatcgttcagtgagcctcgtcttcttatcctcacagatcccaggactgaccaccagcccatcaaggaagcagctcttggaaacattccaaccattgctttttgtgatactgactcaccaatgcgatatgttgacattggtatccctgccaataacaagggaaagcacagcattggttgccttttctggctgttagctaggatggttcttcagatgcgtggtacaattgctcctggacagaagtgggatgtgatggtggatctatttttctacagggagcctgaggaagctaaacaacaggaagaggaggaagcagttgctgctcctgattatggactccctgctgcagattttggaatgagtgctttaggaactgaccaatggccctcccaaatgggtgatcagtggtcagctgatgtggttcagccaccaatttcgggtgtccctgcaattaactggggtgatcaagttgctgttagcgctgatgtttgggatcctgcaagtgctccaccacaaatccctggccctggaatcgatgtatctgctcctgctcccactggctgggagtgaggttttcttatttttgcaaatgtttttcctattgaaaaaaatttgttattgtgatggtatctgtgattttgacacgggttagtttgtagtttccatagacttgaatgacttgctagagatttttgttttattcggtcatcctaaggctctcagttctcgt

SEQ ID NO: 15493 - DNA, 954 bp, Gossypium hirsutum
  Clone ID: GOSHI-09MAY01-C1076_1
cacactttcatttcttgttgaagtcaaacaaggaaaagaaaatcattcagctcagattcatggctacgcttatgacaaatctgctgctcacggcatgcattgctcttttcttggtatcagctgccaccgccgtcggcgactcccccttcatcatcgctcacaagaaggcatcgctcaccagactcaaatccggcgccgagtgcgtctccgtctctatcgacatctacaatcaaggcttctcgacggcatatgatttgagtcttgtggattatagctggccccaagatgcatttgatgttatcagtggaaatatttctcagtcatgggagaaacttgacgctggtggtattctatcacattcatttgaattagaggccaaaaaacaaggcatgttctatggtgccccagcagttatctcttttcgcattcccacaaaggctgctctacaggaggcatattcaacttcaatcttgccgttagatgtcctttcagaaatacctcctgagaagaagtttgagtgggctaaaaggttgctggctaagtatggatctcaagtctctgtgatatcaattgtgggtctattcatctacctgatggttaccccatcaaaatccagtggtttgaaagcaagcaagaagaagcgctaagtatttgtagctgagctgaatacgtgagcttttctttcaatatgcagtttccagaaagttttttccttctattttttgctttgtgttgttttgtttgttgtcgcacactttagaattagatggaccattaactgagttagaggtgcaaagatgaatcaactaattctcactctcctagcaccttgacttgattgaaacagtgtaatgcttaaaaatagaagcgaggacctgatctttgtaatcggatgtcacgcttttgaatatttacgcgaaaaaaaaaaaaaaaaaaaaaaactttcgtggccga

SEQ ID NO: 15494 - DNA, 416 bp, Gossypium hirsutum
  Clone ID: LIB3146-046-Q1-K1-C11
cccacgcgtccgcccacgcgtccgcggacgcgtccgcccacgcgtccggtagcccatcaaggaagcagctctcggaaacattccaaccattgctttttgtgatactgactcaccaatgcgatatgttgacattggtatccctgccaataacaagggaaagcacagcattggttgccttttctggctgttagctaggatggttcttcagatgcgtggaacaattgctcctggacagaaatgggatgtcatggtaaaagagaacacaaccattatgttgtgattttgatgtttctgagatttgcacattcttatgcgtgagttgtatgtatgcaggttgatctattcttctacagggagcctgaggaagctaaacagcaagaagaggaggaagcaatcgctgctcctgattatggaat

SEQ ID NO: 15495 - DNA, 336 bp, Gossypium hirsutum
  Clone ID: uC-gsflnu33B091b09b1
tccacgcgtccgcccacgcgtccggaagctggagcttgttgctcgtgtaactgtcgctatagagaaccctcaagatatcattgaccaatctgcaagaccctatggtcagagggctgtcttgaaatttgctcagtacactggctgtcatgccatcgctgggaggcacactaggggaacattcactaaccaactacagacatcttgtagagagccacaccttcttatcctcacagatgctatggccgaccacccaccgtctcaggagagggttcttagggcagttcctaccatagctttgacgaacacagactcacctacgggtgttgatcccacttg

SEQ ID NO: 15496 - DNA, 398 bp, Gossypium hirsutum
  Clone ID: LIB3166-018-P1-K1-D12
gacagactgcctacttttttagctggctgcttattgtttgcctctagagaaagcccagacgaatggtttttttgttagctggtaaaatatgaaaagcacaagtattgcgaccgccactgtccccgctgccgcaaggcagctttctcctaaggaagccgacatccaaatgatgttggccgccgaagtccatctcggtaccaaaaactgtgacttccaaatggagcgttacgtcttcaagcgtcgcaatgacggaatctacatcatcaaccttggcaagacctgggagaaacttcaacttgctgctcgtgttattgttgccatcgagaaccctcaggacatcattgtccaatctgcaaggccatatggtcagagagctgtactgaagtttgcacaataca

SEQ ID NO: 15497 - DNA, 690 bp, Gossypium hirsutum
  Clone ID: GOSHI-09MAY01-C1016_1
aatcgttgggcagagatgtttcattgtatgattgctagaacatcaacaactgatgtgatatctaatggcatgggaggaaccagaaatggtgcacttcaacttatgaatgctgagcttcaaatcctttcacctttagttcctgttcgtgaagtaagtttcttaaggttctgtaaacaacatgctgaaggtgtttgggctgtggttgatgtatccgttgatactatcaaagaaagtactacatttgttacctgtaggagacttccttctggttgtgttgttcaagatatgcctaatggctactccaaggctatatgggttgaacatgctgaatatgatgagagccaagttcatcaactataccggcctttactaagttccggcgtgggcttcggtgcccaacggtgggtggcggcccttcaacggcaatgcgaatgccttgccatactcatgtcctccaccgttcccactagagaccacaccgctataactgcgagtgggagaccgagcatgttgaagcttgctcaaccgatgacagataacttctgtgccggggtttgtgcatcgaccggtcataaatggaacaagccttacgcccggaatgtagaccaagacgttagggttatgactaggaaaagcattgacgaccccggcgaaccgccagggatcgtactaagcgccgccacttcggtt

SEQ ID NO: 15498 - DNA, 927 bp, Gossypium hirsutum
  Clone ID: GOSHI-09MAY01-C1376_1
tcggcctcctccattttcccacattctgcaaccattcttttctgattaaaaagcaaaaaaaaaaaaaaaaaaacaaaacaaaaccaaacttcaaacaaaagggaattttcttgtcataattttctgaggaattcatcgatggcaaccaaagtgtatattgtatactattccatgtatggacatgtggaaaaactagcagaggagataaagaaaggggcggcatctgttgaaggtgttgaagcgaaactatggcaggtccctgagactctgtcagatgagattcttggaaagatgagtgcaccaccaaaaagtgatgtaccgatcattacaccacatgaccttcctgaggctgatgggtttatttttggcttcccaacaagatttggcatgatgtctgcccaattcaaagcatttatggatgcaactggtggtctatggagaactcagcaacttgctggaaaacctgctgggatattctatagcactggatctcaaggtggcggacaagaaactacaccgttgactgcaatcactcagcttgttcaccacgggatgatttttgttcccatcggatacagctttggtgctggcatgtttgagatggagcaagtgaagggtggaagcccttacggtgcaggaacctatgctggggaacgaacaagaatgccatccgaacttgagttggcgcaagctttccaccaagggaagtacattgccggaatcacaaagaaactcaagacagctgcctgatttcaaattactacagaaaaccacaatttgtccttttgattttttattttctagaatttcagttctctatattttacaaatataaaaagaaagcaataattcatgtcctggtacatgcttgtacgtgtgttacaccttacattggtttctcatttatagtaagtttggtgatttatt

SEQ ID NO: 15499 - DNA, 523 bp, Gossypium hirsutum
  Clone ID: LIB3585-023-P1-K1-C4
gctttttaaaagtttgtcattttgctgtctccttttgagaacccttgaccattttccctataagagatcttaatcagctatcccatatcttattgcccattagttatttgaacatcttgtggtttcttggtttgatattctttattgatgaaatctttacaaatatgctttgttgttgcattgaacctccttgatttgattcgttgccttccatttgtttaaccaagttttgtaaagctctgctgttgcaaatatatatatagataagaagcttcacaagatttatttgttaggcaacattcatagaattgataaagtaaatgaagtaactgtggcatacatttggtacaggtccctgagactctgtcagatgagattcttggaaagatgagtgcaccaccaaaaagtgatgtaccgatcattacaccacatgaccttcctgaggctgatgggtttatttttggcttcccaacaaagattggcatgatgtctgcccaattcaaagcatttatggatgcaactg

SEQ ID NO: 15500 - DNA, 622 bp, Gossypium hirsutum
  Clone ID: GOSHI-09MAY01-C1366_1
cccacgcgtccgcggacgcgtgggaaaattaagcttattcaatacccaaaacaacacaataaagcaattgaaataaaagcaatcagacaaaatcccaaaattcttttgagtgtttgttaggctaaaaccgctataggaaaaaaccaaacacaaagctagaacaatcccacttctttttttttttcttttcatttctgtttcctttttaactttgccaaatctggcaaccttagaaggattgagggctcgttcatcccataaacaagagatcctcgatattgacaacgaagacgaagagtgtaggccttggcgtcgaaggttctcaatggctttcacctggggttcctctctcaggatcactcttcttctcctccttattgctgctattggtttcgcttgtttcaccctccctgttgaaaagattctgaaggattttttgttatgggttgacaaggatcttggaccttggggtccacttgtgctggctgttgcttatattcctttgacagtcttggccgttccagcttcagtgcttacccttggtggtggttatctttttggattgcctgtgggctttgttgcggattctattggtgcaacccttggtgcgggagcggcattc

SEQ ID NO: 15501 - DNA, 385 bp, Gossypium hirsutum
  Clone ID: GOSHI-09MAY01-C1336_8
gtgcttcagtttgctgggattgaagatgttttcacttcttcaaggggttctaccaagactcttggtaactttgtaaaggccaccttcgagtgtcttctgaaaacttatggtttcttgactcctgatttctggaaagagactcgattcacaagatctcctttccaagagtatactgatctgttgggaaagccatcaaagacgctcgtactcgaggatgtcgagagagtggatgtatgatgtgccttcagggccttagaatagtaaaatatcaagttccttttgtgtagtttaagttaaaatgatgccatcttcaccctttttgattgcttttgtattgtcagagagatatttggaatttccagcaaccgcatattgtttttctctt

SEQ ID NO: 15502 - DNA, 907 bp, Gossypium hirsutum
  Clone ID: GOSHI-09MAY01-C1336_4
cccacgcgtccgcccacgcgtccgcaaagccggcaagatcacatcccttgagcaaatctacctccattctctccctatcaaggagtaccaaatcatcgaccaactcgtcggcccttcactgaaagacgaggtcatgaagatcactccagttcagaaacaaactcgcgccggtcagcgtacgcgcttcaaggccttcgtcgtcgtcggtgacggaaatggacacgttggactcggtgtcaaatgtagcaaagaagttgcgacggctataagaggggcgatcatattggctaagttgtcagtgataccggttagaagaggttactggggaaataagatcggaaaaccccatacggtgccgtgcaaggttaccgggaaatgtgggtccgtcaccgttaggatggtgccggctccgagaggtgccgggattgtggctgctagggtccccaagaaagttcttcagtttgcagggatcgaagatgttttcacttcttccaggggatccaccaagactcttggcaactttgtcaaggccacctttgagtgtcttctgaaaacttatggtttcttgactcccgatttctggaaagagactcgtttcacaaggtctcctttccaagagtataccgatctgttgggaaagccggcaaagacccttgtacttgaagatgcagagaggttggacgtatagttctcgtatatatacgagtcattagtaagttgcgccttccaaagcctgcctggctgcatagggtagcaatatgaagttctgttttgtttcttaaaagaatcttaacttacatgttatgtcttgtttggttggtttttcatgaaattttcagttattgtttaaggcttggaacatttttgttttcctttatatggattctttatacaatagttgttttgc

SEQ ID NO: 15503 - DNA, 834 bp, Gossypium hirsutum
  Clone ID: GOSHI-09MAY01-C1336_2
atttcatcgctcccactctgatccctcaaaccctacggctacaaaaaaaagagcaaaaaatggcagaaagaggcggcggagaacgtggcgcttttaggcgcggcttcggtggaggaaggggtgaccgtggtccaagaggcaggcgccgtggccgcaaggacgaagaggagaaatgggtacccgtcacgaaactcggccgtttagtcaaatccgggaaaatcacgtccctcgaacaaatttacctccactctctccctatcaaagagtaccaaatcatcgaccagctcgtcggcccttccttgaaagacgaagtcatgaagatcactcccgtccagaaacaaacacgtgccggccagcgcacgcgtttcaaggccttcgtcgtcgtcggagacggaaacggacacgtcggattgggtgtcaagtgcagcaaagaagttgcgacggctataagaggggcgataatattggctaagttgtcggttatcccggtgaggagaggttactgggggaataagatcgggaaaccccatacggtgccgtgtaaggttaccgggaaatgtggatccgttactgttaggatggtgcctgctccgagaggtgcggggattgtggctgcttgggtccccaagaaggtgcttcagtttgctgggatcgaagatggcttcactccttccaggggatccaccatgactcttggaactttgtaaaggcacccttgaatgcttctgaaaacatatgttctgcaaccgtattttgaaaagactgtttaaaagtctcattccgaagttactatcgtgggaaacttcaaaaccttttctagaatgtaaaagtttt

SEQ ID NO: 15504 - DNA, 952 bp, Gossypium hirsutum
  Clone ID: GOSHI-09MAY01-C1336_1
ccccgcgtccgtatcagggggtggcgggggggggggaactcgtcggcccttcgctgaaagacgagttcatgaagatcactccagttcagaaacaaactcgcgccggtcagcgtacgcgcttcaaggccttcgtcgtcgtcggtgacggaaatggacacgttggactcggtgtcaaatgtagcaaggaagttgcgacggctataagaggggcaatcatattggctaagttgtcagtgataccggttagaagaggttactggggaaataagatcggaaaacctcatactgtgccatgcaaggttaccgggaaatgtgggtccgtcaccgttaggatggtgccggctcctagaggtgctggtattgtggctgctagggttcccaaaaaggtgcttcagtttgctgggattgaagatgtcttcacttcttcaaggggttcaaccaaaactcttggaaactttgtcaaggccacctttgaatgtcttctgaaaacatatggtttcttgacaccggatttctggagagagactcgtttcacaaggtctccattccaggagtatactgatctgttgggaaagccatcgaagacccttgtactggaagatgtcgagagagttgatatctgattgaagatcaacagggtcattacttattagtaagttgggtgtgtttctaggtcctttctatgttgcaatctttaattgtgtcttgcttgttttgattttgtcatgagattaaatcagtaatggttcaattttgttgtgttttttcatctggattctttataaagattgtggatgagttgaggacttgtctatttatatgctgcttgcttgtgaattaatgtttcataatatgatagcatgcttcttatcaaaaaaaaaaaaaaaaaaaaaaaaaaaaaaaaaataaaaaaaaaaaaaaaaaaaaaaattctgcggccgcgaattcttcc

SEQ ID NO: 15505 - DNA, 693 bp, Gossypium hirsutum
  unsure (1)..(693): unsure at all n locations
  Clone ID: AI055020.1
ccaaaccctaaccaaaggcaaaaggaaaaaaaatggcagaaagaggcggaggtgaacgcggcgctttcaggcgtggctttggtggtggtagaggtgaccgtggtccaagaggcaggcgccgcggccgcaaggacgaagaggaaaaatgggtacccgtcacgaaactcggccgcttagtcaaagccggcaagatcacatcccttgagcaaatctacctccattctctccctataagggagtaccaaatcatcgacaactcgtcggcccttactgaagacgaggtatgaagatacntncagttcagaaacaaactgcgccgggaaacgacacgcttaaagcttcgtcgcnttcgtgacggaatggacacgtnagctcggtgtaaatgtacaaaaaaagtccaacggtataaggggcgatcatttgcttaatggtcaatgtcaccggtaaaaaagntactggggaataagatcggaaacccatactgttcatgaaggntaccggaatgtggtgctcaccggtagatgtgccgctcctaagtgctggatgggcttctggttcccaaaaggtctcattgcttgaaatgaatgctattttttcaggtcaacaacctttgaacttgaagcccccttgagcttgaaaacatggtctgaccgtatttgagaaacgtnacagtctttccgtntttctatgaaa

SEQ ID NO: 15506 - DNA, 563 bp, Gossypium hirsutum
  Clone ID: AW186848.2
agtgtttttaggtcctttctatgttgcaatctttaattgtgtcttgcttgttttgattttgtcatgagattaaatcagtaatggttcaattttgttgtgttttttcatctggattctttataaagattgtggatgagttgaggacttgtctatttatgtgctgcttgcttgtgaattaatgtttcataatatgatagcatgcttcttatcaagtctaaattcgaaagaatatggatcatttgtcaacccaaaagactggttggagcaggctttacaaaatctctctaggccccattttttaaaaaaattccacatgtttcaccctgtgatgaaaaatattggattgggtgagttaggattgaaatcgagccgagcagagtgacaagtttgagtagaagctttctatgtccaagttaacttgtcatattatgtcttttagtggtcaaatttgtttgacgttgattttataaatttatttttttggtgtaaaaatttgttttcagaacttgaatagattagtttttaaaatatttttataaaaaaaaaaaaaaaaaaaaaaaaaa

SEQ ID NO: 15507 - DNA, 454 bp, Gossypium hirsutum
  Clone ID: uC-gsronu33B047b07b1
tccacgcgtccgatgtttcataatatgatagcatgcttcttatcaagtctaaattcgaaagaatatggatcatttgtcaacccaaaaaaaaaaaaaaaaaaaaaaaaaaaaaaaaaaaaaaaaaaaaaaaaaaaaaaaaaaaaaaaaaaaaaaaaaaaaaaaaaaaaaaaaaaaaaaaaaaaaaaaaaaaaaaaaaaaaaagggggggcccttttaaaagaaccaaatttaccaacccgggcatggcaaggaaaaacttttttaaaggggcccccaaaataaaataaccggcccaggtttaaaaaacctttgacgggaaaaaacccggggttacccaaattaaatcccttggaaaaaaatccccttttgccaatgggggtaaaaaaaaaaaaggcccaaccataatgccctttccaaaaattggccaccccaaatgggaaaagggacccccccc

SEQ ID NO: 15508 - DNA, 541 bp, Gossypium hirsutum
  Clone ID: AI726832.1
atagaggtgctggtattgtggctgctagggttcccaaaaaggtgcttcagtttgctggaattgaagatgttttcactttttcaaggggttcaaccaaaacttttggaaactttgtcaaggccacctttgaatgttttctgaaaacatatggttttttgacaccggatttttggagagagactcgtttcacaaggtctccattccaggagtatactgatttgttgggaaacccatcgaagacccttgtactggaagatgtcgagagagttgatatttgattgaagatcaacagtgtcattacttattagtagttggaagtgtgtttaggtcctttttatgttgcaatcttaacttgtgtctttgcttgttttgattttgtcatgagattaaatcagtaatggttcaattttgttgtgttttttcatctggattctttataaagattgtggatgagttgaggacttgtctatttaaaaaaaaaaaaaaaaaaaaaaaaaaaaaaaaaaaaaaaaaaaaaaaaaaaaaaaaaaaaaaaaaaaaa

SEQ ID NO: 15509 - DNA, 396 bp, Gossypium hirsutum
  Clone ID: LIB3145-040-Q1-K1-B10
cggacgcgtggggtttaatgtattgttttccatactatttgaaatgaaatattttgttggtggaagtgtgtgtgggaggggtgttttggctatatgcttggttatatgtttgtaaattgttaactattcttgaagttatttgtatttgattattgtgaaatcagcctgttttcggttctagatagctgtttaagatatgttttaaagatggatggttgagttattggtgatatctgattatgcgttgattttggaatgtaaaatgcaggccacctttgagtgtctattgaaaacgtacggcttcttgactcctgatttctggaaggagactcgtttcacaaggtctcctttccaggagtatactgatctgttgggaaagccaacgaagactcttgt

SEQ ID NO: 15510 - DNA, 367 bp, Gossypium hirsutum
  Clone ID: uC-gsronu33b112h10b1
cttcctgccgtttttgctccttccttcatctctacatccctaaacaaaaagcaaataatggcagaaagaggcggcggcgaacgcggtgctttcaggcgtggcttcggcggcgggagatccgatcgtgggccaagaggtcggcgccgtggccgcaaggatgaggaggagaaatgggttcctgttacaaaacttggccgtttggtcaaatcgggaaaaatcacatccctcgaacaaatctacctccactccctccccataaggagtaccaaatcatcgaccaaactcgttggcccttcactaaagacgaggtgatgaagatcactcccgtccagaaacaaacacgcgtccggtcagcgcactcgtttaa

SEQ ID NO: 15511 - DNA, 343 bp, Gossypium hirsutum
  unsure (1)..(343): unsure at all n locations
  Clone ID: LIB3189-008-P1-K1-A1
gtacgcaaaaaatcaaaaccctaactngctcactctctgcatatttattcctaaccctatccgcttctattacctgttttcaatctcacgcatttgtgtcaaaccctaaccaaaggcaaaaggaaaaaaaatggcagaaagaggcggaggtgaacacggcgctttcaagcgtggctttggtggtggtagaagtgaccgtggtccaaaatgcatgcgccgcggccgcaaggactaagaggaaaaatgggttcccgtcacgaaactcggccgcttattcaaagccggcaagatcacatcccttgagcaaatctaactccattctttccctatcaaggagtaccaa

SEQ ID NO: 15512 - DNA, 289 bp, Gossypium hirsutum
  Clone ID: LIB3147-049-Q1-K1-A9
acttcttcaaggggttctaccaagactcttggtaactttgtaaaggccaccttcgagtgtcttttgaaaacttagggggtcttgactcctgatttctggaaagagactcgattcacaagatctcctttccaagagtatactgatctgatgggaaagccatcaaagacgctcgtactctatgatgccgagagagtggatttatgatgttccaacagggccttagaattgcaatatatctagctccccttggggttcttaagtacaatagatgctttctttagtgcacttg

SEQ ID NO: 15513 - DNA, 752 bp, Gossypium hirsutum
  Clone ID: GOSHI-09MAY01-C1286_3
gttggctcatgaagctgatgggtctgttagatttgggcacggcgatggatctgcgtatttgttcgatcccgacatttataccgacggaaggatctccgttcagggtattgacggcgtccttttcccgctggaagagaaagctaaggaagaattctgcaccatcaaagttgccactgtgaaacccagaagagggaagttgcttgaggctgcatgccgaatgcttgtggctattggacaagattcacgtttcacctcttgccgactatgaacacaacaattacttcccccatatcataaacaaatcttcaaacaacaaaaaaaggtgaaccagcatagtataaagtcctggaatgatgttttgctctctgcattaggattttagttttctttttttcttctttccccttttttgttctatattctatcgttcataaggcagcaaaaaggtcaccctggttgattgctgatcctcaagtctacaagattttttctttcttttcttttctattctgtcaaattatgtgtgtaataatctggtgatagtggtggtggaggaaagagggtggattgccagggctcgtaaatgaatcgagcgtggacggactgattcctgttcatgttcgtttgtttatttttaagcttgtctgttcgtgttcgctaaaagttttaaaattgtttgtgtttgtttatttaaagttatatgtgtaaataactgttcgtttttgaattaaatgtatttgtttgtgaacgat

SEQ ID NO: 15514 - DNA, 1026 bp, Gossypium hirsutum
  Clone ID: GOSHI-09MAY01-C1286_2
cttctctttctcctcgtgtttcattggttttattataatcccaatttctcacgacgaaaaactcatccgaattgttaagcttgttcaatggagataatgggtttttcgttgctcttcaagttccttctcttgctctctggctttggggtttcaatggcgttacaagaaaccccattggtggctaaaaacttgggtcaaatcagttctaactcggtgcttgtggccttgttagactcgcattatacggagcttgctgaattagtggagaaagctttgttgttacaaagcttagaagagtctgtgggaaagcataatattaccatttttgctcctaagaatgaagctcttgaaaggaatctagaccctgaattcaagcggtttttgttggaacctggtaatcttaaatccttacaaactctattgctttatcacattgtgccgactaggattgagccacattcatggcctaattcaacatcgggatcgatcattcaccgtacgttatcaaatcacaatgttgagctctcgagtgaagattcaatgggggttaaattcattggtagcgctaaggttattaacccaaatgctgtgaaccgtccagatggggttatccatggcatcgaacagttactaatccctcaatcagtacaacaagatttcaacagtcggagaaatctccgttcaatctccgccgtgaaaccagaaggtgcgcccgaagttgatccaagaacccaccgcttgaagaaaccggccccgccagtgaaacccggttcaccacccgttcttccgatttacgacgcaatggctccaggtccatcactagccccggcaccagctccaggacccggtggacctcaccatcatttcaacggaatgaggcaagtcaaagatttcattcaaacactaattcaatatggggggtacaatgaaatggctgatatattagtgaatttaacatcattagccactgaaatgggtcggttagtttcccgaggttacgttttactgtattagcacccaacgatg

SEQ ID NO: 15515 - DNA, 1903 bp, Gossypium hirsutum
  Clone ID: GOSHI-09MAY01-C1286_1
cgcgcgcgttttttgacaaccggaccctgctctcttcctgggtggggattttctacattttgtcaattatatattacatctttctcctcccgtccgccctcgcgtccgcttcaactctcttcttcttcttcttctgcttcttcttcaaatctcatgttctagattctcattggcattgcaagagaactcatcagccaccgtccgctcgggtcagagcagttccaactcagtcctggtggctttgttagactcgcattacactgagcttgccgagttggtggagaaagctttgttgttgcagacccttgaggaaactgtcggaaaacacaatatcaccattttcgctcctaaaaatgaagctcttgagcgggatctcgaccctgagttcaagcggtttttgcttgaacctggtaatctcaagtccctccaaactctcttgctttaccacattgtgcctgctaggatcgatcgtcattcatggcccaaatcgacttcggcgttaacccatcattttactttatcaaatgaacgagttgaactctccggcgacgattcctcaggtgaaaagttcattggttcggccaaagtaatttcctccaacgctgttgaccgtcccgatggtgtcatccacggcatcgaacaactattgatccctcgatcggtgcaacaagatttcaacaatcgtagaagcctccgctcaatctccgccgtcaaaccagaaggagctccggaagttgaccccagaacccaccgcttgaaaaaaccagcacccccggtcaagcccggagctccacccgtcctcccaatctacgacgcaatggctccaggcccatcgctagctccggcaccagctcccggacccggcggacctcaccatcatttcaacggaatgaggcaagtcaaagatttcatccaaactctgatacaatacggagggtacaatgaaatggcggacattttagtgaacttaacatcgttagccactgaaatgggtcgcctggtttccgagggttacgttttaactgtattagcacccaacgatgaagccatggctaagttaaccacggaccaattgagcgaacccggtgcaccggaacaaatcatttattatcacataatcccggagtaccaaaccgaagaaagtatgtacaatgcggtgaggagattcgggaaagtgtcgtacgatacattgaggttaccacacaaagtatcagctcaagaagctgatgggtctgttagattcgggcacgccgatggatccgcgtatttgttcgaccccgacatttataccgacggaaggatctcggtgcagggtatcgacggtgtacttttcccgcctgaagagaaaactaaagaagaaaagaagactatcaaagttgctacagcgaaacccagaagaggcaagttgcttgaagttgcatgcagaatgcttgtggcaattggtcaagattctcattttagcacatgccaaatataaaaatcacaaccatcatttccccatatcataaacaaaaaacttaaaaagaattggaaggtgaagcaacatagtttaaaactctttgaatatggtgtgatgcattgctctctacaataggatttaggtttttcttttttaaagttgggatcaagcagctaaacatgggaagatatggaaaatggttaccaaaaaatatataatattttccattcccacatgctgaaattcaatgattcaccctggttagttgctgataccctctaaatgtacaagttttttttttttttcaattgtgtgtaatgtggcggcacggtggtggtggcggtggtggggaggagatatgaaggggtgagaggggtttggttttgtgtgaagtagatatggaagataaagagtccaccatgtgggcaaatccagcttaataat

SEQ ID NO: 15516 - DNA, 281 bp, Gossypium hirsutum
  Clone ID: uC-gsflnu33B139d04b1
gatacttttgcgattaaactgaacttaacatgggtggcttttgtaaagggacgtgttttttcccaagggtatgatataaccgacttagcacccatcgacaaggcaatggcgaagctaaccactgaccagttgagcgaaccaggagcggcggagcaaaccatatattaccatataatgccagagtaccagacggaggaaagtatgtacaatgcggcgaggagattagggaaagtgtcaaacgatacatcgaggttgccggataaagagttggctaaagaagc

SEQ ID NO: 15517 - DNA, 523 bp, Gossypium hirsutum
  Clone ID: GOSHI-09MAY01-C1246_1
cccacgcgtccgagtgtttaagcctgatcccattccttgttcaagagagaagcgatctttttttttgatttctttctgggttcggtggcggaaatggcgaaagtggtggatgcgacgggggaaccgatcccaacgtcgtcggtgctgatgtcatcagcaaagcacatagagattaaatgtatgtccgaaaacgtggagttcctcaagtgtaagaagaaagatcccaaccctgagaaatgtctcgataagggccgccaagctactcgctgtgcccttggagtgctaaaagatctgtatcagagatgcaaagaccccatggaagcttatgtgggatgcatgtattactacacaaatgagttcgatttatgtcgcaaagagcaacaagcctttgagaaagcttgccctttggactgacttcggctttcagcagcagccggcagccggcagcccgcactcatcaaacacattctcttttcatgcttgaatatgaataagttagtccagtttgcattgaacaagaact

SEQ ID NO: 15518 - DNA, 674 bp, Gossypium hirsutum
  Clone ID: GOSHI-09MAY01-C1276_31
aaactcaaatttttttttttttctacccacgcaaactaaccctgggttgcttttttaaatatccggttatcaaaattaaattcttcctgaaacccataccatttatttaatcaacgctttcttaccccaatgaaaatacctctatgccttaattgtcaattgaatgaacatttgctccaattatcttccttcttctcttaccaccttgcatcagctcgaagatattgtgcgcaaagacaagcttgtggtgtctacctcctgctcgcttctccacactgccgttgatctagtaaacgagactaagctagatgatgaaatcaaatcctggctcgcattcgctgcccagaaagttgttgaagtcaatgcacttgccaaggcgttggctggtcagaaggatgaggccttcttcgcagccaatgctgctgctcaggcttctaggaaatcctccccgagagtgactaatgaggctgttcaaaaggctgctgctgctttgaagggctctgaccaccgccgtgcaacaaatgttagtgctagactcgatgcccagcagaaaaagcttaacttacctgtccttcccaccacaaccattggatccttccctcaaaccttggaactcaggagagttcgtcgtgaattcaaggctacaagatctctgaggaagattattgttaaag

SEQ ID NO: 15519 - DNA, 413 bp, Gossypium hirsutum
  Clone ID: GOSHI-09MAY01-C1276_28
cacataataacatccctattgtgcttagcaaaaaaaagaaaaaccccattgtaaaacagcctcactttgaaagattttaagagcaatggtaaaatttccagtgatcaacatggagaaactcaatggtgaggagagagcagcaaccatggagttaatcaaagatgcatgcgagaattggggcttctttgaggtgctaaatcatgggattccctatgatttcatggacaaaattgaaagcttgacgaaagagcattacaagaaatgcatggagcaaaggtttaaggaattggtggcaagcaaggcccttgagggtctccaggctgaggttactgatatggactgggaaagtaccttctatttgcgccatctccctgaattaaatatggctgaaatcccagatctaaccgatgaat

SEQ ID NO: 15520 - DNA, 621 bp, Gossypium hirsutum
  Clone ID: GOSHI-09MAY01-C1276_27
gcgtttttcctggtgactttgcttatatttaactctggcctaataatagttccgatatcacttgggcgtgctcttttcaatgccattcctcttctcccaataactcatggcattaagtgcaacgacctctatgctttcgtcattggaagctatgtcatttggacagctattgccggggctagatactccattgagcacattaaaacaaagagggcagcagttctatttggccaaatttccaagtggagtgccattgttgttaagagttccatgctgttatcaatatggatttttggcattcctgttcttattggtctgctttttgagcttttggtgattgtgccaatgcgggtgcctgtagatgagagcccagttttcctactctatcaggattgggcattgggtctcattttccttaagatctggactagactggttatgctggatcatatgatgccattggtagatgaaagctggcgagtaaaatttgaaagggtaagagaagatggattttctagattgcagggcctttgggtgttgcgggagattgtatttcccatcataatgaagctgctgacagccctgtgtgtaccttacgtattagcccgaggggtgtttccg

SEQ ID NO: 15521 - DNA, 561 bp, Gossypium hirsutum
  Clone ID: GOSHI-09MAY01-C1276_26
caggatttgatttcgtcatctagcttggtctcgtttacgagagcaacagcagtgtggagaagcgagcaggaggtggacaccacaagcttgtctttgcccacaacagcttcaagagcctgcaaggtcctaagtgaagaagctagatgacgaaatcaaatcctggctggcattcgctgcccagaaagttgtcgaagtcaatgcacttgccgaggcattggctggtcagaaggatgaggccttcttcactgccaacgcatctgctcaggcttcaaggaagtcctccccgagagtgaccaatgaggctgttcaaaaggctgctgctgctttgaagggctctgaccaccgtcgtgctacaaatgttactgctagactcgatgcccagcagaaaaagcttaacctgccagtcctccccaccacaaccattggatccttccctcaaactttggagctcaggagagttcgtcgtgaattcaaggctaacaagatctcagaggttgattatggtaaagccattaaagagggaattaagaaagttgctgacctttaagaagagcgttacat

SEQ ID NO: 15522 - DNA, 747 bp, Gossypium hirsutum
  Clone ID: GOSHI-09MAY01-C1276_22
ccaaattgatgaggctgctttgagagaggggttgccgcttagaaagtccgagcacgccttctacttgaaatgggctgtccactcctttaggatcaccaactgtggtgtcaaggataccacccagatccacacccacatgtgctactccaacttcaacgatatcatccactcaattatcgacatggatgcggatgtcattaccattgagaactcgcgttcagatgagaagctactgtcagtattccgtgaaggagtgaagtatggtgctggaattggccctggtgtgtatgatatccactccccgagaataccatcaactgaagagattgctgacagaattaacaagatgctggcggtgttggagaccaacatcctgtgggttaaccctgactgcgggctgaaaactcgcaagtacgaggaggtgaaaccggcactgaacaatatggttgctgctgccaagcagctccgcaccaaacttgccagtgccaagtgagagccatccaagaaagggaaaagacgttatatctagtaatcaatatcaataactgtggtttgctgatgacatattattggtcaggcgccctctgaacccaattcattcccaccttttctctctggaaaatcttttagtttttcttgcatagtttagatattttagagattgggttactcggggttgggttatttgttcggcctgtcttaggttttggatttattattttaataatagaatcatattttttactt

SEQ ID NO: 15523 - DNA, 557 bp, Gossypium hirsutum
  Clone ID: GOSHI-09MAY01-C1276_21
ctttcttgtccgcccacgcgtccgcccacgcgtccgggtgcttcctacactgttgcatccgctgctcttcttcttaccttgaacttgttgttcttcactctggttagctctacctacgtgccttgcccaccaccaccaaagagccacaagcctacccacacgagcccaccctcggcacctaaacagccagccacttgccccaaagatacactgaaactaggtgtttgtgctgatttgttgggctcggtgcgcgttgttgttggaccgtcgaggaccaaatgctgctcactcatttcgggttcggctgatctcgatgctgctgtttgcctttgcactgctattaaagctaatgtgttgcgggttaacctaaacgttcctgtttcattgtctttgctcctcaattcctgacgaaaagcaaatgcctgctggttacacatgtgcttaagcaatgtttgggtttttcttttacgtgttctttttttttctgggccgtgtaaatttggtgttttgatatgtcaagggttagataaaatggtaaggtctcttaccttaaccaa

SEQ ID NO: 15524 - DNA, 662 bp, Gossypium hirsutum
  Clone ID: GOSHI-09MAY01-C1276_20
cccagcgtccgcccacgcgtccgcgatttcgaaacttgctaccagattgccttggccatcaaggatgaagtggaggatcttgagaaggctggtatccccgcgcgtccgaatcgatgaggctgctttgagagaagggttgcctcttaggaagtccgagcatgccttctaccaaaagtgggctgtccactccttcagaatcaccaactgtggtgtccaagacattacccagatccacacccacatgtgctactccaacttcaatgatatcatccactcgatcatcgacatggatgccgatgtcataaccattgagaactcacgttcagatgagaagctcctgtcagtcttccgtgaaggagtgaagtatggtgctggaattggacccggtgtctatgacatccactctcccagaataccatcaaccgaagagattgctgacagaattaacaagatgcttgccgtgctcgagaccaacatcttgtgggttaaccctgactgtgggctcaagactcgcaagtacgctgaggtgaaaccagccctgagcaacatggttgctgctgccaagctgctccgcacccaactcgccagcgccaagtgataggcttccgagatattggaaatctaatccataccactccagagagataaaaagaaaaatggca

SEQ ID NO: 15525 - DNA, 1223 bp, Gossypium hirsutum
  Clone ID: GOSHI-09MAY01-C1276_19
tgatgtcctggttcatgagagcctgagagaaagatatggttgagtactttggtgagcaattatctggttttgctttcactgttaacggatgggttcaatcttatgggtctcgctgcgtcaagccaccaatcatctacggtgatgttagccgccccaaaccaatgaccgttttctggtcatctactgcccaaagtatgactaaacgcccaatgaagggaatgcttactggccctgtcaccattctcaactggtcctttgtcagaaatgatcaaccgagattcgaaacttgctaccagattgccttggccatcaaggatgaagtggaggatcttgagaaggctggtatcaatgttatccaaatcgatgaggctgctttgagagaagggttgcctcttaggaagtccgagcatgccttctaccaaaagtgggctgtccactccttcagaatcaccaactgtggtgtccaagacattacccaggtccatatattgcttcactctttttgatcctcggaaaaattgaactttcttatttgcatattctgtattctttgatcaccaccgctctcattcatttcatttgtcaaaaatccgacagatccacacccacatgtgctactccaacttcaatgatatcatccactcgatcatcgacatggatgccgatgtcataaccattgagaactcacgttcagatgagaagctcctgtcagtcttccgtgaaggagtgaagtatggtgctggaattggacccggtgtctatgacatccactctcccagaataccatcaaccgaagagattgctgacagaattaacaagatgcttgccgtgctcgacgcccgcgtcggcgggcgcgtccctgactgtgggctcaagactcgcaagtacgctgaggtgaaaccagccctgagcaacatggttgctgctgccaagctgctccgcacccaactcgccagcgccaagtgataggctcccgagatattggaaatccgaatcccataccattccagagagattaaaaagaaaaatggcaaagaagtttcttctatcttatcatttgaataactctgttgttgatgaaatatttgttacatgcccttggcgtccctttgatttccttatttttgggtgttcttttctctaagtatcatgtactttcttgggaatatcacatatatgctgtcttcagttaaaaaaaaaaaacaaaaaataaaaaacaaaac

SEQ ID NO: 15526 - DNA, 755 bp, Gossypium hirsutum
  Clone ID: GOSHI-09MAY01-C1276_18
ggtgattgtgccaatgcgggtgcctgtagatgagagcccagttttcctactctatcaggattgggcattgggtctcattttccttaagatctggactagactggttatgctggatcatatgatgctcgcttctccacaccgctgttgatctagtgaatgagactaagctagacgatgaaatcaaatcgtggctcgcatttgctgcccagaaagttgttgaagtcaatgcacttgccaaggcattggctggtcaaaaggatgaggccttcttctctgccaatgctgctgctcaggcttcaaggaagtcctccccaagagtgactaacgaggctgttcaaaaggctgctgctgctttgaagggctctgatcaccgtcgtgcaactaatgttagtgctagactcgatgcccagcagaaaaagcttgaccttccaatcctccccaccacaaccattggatccttccctcaaaccttggagctcaggagagttcgtcgtgaattcaaggctaacaagatctctgaggatgattacattaaagccattaaggaggaaattaagaaggttgttgaccttcaggaagagcttgacattgatgtcttggttcatggagagcctgagagaaacgatatggttgagtactttggtgagcagttgtctggttttgcattcactgttaatggatgggtgcaatcttacggatctcgatgtgtcaagccaccaatcatctacggtgatgttagccgccccaagccaatg

SEQ ID NO: 15527 - DNA, 770 bp, Gossypium hirsutum
  Clone ID: GOSHI-09MAY01-C1276_15
cccagcgtccgcccagcgtccgggctgcgtccggacctactttgctgatcttaccactgaggcatacaagacccttgttggattgaagggtgttaccgcttacggtttggatttggttcggggaacccagaccattgatttggtcaaggctggcttccccgaaggaaaatacctctttgctggagttgtcgatggaaggaacatttgggccaatgatcttgcttcttctcttagcaccttgcagcagctcgaagctattgtgggcaaagacaagcttgtggcgtctacctcctgctcgcttctccacactgccgttgatctagtaaacgagactaagctagatgatgaaatcaaatcctggctcgcatttgctgcccagaaagttgttgaagtcaatgcacttgccaaggcgttggctggtcagaaggatgaggccttcttcgcagccaatgctgctgctcaggcttctaggaaatcctccccgagagtgactaatgaggctgttcaaaaggctgctgctgctttgaagggctctgaccaccgccgtgcaacaaatgttagtgctagactcgatgcccagcagaaaaagcttaacttacctgtccttcccaccacaacctttggatccctccccccccccctgggctccggacaattcttcctcaatccatggttaccgtgaacttctaggaacaatgcctccaccccctcacttactatctccctatggtttgggctctcgcaacgtatcctacttctattctccttcc

SEQ ID NO: 15528 - DNA, 1240 bp, Gossypium hirsutum
  Clone ID: GOSHI-09MAY01-C1276_14
cggacgcgtgcgcccgcctgggcttttctccataaacacccaaagtaaaacgagtggagactttgagacaacatcttttaggtcccccctaaaaaagggtttgtaagagaaatggctactttcccagtgatcaacttagagaagcttaatggtgatgagagatcaagaatcatggagcaaatcaaggatgcctgtgaaaactggggattttttgaggtgatgaaccatgggattccacatgattttatggacactgttgagagattaacgaaagaacattataagaaatgtatggaacaaaggtttaaagaactggtagcaagcaaggctcttgaaggacttgaggctgaagttacggatatggattgggaaagtacatttcacttgtgccatctccctgaatcaaacatggctgaaatcccagatctcagtgatgaatataggaaagtgatgaaggaatttgcagtgaaattggagaaactagcagaggagttggtggatttggtttgtgagaatattggattagagaaggggtatttgaaaaaggcgttttatggggcaaaaggtccaacctttggcaccaaagttagcaactatccaccatgtccgaccccagacaaaatcaaggggctcagagcccatactgatgcaggtggcatcatcttgctgttccaagaccccgtcgtcggcggccttcagcttcttaaagacggcgagtgggtcgatgttccaccgctccgccactccatcgtcatcaaacctcggtgatcagctcgaggtgatcaccaatggcaagtacaagagtgtggagcaccgagtcatagcccaaacccgatggaactcggatgtctttagcttcattctacaaccccggcagcgacgctgtcatctatccggcgccggcgttggtggagaaagaagctgaggaaaagaacaaacaggtttaccccaaatttgtgtttgaagagtacatgaaactgtatgcaggactgaaattccaggccaaggaaccaaggtttgaagccatgaaagcgatggaagctactgctcccattgcaacagcttaaaataaaaatattataacttagcttttgactttgtggaaaggaaaaaaaaaaggaaaaaaaaggtgttccagtgttcctcctatattatagatgtgtgttggttgcactggtgaatttaattattggagacgaccattctattatataattattgttaagggggtttgtcgctt

SEQ ID NO: 15529 - DNA, 599 bp, Gossypium hirsutum
  Clone ID: GOSHI-09MAY01-C1276_13
cccacgcgtccgttccttcttccactgaatctcctcttttccctatattttctctctccagttccatctccgttctctacgaaatggcttcccacattgttggctatccccgtatgggaccaaagagagagcttaagtttgctttggaatcattttgggataagaagagcagtgctgaagatttgcagaaggttgcagctgatctcaggtcagctatttggaaacaaatggctgatgctgggatcaagtacattcctagcaacactttctcttactatgaccaggtgcttgatgccacctccatgctcggtgctgttccaccgagatatggttggaacggtggtgagatcggattcgatacttacttctccatggctaggggaaatgcctctgtgcctgctatggaaatgaccaagtggtttgacactaactaccacttcattgttcctgaattgggacctgatgttaacttctcttatgcatctcacaaggcagttgatgaatacaaggaagctaagtcgcttggagttgacactgtcccggtccttgttgcgcccggtctcatacttgttgctctctaaaccttgcaagggtgtgag

SEQ ID NO: 15530 - DNA, 715 bp, Gossypium hirsutum
  Clone ID: GOSHI-09MAY01-C1276_12
cccacgcgtccgggtgtcctcgcctcggcccacgcccgcgcccacatgtgctactccaacttcaatgatatcatccactcgatcattgacatggatgccgatgtcataaccattgagaactcacgttcagatgagaagctcctgtcagtcttccgtgaaggagtgaagtacggtgctggaattggacccggtgtctatgacatccactctcccagaataccatcaaccgaagagattgctgacagaattaacaagatgcttgccgtgctcgagaccaacatcttgtgggttaaccctgactgtgggctcaagactcgcaagtacgctgaggtgaaaccagccctgagcaacatggttgctgctgccaagctgctccgcacccaactcgccagcgccaagtgataggctcccgagatattggaaatccgaatcccataccattccagagagattaaaaagaaaaatggcaaagaagtttcttctatcttatcatttgaataactctgttgttgatgaaatatttgttacatgcccttggcgtccctttgatttccttatttttgggtgttcttttctctaagtatcatgcacctttttgggaatattatatatatgcagtcttcagtttcttagtatcttaataggaatgagagtgtcatcaatggttctgcattgacaatgccatcttgtttatgagtttcagcatgtgtctatt

SEQ ID NO: 15531 - DNA, 1421 bp, Gossypium hirsutum
  Clone ID: GOSHI-09MAY01-C1276_11
gctgcccagaaagtcgtcgaagtcaatgctcttgccaaggcattggctggtcagaaggatgaggccttcttcactgccaacgcatctgctcaggcttcaaggaagtcctcccccccacgcgcccgcccgcccgtccgaaaggctgctgctgctttgaagggctctgaccaccgtcgtgctacaaatgttactgctagactcgatgcccagcagaaaaagcttaacctgcctgtcctccccaccacaaccattggatccttccctcaaactttggagctcaggagagttcgtcgtgaatacaaggctaacaagatctcagaggatgattacgttaaagccattaaagaggaaattaagaaagttgttgaccttcaagaagagcttgacattgatgtcctggttcatggagagcctgagagaaatgatatggttgagtactttggtgagcaattatctggttttgctttcactgttaacggatgggttcaatcttatgggtctcgctgcgtcaagccaccaatcatctacggtgatgttagccgccccaaaccaatgaccgttttctggtcatctactgcccaaagtatgactaaacgcccaatgaagggaatgcttactggccctgtcaccattctcaactggtcctttgtcagaaatgatcaaccgagattcgaaacttgctaccagattgccttggccatcaaggatgaagtggaggatcttgagaaggctggtatcaatgttatccaaatcgatgaggctgctttgagagaagggttgcctcttaggaagtccgagcatgccttctaccaaaagtgggctgtccactccttcagaatcaccaactgtggtgtccaagacattacccagatccacacccacatgtgctactccaacttcaatgatatcatccactcgatcattgacatggatgccgatgtcataaccattgagaactcacgttcagatgagaagctcctgtcagtcttccgtgaaggagtgaagtacggtgctggaattggacccggtgtctatgacatccactctcccagaataccatcaaccgaagagattgctgacagaattaacaagatgcttgccgtgctcgagaccaacatcttgtgggttaaccctgactgtgggctcatgactcgcaagtacgctgaggtgaaaccagccctgagcaacatggttgctgctgccaagctgctccgcacccaactcgccagcgccaagtgatcccacgcgtccgaatggtaaaggtttcttttaccttaaccaatagtcaattctcatctatttatacaatatttgtcatgttagtaaaaaagaaggcttctcgcctttccaatcccataaatatgtaccctacaatccagtgaataattgggatgaaaaataagtaaattatattttggttc

SEQ ID NO: 15532 - DNA, 844 bp, Gossypium hirsutum
  Clone ID: GOSHI-09MAY01-C1276_9
actactatgggtggttggccgcccgcctgccggaccggaacgtactgggtcggacccacgccgtgcggccttcttcttgaaatgggctgtccactccttcagaatcaccaactgcggtgtccaggacactacccagatccacactcatatgtgctactccaacttcaatgacatcatccactcaattatcgacatggatgctgatgtgataaccatcgagaactcacgttcagatgaaaagctcctttcagtattccgtgaaggagtgaagtatggtgctggaatcggccctggtgtgtatgacatccactctcccagaataccatcaaccgaagagattgctgaccgaattaacaagatgcttgctgtgcttgagaccaacatcttgtgggttaacccagactgtggtctcaagactcgcaagtatgccgaggtgaagccagccctgaacaacatggttgcagcggccaagctgctccgcacccaacttgcgagtgccaagtgagaggcatatctgaggtcggacatcatcctttaattcgagatggtccagaggaaattgtcttaaatcatttgaataactgtgtgttggaagtaatttgttaggcgtatcatatgcccctcttttaggccaattgttttcctttttcttttttggttatttaccctctaaatttttgtattttcgggaatatatgaattgccttcaattactttgaaaggcacgaaatttggtagtgtaaaaaaaaaaaaaaaaaaaaaaaaaaaaaaaaaaaaaaaaaaaaaaaaaaaaaaaaaaaaaaaaaaaaaaaaaaaaaaaagaagaatgcgaagatgcaaaact

SEQ ID NO: 15533 - DNA, 2073 bp, Gossypium hirsutum
  Clone ID: GOSHI-09MAY01-C1276_8
tgaagatattgtgggcaaagacaagcttgtggtgtctacctcctgctcgcttctccacactgccgttgatctagttcccgcgtctccgcccgcgcgtccgatcaaatcctggctcgcattcgctgcccagaaagttgttgaagtcaatgcacttgccaaggcattggctggtcagaaggatgaggccttcttcgctgccaatgctgccgctcaggcttctaggaaatcctccccgagagtgaccaatgaggctgttcaaaaggctgctgctgctttgaagggctctgaccaccgccgtgcaacaaatgttagtgctagactcgatgcccagcagaaaaagcttaacttaccggtccttcccaccacaaccattggatccttccctcaaaccttggaactcaggagagttcgtcgtgaattcaaggctaacaagatctctgaggacaattacattaaagccattaaggaggaaattaagaaggttgttgaccttcaagaagagctcgacattgatgtcctggttcacggagagcctgagagaaacgatatggttgagtatttcggtgagcagttgtctggttttgctttcactgttaacgggtgggtccaatcttacggatctcgctgtgttaagccaccaatcatctatggtgatgttagccgccccaagccaatgactgttttctggtcatcaactgctcaaagcatgactcaacgcccaatgaagggaatgcttactggccctgttaccattcttaactggtcctttgtcagaaatgatcagcccagattcgagacttgctaccagattgccttggccatcaaggatgaagtggaggatcttgagaaggccggtatcaacgttatccaaattgacgaagctgctttgagagaagggttgcctcttcgaaagtccgagcacgccttttacttgaaatgggctgtccactcctttaggatcaccaactgtggtgtccaggacactactcagatccacacccacatgtgctactccaacttcaatgacattatccactctatcatcgacatggatgccgatgtgatcaccatcgagaactcacgttccgacgagaaactcctgtctgtcttccgcgaaggggtgaagtatggagccggaattggccctggtgtttatgatatccactctccaagaataccatcgaccgaagagatcgccgataggatcaacaagatgcttgcggtgctcgagaccaacatcttgtgggttaaccctgactgtggactcaagactcgcaagtatgcagaggtgaaaccggcactcaacaacatggttgctgccgctaagttgctccgaacccaacttgctagtgccaagtgaaagagggctttatgaaagattggaaatgtccatgaatgattaagaaaaatctctcaattgtttcaattactttgttttcttgatgaaatatttgttagcaaataatatggccttcaaggccaattgattttctcaaagtacttcgtatccaaatacatgaaaaaaggtacaaaaattcaattatcctcattaaatacatatctgtatctgatattttagacatcatgattttattggaaaaatgctaatgattcaattagattaggaatatatccatttgctgttgggcgcatgaaatggtagatgatctagtaatcttcctgtggttcttcatcatcttcgggaccttctgctccgacttcttcataatctttctcgagagcggagagatcttcgcgtgcttcagagaattcaccttcctccattccttcacctatgtaccaatgaacgaaagctctctttgcatacatgagatcaaacttatgatcaattcgggcgaaaacctctgccaccgctgtgttattgctgatcatacacaccgcacgtcttacctcagcgagatcacccccgggtaccaccgttggtggctgatagttgatgccacacttgaaaccagtagggcaccagtctacaaactgaaccgcccgcctagttttaatgttgcgaacagcagcatttacgtcctttggtacgacatctccacggtacatcaa

SEQ ID NO: 15534 - DNA, 948 bp, Gossypium hirsutum
  Clone ID: GOSHI-09MAY01-C1276_7
caactctaagcacataataacatccctactcgtccgtaagctcttgcataataacaaccccatcgtaaaacagcctcactctgagagttgtttagaaaaaaaattaagtggtaagagaaatggcaaaattcccagtgatcaacttggagaaactgaatggtgagagagcagcaaccatggatctaatcaaagatgcctgcgagaattggggcttctttgaggtgttgaaccatgggattccctatgattttatggacagagtggaaagcttgacgaaggagcattacaagaaatgcatggagcaaaggtttaaggaactggtggcaagcaaggcccttgagggtctccaggctgaggttactgatatggactgggaaagtaccttctatttgcgccatctccctgaatcaaacatggctgaaatcccagatctaaccgatgaatacaggaaggtgatgaaagaatttgcattgaaattggagaaactagcagaggagctgctggacttgttctgtgagaaccttggtctagaaaaaggatatctgaaaaaggctttctatggggcaaaaggtcccacctttggcaccaaagttagcaactacccaccatgtcccaccccagacaaaatcaagggactcagagcccacacggacgccggtggcatcatcttgctgttccaagacccccaagtgggcggccttcagcttcttaaagacggggaatgggtggatgtgcccccctggcgccactccatcgtggtcaacctgggagaccagctggaggtgatcacccacgagcaaatccaagagcgtggagcacacgtgattgccaaaccgacgttttgcatgtcatgctctttttcaacccggaagcacgcgttttaccgggcaaccctgtgaaaagagagaaagagaagttgacccaaatggtcaagatcttaacttcggg

SEQ ID NO: 15535 - DNA, 712 bp, Gossypium hirsutum
  Clone ID: GOSHI-09MAY01-C1276_6
cacttgcattgagtctctaagatatcactgcaaggaaaaaaaaaaaaaaccagacatggcttccaacactgttgcatccgctgctcttcttcttaccttgaacttgttgttcttcactttggttagctctacctacgtgccttgcccaccaccaccaaagagccacaagcctacccacaagagcccaccctcggcacctaaacagccagccacttgccccaaagatacactgaaactaggtgtttgtgctgatttgttgggctcggtgcgcgttgttgttggaccgtcgaggaccaaatgctgctcactcatttcgggtttggctgatctcgatgctgctgtttgcctttgcactgctattaaagctaatgtgttgggggttaacctaaacgttcctgtttcattgtctttgctcctcaattcctgcgaaaagcaaatgcctgctggttacaaatgtgcttaagcaatgtttgggtttttcttttacgtgttctttttttttctgggcgtgttaaatttggtgttttgatatgtcaagggttagataaaatggttaaggtctcttaccttaaccaatactcaattctcatctatttatacaatatttgtcatgttagtaagaaagaaggcgtctcgccttccaatccataaattatgtatgttacaagtcagtgaaacaattggatgaaaaaataagttaattttagaaaaa

SEQ ID NO: 15536 - DNA, 829 bp, Gossypium hirsutum
  Clone ID: GOSHI-09MAY01-C1276_5
gtcgacccaccccgcgcccccgcgtcggccgccgcgtccgcttgcattaagtctcaaagatatcactgcaagaaaaaaaaaaaaccagacatggcttccaacactgttgcatccgctgctcttcttcttaccttgaacttgttgttcttcactttggttagctctacctacgtgccttgcccaccaccaccaaagagccacaagcctacccacaaaagcccaccctcggcacctgaacagccaggcacttgccccagagatgcactgaaactaggcgtttgtgctgatttgttgggctcagtgcgcgttgttgttggaccgtcgaggaccaaatgctgctctctcatttcgggtttggctgatctcgatgctgctgtttgcctttgcactgctattaaagctaatgtgttgggggttaacctaaacgttcctgtttcattgtctttgctcctcaattcctgcgaaaagcaaatgcctgctggttacaaatgtgcttaagctcatttccactgtttcctcagcaatgtttgggtttttcttttacgtgttctttttttttcctgggcttgtttaatttggtattttgatatgtcaagggttagataaaatggtaaaggtttcttttaccttaaccaatagtcaattctcatctatttatacaatatttgtcatgttagtaagaaagaaggcttctcgccttccaatccataaattatgtaccttacaaatcagtgaaataattggatgaaaaaataagttaatttatatttgtttcatttgcctctcctgtatttaaaaaaggttctttttatttcaaaaaaacttaaaa

SEQ ID NO: 15537 - DNA, 1107 bp, Gossypium hirsutum
  Clone ID: GOSHI-09MAY01-C1276_4
tcgcgttaagccaccaatcatctatggtgatgttagccgtcccaaaccaatgactgctttctggtcatctaccgcccaaagcatgacttcacgcccaatgaagggaatgcttaccggccctgttaccatcctcaactggtcgtttgtccgaaatgatcagcccagatttgagacttgctaccagattgccttggctatcaaggatgaagctgaggatcttgagaaggctggtatcaatgttatttaaattgacgaggccgctttgcgcgaggggttgccttttaggaagtccgagcatgctttctacctcaaatgggcagtccactccttcaggatcactaactgtggtgtcaaggataccacccagatccacacccacatgtgttactccaacttcaatgatatcatccactcaattattgacatggacgctgatgtgatcaccatcgagaactcccgttccgatgagaagctcctatcagtcttccgtgagggagtcaagtacggtgctggaattggccccggtgtctatgatatccactctcccagaataccatcaaccgaagagattgcagacaggattaacaagatgcttgctgtgctcgagaccaacatcttgtgggtcaaccctgactgcgggctcaagactcgtaagtatgctgaggtgaaaccggccctcaacaacatggttgctgcggccaagctgcttcgcgctcaacttgccagtgccaagtgagaggatcatgatgagagattggagatccttactccattaatgatttattatacccaagaagagaaagaattaaaattgaaagaaatttctgtgttacaatttgaataactctgtgtctttgatgatatattttgtaggcatgatttgccctcgaggccaatttttttccttctttcttgggtggttctatttttttaccaactattttgtatttctgggatatattcaagtaatgattttcaaaaaaaaaaaaaaaaataataaaaatatttaatataataaaaattaaatttttaataataatttctttatttttaatataatatattttttttttttattttaataatttttttatcttccaatttaaa

SEQ ID NO: 15538 - DNA, 1571 bp, Gossypium hirsutum
  Clone ID: GOSHI-09MAY01-C1276_3
acgcgacggccccctttttttttttttttgcaaaccaaagctaaaatgttagaaatcaagattaaaagtctttgacaaacttagaatactataaatagctgatgaagtaaaatcagacgaggaacgtggggaatcattagcctgtgcttttccaaaatacagatctagtaatcttccggttcttcttcgtcttcaacaccttctgccccaacttcctcgtagtctttctctagagcagcaagatcttcacgggcttccgagaattcaccttcctccattccttcacctacataccagtgaacgaatgctctcttggcatacatgagatcaaatttgtggtcgattcgagcaaaaacctcggccacagcggtgttattgctgatcatacacactgcacgttgtactttagcaagatcaccccctggtaccaccgttggtggctgatagttgatgccgcacttgaaaccagtagggcaccagtctacaaactgaactgcccgcttagttttgatggtagcaacagcggcattgacgtccttcggtacaacatccccacggtacattaaacagcatgccatgtatttcccatgtctcgggtcgcatttggccatcatgcttgagggttcaaagacggcacttgtgatctcaggaacagatatctgctcatggtaagcttttgcagctgagattactggggcataagatgaaagcatgaaatggatacgaggataaggcacaaggttagtctgaaactccgtaatgtccacatttatggcgccatcaaacctcaatgaagtggtcaaagaagagataatttgggatatcaagcgattcaagttggtataagttggcctttcgatgtccaaggatctcctgcagatatcgtatatagcttcattgtcaagaagcacagaaacatctgtgtgttcaaggagagaatgtgttgagagcacgctattgtaaggttccacaactgctgtagaaacctgaggagaagggtagatagtaaacccaagctttgacttctttccataatctactgacaagcgctccaaaagcaatgagcccaaacccgaaccagttccaccgccaacagcattgaataccaaaaatccttgtagaccagtgcagttgtcagccaattttctcactcggtcaaggcaaagatccacaatctccctaccaacagtataatgtcctctagcaaagttattagcagcatcttcctttccggaaataagttgctccggatgaaacagttgtctataagtcccggttctaacttcatcaatgacagtgggctctagatcaacaaatatagcccttggcacatgcttgcccgacccagtctcgctaaagaaggtattaaaagcatcgtggcaagcacctacagtggtgtcactaggcatcatcccatcgggttgaattccatgttcaagacaataaagctcccaacaggaatttccgacctgaattccagcttgaccaatatgtatactaatcacctccctcatatctgtttttttttttttcaaaaccaaaatctcaaacaacccttttttttctttctc

SEQ ID NO: 15539 - DNA, 2164 bp, Gossypium hirsutum
  Clone ID: GOSHI-09MAY01-C1276_2
tcgctttgacacaccgccacctaaaaaggccgcgcgtatgcttaaatttcattaaaaactaaaactagaaagaaaaaaaaaaagagaagaaaaaaatcaccatcaccatcatcgtcagattcagatctgggttttcactcatttatagccaatagtacaccattttagctataaatagccaacctctccactctctaaaattgtgccacttcttcctcttcatctctctgtatctctttgagtgacttctttttagttctctctccggttccacctccgttcacttcgaaaaatggcctctcacattgttggatatccccgcatgggacctaagagagagcttaaatttgctttggaatctttctgggacaagaagagcagtgccgaggatttgcaaaaggttgcagctgatctcaggtcatccatctggaaacaaatggctgctgctgggatcaagtacatcccgagcaacactttctcttattacgaccaggtgctcgatgcaacatcgatgctcggagctgttccacctagatatggctggaacggtggtgagatcggatttgacacttacttctcaatggccagaggaaatgcctctgtgcctgccatggaaatgaccaagtggtttgacaccaactaccacttcattgttcctgaattgggacctgatgttaacttctcttatgcatctcacaaggcagtggatgagtacaaggaagctaaggcgcttggagttaacacagtcccggtccttattggccctgtctcatacttgttgctctctaaacctgcaaagggtgttgagaagaccttctctcttctctccctcctccccaaaatcctccctatctacaaggaagttatatctgagcttaaggcagctggtgcttcctggattcagtttgatgaaccgacccttgtcttggatcttgactctcacaaattgcaagcattcactgctgcttatgatgatttggaatccactctctctggcttgaatgtattgatcgagacctactttgctgatcttactgctgaggcatacaagacactcattgggttgaagggtgtcactgcttatggtttggatttggttcgtggagcccagactcttgatttggtcaagagcaatttccctaagggcaagtacctctttgctggagttgtggatggaaggaacatttgggccaatgatcttgctgcttctctcagcactttgaaggagcttgaggctgttgttggcaaagaaaacctggtggtgtccacatcctgctcgcttctccacaccgctgttgatctagtgaatgagactaagctagacgatgaaatcaaatcctggctcgcatttgctgcccagaaagttgttgaagtcaatgcacttgccaaggcattggctggtcagaaagatgaggccttcttctctgccaatgctgctgctcaggcttcaaggaagtcctccccaagagtgaccaatgaggctgttcaaaaggctgctgctgctttgaagggctctgaccaccgtcgtgcaacaaacgttagtgctaggctggatgcccagcagaaaaagcttaatctgccagtcctacccaccacaaccattggatccttccctcaaaccttggaactcaggagagttcgtcgtgaattcaaggctaacaagatctctgaggacgactatgttaaagccatcaaggaggaaattaagaaggttgttgaccttcaggaagagctcgacattgatgtccttgttcatggagagcctgagagaaacgatatggttgagtactttggtgagcagttgtctggttttgctttcaccgttaatgggtgggtgcaatcttatggatctcgctgcgttaagccaccaatcatctatggtgatgttagccgccccaaaccaatgactgttttctggtcatctaccgcccaaagcatgacttcacgcccaatgaagggaatgcttaccggccctgttaccatcctcaactggtcgtttgtccgaaatgatcagcccagatttgagacttgctaccagattgccttggctatcaaggatgaagttgaggatcttgagaaggctggtatcaatgttattcaaattgagaggctgctttaaagagggttccgtttaaagtttgacaccctttacttaaaggctgcc

SEQ ID NO: 15540 - DNA, 1486 bp, Gossypium hirsutum
  Clone ID: GOSHI-09MAY01-C1276_1
ctgcactaaacgactgactagctggaacgcctgcacgcccggggtccgggtccgggatcgacgcgcacgcgctccaaccattggatcctgccctcaaaccttggagctcaggagagttcgtcgtgaattcaaggctaacaagatctctgaggatgattacattaaagccattaaggaggaaattaagaaggttgttgaccttcaggaacacctgcgcccggatgtcttggttcatggagagcctgagagaaacgatatggttgagtactttggtgagcagttgtctggttttgcattcactgttaatggatgggtgcaatcttacggatctcgatgtgtcaagccaccaatcatctacggtgatgttagccgccccaagccaatgactgttttctggtcatctaccgcacaaagcatgactgcacgcccaatgaagggaatgcttactgggcctgttaccatccttaactggtcctttgtcagaaatgatcagccccggtttgagacttgctaccagattgccttggccatcaaggacgaagtggaggatcttgagaaggccggtatcaatgttatccaaattgacgaggctgctttgagagaggggttgcctcttagaaagtcggagcacgccttctacttgaaatgggctgtccactccttcagaatcaccaactgtggtgtacaggacactacccagatccacactcatatgtgctactccaacttcaatgacatcatccactcaattatcgacatggatgctgatgtgataaccatcgagaactcacgttcagatgaaaagctcctttctgtattccgtgaaggagtgaagtatggtgctggaatcggccctggtgtctatgacatccactctcccagaataccatcaaccgaagagattgctgaccgaattaacaagatgcttgctgtgcttgagacaaacatcttgtgggttaacccagactgtggtctcaagactcgcaagtatgccgaggtgaagccagccctgaacaacatggttgcagctgccaagctgctccgcacccaacttgcgagtgccaagtgagaggcatatccaaggtcggacatcatcctttatatcgaagatgatccagaggaaatttgtcttaaatcatttgaataactgtgtgttggaagtatttgttaggcgtatcatatgcccctctttgaggccaattgttttccttttcttttttggttatttcccctctaaatattttgtatttttgggaatatatgaattaccttcaattactttgaaaggcacgaaatttggtagtgtatcttttatgagcctaatgaaaatgtcagtactggctgtggctgtggactgactatattagcttctttctctaaaaaaaaaaaaatgtaaaagaacctacaaataaattaaaaaaaaaaaaaaaaaaaaaaaaaaaaaaaaaaaaaagggggcggccgttctaaaggatccaagcttacg

SEQ ID NO: 15541 - DNA, 636 bp, Gossypium hirsutum
  Clone ID: AW187866.1
ccggtatcaatgttatccaaattgataccggcctcgtgacgaatgcgttatccctcataaagacacagtgcacctccatggggagttgggcattcaactcctgcacactccactgttgtcgtgttcaagaaagtacccatatccacactcttatgtgctactccaacttcaatgacatcctccactcaattatctacatggatgctgatatgataaccatctagaactcacgttcacatgaaaatctcctttctgtattccgtgaacgagtgaactatggtgctggaatcggccctggtgtctatgacatccattctcccacaataccaccaacctaagagattgctgacccaatttacaagatgcttgctgttctttagacaaacatcttgtgggttaaccctcactgtggtctcaacactcccaattatgccgatgtgaaacctcccctgaacaacatggttgcagctgcctatctgctccacaaccaacttgcgagttccacctgacaggcatacccaaagtcggacatcttcctttatatcgacaatcatccacacgatatctgttttcaatcatttgaacaactgtgtgtttgaaatatttgtttcgcatctcctctccccccccttatac

SEQ ID NO: 15542 - DNA, 525 bp, Gossypium hirsutum
  Clone ID: uC-gsronu33B178c11b1
tctttcgcgtccgaccacgcgtccgcccacgcgtgcgcccacgcgtccggccaatgactgttttctggtcatctactgcacaaagcatgactgcacgcccaatgaagggaatgcttactgggcccgttaccatcctcaactggtcctttgtcagaaatgatcagccccggtttgagacttgctaccagattgccttggccatcaaggacgaagtggaggatcttgagaaggccggtatcaatgttatccaaattgacgaggctgctttgagagaggggttgcctcttagaaagtcggagcacgccttctacttgaaatgggctgtccactccttcagaatcaccaactgcggtgtccaggacactacccagatccacactcatatgtgctactccaacttcaatgacatcatccactcaattatcgacatggatgctgatgtgataaccatcgagaactcacgttcagatgaaaagctcctttcagtattccgtgaaggagtgaagtatggtgctcgaatcggcc

SEQ ID NO: 15543 - DNA, 619 bp, Gossypium hirsutum
  unsure (1)..(619): unsure at all n locations
  Clone ID: AW187869.1
gtgagcaattatctggttttgctttcactgttaacggatgggttcaatcttatgggtctcgctgcgtcaagccaccaatcatctacggtgatgttagccgccccaaaccaatgaccgttttctggtcatctactgcccaaagtatgactaaacgcccaatgaagggaatgcttactggccctgtcaccattctcaactggtcctttgtcagaaatgatcaaccgagattcgaaacttgctaccagattgccttggccatcaaggatgaagtggaggatcttgagaaggctggtatcaatgttatccaaatcgatgaggctgctttgagagaaaggttgcctcttangaagtccgagcatgccttctaccaaaagtgggctgtccactccttcagaatcaccaactgtggtgtccaagacattacccagatccacacccacatgtgctactccaacttcaatgatatcatccactcgatcatcgacatggatgccgatgtccttaacatttgagacctcccgttcagaataagagctccctgttattcttcctttaaagagtaaattaatgttctgggaattgaacccggtgtctaataactcaactccccccgaattcc

SEQ ID NO: 15544 - DNA, 465 bp, Gossypium hirsutum
  Clone ID: uC-gsflmaxxa047a07b1
aagttctggctccggttccacctcccgtggctactaaaatggcttcacacattgttggatatccccgcatgggacctaagagagagcttaagtttgctctggaatctttctgggataagaagagcagtgccgaggatttgcagaaggttgcagctggtctcaggtcatccatctggaaacagatggctgatgctgggatcaagtacattcccagcaatactttctcttattatgatcaagtgctcgataccacagcaatgctcggcgctgtaccacctagatatggctggaatggtggtgagatcggatttgacacttacttctgcatggccagaggaaacgccttcttgcctggcatggaaatgaccaagtggtttgacaccaactaccacttcattgtttccgaattgggacctgatgttagattcttttatgcatctcacaaggcaggtggatgagtacaag

SEQ ID NO: 15545 - DNA, 395 bp, Gossypium hirsutum
  Clone ID: uC-gsflmaxxa009a11b1
gtatggggcataaggacccacctttgggaccaaagttagcaactacccaccatgtaccaccccagacaaaatcaagggactcagagcccacacggacgccggtggcatcatcttgctgttccaagacccccaagtgggcggccttcagcttcttaaagacggggaatgggtggatgttccccccttgcgccactccatcgtgatcaacctgggagaccagctggaggtgatcaccaacggcaaatacaagagcgtggagcacagggtgattgcccataccgacggagattgcatgtggatagctaatctttacaacgcttgcatctactgccctgtaagccgctgaactcaatgcacgtgccaaggcgttgcctggtcaaaaggatgagggcttc

SEQ ID NO: 15546 - DNA, 604 bp, Gossypium hirsutum
  unsure (1)..(604): unsure at all n locations
  Clone ID: LIB3828-010-Q1-K6-H1
gnaattctctcaaagttcttaaacattgtctttttttgtctgaagttcaatttttatctcttttcttttttcattaagatatacggtaaaatggcttcccacattgttggatatccccgtatggggcccaagagagagcttaaatttactttggaatctttctgggataagaagagcagtgctgaggatttgaaaaaagttgcagctgatctcaggtcatccatctggaaacagatgtctggtgctgggatcaagtacatccccagcaacactttctcttactacgaccaggttcttgatactacatccatgctcggagctgttccacctagatataactggactggtggtgagatcggatatgacacttacttctccatggctagaggaaatgcctctgtgcctgccatggaaatgaccaagtggttcgacaccaactatcacttcattgttcctgaactcggacctgatgttaaattctcttatgcttctcacaaggcagtggatgagttcaaggaagctaaggcgctcggagttgacaccgtcccagtccttattggccctgtctcatatttgttgctgtcaaaacccgcaaagggtgtcg

SEQ ID NO: 15547 - DNA, 562 bp, Gossypium hirsutum
  Clone ID: LIB3584-031-P1-K1-F12
cccacgcgtccgcccacgcgtccgcccacgcgtccgcccacgcgtccgcatccactcaattatcgacatggatgctgatgtgataaccatcgagaactcacgttcagatgaaaagctcctttctgtattccgtgaaggagtgaagtatggtgctggaatcggccctggtgtctatgacatccactctcccagaataccatcaaccgaagagattgctgaccgaattaacaagatgcttgctgtgcttgagacaaacatcttgtgggttaacccagactgtggtctcaagactcgcaagtatgccgaggtgaagccagccctgaacaacatggctgcagctgccaagctgctccgcacccaacttgcgagtgccaagtgagaggcatatccaaggtcggacatcatcctttatatcgaagatgatccagaggaaatttgtcttaaatcattgtgataactgtgtgttggaagtatttgttaggcgtatcatatgcccctctttgaggccaatcgttttccttttcttttttggttatttcccctctaaatattctgtattttt

SEQ ID NO: 15548 - DNA, 428 bp, Gossypium hirsutum
  Clone ID: LIB3272-004-P1-K1-B9
tggaccgtcgaggaccaaatgctgctctctcatttcgggtttggctgatctcgatgctgctgtttgcctttgcactgctattaaagctaatgtgttggaggttgactgtccctgtgtgacacctgaggttgtccttaaggcatctggtcatgtggataaatttactgaccttatggttaaggatgagaaaactggaacctgctatcgagctgatcacttgctgaaggatttctgcaacgagaagcttcaaaaagacctcaccataagtgcagagaaggctgctgagcttaagcatgtacttgctacattggatgatctatcagctgaagcactaggtgcaaagatcaaagagtatggtattactgctccagatacaaagaatcctctctccgatccttatccattcaacttaatgttccaaagcaaag

SEQ ID NO: 15549 - DNA, 486 bp, Gossypium hirsutum
  Clone ID: LIB3147-019-Q1-K1-H11
aataaagagagattttacgccatggttgaaggaaatgggtgttgcaagcttgcaggaccagtatatggcttccaacactgttgcatccgctgctcttcttcttaccttgaacttgttgttcttcactttggttagctctacctacgtgccttgcccaccaccaccaaagagccacaagcctacccacaagagcccaccctcggcacctaaacagccagccacttgccccaaagatacactgaaactaggtgtttgtgctgatttgttgggctcggtgcgcgttgttgttggaccgtcgaggaccaaatgctgctcactcatttcgggtttggctgatctcgatgctgctgtttgcctttgcactgctattaaagctaatgtgttgggggttaacctaaacgttcctgtttcattgtctttgctcctcaattcctgcgaaaagcatatgcctgctggttacaaatgtgcttaagcaatgtttgggtt

SEQ ID NO: 15550 - DNA, 391 bp, Gossypium hirsutum
  unsure (1)..(391): unsure at all n locations
  Clone ID: LIB3135-011-Q1-K1-H1
ttccggtcgaccacgcgtncgccacgcgtacgaccacgcgtncgcgttcctgtttcattgtctttgctcctcaattcctgcgaaaagcacatgcctgctggttacaaatgtgcttaagctcatttccactgtttcctcagcaatgtttgggtttttcttttacgtgttcttttttttctgggcttgtttaatttggtattttgatatgtcaagggttagataaaatggtgaaggtttcttttaccttaaccaatagtcaattctcatctatttatacaatatttgtcatgttagtaagaaagaaggcttctcgccttccaatccataaattatgtaccttacaaatcagtgaaataattggatgaaaaaataagttaatttatatttgttt

SEQ ID NO: 15551 - DNA, 237 bp, Gossypium hirsutum
  unsure (1)..(237): unsure at all n locations
  Clone ID: LIB3189-013-P1-K1-F1
cggacgcgtgggcggacgcgtgggttcctctctctctatatctaaagggttctttagattttctggccagtttcttctattaagaagatggcctcccacattgttggatatccccgtatgggaccaatgagagagcttaagtttgctttggaatccttctgggataagaagagcagtgcccnatgatttgctaactctctattgctgtttcttaatgatattcatttttttatcatt

SEQ ID NO: 15552 - DNA, 384 bp, Gossypium hirsutum
  Clone ID: uC-gsflmaxxa040a01b1
ttcactcgtccgcccacgcgtccgcggacgcgtgggtcaacttggagaaactgaatggtgagagagcagcaaccatggatctaatcaaagatgcctgtgagaattggggcttctttgaggtgttgaaccatgggattccctatgaatttatggacagagtggaaagcttgacgagggagcattacaagaaatgcatggagcaaaggtttaaggaactggtggcaagcaaggcccttgagggtctccaggctgaggttactgatatggactgggaaagtaccttctatttgcgccatctccctgaatccaacatggctgaaattccagatctaaccgatgaacacaagaatggtgatgaaagaatttgcgttgaaattggagaaa

SEQ ID NO: 15553 - DNA, 448 bp, Gossypium hirsutum
  Clone ID: LIB3197-052-Q1-M1-F10
cggacgcgtgggcctccctttttttttctctaatttagttctctctccgttttcatctccgttcactacgaaaatggcttcccacattgttggatatccccgtatggggcccaagagagagcttaaatttactttggaatctttctgggataagaagagcagtgctgaggatttgaaaaaagttgcagctgatctcaggtcatccatctggaaacagatgtctggtgctgggatcaagtacatccccagcaacactttctcttactacgaccaggttcttgatactacatccatgctcggagctgttccacctagatataactggactggtggtgagatcggatatgacacttacttctccatggctagaggaaatgcctctgtgcctgccatggaaatgaccaagtggttcgacaccaactatcacttcattggtcctgaactcgga

SEQ ID NO: 15554 - DNA, 430 bp, Gossypium hirsutum
  Clone ID: uC-gsronu33B104b08b1
ccggcactcaacaacatggttgctgccgctaagttgctccgaacccaacttgctagtgccaagtgaaagagggctttatgaaagattggaaatgtccatgaatgattaagaaaaatctctcaattgtttcaattactttgttttcttgatgaaatatttgttagcaaataatatggccttcaaggccaattgattttctcaaaaaaaaaaaaaaaaaaaaaaaaaaaaaaaaaaaaaaaaaaaaaaaaaaaaaaaaaaaaaaaaaaaaaaaaaaaaaaaaaaaaaaaaaaaaaaaaaactctaatattttttaaaataaaaaaatttcactgcctttcatataacaaaataattactgggggggggcctttaaaaaaaatcatttttcgccttgcttcacatccccttattggcttttctttggggcccc

SEQ ID NO: 15555 - DNA, 336 bp, Gossypium hirsutum
  Clone ID: uC-gsflmaxxa009a06b1
tttatatctgaaaaaggctttctatggggcaaaaggtcccacctttggctccaaagttagcaactacccaccatgttcgaccccggacaaaattcatggagtccaaactctcgatgaggccaagagcaatttccctaatggcaagtacctctttgctggagtctgtggacggaaggaacatctgggccaatgatcttgctgcttctttcagcactatgaaggagcttgaggctgttgctggcaaagaaaaccctgtggtgtccacatcatgctggcttgtccacaccgctgttgatctagcgaatgagactaagctagacgacgaaatcaaatcgc

SEQ ID NO: 15556 - DNA, 343 bp, Gossypium hirsutum
  Clone ID: LIB3165-030-P1-K1-A8
cccacgcgtccggcttgacattgatgtcctggttcatggagagcctgagagaaatgatatggttgagtactttggtgagcaattatctggttttgctttcactgttaacggatgggttcaatcttatgggtctcgctgcgtcctccccaccacaaccattggatccttccctcaaactttggagctcaggagagttcgtcgtgaatacaaggctaacaagatctcagaggatgattacgttaaagccattaaagaggaaattaagaaagttattgctgagcttaaggctgctggtgccttatgggttcagtttgatgaaccgacccttgtcttggatctcgac

SEQ ID NO: 15557 - DNA, 327 bp, Gossypium hirsutum
  Clone ID: LIB3147-039-Q1-K1-B7
cttgcagcagctcgaagctattgtgggcaattacaagcttgtggcgtctacctcctgctcgcttctccacactgccgttgatctagtaaacgagactaagctagatgatgaaatcaaatcctggctcgcatttgctgcccagaaagttgttgaagtcaatgctgctgctcaggcttctaggaaatcctccccgagagtgactaatgaggctgttcaaaaggctgctgctgctttgaagggctctgaccaccgccgtgcaacaaatgttagtgctagactcgatgcccagcaagaaaagcttaacttacctgtccttcccaccacaac

SEQ ID NO: 15558 - DNA, 179 bp, Gossypium hirsutum
  Clone ID: LIB3493-055-P1-M1-A9
gaaattaagaaggtttgtgacggtcaagaagagcttgacattgatgtcttggttcatggagagcctgtaagaaacgatatgggtgagtactttggtgtgctcgtgggtggttaagtattgcctcgtttgcggggtgtacccctactcagggtttttctgttttttttttaaattgttgt

SEQ ID NO: 15559 - DNA, 2066 bp, Gossypium hirsutum
  Clone ID: GOSHI-09MAY01-C1266_1
cacaaacaaaacattttcagtcctccaccaacccactctaaacactcttttgttttccccccttggaacagctgagccaagacgcgagtaatggcggtggcaatgagctttcgtagattgtcttcctccatcaagtccccaaccagacctctcttcagtggcagctccctctattatatgtcaacagctgcggcagagaaagagaaagctcgtgctaatcggatacatcagttgaatgctccgctagaggaaatcgatcctgaaattgctaccataatcgaactcgagaaagctaggcaatggaagggactagaacttataccatcagagaattttacatccctatcagtaatgcaagcagtgggctctgtcatgatcaacaagtacagtgaagggtatcctggtgctagatactacggaggaaacgaatacattgacatggctgagtccttgtgtcaaacgcgtgcactagaggcttttgggttggatcctgcaaagtggggagtcaatgtgcagtcactttccggatctcctgctaactttcaggtttatactgccttgttgaaacctcatgagcgaattatggcactagatttaccccatggtggacatctttcacatggttatcagactgacactaagaagatatctgctgtgtcaatattctttgagacaatgccatatagattgaacgagggtacaggttatattgactatgatcagctagagaaaagtgcagtgcttttcagaccaaaacttatagttgctggtgccagtgcttatgctcgcctttatgactatgctcgtatacgcaaggtctgtgataagcagaaagcaattatgttggctgacatggcacatattagcgggttggttgctgcaggtgttattccatctccttttgaatacgctgatgttgtgacaaccacaacacacaagtcacttcgtggtccacgtggtgctatgattttcttcaggaagggactcaaagagattaacaaacaagggaaagaggtaatgtatgacttggaagacaaaattaatcaagctgtctttcctggtcttcaaggtggaccacataatcacaccatagctggtttagcagttgcattgaagcaggtcagaacacccgagtacaaggcttaccaagagcaagttcttagtaattgctcgaaattttctcagaggttgctggagaacggctatgaactagtatctggtgggaccgagaaccatttagtcttggtcaatttgcgaaacaagggtattgatggctcaagagttgagaaggtattggaatcagttcatattgcagccaataaaaacactgttccaggggatgtgtctgctatggttcctggtggtatccgcatgggaaccccagctctcacatctaggggtttcattgaggaagatttcgagaaggtagctgacttctttgacgctgctgtgaaattagccttgaaaatcaaggccaagacggaaggaacaaagttgaaggattttgtagcaaccttacagtcggatacatactttcaaaccgaaatcgctaagctccgacaagaagtggaggagtacgcaaaacagtttccgactattggttttgagaaagaagcaatgaaatacaaggactaaagcggatatctttacacacaatgcaaggtttgtcagctctaaagaacttcctaaactggttgctgtcttatttgttgaacgtaatcttctagaggcaactatcttagaatttattgaaatgccaaaatatgcacgttagtttttagtattaaggatgttatctggggttgagccgaactgtattcaaactgtatgaaactatgagcttttcattcaaagtttgagacttgagtttggctcacgctcgatcaattttcgttttcgaagctcaaaatcgattcgcgatttaaaaaagaaaatgaactgctcatgtttgtttgattagactcgtttattggctattaaattcatgtatcaaacaattcagctgagttggatagctagttttactattcaaaagattacaaaataattttttaaaaaaacaaaaa

SEQ ID NO: 15560 - DNA, 596 bp, Gossypium hirsutum
  unsure (1)..(596): unsure at all n locations
  Clone ID: LIB3829-021-Q6-K6-C12
gcgttctcggncgcgtgggcggccgcgtggggggctgtgggggggttncagaaaggactcaaagagatgtaacaaacaagggaaagaggtaatgtatgacttggaagacaaaattaatcaagctgtctttcctggtcttcaaggtggaccacataatcacaccatagctggtttagcagttgcatgggggggggtactctgataaaaatttttttgtgtatatgcaagttaaacacactatgccaagctcaggccatacaaaatcttgatacaagttaaccaggagcctttaggtttcttgagtttgacatatgtgcttataggtcagaacacccgagtacaaggcttaccaagagcaagttcttagtaattgctcgaaattttctcagaggttgctggagaacggctatgaactagtatctggtgggaccgagaaccatttagtcttggtcaatttgcgaaacaagggtattgatggctcaagagttgagaaggtattggaatcagttcatattgcagccaataaaaacactgttccaggggatgtgtctgctatggttcctggtggtatccgcatgggaaccccagctctcaca

SEQ ID NO: 15561 - DNA, 499 bp, Gossypium hirsutum
  Clone ID: GOSHI-09MAY01-C1236_1
cccacgcgtccgcggacgcgtgggtttttccatcccctaaaacccattttttctaccactctttgtgccttggaatgatgtcaagtagcagagaaagagaagagtcattaactttcccaacaaacccatcatcgacctcttctccaatcacagtttcagaccaccttgaccgttatctccaggacccatcttcccacatcggaagtgcttctgggagttactcaaacgagggtcctctagctgctgaaacagctagtcccagtaacagtgatgttgagtttggtttctcaaggcatgactttagacagcaaagtccaatctctggcactgtacagttctatcaacgccatgtcttcctttgctacaaaagcccatcagtttggcctcctaggattgaggctgctgagtttgatcgtttgcctaggttgttgtctgccgctgttctggccaggaaggctgatatgataaaagagacccgcttgacaatatgtgaagggca

SEQ ID NO: 15562 - DNA, 415 bp, Gossypium hirsutum
  Clone ID: GOSHI-09MAY01-C2996_2
taaaaggattaagcttagtgccgagaaagctatatttgtctttgtgaagaacactctcccacctactgccgccttgatgtccgcgatttacgaggaaaacagggatgaggatggctttctttacatgacttacagtggagaaaacacatttggttcccctttacttttagcttgattcaatgcaatgcagaaagaagcttatgtatatatagctcaaagaaaaggtgtaaattctatatggtgtttgcttgtgtaaatgctttgccctttacgatggcggttacttttaactgtctggacttggaacctttgtttttctgtaaatttaatgtctgaaactaactttatcactgcttcctaatggtatttccatccttttagttaagagaaaaaagaaaataaaaaaataaaatgg

SEQ ID NO: 15563 - DNA, 677 bp, Gossypium hirsutum
  Clone ID: GOSHI-09MAY01-C2996_1
aattaaatccctaaaaagtttccttctcgcttgaaaaatctgtcctctcaatctaaactcaaattggaacaaaccctttttctaattatctctatcaatcaattgggttcttgtttttaattgaaaccctaatttcttaaagcctccattgtttttttttttctcgtggatagtcaaggatcaaatttagcaatggcgaaaagttcctttaagcttgaacatcctttggaaaggaggcaggctgaatctggtcgcatcagggagaagtatccagacagagttcctgttatcgtggagaaggctgaaaggagtgacattcctgacattgataaaaagaagtatcttgttccatctgatttgactgtggggcaattcgtttatgttgtacgcaaaaggattaagcttagtgcggagaaagctatatttgtctttgtgaagaacactctccctcctactgctgctttgatgtctgcaatttatgaagaaaacaaggatgaagatggctttctgtatatgacttacagtggagagaacacatttggttccccataacttctttagcactacgctattatcaatctatgtaaatggctaaaaggaagtatcttgttccatctgatttgactgtggggcaattcgtttatgttgtacgcaaaaggattaagcttagtgcggag

SEQ ID NO: 15564 - DNA, 450 bp, Gossypium hirsutum
  Clone ID: GOSHI-09MAY01-C2986_3
cccacgcgtccgcccacgcgtccgctcctaactccaaaagaattgcttatattcagaatctggggcctgctatttgccaccagtcagtgtagatcatgagatttgtcatctcggctttgttcctttttgtagttgcagctgcttatgatcctttggatccaaatggaaacttaacaatcaaatgggatattgtgtcttggacacccgatggctacgtggctgttgtgacgatgaacaattttcaaatgtatcggcacataatgagtcctggttggaccttggggtggacatgggctaagaaagaagtgatatggtccatgaatggagctcaaactactgaacaaggtgactgctcccagttcaaaggaaatgtacctcattgttgcaagaaaacacccacggttgtagacttgctccctggtgttccttataatcaacaatactccaatt

SEQ ID NO: 15565 - DNA, 1581 bp, Gossypium hirsutum
  Clone ID: GOSHI-09MAY01-C2986_1
ccgggcgcccacgcgcgcgcccgcggccggccgcgtggcctgcattcagcaattgtcggaatattgcttcaaatcagaacctgagtctcgccattgctacaagtccatagagatgaagtttttcatctcagttttgttcctttttgtcctcttttcttatgcagctgcatatgatcctttggatccaaatggaaatgtaacaatcaaatgggatattgtgtcttggacgcctgatggctatgtggcagtggttacaatgaacaattttcaaatgtatcggcacatcatgagtcctggttggaccttggggtggacatgggctaagaaagaagtaatatggtccatggtaggggctcaaactactgagcaaggtgattgctcaaagttcaaaggaaatatacctcactgctgcaagaaaacccccacggttgtagacttgctccctggtgttccctacaatcaacaattcaccaattgctgcaaaggtggagtgcttgcagcatggggtcaagatcctcaatctgctgtctctgctttccaaattagtgttggattagccggtacttcaaacaagactgtcaaacttcccaagaacttcactttacttggtccgggaccaggttacacttgtggtcctgcaaaggtcgtgccatcgaccacttttctcaccccagatcgccgccgaaaaactcaggccctcatgacatggaatgtgacctgcacttattcgcaatttctagctcggaaaaacccgaattgttgtgtctctttctcgtctttctacaatgaaaccatcactccttgcccaacttgtgcatgtggcccccgcgtccggaacaattgtgtcaagagtgattccaagtttcttaaaatggtaggattgaacacaccaaggaaagataatgctccactgcttcaatgcacgcaccacatgtgcccagtgcgagtacactggcatgtcaagctcaactacaaagagtactggcgagttaaggtatcgatcaccaacttcaactaccggatgaactacacgctatggagccttgttgtccagcaccctaatcttaacaacgtaacacaagttttcagcttcgattacaagccgctggttccctatgaatcaatcaatgacacagggatgttctatggcatgaagtactacaatgacctgttgatggaagcagggccattaggaaatgttcaatcagaggtgcttctgaggaaggacaaggatacctttactttcaaacaaggatgggcatttcccaggaaagtgtatttcaatggtgatgaatgcatgctccctccacctgatacatacccatttctaccaaactctgcccatcaacacctatccttcaccagctttacattcattgctgcaatgtttttcttatttgtaaccttttggtgatcgtttctcatgttgtatgagcacaaatgacagcgagaaagtacacaattttacaattttcgaaattgtttcaatgaatcggaaaagggattttgtaaaaaaaaaaattataatattataattataattaataaaaaaaaattataaatataaattaatttttataa

SEQ ID NO: 15566 - DNA, 533 bp, Gossypium hirsutum
  Clone ID: LIB3584-048-P1-K2-H4
tgcgccaccggtaccgaattccaattccggcctagacccacgcgtccggttacaatgaacaattttcaaatgtatcgacacatcatgagtcctggttggaccttggggtggacatgggctaagaaagaagtaatttggttcatggtaggggcttaaactactgagcaaggtgtttgctcaaagttcaaaggaaatatacctcactgctgcaagaaaacccccacggttgtagacttgctccctggtgttccctacaatcaacaattcaccaattgctgcaaaggtggagtgcttgcagcatggggtcaagatcctcaatctgctgtctctgctttccaaattagtgttggattagccggtacttcaaacaagactgtcaaacttcccaagaacttcactttacttggtccgggaccaggttacacttgtggtcctgcaaaggtcgtgccatcgaccacttttctcaccccagatcgccgccgaaaaactcaggccctcatgacatggaatgtgacctgcacttattcgcaatt

SEQ ID NO: 15567 - DNA, 733 bp, Gossypium hirsutum
  Clone ID: GOSHI-09MAY01-C2956_1
cccatactccacgcccaactctacaacgccaaattcaagtttaccaaccttattgtttatttgttcgagacttagagagtttttttgaatacccatggcttcgaagcggattaataaggagttgaaagatctgcagaaggaccctcctgcatcttgcagtgctggccctgttggtgatgatatgttccactggcaagcaacaattatgggcccagcagacagtccttttgctggaggactatttcttgtttccattcacttccccccagactatccattcaagcctcccaaggtttctttccgaacaaaggttttccatcccaacatcaacagcaatggaagcatctgtcttgacattctcaaggagcagtggagccctgcccttaccatatccaaggtgctgctttcaatatgctcacttctcacagatccaaatcctgatgaccctctggtgcctgagattgctcacatgtataagactgatagagccaaatatgagagcactgctcgctcatggactcagaaacatgcaatgaattaagggtcggtcaggcttaggatgctatgtttgataccttttactaaataatattagtaataacttttgtcgtttggatactttgataaagtggtggtgtgggtgtaataagctcctaaagtctttcagaagggtattttttttcccaatcaagttacttaaaaaatactattataaatatattcgatagttcgt

SEQ ID NO: 15568 - DNA, 643 bp, Gossypium hirsutum
  Clone ID: LIB3828-019-Q1-K6-G10
gaaaagggggtctttatttatgatttgtgctttcctggaaatttgaggtttatgcagattagctttcaaaaaccaagtgaaagctggagtcctcaaaataaaatgaagtgaaatctaaatgctacaatattattttttttcctatctcagtatttatttgattcttatgaatgattaacagggatggacactttatgaggtactccaatatgttccagaacataattggattgcatacgaacaagctcttaaagccaaactagtgatagccaaaatggcaataagtgggatagtctattcaataggaaattagattgcacaagtagtttctctctcttctccaccctctctattaatcctttaaacgtaaacatatattgcattcagctcatattgtatagcctgtgtgtagtgttatgaaggaaagccttcagatcgggccttgttggatttactcttcatagatccctttctcattattattaccagttttgtgaggtaatacttgtggttcatagtttatatgttttgctgctttgagtcgttttttttttccatggagcaatgaaacactttgagttccaggctctgtttcctttcgatgactggtgggtggttccagcaaaattatctttgatcaaac

SEQ ID NO: 15569 - DNA, 445 bp, Gossypium hirsutum
  unsure (1)..(445): unsure at all n locations
  Clone ID: LIB3584-014-P1-K1-F1
gaagaacagtcattcccatgaacctaagaagcttttgttcccaaatggctccaaaactttgaaggcttcttcttcagaggttggaggtggtcacggtgatgatggtgatggccatgatgatgtcgagaagttgagtagtagagcaatcaatgcctctatcgttcttggatttgacacgtttgttgtatccaagttacttataattgatcatgattattggcatggatggacactttatgaggtactccaatatgttccagaacataattggattgcatacgaacaagctcttaaagccaaaccagtgatagccaaaatggcaataagggggatagtctattcaataggaaattagattgcacaagtagtttctctctaataatcctttaaacgtaaacatatattgcattcaactcatattgtatagnctgtatgtagtggtatg

SEQ ID NO: 15570 - DNA, 938 bp, Gossypium hirsutum
  Clone ID: GOSHI-09MAY01-C2916_1
gaccctcgcatcccatcagtcaagaattaaaccatggcaacgaatgaagtaaaagttttgggttcctggccgagtccatatgcgatgaggccaaggattgcccttaacctcaaatccctcacttacgaatacattgaagagaagttatgggaaggcaaaagcgagcttcttctccaatcaaaccctgtttacaagaaaatcccagtcctcattcacggcgataacaagccaatctgcgaatctctcatcatcgtacaatacatcgacgaggcttggtcttccggtccttctattcttccttctgatccctgtgaacgtgctgtcgctcggttttgggctgcatatcttgacgacaagtggttcccagcggtgaaaagtataggagtcgctaaaggagaggaagcaaagaaagcagcaatagcgcaagtggaagcagggttggctttgatggaagaagcatacgacaagtgcagcaaagggaagggttactttggtggggatgaagttgggtaccttgatatagcttttgggagcttcttgggatggcttagagtgacggagaagttcaatgcgatgaagctgctggacgaggggaagacgcctggtctggtaaaatgggcggacaggttctgttcccatgccgctgtgaaggacgttatgcctgataccgacaagcttgcggagtttggtaagtttgttattgccaaaataagggccgctggcgctgctgctgaaatgcattagaacaaaaattagcacatcttggatggaactaatgaatatattatctctgtttcttcactttgtgatgatgaacaaagatatatatatatattccagtgttgaagttttttaataaacccttttctttggctattggattaactggcaaaagaggaggaagaagagaggttgtttttggagaaagcaagatagct

SEQ ID NO: 15571 - DNA, 460 bp, Gossypium hirsutum
  unsure (1)..(460): unsure at all n locations
  Clone ID: uC-gsronu33B157c07b1
gcagctatagcgcaagtggaagcagggttggctttgatggaagaagcatacgacaagtgcagcaaagggaagggttactttggtggggatgaagttggnntccttgattttgcttttgtttgcttttttgttttgtcttatattaactttaataagttttattctctattattttttctactttatgtttttatcattttcttattttttaatacttttttatattttccttattttttattatatctaatttataaccttcttattatttttatttcttatttctatttttatttttagtttttttctttttactattatttatttatattttatcatttttatatatttctttatctatttcttcttatctattctttttttactctacttcttttttatattatcttcattttcttttttttcttattattttttttttctattcttttcatttttt

SEQ ID NO: 15572 - DNA, 357 bp, Gossypium hirsutum
  unsure (1)..(357): unsure at all n locations
  Clone ID: LIB3197-014-P1-M1-D2
aagaaanaaaccatggcaacgaatgtgnnctgggttttgggttcctggccgagtgcatatgcgatgaggccaaggattgcccttaaccttgaggggtgtgatgtgaggaatncattgnagagaagttatgggaaggcaaaagcgagcttcttttccaggcnnttggtgttgagatgaggggggcnagtgcttattcacggcgataacaagccaatctgcgaatctctcatcatcgtacaatacatcgacgaggcttggtnttncaggggggtggtatttccttctgatccctgtgaacgtgctgtcgctcggttttgggctgcatatcttgacgacgaggggttcccagcggtgaaa

SEQ ID NO: 15573 - DNA, 299 bp, Gossypium hirsutum
  Clone ID: uC-gsronu33B114d03b1
gcctaattaagagccgctggcgctgctgctgaaatgcattattacaaaaattagcacatcttggatggaactaatgaatatattatctctgtttcttcactttgtgatgatgaacaaagatatatatatatattccagtaataaacccttttctttggctattggattaattggcatttgaagttgattttcagtaagtttggaattaatactctattctcttaaaaaaaaaaaaaaaaaaaaaaaaaaaaaaaaaaaaaaaaaaaaaaaaaaagggctgacactataaaaaaaccaaa

SEQ ID NO: 15574 - DNA, 440 bp, Gossypium hirsutum
  Clone ID: GOSHI-09MAY01-C2906_1
cacatataggaaaggaattcaggttgtaagtaacagattctctaggtagtaccgggcatagcattactttttaagcatggtctcgagcattctttctcccagagtggtttaagaagtacagggaaaaacaaaacaaaacttacaaaggaacggttacattcttttgctttgcagtatgagctatgaaagctgtctggaaaaagaaaactattctatagaagctacaccaggagatgataaatccagcagctacggagctgtaacataagcatgaaacgaggccttccaggcttccaaataaaatttaaccgagaaccaggtcgccttatcatcatatcacagctgccgacaacggtgaattattgttcctgattgtttgaggcttgcccatgtattcggtgcggcttcatattcaagtctatcattttagtacccgtttc

SEQ ID NO: 15575 - DNA, 1176 bp, Gossypium hirsutum
  Clone ID: GOSHI-09MAY01-C2936_1
agtcccttaaattcctcctctgaattatatatttgtcatccaactgaacacaccctcgcctccccatctctctcggcaatttgatgggtcctttcgccattgctgccacagtatttgcagtgctttctctttcataccagcttcatggacatggggagaaggtggagagaggtttaactgtagatggttgtgatcttttccaaggcagttgggtgtatgatgaatcctacccactttaccaatcatccagctgctccttcatccagaaccagttcgattgcttgaagaatggtcggcctgataaagactatctcaagtatcgatggcagcccactacatgcaacttgtcacggttcaatggtgaagatatgctatcgagaattagggggaagagcattatgttcgttggcgattctctgagtctaaatcaatggcagtcactcacttgcatgcttcacactgctgtccctcacgctcagtacaaaactataactgttcaaggcctctccaccttcacttttttagagtacaatgcgaaggtgatgttctcccgcaatgcattcctagtggatcttgtaagcctgccgattggtcgagttctgaagcttgattcaattgaagaaggtgccaaattatggaaaggaattgatgttttgatcttcaatacttggcattggtggctccacaccggaaggaaacaaccatgggatttcattgaagaaggaaatcatacacaggtagacatggaccgcttggttgcctatgagaaagggttaaatacatgggctaaatgggttgacgccaatgttaatacttcaaaaactatagttttctttcaaggagtttctccggatcacattaattcaagtgattggggtgaacctaaagcaaagaattgtgaagggcagaaagagccaattaagggaggagattacccaggaggtcaacatccagcagagaaagtggttgagaaagtgcttaagaccatgtcgaaaccggtttatctactcaacgtaacgactctgtcacagctgagaaaagatgggcatccatcggtgtatggccatggcggccacagagatatggactgcagccattggtgtttggctggtgttcctgatacttggaatcaactcttatatgcagctctcatcaaagctgaattacattccaatc

SEQ ID NO: 15576 - DNA, 459 bp, Gossypium hirsutum
  Clone ID: GOSHI-09MAY01-C2886_1
ccaggttgtcgatttacggtaaaccagagacttggtacatacttttataagggagtattgtatggaacggttggatttgcatgtggtattatcggccaaggaattgcgaatttgataatgactgccaagaggagcatgaaaaaatcggaagaggacatacctgtgccacctcttataaagagtgcagctctctggggtgtttttctcgcggtttcatctaatactcgataccaaatcatcaacggattggaacggttggtggaggcatcaccattggccaaacaagttccacccgttgcaatggcgttcaccgtcggcgtgcggtttgccaataacatatatggcgggatgcaattcgtagattgggctagactgagtggtgtgcaataaactacaaacatgggtttcatgtactttacctataaatatcccctattaaccattgggggggggggtaga

SEQ ID NO: 15577 - DNA, 406 bp, Gossypium hirsutum
  Clone ID: GOSHI-09MAY01-C2876_1
cgaaaaaatacttcaaaagttttgcgcattcgtccggaggtcggaaccgatgaggatgcacttaccagagtgattgttacaagagctgaaaaggacctgaaagatgtcaaagagctttattacaagagaaacagtgtgcctcttgatcaagctgttgctaaggacacctcaggggattacaaggcattgcttcttactctgttgggaaaagaagattgaacatctttatttggcccattttcaggttttaaattaagtgttgttctggtttgtgattggaccttattgatatgagtcactgttatcttcatccttttgtttttatgtggtgtgacattgtttgtttacatttggtttggttttaatggagttgttattttccaaaggcaaaaaaaaaaaaaaaaaa

SEQ ID NO: 15578 - DNA, 1354 bp, Gossypium hirsutum
  Clone ID: GOSHI-09MAY01-C2816_1
aaaataatatcattgggtcaggaagaacagggactatgtacaaaggtgtcctcgaagatggaacctcgcttatgattaaaaggttacaggattctcaacactctgacaaagaatttacatctgagatggctactctgggaaatgtgaaacaccgcaacttagttccccttctaggtttctgtgttgcaaaaaaggagaggcttatagtttacagatacatggcaaatggcactctcaatgataatttgcatcctgtagatgatgctaacaaggctatggagtggtccataaggcttaaaatcggtataggggctgccaaaggatttgcatggctccaccacaactgcaatcctcgtatacttcatcgaaatataagctctaagtgcatcttattagatgcagattttgagcccaaaatatccgattttggtctagctaggcttatgaacccaattgatacacatctgagcacctttgtgaatggcgagtttggggatttagggtatgttgcccctgaatatgccagaacgctagtggccactccaaaaggagatgtctacagctttggagttgtccttctcgagtgggtgactggtgagaaacctacccacgtatccaaagctcctgagagcttcaagggaagtctggtcgaatggatcacgcagctatcaaatgatgggaaacttcaggatgctattgacacatccttgcttggaagggtgttgataatgaacttttccaatttcttaaagttgcatgtaattgtgtattgccacctcccaaggagaggcctaccatgtttgaagtataccagcttttaagagctattggagagcgatacaattttaccaccgaggatgaaattttgatgccttcagatactggtgatgctgattatttagaggaacttattgttgctcgagaagtcaacgagagtcagtgaagagctatgggacatggtgagtattgtatcttagcatagtgcatgtgtaagtatttgctcttgtgcatgtttaaataaaggttgaagttacatgtatgatgctttacttactatttcaacttcctacattcagtactcactgtaattgtatcaggtatattttttagcatctacattaggtctttgtgtctgttatttcatattagaatccttcacctatgtcctcgaggaaaaaaaaaactttagattgattagtatcatacataatctttcgaggctttctccctaaattatcatgtatgtaggatgattagcttcacaccaatcaaatgctacgtataatgtaattaagatcacttcacaattgtgggatctgttttccttattgattaatgtgataatttcttgctg

SEQ ID NO: 15579 - DNA, 1012 bp, Gossypium hirsutum
  Clone ID: GOSHI-09MAY01-C2806_1
gggtcccaattttcaagcttgctatgcctgacaaacttggcatgaggtactcaggccgccaagacagtgcgaccagctcctgctagctccaaaaaagaacttgctgtggagcttggggtttctgttgatgcatggtggagtgatggctggtgggaaggggttgtaactggggttaacagcagtggtgatgataattttccgggccgccccccgccggccgatttatcaatgaacatacacaagaaaggtctaagaatttccagagattgggatggggaccactggattgatattgatgcaagaccggatattctctccttgatatctgatgtcattagcccagatatggacacgaaagtttccatgtccactactattgtcatggatgccaagcatgatgggggtacaatgccagttgaagctgttgctgccaaaattattgctgaaggggagaaacctgagttagcttttcaggactgttttgataaccttgtagaagacgctgattgtaaggagcctgcatcatcaaaagatgaaaaggatggggatgcaagtgattgtaagaagcctcccccatcagaaaatggaaaaaatgctgatgctgatgatgccagtaccattcatgataaactaaatggtatggatggtaatgatgaaatcaacaataatgatgatgacgaggaaggcaaaatagaggcggaagatggcaaggagcagaactctaaaagtacggaactcatggaagcagcaacctagaatgcttctggcgcaacagattcttttgtaatggggatgttggtactaatgttaactaacatgatttccgttgaagttcagacctgtaaatagtgatgcagtcatagcgcaaaagttgttgccgtttgtgcttgacgaggtaaccttgggtcggtgtacagaaacaagggtagtattctgtccgttttgtgtagtaattgttttgtatcagagataggatttgcattttgaagaacttgggtataagcgcctctaa

SEQ ID NO: 15580 - DNA, 340 bp, Gossypium hirsutum
  Clone ID: uC-gsflmaxxa006a09b1
cccacgcgtccgcccacgcgtccgcccacgcgtccgtgatgtgcaggatgaagatggatatggtaaccttgaggaatgggtcccaattttcaagcttgctatgcctgacaaacttggcatgaggtactcaggccgccaaaccgtacgaccagctcctactagctccaaaaaagaacttgctgcggagcttggggttgctgttgatgcatggcggagtgatggctgggggaaggacgctgtaaacgggtcaaacagcagtggggttcatcggccggaggagcaccgcacgtcgcgtggtgttcggtgcgcccccagcggaccttgaaaatacttaggaccg

SEQ ID NO: 15581 - DNA, 612 bp, Gossypium hirsutum
  Clone ID: GOSHI-09MAY01-C2836_3
gaccagactaatttgtccttaaaggaaccgaaaaccaaattttggcctttttaaaattttgggggaccatttcctcttcttctcttgaattttcccaaaccaaaaagaacccaattttttctttatcaatggccttccttgcttttctaaatccctaccataaaatcctcgtttgggtctcaaaaatcaggctttttccaaaatgggttctcgatgctatcgcttactgcttctgggtttgtctttaactctagatcttcagcatttatgcaagagcagctaccgttaaaaccctatacgactacacagtaaaggatattgatgggaaggatacccctcttagcaaatagaggggaaaagttcttttgatcgccaacgcctctccaagatgaaaactgacggcttcctttttttctgcaatttttttggaactgaagatttactaatggttatgggggataacgaacgaaataaaaagagagcccgggaagagacagaggctaactcggtgcccaatacaaaactcgctcgagttgacttggacgataataagggtcccgactccgactctcccgaggctactcgtgtagaacctgatcctgatgatggaga

SEQ ID NO: 15582 - DNA, 1074 bp, Gossypium hirsutum
  Clone ID: GOSHI-09MAY01-C2836_2
cggccgcgtcgaccaaacctcccactggcttcccacgcccccccccccgtcgcccaatattcttttttctcgtcttccacagttgcattttagacaattagacagacacaaaggaaacagagaacgaaactatggcttccatgtctttctctgcaactattccgtctcctcttcttgatttttcccaaaccaaaaagaacccagttttttcttcatcatggccttccatgtctttctcaatcccttccatcaaatcctcgcttgggtcttcaaaatcagcctttttccaaaatgggttctccttgccatcgcttactgcttctgggtttgtctttaactctagatcttcaggcatttatgcaagagcagctacggataaaaccctatacgactacacagtaaaggatattgatgggaaggatacccctcttggcaaatttaagggaaaagttcttttgattgttaatgttgcttcaagatgtggtttgacaacatcaaattactctgagctttcccacatatatgacaagtacaagaatcaaggatttgagattctagctttcccttgcaatcaattcgggggacaagagcctggatcaaatcctgatattaaaaaatttgcttgtaccaggttcaaggcagagtttcctatatttgataaggttgatgtgaatggaccaaatacggctcccgtttaccagtttctgaagtcgagtgctggtggttcttttcggtgacctgatcaagtggaactttgagaagttcttggtggataaaaatggcaacagttgtggagaggtatccaccaacgacatcgcctttccaaattgagaaggacattcagaagctcctcgcgacatgaatcttgaggtcacagtgacttgaaccgcttctgcttgcaatgaaaataagtagatagatagtacaagtagatgtcaggaaaagaagatggaacggtgttttcgcgctatatgtctgatatggacttttttgttttctgttttcccatggtcatggtctgcattatctgatcaaatttcccttttcaacagttatacaaagttgtttactttg

SEQ ID NO: 15583 - DNA, 1125 bp, Gossypium hirsutum
  Clone ID: GOSHI-09MAY01-C2836_1
cccacgcgtccgcccgtattttctctctctacactttcactttctctctctagaaaccttctctctaaacagtttattatattttttttccaaatcctttataaaatcaccagtaactctctgatttgaaaactgaggggttttttttttctgcaatttttttggaactgaaggtttactaatggttatggaggataacgaaggaaataagaagagagcccgggaagagtcagaggctaactcggtgcccaatacaaaactcgctcgagttgactcggacaataataagggtcccgactccgactctcccgaggctactcgtgtagaacctgatcctgatgatggagaagataatttgccggaaacaaggcatataccggaggaattgctgaacatcctcgacgattcagatccggttagtggaccagatccggcgattcagggacttgattcggtcatcaggagtttcgaagaagagatcttaattccggaacaggtggctttaccggaaacggtattggattccggcgagtcgaggccggagttagggtttctgtttgaagcttcggatgatgaactgggtttgccaccgagtttaccggcggttgaggtggagcagagatttgagaccgcctttgatgtggatgaaggtggagggtcaggcggcgttggatttggggaaatgatggggagtgagttcccgattccgatctacgaaccgtttgaattcggaatcggcgttgactcagataccaataacaatatccatagtaataataccggcgatttcgtggcgttaggaggtttgtttgaaccggcggctgatatttcggagctgacgtggcggcctgaatcactttccgccttgtagtaaaaattaaataaataaaaaacaaccgaaacggttcgttttggctccgtatacatcacgtggacatattcgtttttttttttgggggtaattacataaatatacatgtggtctagatttagttttaagcctgaaatataagttcttaatggtaataatacgacatttatttaaccatcttccgtctatttgtaatttaaacttaacactgttgattaaatttaaattttagtaatattttagtttcctcgctt

SEQ ID NO: 15584 - DNA, 218 bp, Gossypium hirsutum
  Clone ID: LIB3145-058-Q1-K1-A4
ggtggtaattacacaaatatacatgtggtctagatttagttttaagcctgaaatatcagttcttaatggtaataatacgacatttatttaaaaatcttccttctatttgtaatttaaaaaaaaaaaaaaaaaaaaaaaaaaaaaaaaaaaaaaaacaaaaaaaaataaaaaaaataaaaaaaaataaataaaacaaactaaataacaatataaagaca

SEQ ID NO: 15585 - DNA, 700 bp, Gossypium hirsutum
  Clone ID: GOSHI-09MAY01-C2826_1
ctctcctgagattcatgctcaaaacgttgataaattgaaggtcgtagccgaatctcttgccaactccagtgtaaaagcacagaaacgcatttcagatcacagacttcagaaggaggaggccttaactgttcgtgtggtcaaagcaaatgaacctgatgaaagagagaaggaaatagtagctgagatttctgagctcgagaaacaaagagatcaacttgaagcagagctgaaaaaggttcatatctcgttggttgctgctaatgcacgtctacacaatgtcagggaagaaagagatcacttctatgaagctaatgatcagattgttgcccatctgaaaacaaaggaagatgaactgtcaaaatcgatttctgcatgtaaagtaaaagcaaaagttctccatacatggattaatttcttggaagatacttggcttctccagtcctcctatgtagaaactaagaacaagcaaattgttgaagaattggaacgaactgaagaatattttgttaactttggccataaccctctcttcaccttacagaaagagctgaggcctctcattaaccgtttccgttaatttgtggaaaacctgaagaagttgagttagagttccagaaatgaatattcctaagaatcaacccccaggaaactcctgaagaagaatatttgggttgttaagacccacaatattaccatccta

SEQ ID NO: 15586 - DNA, 539 bp, Gossypium hirsutum
  Clone ID: LIB3584-012-P1-K1-F1
aaagttctccatacatggattaatttcttggaagatacttggcttctccagtcctcatatgtagaaactaagaacaagcaagtcgttgaggaattggagcgacatgaggattattttgtgaactttgccattacccttctctcagcttacaaggtatgcagtacattctgttggaaaaaatacttactttgagaacttaagtgatggatagctctccctatgttacttggacctgggtgtacatgtcggatacaatatatgttcggcatgggaatgttctattttttttttttttagtttttccatgtatttagtggagggtcatatccctttgtcctcttggaattattcctcttggaattattgtactcttgcagaaagagctaggcccttcaattagccgtatcagtaaatttgtagagaacctgaagaagttgagtgagagtgcaagaaatgatgattctaaagaatcaaatccaaggaaacatcttgaggaggaatatttgggttatgaaaccaagattataacaatcttcagt

SEQ ID NO: 15587 - DNA, 701 bp, Gossypium hirsutum
  Clone ID: GOSHI-09MAY01-C2556_2
aaaccagaaacttcaatttaatggttaagaataaggatgcataggctttaacaggttatagtgtttacaattagcaacttggtttgcgctgcccttgtgtgcccaaatataatcccaatctgaagtgtaaaatatttgccggtttgaagtcagtttttgagtcctgcccatatccccatgggatgattcctgatggcaggaatagctgtaattgaagggtcatatatggcaatgggggctatatgtgaacacattggctgcgaaagaaaacggataaccccagatacctgcttgaagttttgcattgcttcggagaatgattattgattcaagagagagatccattacatcgtaaggttcttctcgaaagtgtgtgatgataaaagactccacgccataatggccattgattttttacgttaaacccgtctgtaatagacacagaagcattttagaggtgaaaatatttttatatagtatgccaggaaaatcgcctgtccctttcagctcatccttgacatgtaattgtactctttagtataggtcggactaatgtttgaagtggttcatagtgcttgtagacattaatggtggtattaaaaaaaaggttcatcatggctttgatgtgagaaattgggtttgtttgacaatggagttgctccccaaaatatgtagaatgacatcaatgtttttaatgccat

SEQ ID NO: 15588 - DNA, 585 bp, Gossypium hirsutum
  Clone ID: LIB3584-004-P1-K1-F5
tcgcccacgcgtccgcccacgcgtccggaattagcaacttggtttgcgctgcccttgtgtgcccaaatataatcccaatctgaagtgtaaaatatttgccggtttgaggtcagtttttgagttctgcccatatccccataaaatgattcctgatggcaggaatagctgtaattgaaggggggtatatggcaatgggggctatatgtgaacacattggctgagaaaaaaaaaggataaccccatatacctgcttgaagttttgcattgttttggagaatgattattgattcaagagagagaaccattacatgataaggtttttctcgaaagggtttgatgataaaagactccaggccataatggccattgatttttcaagttaaacccgtctgtaatagacacaatagcattttagaggtgaaaatattttcagctcatccttgacatgtaattgtactctttagtataggtcggaaaaatgtttgaagtggttcatagtgcttgttgacattcatggtggttttaaaaaaaggttcgtcttggctttgatgtgagaaatgggtttgtttgacaacggagttgctc

SEQ ID NO: 15589 - DNA, 1356 bp, Gossypium hirsutum
  Clone ID: GOSHI-09MAY01-C2576_1
cttcaatccgaaggatttggccagagatttcctaccgttctccgaaccacttctgggacggccgtctccaggtaaaaactttctcttcttctaagagcctcatttgctatagtatgggcataaatattctgtgctttagggacgaaagtaaactcagtctcctggaacctgttttttagactttggatatctgtgataattgctccaatgactgatttatccgtgaagaagctttggcatttcttgataacagttttggaatctcctaaaactgttaatttattgactcccagtctaatccctaattttattgcatgtaaccctgcatatgcctctgctgtgaatggatctgcaatgttggagtgaatgactgcctgtgatgcaagaatctctctattctcgttccgtactattatacctgaagccgatctgaactccagacgatcgtaagctgcatcaaaatgaatgaaggtccatccccttttgtgtatctgttggagattgtcagatgaatggagaatgatttctgctaaaccaaatgaaccaaaggctacaacagaaaagttgaagctgctcttcattacctcgatcaaaaacccagggcactgaataaaaatatgccagctattttcttcagcacaaccgcacctgggacaaagagtgttcatcactaccctctttattttgaggttgacaaaggaagggataaaatcccaagaaatcctccaaattgtcatctgaatctttgaagggatatgtaacttccataatttgttgtagaaattttttgtctcggtctgtaataataaatcattaggatccagattagaaccatgtaatagtttataggcactcctcaccgagaactcccctgtcggttctcctctccatacttgaagatcttcttgttctgtctccgcaagagggatttgtaatatttgctctgcaacatctggttgaaagctgcttccccccgtatccatgaatctccccgcatggaaatttgatcacctctccccaccctccaacagcgtccattattaagaagtcctctcgcagcccatatacttttccaggtaaaagaaggatctctttttcttcttcatcaagagataaacccgcaaattctgattccatggatgttgtacccgaagcctccgttaaagacatcacttcaaataaatggagatgagcgccgccaaaagaaaaccagaagaaaaaacttgccagagaggcagacagagacgtgctagggtagcagacttttttaattattaaactcattcaaaaacctagtaaatttatatctatatatatagtttcaattaaaattatttataccaacaaatgttgggt

SEQ ID NO: 15590 - DNA, 542 bp, Gossypium hirsutum
  unsure (1)..(542): unsure at all n locations
  Clone ID: uC-gsronu33B145e03b1
tatctcgtccgcccactcttccgaatggatctgcgatgttggagcgaatgactgcctgtgatgcaagaatctctttgttctcgttccgtactattatacggaagccgatctaaaccccaggcgttcgaagctgcatcgaaatgaatggaggtccatccccttttatatatctgttggagattgccagatgaatggagagtaagatttcttccttttgttactgcaagttctgtaatatagacactgattttccttgctatttctgatcctgacatgagtctttttccataaatgagatgatttctgctaaaccaaatgaaccaaaggctacagcaaaaaagttgaagctgctcttcattacctcgatcaaaaacccagggcacttaataaaaatatgccagctattttcttcagcagaaccgcacctggggcaaagagtgtttatcactaccctctntattntgagattgacaaaggacgggataaaatcccaagaatcctccaaatgtcatctgaaattttggagggatatgtaacttcca

SEQ ID NO: 15591 - DNA, 534 bp, Gossypium hirsutum
  unsure (1)..(534): unsure at all n locations
  Clone ID: LIB3584-003-P1-K1-H9
gtttggcaccagatgctattgaagaagtccaggaagactctagcttattcaagaaccttttgcaagaattaatgcagaaggaaggttgtcctctaccagtttacaccacaactagatctggagaagcccatgcatcaatgtttgtttccagtgttgaggtgaaaggagaggctttcactggacagggagcaagatccaaaaagcaagctgagtttttggcagcaaaagttgcatacactaagcttaaagagtgcaagtcaaataaggtctcaacaaacataactccggcctaccatgagcaggaagtgcatgtggtctcatcttcccactcgccaacaaatgtcaatgctggtactgaacaaaatcttggatccaaatctggttcattgcttaattcaagctcaactttaggggcagatcggcaggatgatggagttaatgtaacatttatggatcatcactcagctcaattcccacaaccagagatgactactgattgngaaagtagtccatcctcactgattttgtctgatc

SEQ ID NO: 15592 - DNA, 429 bp, Gossypium hirsutum
  Clone ID: LIB3135-055-Q1-K1-E12
ttgtgaggttgagggtccacctcatgcaagtcgctttaggtgcaaggtcactattgatgagaaaacctatgagggtttggagttttttccaacaataaaggaagctgaacatgcagctgcaagagttgcattatcatgtttggcaccagatgctattgaagaagtccaggttactgattaatggagtgtttttccctttgttgctttatgcatttatgatattttttaaaatgttcagttgtgaatctctagagcttgagttttttccctttgtatattttttttcttcctcaggaagactctagcttattcaagaaccttttgcaagaattaatgcagaaggaaggttgtcctctaccagtttacaccacaactagatctggagaagcccatgcatcaatgtttggtttcagtgttgaggtgaaaaga

SEQ ID NO: 15593 - DNA, 832 bp, Gossypium hirsutum
  Clone ID: GOSHI-09MAY01-C2486_2
gttgagacattattcgccgacgaagaggaaaaaaaaggggcagagcgatgggtttgcaactatgggagactttgaaggaggaaataacggcgtatacgggtctatctccggccactttcttcacgggtggtgctctgttgtgggccatttactatgtagtaacgggtctattcgggtcgtccgatgatcaccatcaacgttccagggctttcgaggagcagatggagccgctcccacctccggttcaggtaggcgaaatttccgagaaggaacttaaacagtatgatgggtcggatcccaagaagccactccttatggccatcaagggtcagatttatgatgtttctcatagcagaatgttttatggacccggtggaccttatgcattggttgctggaaaggatgcgagcagagctcttgcaaagatgtctttttgaaaaaaaggtctggacggttacacattaggggtttgtgcattctaaatggacaccttgtgagaatgggagttcaagttcatgagcaagtacgtgaaggttggaaccatcaagaagacaacagtttcagtaaccgaaggggatgccagtggtgaagcctcaggagctgcagaaactgatactaagccaactgaagatggtgcatcacaaactacagttactgggtcagaggaaaaatcttctcctgcagatactaaggaggagtaacatgttcgagctttagctgtgtctgattcgaacaggtgatcactctttgtactggacatgccggaagagacagcattggtgtgttcgaatgaatgtgaatcgacttctatatataaactcagagtagtgca

SEQ ID NO: 15594 - DNA, 1182 bp, Gossypium hirsutum
  Clone ID: GOSHI-09MAY01-C2486_1
cccacgcgcccggccattttctgctctttcaattttaagaccaaatcacgagcgactctcagactcagctgagttaagatcgctaaagcgatatggctttgcagctatgggaaacgttgaaggaggcgataacggcgtatacgggtctatctccggccacttttttcacggttctagctctgttatgggctgtttactatgtagcaacgggtctattcgggtcatccgatgaccatatccatcaacggtctacggctttcgaggagcagatggagccgctaccgccaccggttcagctcggcgagattaccgaggaggaacttaagcagtatgatgggtcggattcaaagaaaccactccttatggccatcaagggccagatctatgatgtttctcaaagcagaatgttttatggacctggtggaccttatgcgttgttcgccggaaaagatgcaagcagagctcttgcaaagatgtctttcgaagaaaaagatctgacaggtgatatttcagatctcggtccattcgaattggacgcattgcaggattgggagtacaagttcatgagcaagtacgtgaaggttggatccatcaagaagacaatggttccagtaaccgaaggggatgccagtggtgaagcctcaggagctgcagaaactgatactaagcaaactgaagatggtccatcacaaactccagttactgagtcagaggaaaaatcttctcctgcagatactaaggaggagtaacatgttcgagctttagctgtttctgtttcgaacaggtgatcactcgttgtactggacatgccggaagagacagcattgtgttgttcgaatgaatgtgaatcgtcttctatatataaactcaagttagtgcagatactgtttctagcaaaacttgcctcaataattagttccatcaaaaaaataaatgttaaaaaacctggggattcagacaaatacttattatgatgaactgatatgtgtgggcaggaattaattactttgttcaacaaaataactagttgttgttgctactgctgctgcattataaggtattaatagaggtactgtgagtcctttttctctcaaaaaaaaaaaaaaaaaaaaaataaaataaaaaaaaaaaaaataaaaaaataataaatgggaaataattttggggggtctattttaaagt

SEQ ID NO: 15595 - DNA, 604 bp, Gossypium hirsutum
  Clone ID: GOSHI-09MAY01-C2456_1
cccacgcgtccgagcagctttacaggttgcattggctcaaatggaataccaattgccgcgtcttactaaaatgtggactgaccttgagcgtcaagctggaggcaaggtgaagggtatgggtgagaaacaaattgaagtggacaaacgtatcttacgtactcaaattggagttcttaaaaaagagcttgaatctgtcagaaaacatcgaaagcaatatagaaaccgccggttttctgttcccgttcctgtagtatctttggttgggtacacaaatgcgggcaagagtacacttttaaatcaattgactggagctaatgttctttcagaggaccgactgtttgctacccttgatccaacaacaagaagggttcagatgaaaaatggaagtgaatttcttcttactgacactgttggtttcatccaaaagttgccaacaaccctggttgctgcattcagagctacattagaggagatatctgagtcttctcttttagtgcatgtggtggacatcagccatcccctagcagagcagcagatagatgctgtggaaaaagttctagcagagctagatgtgtcagaaattccaaaattaatggtctggaac

SEQ ID NO: 15596 - DNA, 431 bp, Gossypium hirsutum
  Clone ID: LIB3146-055-Q1-K1-F8
cccacgcgtccggtcaagctggaggcaaggtgaagggtatgggtgagaaacaaatggaagtggacaaacgtatcttacgtactcaaattggagttcttaaaaaagagcttgaatctgtcagaaaacatcgaaagcaatatagaaaccgccggttttctgttcccgttcctgtagtatctttggtaagcacttaacctgttttttttaaaaaataatacaaggacagttttattgtgttgcttttatgtctccgacatataatacatttgaaagcattataggttgggtacacaaatgcgggcaagagtacacttttaaatcaattgactggagctaatgttctttcagaggaccgactgtttgctacccttgatccaacaacaagaagggttcagatgaaaaatggaagtgaatttcttcttactgatact

SEQ ID NO: 15597 - DNA, 1201 bp, Gossypium hirsutum
  Clone ID: GOSHI-09MAY01-C2476_2
cccacgcgtccggatgaagttgttagcgaaagcgtatcatccatgacagaataaatagagagaaaagcaagaagaagaacaaaagtgttaaagagtgtgtgtttgggggtattgcaaagataatatttttattggggaaaaaaaagaatggggagaggtagggttgagttgaagagaattgagaacaagattaacaggcaagtaacttttgctaagagaaggaatgggcttttgaagaaagcctatgagctttccgttctttgtgatgcagaggttgctctcatcatcttctccaataggggaaaactgtacgagttttgcagtagttcaagcatgatgaaaacattggagaggtaccagaagtgcagccatggagcaccagagacaaatgtttcaactagggaggctctggagctaagcagccagcaggaatatctgaagcttaaagcacgttatgaagccttacaaaggtcccaaaggaatttacttggagaagatctggggcctttgagcaccaaagagcttgagtcacttgagaggcagcttgattcttcattaaagctgataagatcaacgcggacccaatacatgcttgatcagctcactgatctgcaacgaaaggaacatctacttaatgaagctaataagaacctaaaacaaaggttgatggaaggctaccaagtacattcactccagctgaatccaaatgccgatgacgtcggctacggccgacaaccaacccatcagcctcagggtgatgtcttcttccatccattggactgcgagccaacgttacaaatcggatatcagcccgatacgatatcggcggtcaccgggggcccgagtgtgaataattacatgacgggatggctaccatgactatgatacataaaggaaaatagaagcaaaagcatgaagtggcaaatgcatgcatgcatggtgtccgcattccttcataagaacatcatcagcacattttatcatctgtttgcatgttatttgatgaaacaaaatgtgtgtaatgtgtcatggatttaatattaactttcctgtctttaattctgtaagcactgcgcagcactctttgaaataatgtggtggtgctgtttgcttgtaagagggattccaactctgaccatcatctgccttatttagttttaaatcaacaaaaacaagcatttgttgttgccataaaaaacac

SEQ ID NO: 15598 - DNA, 1306 bp, Gossypium hirsutum
  Clone ID: GOSHI-09MAY01-C2476_1
cccacgcgtccgcccacgcgtccgcccacgcgtccgcccacgcgtccgaaaaaaaaaaaactctccaagaagataaatagagaagaaaaaagtatcattaaacaccttcaccaacaagaacaaaaaaaacaggtgaaaccccgtttccttttggtctcaaaacgattcaaaagggcaagattcttggttttagggtttgggttttcattgatttttagtgaaaaaattataaaaaaaattatgggaagaggtagggttgaacttaagaggattgaaaacaagatcaacaggcaagtcacttttgcaaagagaagaaatggtcttttgaagaaagcttatgagctttccgttctttgtgatgctgaagttgctctcatcatcttctccaatagaggaaagttgtacgaattttgcagcagctcaagcatgatcaaaacattggagaggtaccaaaaatgcaactatggagctcctgagccaaatgtgtcatctagggaggctgctttggaattaagcagtcgacaggaatatttgaagcttaaagcacgttacgatgccttacaaaggtcccaaaggaatttactaggagaagatttgggacctttgagcagcaaggagctcgagtcacttgagaaacagcttgattcatcattgaagctaatcagatcaacgcggacccaatacatgcttgatcagctcaatgatcttcaaagaaaggaacatcttcttaatgaagccaataagaccctaaaacaaaggttggtggaagggtatcaagtaaattcgttacaattgaatccaaatgcaacggaagacgtcggctatggccgtcaacaggttcatcatcagcctcatggcgatgccttcttccatccattggattgtgagccgactttacaaatcggatatcagcatgatccaatgtcagtggtgactgcagggccaagtgtgaataattatatgacaggttggttaccatagtatatatatatctatatatctatatgaagaagaagaaaccatgggtatggatttcttcataagaaacttattttatgttattatatgaaacaaaagaaatgtgtaatgccatggatttattattattattattattattgtaactttgtgtttttaattaggatgcactataacaaactccatctgtgtgagctataatgtgcatctttctttgaacaatttaatttgtttttaagggattaatattttgttttgcttatttattacttataattattcctttctttacattgaagaattacgataatgaagagagattttgtgt

SEQ ID NO: 15599 - DNA, 351 bp, Gossypium hirsutum
  Clone ID: LIB3585-034-P1-K1-B6
attcaatttcaatctccagctcccaaggtcatttgcccctcgaaacccccttttgccgggggggagaggcgactcaccccgatgctcctaaggtcaatggtttcgggtttcatctcatccctagtgaaaaaattataaaaaaactatcggaagaggtagggttgaacttaagacgatctacggagcaacaacccccggccgggtctcttttgcaaagagaacaaatggtcttttgaagaaagcttatgagctttccgttctttgtgatgctgaagttgctctcatcatcttctccaatagaagaaagttgtttcgttggccgtaactttacttacctttcacctcattctt

SEQ ID NO: 15600 - DNA, 558 bp, Gossypium hirsutum
  Clone ID: LIB3584-003-P1-K1-E8
cccacgcgtccggaaacggtggttttttacagttgatggaaggctaccaagtacattcactccagctgaatccaaatgccgatgacgtcggctacggccgacaaccaacccatcagcctcagggtgatgtcttcttccatccattggactgcgagccaacgttacaaatcgggtactacatacctatatccaacactaacaacgaatttaaataactacaagatgaattcttaatcggtttgatttgttgaactacagatatcagcccgatacgatatcggcggtcaccgggtgcccgagtgtgaataattacatgacgggatggctaccatgactatgacacataaaggaaaatagaagcaaaagcatgcagtggcaaatgcatgaatgcatgcatgcatggtgtccgcattctttcataagaacatcatcagcacattttatcatctgtttgcatgttatttgatgaaacaaaatgtgtgtaatgtgtcatggatttaacattaactttcgtgtctttaattctgtaagcactgcgcagcactctttgaaataatg

SEQ ID NO: 15601 - DNA, 540 bp, Gossypium hirsutum
  Clone ID: LIB3585-033-P1-K1-A6
cccacgcgtccgcccacgcgtccgcccacgcgtccgcccacgcgtccgcccacgcgtccgcccacgcgtccggattaacaggcaagtaacttttgctaagagaaggaatgggcttttgaagaaagcctatgagctttccgttctttgtgatgcagaggttgctctcatcatcttctccaataggggaaaactgtacgagttttgcagtagttcaagcatgatgaaaacattggagaggtaccagaagtgcagccatggagcaccagagacaaatgtttcaactagggaggctctggagctaagcagccagcaggaatatctgaagcttaaagcacgttatgaagccttacaaaggtcccaaaggaatttacttggagaagatctggggcctttgagcagcaaagagcttgagtcacttgagaggcaccttgattcttcattaaagctgataagatcaacgcggacccaatacatgcttgatcagctcactgatctggcaccaaaggaacatctacttaatgaagcttataagagttttaa

SEQ ID NO: 15602 - DNA, 399 bp, Gossypium hirsutum
  Clone ID: LIB3145-043-Q1-K1-C9
ggatgaagttgttagcgaaagcgtatcatccatgacagaataaatagagagaaaagcaagaagaagaacaaaagtgttaaagagagagtgtttgggggtattgcaaagataatatttttattggggaaaaaaagaatggggagaggtagggttgagttgaagagaattgagaacaagattaacaggcaagtaacttttgctaagagaaggaatgggcttttgaagaaagcctatgagctttccgttctttgtgatgcagaggttgctctcatcatcttctccaataggggaaaactgtacgagttttgcagtagttcaaggtatcaccaaaactatttcaccttttttcttttttgggaccctctttaaaaacccaaaaccaacaaggttttttttttt

SEQ ID NO: 15603 - DNA, 296 bp, Gossypium hirsutum
  unsure (1)..(296): unsure at all n locations
  Clone ID: LIB3197-014-P1-M1-H2
aaacngtgaaattctttttccttttgtctcaagcaattcaaggggaaagagggtggtttgggtttggttctcattgttagggtgtgtgggggtgnnnnnnnnnnntgggaagaggtagggttgaacttaagaggattgatggcgtgggcgcggtggggtggcttttgtgaaagagaagaaatggtcttttgaagaaagcttatgagctttctgttctttgtgatgctgaagttgctctcatcatctnnnncggggagaggaaagttgtacgaattttgcagcagctcaagcatgat

SEQ ID NO: 15604 - DNA, 733 bp, Gossypium hirsutum
  Clone ID: GOSHI-09MAY01-C2406_1
gcgatacaaagactgcaatataacctcaagctctgacacccacttttcagaccttaacaccaaactcataccaaacactcttgctccatatatctgcctctctttctttctttacaattctcaggtttctgttctttgaatcctgctttcaagatcataatagaaacaaagaaaggcaaagcttagaagatgggatcaggtgaatggtgccttcaaaaacgagatagtttcaagagtgaaacgcttgtaggcaatgagactgtgccagaaattgggtgcctttcgattattgttcttggtgcctctggtgatcttgccaagaagaagactttccctgctctctttcatctttattgccagggatttctgccaccaaatgaggtgcacattttcggctatgcaaggactaagatttcagatgacgaattgagaaatcgcatacgtggatatcttgtgagtgaaaggagtgcttcaccatcaaaagatgtatcaaagttcttacagctgattaaatatgtaagcggatcatatgatgccgcagagggctttcaaacgttagacaaggagatttcaaagcatgaaacctcgaaatacagcctagatgggtcttctcggaggctcttttatctcgcacttccaccatcagtatatccatctgtttgcaggatgatcaggagatattgcatgaataaatctaatcttggcggatggactcggattgttgttgagaaac

SEQ ID NO: 15605 - DNA, 539 bp, Gossypium hirsutum
  unsure (1)..(539): unsure at all n locations
  Clone ID: LIB3583-061-P1-K1-G2
gcgatacaaagactgcaatataacctcaagctctgacacccacttttcaaaccttaacaccaaactcataccaaacactcttgctccatatatctgcctctctttctttctttacaattctcaggtttctgttctttgaatcctgctttcaaggtttgtttcacttctttatctcagatcataatagaaacaaagaaaggcaaagcttagaagatgggatcaggtgaatggtgccttcaaaaacgagatagtttcaagagtgaaacgcttgtaggcaatgagactgtgccagaaattgggtgcctttcgattattgttcttggtgcctctggtgatcttgccaagaagaagactntccctgctctctttcatctttattgccagggatttctgccaccaaatgaggtgcacattttcggctatgcaaggactaagatttcagatgacgaattgagaaatcgcatacgtggatatcttgtgagtgaaaggagtgcttcaccatcaaaagatgtatcaaagttcttacagctgattaaata

SEQ ID NO: 15606 - DNA, 803 bp, Gossypium hirsutum
  Clone ID: GOSHI-09MAY01-C2436_2
tgttttgggctctcattgtaactactctcacccttcaactagccattacgagtgcacaaacaccagctgcctcaccttccagtacgccaaccaccaccaccaccactccaccttcaacttcgccaccacctacaacttccgcaccacctccttcaacaacccctccacctacaacttcagcaccacctccttcaacagcattgccaccaccatcaccaccaccagtatctcctgcaccagcaccagctcagaaaccaccagctcctgcaccagtaaagctgcccccagcacctgcacccattactttgccaccggctcctgcaccagctcccaccaagcacaagagaaggcacaggcacaggcacaggagacaccaccatgcaccagcaccagcaccaacagttccaagccccccagcaccacctgcagtgccaactacagatgacacgacaccagcaccatcacctagtctcaatttgaatggaggagattcattgttggtggcaggaacaaagctctggtgggcaaggacaggattgactattgccattttgatcgctattacaggctatagtttctaggaactcataagctaaggggtgattgtgatttactttacaattgcttgtcataccttttttctttttggtttgtatttctgtcacataacagagaatattgtttcatttgtgtaacaaaataaattgaaattttattagaaatagatacgaataagaccagccaaaagctgaagaagcaaaaaatatatatatacctgggtaaaaaaaaataagaaaataaaa

SEQ ID NO: 15607 - DNA, 1020 bp, Gossypium hirsutum
  Clone ID: GOSHI-09MAY01-C2436_1
cccacccgcccgctcccccggctttcatgttttgggctctcattgtaactactctcacccttcaactagccattacgagtgcacaaacaccagctgcctcaccttccagtacgccaaccaccaccaccaccactccaccttcaacttcgccaccacctacaacttccgcaccacctccttcaacaacccctccacctacaacttcagcaccacctccttcaacagcaacgcctccaccttccaccacgcccatcgcgccagctcaaccacctgcaacaactccccctcccactgttgcaccagctacaagcccaaccgtcccaccgccacaaactccaccacctcaaccacctcaaactcctccaaccacagctccagctcaaccgccagcattgccaccaccatcaccaccaccagtatctcctgcaccagcaccagctcagaaaccaccagctcctgcaccagtaaagctgcccccagcacctgcacccattactttgccaccggctcctgcaccagctcccaccaagcacaagagaaggcacaggcacaggcacaggagacaccaccatgcaccagcaccagcaccaacagttccaagccccccagcaccacctgcagtgccaactacagatgacacgacaccagcaccatcacctagtctcgatttgaatggaggagattcattgttggtggcaggaacaaagctttggtgggcaaggacaggattgactattgccattttgatcgctattacaggctatagtttctaggaactcataagataaggggtgaatgtgatttactttacaattgcttgtcataccttttttctttttggtttgaatttctctgtcacataacagagaatattgtttcatttgtgtaacaaaataaattgaaattttaatagaaatagatacgaataagaccaaccaaaagctgaagaagcaaaatccatatacatctggttattagcttatgtttaaaaaaaaaaaaaaagggcggcccgctcgcgat

SEQ ID NO: 15608 - DNA, 373 bp, Gossypium hirsutum
  unsure (1)..(373): unsure at all n locations
  Clone ID: LIB3083-109-Q1-L1-G12
gctagttgaagggtgagagtagttacaatgagagcccaaaacatgaaagccatttcgagtgcacaaacaccagctgcctcaccttccagtacgccaaccaccaccaccaccactccaccttcaacttcgccaccacctacaacttccgcaccacctccttcaacaacccctccacctacaacttcagcaccacctccttcaacagcaacgcctccaccttccaccacgcccatcgcgccagctcaaccacctgcaacaactccccctcccactgttgcaccagctacaagcccaaccgtcccaccgncacaaactccaccacctcaaccacctcaaactcctccaaccacagctccagctcaaccgccagcat

SEQ ID NO: 15609 - DNA, 378 bp, Gossypium hirsutum
  Clone ID: LIB3083-002-Q1-L1-D4
cgtaatggctagttgaagggtgagagtagctacaaggagagcccaaactccatctgccttaccttgcactacgcgaaccaccaccaccactcctacaccttcaacttcaccaccacctacaacttccgcaccgcctccttgaacaacccctacacctacaacttcagcaccatctgcttcaacagcaacgcctccaccttccaccacgcccaccgcgccagctcatccacctgcaacaactacgactcacactgtatcaccagctactagcccaactgtaccaccgtcacatactctaccacctcaaccacctcaaactcctccaaccacatgttcagcttaaccgtcagcagtgccaccaccatcaccaccaccagt

SEQ ID NO: 15610 - DNA, 895 bp, Gossypium hirsutum
  Clone ID: GOSHI-09MAY01-C2426_2
gcgtacgcaaatatggaaaactgtatcgggatcctggcttcggtgctttcggagaatccagattttcatttggactttttctttcggctattatcaaggatgattcactttgtacttttaattagtcgacaagggaaagttaggttgacaaaatggtattctccttattctcagaaggaaagaacaaaggttatccgtgagctcggtggggtgattctcaatagagggccaaaactctgtaattttgtggattggagaggatttaaagttgtttataaaagatatgctagtctttacttctgcatgtgcattgatcaggatgacaacgaattagaggttctagaaatcattcatcactttgttgagatacttgatcgatactttggcagtgtctgtgaattggatttaatcttcaacttccataaggcctattatatattggatgaactcttacttgctggtgaacttcaagagtcgagcaagaaaactgttgcacgtttaatagctgcacaggattcactggtggagaccgcgaaagagcaggccagttccattagcaatataattgcacaggccacaaagtaggttatgaccgagagtggttgcggattgccatttgtattggggttggttttggtgtctcatctgttgtgagaactctttctggattttagtttgagaacttaattgtatgtttatgaatgtagattcgggagccttttgtagaaatgatcacatataatcatcatattaattatgtatacagtcatgcatttgggtttcagccgttcatttgttggctgtaacatgcaaccggcattgttaattttcttcattgtgaagttaatatttttattggtaaaaaaaaaaaaaaaaaaaaaagtcgacgcggccg

SEQ ID NO: 15611 - DNA, 833 bp, Gossypium hirsutum
  Clone ID: GOSHI-09MAY01-C2426_1
ctggcttcggtgctttcggagattccagattttcgtttggactttttctttcggctattatcaacgatgattcactttgtacttttaattagtccacaacggaaagtcaggttcacaaaatggttttctccctattctccgaaggaaagtacaaaggttatccgtgagctccgtgcggtcattcctcatccatggccaaaacataaatggccctcatccctttactttttccattgcactagattttaccttttttctcctaacataatacccttcttttttacattttttaattcccccctattaaccctcatttccagtttcttcaatacatctcccccctcgtttttaatcccccattatatatttctcgcttttcctccctttctatttataactcctctctccctttgtccactaattttttccttattctccttcttctccttttttccccctatcttcccccctcatactccttctccccttttttaatctagcctcgatttttcttctccatacatctctaaaatcatcccccccttccctcttcctctccttcttcttctttctgcccttctatatcgtttttctaccccaaaatttcatttcttacataattatttcttccttgtgtctctttgtttcccttctctatcttccttattaataatacttctctctgatacttcatagtttctcaaatctccttttctctttttttcactattcttaacccttcctccccctctccttcttctatattatcttcctcttctcttactccctcttctatctctctctctttctcacctcctcctcttccgctcttc

SEQ ID NO: 15612 - DNA, 463 bp, Gossypium hirsutum
  unsure (1)..(463): unsure at all n locations
  Clone ID: AI731727.1
ggcttcggtgctttcggagaattcagattttcgtttggactttttctttcggctattatcaaggatgattcactttgtacttttaattagtcgacaagggaaagttaggttgacaaaatggtattctccttattctcagaaggaaagaacaaaggttatccgtgagctcggtggggtgattctcaatagagggccaaaactttgtaattttgtggattggagaggatttaaagttgtttataaaagatatgctagtctttacttctgcatggcaatctctcggggctatggaatttgtaaagaagttctaaaatagattatagtatgatcaaatgatgttgtacttgttgcctggctcaactttcaatttagattgttgtattctcattttgacaatgcagtaaaaggtatcaattttcagtctcattcaattccccnaaaaaaaaaaaaaaaaaaaaaaaat

SEQ ID NO: 15613 - DNA, 338 bp, Gossypium hirsutum
  Clone ID: uC-gsflnu33B071h05b1
ttttcacgcgtccgcccacgcgtccgcccacgcgtccgcccacgcgtccgcccacgcgtccgagcaggccagttccattagcaatataattgcacaggccacaaagtaggttatgaccgagagtggttgcggattgccatttgtattggggttggttttggtgtctcatctgttgtgagaactctttctggattttagtttgagaacttaattgtatgtttatgaatgtagattcgggagccttttgtagaaatgatcacatataatgatcatattaattatgttgaagaaagaaatgcaagatggtgaggaatcgcgactaggacatacaataagtg

SEQ ID NO: 15614 - DNA, 314 bp, Gossypium hirsutum
  Clone ID: LIB3148-029-Q1-K1-B2
accacgcgttcgatacagggtttggctggcaatttgggtgagagctttaaacacaactgcttaaatcttcctttagtatcttgataagatgtacacttattagtttgtatttagataaaaaaggaattgtatgctgacacgagaaaagttcgagtgacgcgtttgagtatgatatcattaactctgcctaaacgaagcggtcgttatatgacgaaaccaagatctatgcggtgaacttcaagagtcgagcaagaaaactgttgcacgtttaatagctgcacaggattcactggtggagaccgcgagggcgcccg

SEQ ID NO: 15615 - DNA, 746 bp, Gossypium hirsutum
  Clone ID: GOSHI-09MAY01-C2776_5
cttgatgattgataatgaatcaccttcaataatgatcttgggccatttcatctctatcccgatttggactgctctacggcaagcgagtgcctccgcggcaaaagctgagcctatctggtgatgaatctctaagcaagatattagggcctttccttcagtgtttctaaccactatccccgaagccgcttgactagatctttcatcatatgctgcgtcaaaattaatcttcactgtctgattagattgtccataacgcgcaacaaaataatcagcataaggaaatgttattctgagcaaacacctaggttagccattgtagaaattccatattagattcctgtagaagcttctggaatgataattctgtccatactgtcactgatacagggcattcccggaagagatcgtccatcgtttccactgctgattcacaccgggggcaaatggcattagtaatttgctctctgtattgcatgttagctcgtgtaggcaagtgattctggaggttttccaaaccgtaatcttaattttggagggtagatttaaaagctatagttttttttatagaaactactgtagtcggtttggaaagcataaacactaggatcttccgacctttgtaatagtttataggcacgatggacagagtattctcccgagagttcaccactccaagccaagaaaatattatgaggtgctttcgccagtggaatatgtagaatctcctcagttcctttgttttgaaa

SEQ ID NO: 15616 - DNA, 812 bp, Gossypium hirsutum
  Clone ID: GOSHI-09MAY01-C2776_2
cggccgcgtgggcggccgcgtgggtagaaatcttagttcaagccctcccccgcggccgaaaagatgcttcttctttgcatttattacggttctctctctacgagtattgtaatttgaagagttttattactccaaagaaatctatttcgatttttaatccaagattattcttgttcctatataattcttatacatgtgaatacgaatccattttcctttttctccgtaatcaatcttctcatttaccatcaacatcttctggggtctttcttgaacgaatttttttctatggaaaaataaagtatcttggcgaagtcttttataatgattttcagaacaacctatggttgttcaaagaccctttcatacattttattaggtatcaaggaaagtcaattctggcctcaaaggatacgtctcttctgatcaataagtggaaatattactttgtcgatttatggcaatattatttttacctgtggtctcaatcaggaagagtccgtataaatcaattatctaaatattctctcgactttctgggctatctttcaagtgtgcgattaaatccttcagtggtacggagtcaaatgctagaaaattcatttctaatagataatgctgtgaagacgttggatacaagaattccaattatttcgctcattggaccattgtctaaggcgaaattttgtaacacattagggcatcccattagtaagccgacgtgggccgattcccccgattctgatattattgaccgatttgtgcggatatccagaaatctttctcattattacagtggatcttcaaaaaaa

SEQ ID NO: 15617 - DNA, 1092 bp, Gossypium hirsutum
  Clone ID: GOSHI-09MAY01-C2776_1
cccacgcgtccggcttccctttctttctcttcttctctatccattttctatccggttctcgcacactgtcatttactctctgaaattcggcatattcaggaacactatccaccaggtatatctcctcccttttcttcattgattctctagctagtatatgtgttaaactatttgttgctcttgggatatattcaaacgttaagtttctagatctggacattatttgctggatatcatgtatatatgctctgatatgtgatttgtcctctctgttttccttgcatttcttgatgattgataatgaatcaccttcaataatgatcttggaccatttcatctctatcccgatttggactgctctacggcaagcgagtgcctccgcggcaaaagctgagcctatctggtgatgaatctctaagcaagatattagggcctttccttcagtgtttctaaccactatccccgaagccgcttgactagatctttcatcatatgctgcgtcaaaattaatcttcactgtctgattagattgtccataacgcgcaacaaaataatcagcataaggaaatgttattctgagcaaacacctagggcattcccggaagagatcgtccatcgtttccactactgattcacaccgggggcaaatgacattagtaattagctttctgtattgcatgttacctcgtgtaggcaagtaattcaaggaggttttccaaactgtaatcttaattttggagggtagatttaatagccatagttttttatagaaactacttagtcagtttttaaagcataagcactaggatcttccgacctttgtaatagtttataggcactacggacagagtattctcccgagagttcaccactccaagccaggaaatcatcacgaggtgctttcgccagaggaatatgcagaatcttctctgctacttcgtgcggaaaggtattgacaatcttctctattttccagcttctgttattaacatcaataagctcagcaactttaaaatcccttttaataatatatattttatttattatttatttatttttttttttttttttttttttaattttttctttttt

SEQ ID NO: 15618 - DNA, 550 bp, Gossypium hirsutum
  unsure (1)..(550): unsure at all n locations
  Clone ID: LIB3583-052-P1-K6-C9
cgtccgcaaaacaatcttcatatcggggggggggntgtttccatttactgacgtcctggnttgcctataacgcgcaacaaaataatctacacaaggaaatttattctgggcaaaccccaggcattcccagaagagatggtccattgtttccactgctgattcacatcgagggcggattgcatattagtaattagctttctgtattgcatgttagctcgtgtaggcaaataattccaggagattttccaaactgtaatcttaattttggagggtagatagccatagttttttatagaaattgttgtagtcggtctgtaaagcataagcactaggatcttccaaccttgtttataggcactacggatagagtattctcccgagagttcaccactccaagccaggaaatcatcatgaggagctttcaccagaggaatatgcagaatcttctcagctactttgtgaggaaaggtattgacaatcttctctcatttccagcttctattatgaacatcaataagctcagcaactttaaaatacataaattattaac

SEQ ID NO: 15619 - DNA, 416 bp, Gossypium hirsutum
  Clone ID: LIB3146-056-Q1-K1-F4
gctgtgaagacgttggatacaagaattccaattatttcgctcattggatcattgtctaaggcgaaattttgaaacacctagggcattcccggaagagatcgtccatcgtttccactactgattcacaccgggggcaaatgacattagtaattagctttttgtattgcatgttagctcgtgtaggcaagtaattcaaggaggttttccaaactgtaatcttaattttggagggtagatttaatagccatagttttttatagaaactacttagtcagtttttaaagcataaacactaggatcttccgacctttgtaatagtttataggcactacggacaaagtattctctcgagagttcaccattccaagccagaaaatcatcacgaggtgctttcgcaagaggaatatgcaaaatct

SEQ ID NO: 15620 - DNA, 389 bp, Gossypium hirsutum
  Clone ID: LIB3583-044-Q6-K1-H9
gcttccctttctttctcttcttctctatacattttcaatccggttcacgcacactatcatttactctctgaaattcggcatattcaggaaaactatccaccagcgagtgcctccgcagcgaaagctgagcctatctggtgatgaatctctgagcaagatattaaggcctttccttcactatttctaaccactatccccaaagccgcttgactagatgtttcatcatatgctgcgtcaaaattaatcttcactgtctgatcagattgcccataacgcgcaacaaaataatctacacaaggaaatattattctgggaaaacacccagggcattcctggaagagatggtccattgtttccactgctgattcacatcggaggcagattgcatt

SEQ ID NO: 15621 - DNA, 357 bp, Gossypium hirsutum
  Clone ID: LIB3584-007-P1-K1-H10
cggcgcgtgggtttttatagaaaaaaaactatggctattaaatctatccccgaagccgcttgactagatctttcatcatatgctgcgtcaaaattaatcttcactgtctgattagattgtccataacgcgcaacaaaataatcagcataaggaaatgttattctgagcaaacacctagggcggtgccggaagagatcgtccatcgtttccactactgattcacaccgggggcaaatgacattagtaattagctttttgtattgcatgttagctcgtgtaggcaagtaattcaaggaggttttccaaactgtaatcttaattttggagggtagatttaatagccatagttttttatag

SEQ ID NO: 15622 - DNA, 348 bp, Gossypium hirsutum
  Clone ID: LIB3196-028-P1-M1-G1
cacagcttccctttctttctcttattctctatccatttttaatccggttctcgcacactatcatttactttctgaaattcggcatattcaggaacactatccaccagtttggactgctctgcgacaagcgagtgccttcgcagcgaaagctgagcctatctggtgatgaatctctgagcaagatattagggcctttccttctctgtttctaaccactatccccgaagccgcttgactagatctttcatcatatgctgcgtaaaaattaatcttcactgtctgatcagattgcccataacgcccaaaaaaataatctgcatagggaaatgttattctgagcaaacacct

SEQ ID NO: 15623 - DNA, 1187 bp, Gossypium hirsutum
  Clone ID: GOSHI-09MAY01-C2706_2
aaattaataagagccttttggctctcaaggagtgtattcgtgccctggacaatgatcagatccatataccattccgtgggagcaaactcactgagagtgctccgtgactctttcgttggcaactcaaggactgttatgatctcgtgtatttctccaaatgcaggttcatgtgagcacactctcaatactctgagatatgctgatagggttaaaagtctttccaaaagtggtaatcccaaaaaggaccaggctgtaacttctttaccaccaggtaatacggatgcttcttcagcatcttctctgccagctcccgcagatttagaagtcgtatatgaacaacaacaggaagccaaagttgttgatacaagtcaaagggttgtagaaaaagatgtttatactgttgactttgataaacagctgtcaaagtttccgtcaggttactctttcaacaggagagaggaaagtggattgacttctgggccaacaggtcgggagagatttgaagtgaataactcctacggcagctcaacaaaaagagtttactcatcaaattctcaaaactcagctgatacagaagagaaactgcagaaggtgtcaccacctcctagaaaagtgactagagaagaaaagtcagataagatgaccgggatcgtagctaagaaagacgggggaggatctgatttgtccactacaaagtctaggcagtcaaatgctgttagttatagcaatgcagataatgttggacatagacaatatgatcccgagcctcctgatgagaatatcaatgcaatacttgaggaggaagaggctttaattgctgctcacagaaaagaaattgaggatacaatgggaattggtcgtgaagaaatgaagcttttgccggaggtggaccaaccaggcagcctcatcgacaattatgtgacccaactaagctttgtgctttcacgcaaggctgctggtctggttggccttcaagctcgccttgccaggttccagcatcgattgaaagagcaggagatactgagtcggaagagagttcctcgttaaggcaagcagtttgttccctgcttgcattaccgcatcagaacctgtctcataacctcgcttagattgttatagttattttctcgagtggacattgacgcttaaatattttgatataaacaaatatataaagcttttatctc

SEQ ID NO: 15624 - DNA, 1700 bp, Gossypium hirsutum
  Clone ID: GOSHI-09MAY01-C2706_1
cgtttttaaaaagacaggctgtaaattcttttgaaccggtaataaggatgcttcttcagcatcgtctctgttacctactgctgttgtggagagaatttatgagcgacaaccggaagtaaaagttgttgatactggtcgaagggtagcagagaaagatgtttatactacagacattgacaaacagccctctactttttcgtcaggttacccattcaatgggagggaggaaagtggaaaggcttctggcccaacggatagggagagatttgaagtgaatagtaattatggtggttcttcgagccaaagagtttattcatcaaattctcaaaattcagctgatacagaagagaaagtgccaaaggtgtcaccacctcgtagaaaagcaattagagaagaaaaactggaaaagtcgaggaattgggccaagaaagatggaggaggatccgattcgtctgcttcaaactcgaggcaggtgaatgctgttaataataacgaaactaataccattggacatagacaatatgatccagaagaaaaacaggaaaagacgaggaattgggccaaaaaagatggaggatccgatttttctgcttcaaacttgaggcaggtgaatgctgttaataataatgaaactaataccgttggatatagacaatatgatccagaagaaaaaccggaaaagacgaggaattgggccaagaaagatggaggatctgatttgtctgcttcaaactcgaggcaggtgaatgctgttaataataacgaaactaataccattggatatagacaatatgatccagagcctcccactgatgagaatatcaatgcaatacttgaggaggaagaggctctaattgctgctcacagaaaagaaattgaagacacaatggagattgttcgtgaagaaatgaagcttctggctgaggtggaccaaccaggcagccacattgacaattatgtgacccagctgagcttcgttctttcacgcaaggctgctagtctggtgagtcttcaagctcgccttgcccggttccagcatcgactgaaagagcaggagatactgagtcggaaaagagttcctcgttgatgccagctctttgttctctgctttcattgctgcatcagactctgtccatcgatgcacggagctgcattagggtcttgagaggaaattcagcagtgtgcaaagatcctgatcctatttcccccagcatcaaacgttgcagatcgcgtttccttcaaacgcaatggcaaagataattcaggtgcagatacttgtgtgatgcttgatttatcaaaatgtgtattgttttagatgaatctgataatgttctggttgaagattgaatggttttggtggccttctgttgtttaaagggcgacaagaaaatgctttctttaaaatcatttctaggaaatgggagagaaaaaaaaagaagggaaaataaggtttttgtttttcccctttgtttattctgtacttttgaaactatatatattctgttttctcacctcaaaaagcaccttgtgaatgttatatagacccagtagtatgtagtagtgtccttttcaagtattttgttatgtcataatcgtattttaaggtattttatatttgtattatattttatacattaataatttgtattttatatatatgtgaaaacatttgtgcatttgggttccaccaaaaaaaaaac

SEQ ID NO: 15625 - DNA, 496 bp, Gossypium hirsutum
  Clone ID: GOSHI-09MAY01-C2726_2
cgtttgttatttccaataatccaaattcatgttttattgttaggtcgcttttttcttgttttttcttgtttgactgcttatgaactatgataatataggaacccagttcctctagagaatttcagagggcaggagcggatgatagacctgcatggattgcatgttagtgaggcccttcatatgctgaaacatgaactatcagtgctgcggagcacagcacgggcagcagatcagcgtctgcaggtatacatatgtgttggaactggccaccatactaggggttctcgtactccagcgagacttccagttgctgtgcaacggtatctgcttgaagaagagggccttgactatacagaaccacagccagggctacttcgagttgtcatatattgaagccatggacttgacagcgttgagctataggaagtttttgacactacagaaaaaagaaaccatcaagtcatagtcaccatagtcattcttgtatctgtacatg

SEQ ID NO: 15626 - DNA, 599 bp, Gossypium hirsutum
  Clone ID: GOSHI-09MAY01-C2726_1
cgtccgcccacgcgtgccatttgtcattgcaacaaggctctagcaaaggaacttagtgtgaaaggacaaatgcacaatatgcatatgaaggcggctcatggaaaagctcaggaatctatatatcaccagaggaacccagttcctctagagaatttcagagggcaggagcggatgatagacctgcatggattgcatgttagtgaggcccttcatatgctgaaacatgaactatcagtgctgcggagcacagcacgggcagcagatcagcgtctgcaggtatacatatgtgttggaactggccaccatactaggggttctcgtactccagcgagacttccagttgctgtgcaacggtatctgcttgaagaagagggccttgactatacagaaccacagccagggctacttcgagttgtcatatattgaagccatggacttgacagcgttgaggtataggagtttttgacactacagaaaaaagaaaccatcaagtcatagtcaccatagtcattcttgtatctgtacatgggaggaaaatggaaagggggatgtagttgaagtctggaaaaggaaatcaaaaaacagaaagttaggggaag

SEQ ID NO: 15627 - DNA, 422 bp, Gossypium hirsutum
  Clone ID: GOSHI-09MAY01-C2676_1
ccccgcgtccgaaaataatgcattaaagagtgctggaagctgagcctccggagtggcttccagatagttctaccactgtttgcatgcagtgcagggctctctttacagcaatcacgcgtggcagacatcattgccggttttggggagggattttctgtagagcatgttctaagggaaggggcttgctacctgttaaatttagggatagaaatccccagagggcgtgtgattcttgctatgatagacttgatccattgcagggggttcttattaactccattagcaatgctgcacaagtagcaaaacatgatgtcatggattggacgtgcactcgaggttggttgaacttgccggttggtttgtccatggaacatgagatctacaaagcatccaccaccttgagaagctattgccaggttgct

SEQ ID NO: 15628 - DNA, 1005 bp, Gossypium hirsutum
  Clone ID: GOSHI-09MAY01-C2636_1
gttgcttgcaatgcagatccgctttgtcgggtgtcaacatgtgcaatccggtgaacatatggccgccatgggcgtcttcttcttgatgcaggttttctactttttagattgggtgaagcacatgcttagtgacacaaaattgtttcaagctttcttgaggatcaccgtgacttctgcagtcgctgtggggtggtactgcttttgggattaggcatggtatccggttatatttcaccttggacaggaaggttttactctttgctggatccaacatatgccaaggatcacatccccatcattgcttctgtctctgagcatcagccaacagcgtggtcatctttcatgtttgatttccatatcctgcttttccttttcccagctggtctttatttctgcttcaaacggttgtcagatgccactatatttattgtcatgtatggtctgacaagtatgtattttgctggtgttatggttcggttgattcttgttgctacacccgcagtttgccttattagtgccatcgctgtttccgccactgtgaagaacttgactgtgctgttgaggtcgaagaacaaggttgtccaaactggttccactaagggaagtggcggttcaaagtcctcttctaaggctttacttgatcagtcccagcctttccagaaaaatggggcgattgcactgctctttggtgccttttacttgctcagtaggtatgctacccactgtacatgggtcacttcagaagcttactcatctccttcaattgtactggctgcaagaggtgcccatgggaatagagttatttttgatgattatcgtgaggcttacttttggcttccggcaaatactcctcaagaatgccaaggtgatgtcctggtgggaattatgggtatcaaatcactgccatgggaaaccgaaccgttattgttgacaacaacacttggaataatactcatatcgctactgttgggcgtgctatgtcatcttacgaagatgaggcaattg

SEQ ID NO: 15629 - DNA, 770 bp, Gossypium hirsutum
  Clone ID: GOSHI-09MAY01-C2126_1
ctcattcatcacttctagtaaggtatccaaaaatggtttcactataaatgtattcgagtgtccgatttgtggcgcttcttatcggtctgaggaggaggtgtctatacatgttgaaacttgtgtcaacaataccaattcattggatagaaaaggaactgatgatgaatctggatccaatgagaccgctttggaagagtcaagaggtgaagtagaggttcgtgttagttcattcctttcagggaaaccagcagaaggctcgattgaggtagttctcaagttgttgaggaatatagttaaggaacctgggaatgacaagtttaggaagcttcgaatgagtaatccgaagataagggaggcaattggtgaggtagcaggaggggttgaactgttggaatttgttggatttgaattgaaggaggaaggaggggaaatgtgggcagtcatggatgttcctaaagaggagcagattagtgtgatcagtaaggcaataatgttgttggaaccaggaaacatggaaaaatttaagagtgaaaatatttcccctgcagctccacctgagaaagaggaaactgttgagtcaaagaagatagacagaaagatccgggtgttcttctctgtacctgagagtgtggcagcaaaaattgagctaccggattctttctataacctatcaagtgaagagttgaagagagaagcggagatgagaaagaaaaagattgcagacttccagcttttaatccctaagtcttacaaggaaaagcaagcgaaag

SEQ ID NO: 15630 - DNA, 1142 bp, Gossypium hirsutum
  Clone ID: GOSHI-09MAY01-C2026_1
atcaagtttttgcttcttgtttggcatctccatatgactattctgtaaaccaaatatcctactggtttcaatgggcataacaaagatttgcccttggaaatcaggggataatagttgtcaggttcacattcctggctcattagaagatgaaggcaagggaaaggaagataaccctgtatatggggcagactcgggtaaggatctcgatgactgtgacttggagggaattaactgtgaactgtgcatggtggaaggtaagatttgtagtataccgtatgaactctttgatctacctgatttgagggagatattgtcattggaaacatggaactcatgcttgacagaggaagacagattctgtttatcagcctatctcccagatatggatgaatggaccttttggttgaccatgaaagagctcttcggtggtagtgatttgtatttcgggaatcccatggatgcttttttcaaaagagtgaaaggtggattttatcctcccaaggtttgttgtctcagagagtccttgcggtttcttgagaggagaaaatattaccacacgttaagatcttatcatgacaaaatggcacatatgttcacagacatgagaaggttgtgggatgagtgtagtgtgagcactggtgttcaagaaagactttatatgtggagaacaaggaggagttgcagggattccaatttgcttgaccttaatgccgtaccaagtgatgggtatctgttaaatgaggatgctaacttagattcagtcatgtgccatttgccaaagagaatgaagacttgggaaactgttagtacaaaaaacattgttgccagtccatctgccgatggaatgactatgattgctccaaactacagcacaaagagtgttctgaaggttaagacttctggcagtaatgcaattcacaaccacaatcagaaattggttgtaggtgacaaatcggaacaatgtctatcagtgccaaaggttctgttgaaagcagtaaccaaagttccttctgttcttccaccgctatcaaaagtgtgctcaagaaggtcacaaacagcattgcttgttggtgcccaagttttacgggaccccaaacccgaacgtacaatcttgggaaatgcgggttgttttagcgggtcat

SEQ ID NO: 15631 - DNA, 526 bp, Gossypium hirsutum
  Clone ID: GOSHI-09MAY01-C2396_6
cggacgcgtgggcggacgcgtgggcgggcgcgtgggcggacgcggaaccatgatcaaatgggtggagacctcgtcatttccatcgaggagcttcaagagatccaagacgagcttgagaagatcaatgaagaggcaagcgagaaagtcttggaagtggagcagaaatacaatgaggttcgcaagccggtctatgataagcggattgaaatcatcaattcaattcctgatttctgggtaacagctttcttgagccatcctgctcttggtgatcctttgactgaagaggacccgaagatattccaatatatttacccactttgaagtggaggattttaaaagacctgaatcctggttccccttatcacatttaactccaattccaatccgtactttgaaattccaggcttacaaggacctttaccttccttgatgatggaaccaaaattactgctaccccaatcaagtggaaagagggcaagggcttgccaaatggagttaatcatgagaaaaaggaaacaagcgacaa

SEQ ID NO: 15632 - DNA, 464 bp, Gossypium hirsutum
  Clone ID: GOSHI-09MAY01-C2396_4
cggacgcgtgggcggtcgcgtgggcggtcgcgtgggggagtctgatgatgatcaagacgaggatgatgacgtcgacggtgaggactaaatcacttaacagccttaatcatagtagttgcttctcttgctcaagtaaggacttgtgtaaagttgtctcctagtcatagctaagtaaggttatggagaagatagccatctttaagattagctttctatgctttataagcaactctcgttattgtaagcatagctatgactcgtttctttttgcccatcccttcactccctttttttgatctttactcgtgtttttgtttttatggtttcctcccagagggtgacatgaagtgaaagcttcttacatgatattggaatgcaggcattttatttatagttttgtttgacaaaaaaaaaaaaaaaaaaaaaaaaaataaaaaaaaaaaaaaaaaaaaaaaataataaat

SEQ ID NO: 15633 - DNA, 676 bp, Gossypium hirsutum
  Clone ID: GOSHI-09MAY01-C2396_3
cggtaccggccgtccccctgtcccccaccctcccaaaaaaaaaaaattcagttttagggtttaagactagaagacgtaaaatctagggtttagggttttcatttttctgtttggtgtaagtgagaagggcaaaaatggtggctgacagaggaaagaaggcgaaactagaagagaagggagtcgaagagaactctgaacaaattgatggcgcactcgtcttttccatcgagaaacttcaagagatccaagacgagcttgagaagatcaatgaggaggctagtgagaaagtgttggaagtggagcagaaatacaatgagttacgcaagccagtctatgataagcggcacgacataatcaaatcaattcctgatttctggttgacggctttcttgagtcatcctgttctgggtgaacttttgaccgacgaggatcagaagatcttcacgcatattaactcacttgaagtggaggattacaaacatctgaaatctggatactctattacttttaacttcacccccaatccttattttgaagatacaaagcttacaaagacctttaccttccttgatgaaggaattaaaattactgccactcaaatcaagtggaaagaggacatgggcttgccaaatggagttaatcatgagaagaaaggaaactagcgacaatttgctga

SEQ ID NO: 15634 - DNA, 610 bp, Gossypium hirsutum
  Clone ID: GOSHI-09MAY01-C2396_2
cccacgcgtccgcccacgcgtccggccaaatggagttaatcatgagaaaaaaggtgacatgcgtcaacttcctgatgaaaggtagcagagattatcaaggaggatttatggcccaatcctctcacttatttcaacaatgaggccgatgaggaggattttgatggagatgaaggtgatgaagagggtaaagatgatgatgatgactctgatgatgatcaagacgacgatgatgatgaggacgacgacgacgacgaggactaaatcacttaacagccttaaatcatggtagtatgttctcttgctcaagtaagaactggtgtaaagctgtctcctagtcatagctacgtaaggttatagagaagatagccatctttaagatagctttctatgttttataagcaactcttgttattgtaagcatagctatgactcgtttctttttgcccatctcttaacctttttgatctttcctcccgtgtgtttttgtttttctggtttcctcccagagggtgacacgaagtgaaagcttcttacatgatattggaatgcaggcattttatcgatattttttttaaagctctgttaaatagatatgtaaaatgctgaattc

SEQ ID NO: 15635 - DNA, 1036 bp, Gossypium hirsutum
  Clone ID: GOSHI-09MAY01-C2396_1
taccgcttttgtcccccgtagatatcagagggaaaacacaaaaactagggttttagagagaacgggagccaaagtgagagagaagaggcagatatttttaggagtagggttttgttatattgcttctctagggtttagaaaatggtggccgacaaaggaaagaagctgaaagtagcagagaaagtagaggaagagaaccatgaacaaatagatggagacctcgtcatttccattgagaagcttcaagagatccaagatgagcttgaaaagatcaatgaagaggcaagtcagaaagtcttggaagtggagcagaaatacaatgaggtttgcaagccggtctatgataagcggaatgaaatcatcaattcaattcctgatttctggttaacagctttcttgagccatcctgctcttggtgatcttttgactgaagaggaccagaagatattcaaatatattaactcacttgaagtggaggattttaaagatctgaaatctggatacaccatcacatttaacttcaattccaatccatactttgaaaatacaacacttacgaagacctttaccttcctcgatgatggaaccaaaattactgctaccccaatcaagtggaaagagggcaagggcttgccaaatggagttaatcatgagaagaaaggaaacaagcgacaacttgctgaagaaagcttctttacctggtttgctgatgctcagcaaaaagatgacatggatgaaattcatgatgaggtagcagagattatcaaggaggatttatggcccaatcctctcacttatttcaacaatgaggctgatgaagaggattttgacgcgcttgaggggttaaaaagggtaaatgatgatgaagatcctatgaagatcccaagatgatgatgatgaccagatgacgccaccacgagactacttctttcaaccgtaatatagtagtgatttttctcaataaaaccagggaaaggtgctcacatactataaggttttaaaaaaaccctttaaacttcttttttatcaacccttt

SEQ ID NO: 15636 - DNA, 483 bp, Gossypium hirsutum
  Clone ID: LIB3493-043-P1-M1-E2
cccacgcgtccgggaaaacacaagaaaaacagaactagggttttaaagagaaagggagcggaagtgatagagaggagagaagaggctgaaatttttaggattagggttttattatattgttcttacggtttataaaatggcggccgacaaaggaaagaagatggatgtggctgacaaagtagatgaagagaaccatgatcaaatagatggagacctcgtcattttcatcgagaagcttcaagagatccatgacgagcttgagaagattaatgctgaggctagtgacaaacgtttggaagtcgagtcaaatacattaactttgccactatgtatcataagtgaataaatatctttaactttgatctggtcaattttttgtcatttctctgcgatttatcttctaacccatatgttgtctttattaatttcagaggatttggtgtggaggtctaactttactaagttggatttgaaacttgcaca

SEQ ID NO: 15637 - DNA, 360 bp, Gossypium hirsutum
  Clone ID: LIB3196-027-P1-M1-B1
gccacgcctacggtgggcgggggaggaaagaatatgaaagtagtagagaaagtagaggaagagaaccatgaacaaatagatggtgacctctacattttcatcgagaattgtgactacaaccatagagctgccttgataagatcaatgaaaaggcaaacggaagaatgttggaagtgaagcactaatacaatgaggctcgcaagccggtctatgataattccttttgaaattattaatttaattccaatttctgcttgacacttttcttgagccatactgctcttggtgatcttttgactgataatgaccatatgatattcaaatattttaactcacttgaagtggtggattttaaagatc

SEQ ID NO: 15638 - DNA, 634 bp, Gossypium hirsutum
  Clone ID: GOSHI-09MAY01-C2376_1
cccaactcaaaataaaaaaaaacagcagctgaatttggaggaaaatgggtgacgctttgtttgagcttgagcagaatctacgatcccgaaaggaacaattgacccgacaagaagaaaacatttttcaaaggtgtaagtcctcggcgcttaatcatttcacggctggtgtaattgctggtggtggtcttgtttgggcagcaacatggaagctgaataggctacttcgggtaaacctctctggtggagctgccgtaatacttggattttggaaatttgggaattcactagattcgagtgttgaccatattcttgcgttagacggaactcggatgcaaagtgaattagcaaatataatagtgaagaaatatcggcatgatccttggaagatgagacttatctctaaacatttctatttagaggaagtacttgatgattcaacgtcagggccaaatttaaggtggcgttatcgaaatttctttggtgataatgttgatcaggatcaaggcactcatggcgattttcaggatgtctcccataagggcagccccagtgatatccacaataactttgacagaaaaaagacagatttgaagtctgagcaagttcctgtgaagtctggttttgatctaatggc

SEQ ID NO: 15639 - DNA, 445 bp, Gossypium hirsutum
  unsure (1)..(445): unsure at all n locations
  Clone ID: LIB3493-013-P1-M1-F1
acgagagaacataaggtgaaagatgaaagcagcaactggagctggaggaaaatgggtgaagctccggtcgagctagaacagaatctaagatccggaaaggaacaattgaccggacaagaagaaaacattttaaaaaggtgtagaaggtactcactgaatcatataaaggatcacgcacttgttggagtgcggttgcgtgggctgcagacatggtagctggataagcaactaatgtggaacctttatagaggagctgacataatacgtgggattttggaaactagggaattccctagattcgagtgttgaccatattcttgcgttagacggaactcggatgcaaagtgaattagcaaatataatagtgaagaaatatcggcatgatcccttggagatgagacttatctctaaacatttntaatttagaagaagttttgatgattca

SEQ ID NO: 15640 - DNA, 423 bp, Gossypium hirsutum
  Clone ID: LIB3583-061-P1-K1-D2
gtgacgctttgtttgagcttgagcagaatctacgatcccgaaaggaacaattgacccgacaagaagaaaacatttttcaaaggtgtaagtcctcggcgcttaatcatttcacggctggtgtaattgctggtggtggtcttgtttgggcagcaacatggaagctgaataggctacttcgggtaaacctctctggtggagctgccgtaatacttggattttggaaatttgggaattcactagattcgagtgttgaccatattcttgcgttagacggaactcggatgcaaagtgaattagcaaatatctggatgccgaatacagaatagtgaagaaatatcggcatgatactcggaagatgagacctatctctaaacatttctatttagaggaagtatttgatgattcaacgtcagggccaaattt

SEQ ID NO: 15641 - DNA, 641 bp, Gossypium hirsutum
  Clone ID: GOSHI-09MAY01-C2316_1
cccacgccgtccgcggatagggaaccaaagcacactgaaaaaatggtggtcaccagtggagctggagttcatgatgattccaacaactacgacagagaaaggaactgaaagcattcgacaattcaaaagccggtgtcaaaggtctggtagatgctggaatcactaaggttcctcgtatgttcatccgttcagacatttcatcgaacactttagagacaaccaagaaaacccaatacaaaattccagttattgatctacaagggatcgaagatgatccacggcggcataaagagatcagtgaccaagtcaggcatgcatcagagacatggggctgcttccagattgtcaaccatgggataactgtaagtgttcttgaagagatgaaagatggggttcgaagatttttcgagcaagatactgaagtgaagaaaaagtattacgcaagagaatcgggaagcaggtttagatatcagagcaactttgacttgtatacagctccatttgcgaactggagagatacctgtttctgcatgatggctcctgatcctccccagcctcaagaattgcctgaggtgttgagagatattctagtgaaatacacgaaagaagtaatgagattggggagttgtttatttagagta

SEQ ID NO: 15642 - DNA, 366 bp, Gossypium hirsutum
  Clone ID: GOSHI-09MAY01-C2206_1
atcgctctcagctctacagtccttctcgattgcagtggcgtacatccatacccgaagccccactctccgaccgaaaaatgttcagcggtccaagtaacaggatctagaatcgaaattcatgtagttgtaaccgaccccttactgtcttataatggtgtgtagatcgaaatttaggtattttatacaggaatttgagattgttaatttttcatgctttgttttcagattgttatgaatgtaatgtaggttttgattttatcattgattggaaatcttatcattgatttctcataaacaaaagatgttgtatttttgctcattttgattgaatctaaaggctttgggtaaaaaaaataaacaaaaaca

SEQ ID NO: 15643 - DNA, 535 bp, Gossypium hirsutum
  Clone ID: GOSHI-09MAY01-C2236_1
tcctcacgcgtccgcgaaaatctctcccccattttccacagtttagtttttgcagccacaacacagccaaagaaagaagaaaatggcgtcgaatgcggcggttccattctggcgtgcagccggcatgacttatataacctactcgaacatatgcgccaacctcgttaggaactgcttaaaggaaccttacaagactgaagcccttagtcgtgagaaagttcatttctccatctccaagtggacggatggaaagcctgaaaagcctactctccgctcagactcacctgaagaatgagatgcaagtttggtcatggaagcttcgaaactggaaggattttaattttttttttagtaatttctgttatgtctgaaacataagaacagatttcaggctgagatgatgttgcacatcctaataataatgtactttgtgacttgactgccgttgacccttcacgggatgttcatgggttatcaagtattcttgtcaaagtattttaagctgcacctttcaaacaaaaaaaaaaaaaaaaaa

SEQ ID NO: 15644 - DNA, 657 bp, Gossypium hirsutum
  Clone ID: GOSHI-09MAY01-C3986_1
ggccttcgcccaccgcttccgcccacccgtccgttttaagcatctttgtcaaacaaatcaccaatctttccagaggcctgagcctcaccacttcagtgattatggcttcgacccccaattccactatttccaggttttggaacaagcaaggaaacacaagaaagggacgcgagactccattgattcattacagttcaagctcgaaaaacccatctctaaagacgacccaaagtccaaaacgaagaaatattggtggagaaatgctcgcttgttcttcaactggaaaaaatggtctccaaatagcaataaccagcatgatgatcgaacaaaggctaaagctttaagggcatcgaattcaggaccaatttacatgatcgagaccagcaataatggttcaaccactccttatcgaaccagtagccgaccatcttcaggccctttgactggaatttcgactccttatattagtcttagggaacttaacatggagcaacaacaacatagggtttctacttcttctttacccatatatttggtcacttaacccatcattttttttttgggttaagctaagtttttttttctttttcttttaagctctgtttatcatcttcttgggttgtacacactgacagaagtgtttgataaagtttgttt

SEQ ID NO: 15645 - DNA, 331 bp, Gossypium hirsutum
  Clone ID: LIB3585-068-P1-K1-G11
aaaaaacctaaaatctggtagttattggcatttactagggtttgtactttgtcatttcccaagggccattcccccttgagccccaaaagatcagagttgttcccttttttattcttcttttagctttcacaaagataagctgcaaaaagattgaacttctttcagcaacaatgtcaaacaaatcaccaatctttccaatgcctgagcctcaccacttcagtgattatggcttcgacccccaattccactattttcaggttttggaacaagcaaggaaacacacaaaagggacgcgcgactccattgattcattacagttcaagctcggaaa

SEQ ID NO: 15646 - DNA, 665 bp, Gossypium hirsutum
  Clone ID: GOSHI-09MAY01-C3976_1
aattaaagattgagcgactgccactgccataccaccatcaccaaaccacgcgtccgctcaactctccttatcattatccttttgtttctgtttttcatttcgatgcccccgtgattgatttgaaagatggcaaatcaccaccgtacatcaagaatcgacgtcggcggcggaagcccaatgtttggaggttttggctttactgttagattattggcttctgccattactgttgcactctgtttcttctttcttctttcttttttctttacttctcactctcattctcctcatctccaaaccaactttggtttctccactggaattggatccacaaggaggtccgttttggcactcaaatccgatccgctcaagccccggctggatcagatccggaaacaagccgacgaccaccgctctcttgtcctcgcttacgcctcctacgctcgaaagctaaagctcgaaaactcgaagcttgttagggttttcgctgatctatctcgaaactactcggatctcattagtaaaccatcctatcgggctctcttcgaaaccgattcgctctccattgacgagcccttgctacgacagttcgagaaagaagtcaaagagcgaatcaaagccacgcgccaagtgatctcggaagccaaggaatcttctgataacat

SEQ ID NO: 15647 - DNA, 623 bp, Gossypium hirsutum
  Clone ID: GOSHI-09MAY01-C3906_4
cccattcaccggcactggttcgatgaggggtcgcattttagccggtacttgccatagtgccaagatgataaggacaatcattgttcgacggaattaccttcattatatcaagaaataccaaagtacgagaagagacattcaaatatccctgcacatatttctccatgcttgcgggggaaggaaggagatcatgtcattatcgggctatgcaggccgttgtcaaagactgtgaggttcaatgttttgaaagtgattcctgctggatcttctggtggagggaagaaagctttcactggaatgtgaggtgtaagtgttttcaatcaggagaagacattaaaatccctgaactgcctctagatatgaagaacctgggactattagatgtttttatgtttttgtttttcctttcctattacttgttatgtttggatttgtctagttatgacaactggaattttgaaggtatcccctattctagtatgatcctgttctctggagaatcactctgatcacttacttagattatgtatgaaaattctggtgttctctaaaaaaaaaataattttataatacaaaaacatcttttttttttcttatattatttttgctccccctttttaatt

SEQ ID NO: 15648 - DNA, 826 bp, Gossypium hirsutum
  Clone ID: GOSHI-09MAY01-C3906_3
ggcggcacatccgcgccacactctccaggaagctcatcaaccatggcggatcaggtctacactgagatctatgggcatgatcattcatttcttttctttgcttctcatttactggtttttttctcatttgtttgcagaccgagaaagcatttttgaagcagcccaaagtgtttttaagctctaagaaaactggtaaagggaagagaccaggaaagggagggaaccgcttctggaagagcattggtttgggattcaagacccctcgtgaagctattgaaggaacttacatcgataagaaatgcccgttcgccggccctgtttcggtcaggggccgcatcttagctggtacttgccatagtgccaagatgatgaggacaatcattgttcgacggaattaccttcattatatcaagaaataccaaaggtatgagaagaggcattcgaacatacctgcacatatttctccatgcttccgtgtgaaggaaggggatcatgtcattattgggcaatgcaggccattgtcaaaaaccgtgaggttcaatgttttgaaagtgattcccgccggatcttccggcggtgggaagaaagccttcactggaatgtaagctgcgagtgttattctgtgtttttgtctggggtcgtaggagcctacgtttcactgttagatttcttttgttattgtttttctttccatttacttcttatgtttggatgctgacatctggaattttgaagatatcacttgaatatgcttgaatttttgcattactagtatattcccattttcagatgctgaatctattatttaattatgatattatggatg

SEQ ID NO: 15649 - DNA, 833 bp, Gossypium hirsutum
  Clone ID: GOSHI-09MAY01-C3906_2
cccacgcgtccccctcgcgcccgcccacccgtccgcgcggttttcatttccccttcgcaagtagccagccgtttcacacactcaagaagagcgagagctcgtaaatcatggcggaacagaccgaaaaagcttttttgaagcaacccaaagtgtttttgagctcgaagaaaggtgggaaagggaagaggccaggaaagggtgggaatcgcttctggaaaagcattggattgggcttcaagactccccgtgaagctattgaaggaacctacatcgataagaaatgccccttcactggcactgtttcaatccggggtcgtatcttagccggtacttgccacagtgccaagatggtcaggacaatcattgttcgacggaactaccttcattatatcaagaaataccaaaggtatgagaagcgccattcaaacatccccgcacatatttcaccatgcttccgtgtgaaggaaggggatcatgtcattattgggcaatgcaggccgttgtcgaagaccgtgaggttcaatgttttgaaagtgattccagcaggatcttccggtggtgggaagaaagctttcaccggaatgtaagcttttctatggtagtccatggttataggaaccaatagagaagataatcaaagaaattaagttcttaaactgcatttagctttgaggatattttactgttagaattgttttctttttttgggttattttcttgttttgattttgtcgaattaccgaaatccggaattttgaagatatctttatttaagtttggctttggaaaaaaaaaaaaaaaaaaaaaaaaaaaaaaaaaaaaaattctgcggc

SEQ ID NO: 15650 - DNA, 880 bp, Gossypium hirsutum
  Clone ID: GOSHI-09MAY01-C3906_1
cccacgcgtcaaaaactctctcattttatcactgccgctttgccagcagccgcgccacactctacagagagctcatcaaccatggcggaacagaccgagaaagcatttttgaagcaacccaaagtgtttttaagctcaaagaaatctgggaaagggaagagaccaggaaagggagggaaccgcttctggaagagcattggtttgggcttcaagacccctcgtgaagctattgaaggaacctacatcgacaagaaatgcccattcaccggcactgtttcgatcaggggtcgcatcttagctggtacttgccatagtgccaagatgattaggacaatcattgttcgacggaattaccttcattatatcaagaaataccaaaggtacgagaagaggcattcaaacatccctgcacatatttctccatgcttccgtgtgaaggaaggggatcatgtcattattgggcaatgcaggccgttgtcaaagactgtgaggttcaatgttttgaaagtgattcctgctggatcttctggtggagggaagaaagcttttactggaatgtaaggtgtaactgttttcaatcatagttcgggttgtaggaacataaggagaagacattaaaatccctgaactgcctctagatatgaagaacctgggactattagatgtttttatgtttttgtttttcctttcctattacttgttatgtttggatttgtcttgttatgacaactggaattttgaaggtatcccctattctagtatgatcctgttctctgaaaataagataataaagagaacattaaaaatgctgctacaaaaatcaaaaatgaggatggtcttctgacatatggatcatcatgtgttgtaaaaaagattcttt

SEQ ID NO: 15651 - DNA, 429 bp, Gossypium hirsutum
  Clone ID: LIB3149-033-Q1-K1-B1
ccctttcactggccctgtttcagtcaggggccgcatcttagctggtacttgccatagtgccaagatgatgaggacaatcattgttcgacggaactatcttcattatatcaagaaataccaaaggtacgagaagaggcattcaaacattcctgctcacatttctccatgcttccgtgtgaaggaaggggatcatgtcattattggtcaatgcaggccattgtcaaagactgtgaggttcaatgttttgaaagtgattcctgctgggtcttccggtggtgggaaaaaagctttcactggaatgtaagggcgtgagtgttatttaaaaaaatatatatatgttttggggttttagaaacctatgaagaagacactaagattttgatgaactgactacacatggaattttcaatatatttccaattattatta

SEQ ID NO: 15652 - DNA, 338 bp, Gossypium hirsutum
  Clone ID: LIB3149-022-Q1-K1-A3
aaaactctctcattttatcactgccgatttttcagcagccgcgccacactcgagagagagctcgtcagccatggccgaacagactgagatagcctttttgaagcaaccaaaagtgtttttaagctcaaagaaatcttcaaaagggatgagacctggaaagggaggtaaccgcttctggaatgagcttaggttggtgcttgatgactattggtgaagctatcgatggaacctacttctacactaaatgcccgggagctggcactgaagcggtcaggagagctagcatatctgaatcgtgccatagggctcatattgataggacactaatctgacgacgg

SEQ ID NO: 15653 - DNA, 294 bp, Gossypium hirsutum
  Clone ID: uC-gsronu33B121g07b1
tgtctcgcgtccgcaatcatagttcgggttgtaggatcataaggagaagacatttaaatccctgaactgcctctagatatgaagaacctgggactattagatgtttttatgttttttttctttatttatctttctttttttttttttctcttttttattattatttaatattctttcatttttttcttttctctttccttattttttttttctatttttttttttatttctttttttattatcttttttctactttttttttttttttttttaacttattatttattttttcta

SEQ ID NO: 15654 - DNA, 193 bp, Gossypium hirsutum
  Clone ID: uC-gsronu33B121a07b1
agcagtcctcgtttctctttcatttagcccgcactagcagcagggagctcctcactcttcacagtagctgatcaaccatggcggagcagaccgagaaggcatttctaaagcaacccaaagtgtttttaagctccaagaaatctgggaaagggaagagaccaggaaagggaggaaacctgttctggaagagcat

SEQ ID NO: 15655 - DNA, 1188 bp, Gossypium hirsutum
  Clone ID: GOSHI-09MAY01-C3926_1
ctccggcccggaattaccgggcgcccacccttcggccacgcgtccgccgacgcctgcgcaaacctaaagacatggcttcatcatctcctctttctcccattctcctctctctgtttctagtattcatttgtggggtgtcagctcaaacggctcccgcccctgccccctctggccccttgaatttcactggaatccttgacaaaaatggccaatacacctacttccttcagcttttggcacagactcaagttgggagccaagtacaaactcaactcaaaaccaccactgaaggctttaccgtctttgctcccacagataatgccttcaacaacctcaaacctggtaccgtcaataacctggacccacaacagaaagtacaactagttctataccacgttattcccaaatactactccttgaacgatctccaatttgttagcaaccccgttagaacccaagctggtgaggatttcggcctcaacgtcactggcctgaacaaccaggttaacgtctcaagcggggttgtcgagactcagattaacaacgcattatatcaaaagaaacctctggcaatttatcaagcggacaaggtgttgttgcctgaggagttttttgaagctaaatccccagcggctgcaccttcaccggcgacaaagaaatcatcaacagggtctaaatcgaactcaagagcatcagcaaccgcagatgagccagcttctgctgataattcaggctcagccggaaggaatatggggctgggattcgttgttgggcttgcattggcttgcatgggatttctctcatgagcggatatatatgaagttggtctgcattttttactataaattttcgtttttcaaatggatcgataagggtctgattggtcgttgaacatattcttgttatccacattatttgtatttccagaattttttgttgattttgcttctgcgcgctgcttgatgttaataataatatatgtgagtttctggaggggctttagtctccccatctctcttttcctaccaaatagatcccagtttattgttgagcataaattcaagggattaatcctataaaaatgtagggaaggatgtagttatatataaagaaatgaagtgtaatacagatgatgaaggtgattggcccctccttttgcaatataaaaaaaaaaaaaaaaaaaaaaac

SEQ ID NO: 15656 - DNA, 580 bp, Gossypium hirsutum
  Clone ID: GOSHI-09MAY01-C3886_1
cccacgcgtccgcccacgcgtccgcttatccatttcattgttggtgcaatgataatggaaatatggtatgtttgggttttcataatatcttttttgagtgtaagtgtaggcaactggatttataggtggaggaaccctaaatgcaagggcaaactccctcctggttccatgggattccctcttataggagagacccttagcttctttgtcacttccaactccattgacatgcatcctttcgttaatgaaagattgaaaagatacggtccgttgttcaagacaaacatagcgggtcgaccggtggcggtgtcatcagatcccgaattcaactacttcgtgttgcaacaagaggggaaactcatcgaactctattacatggattccttttcacagacggtacacaacgataacttgagtaatctaggtggctacttccagaggtatctacggcgctccattctccgtcatttcggacatgagccactcaaacgtaagctgttgtctgagcttgaggatgtaataaaccatgaagtacataagtggaccaatctgccagaggtcgatgtaaaacttcaaactg

SEQ ID NO: 15657 - DNA, 384 bp, Gossypium hirsutum
  unsure (1)..(384): unsure at all n locations
  Clone ID: LIB3585-047-Q6-K1-H2
acccacgcgtccaactccttatccattccattgntgttgctttgataatggaaatatcgcatgcggggggggtcataatatcgtctttgagtgcaactcaatcaactgcatttataggtggaggaaccctaaatgcaagggcaaactccctcctggttccatgggattccctcttataggagagacccttagcttctttgtcacttccaactccattgacatgcatcctttcgttaatgaaagattgaaaagatacggtccgttgttcaagacaaacatagcgggtcgaccggtggcggtgtcatcagatcccgaattcaactacttcgtgttgcaacaagaagtgaaactcatcgaactctattaccatggattccttttcac

SEQ ID NO: 15658 - DNA, 408 bp, Gossypium hirsutum
  Clone ID: LIB3585-067-P1-K1-A12
gcttgatctcaacttatatttccgagcagcttggcatcaattgttccgttctgatgggggcaaatcttgcgagtgagattgctgaggagaaattcagtgaagcaacagtcgggtatggaaacaatagagaaattgcagaacaatgggttcaattatttactaccccttatttcatggttactcctgtgcaggatgtggaaggggttgaactatgtggcactttgaagaacgttgtggccatagcagctggttttggggatggacttgacatgggaaataacacgaaggctgcgattataagatttggtctgagagagatgagagagttctgcaagcttgtattttcattcggtaaggatgataccttcttttgaagctgtggagttgctgatgttatcacaacatgct

SEQ ID NO: 15659 - DNA, 304 bp, Gossypium hirsutum
  Clone ID: LIB3146-054-Q1-K1-D2
cccacgcgtccgcccacgcgtccgcccacgcgtccgtgacatgggaaataacacgaaggttcatacttctggttttttaacatctatcttaccaatttccacgctgtctagtttctcatgtcatgcatattattaggctgcgattataagatttggtctgagagagatgagagagttctgcaagctgttattttcatccgttaaggatgataccttctttgaaagctgtggagttgctgatgttatcacaacatgcttcggcggaagaaacagaaaagttgccgaggcatttgctaggaatgga

SEQ ID NO: 15660 - DNA, 838 bp, Gossypium hirsutum
  Clone ID: GOSHI-09MAY01-C3846_1
cccacgcgtccgcaggacttagacacgactctgtaaggagcaagatagcgatggaccactaaagctaaggagtgtgtaattaatttatgaagtgaatggttgagaatttgagagtgacaaattagtaaaatgtgtttcttcttctttttctgtgttttcctctgattggttcaacataaagcaactttcaagctttctgtgtcagttcaatactttcatgtgatcatagttgctattcttagttggctatctcataaaaagaaaagaagttgaataaagaagaagaagaagaagaagaagaagaagaagatggagccaacaaaccagaagtttttggaaagagttgtttcacaaaaagctctgcaaatgggaagttcattcccatgccaaatttgtgtggtgggttttctctgtggagtctgcctcacttctttgttcttggctgttcttacttctgtggggacctggggctttactgggatttcattttcatccttatcaatggggaattctccattgaattcaagttctgagattatcaatgttattacgagttcggactaccaatccaaagtaaaagaaaccgcaagatgggtggatacgaagggaagggaaccgtgaagcgatgatgataacagggtttctttattgactgaagcatggggtgctttactagctgacagggaacctgaagaaagcgagtactcgaaaagatctggactgagtaaatcaagtttaccgaatactccttattcggagaactgttaattaagtgcacaagtgaataatcgtctcgacacacgttcaggagctgcgagatttccttcgtggacaactt

SEQ ID NO: 15661 - DNA, 453 bp, Gossypium hirsutum
  Clone ID: LIB3582-003-P1-K1-H8
gtttatctttataagtctttgttctctttgatatgtgcttaaaactgctatctgagttccatcactttaaatggttctttctcggactcaagacttatacacgactctgtacggagcaagatcgcgatggaccactaaagctaaggagtgtgtgattaatttatgaagtgaatggttgacaatttgagagtgacaaattagtaaaatgcgtatcttcttctttatctgtgtgttcctctgattggttcaacataaagcaacttgtaagctttctgtgtcagttcaatactttcatgtgatcatagttgccattcttagctggctatctcataaaaagaaaagaagttgaataaagtagaagaagaagaagatggagccgacaaaccagaagtttttggaaagagttgtttcacagaaagctgtgcacatgggaagttcattcccatgccaaat

SEQ ID NO: 15662 - DNA, 673 bp, Gossypium hirsutum
  Clone ID: GOSHI-09MAY01-C3836_1
ctttcccctaaactttcatttctgataatcttttctttctatagtaaaccttaaatcccacaagagtaaacaaacccctttattgctgtttgtttttcttaaatgatttttacgtcattttgtgtgttcttcacccaactttaaactctcaaaaattgtatcatggctaagaagaaaaaaaaaggaagttgaaatgctagagactctgaagtacctgatcggctcaacaggagtcagcggcttcggctctaagtccaccgccgaggaagtcaccgagacttgccctgatctccgctctataacagtcatcatcacaggtgcgacgtcggggatcggagctgagacggccagagtgttggccaaacgaggagcgaggttggtgcttccagctcggaaccttaaagccgctgaggaagcaaaggctaggatagtttccgagtttcctgagtcagaaattattgtcatggctcttgatcttagttcactcacttctgttcgaaattttgtatcggagttggagtctcttaacttgccagtcaatatcctcataaacaatgcccggaagtttgcgcatgaacatgcaatctccgaggatggaatccagatgacatttgccactaattaatcttggtcattttttggtggacgaagtgttgctaacacgatgatgaga

SEQ ID NO: 15663 - DNA, 1034 bp, Gossypium hirsutum
  Clone ID: GOSHI-09MAY01-C3596_1
gagcacacttcattgcgaaagctatggtacatgcagacaaagcaacaactgtatcacacacgtattcgaaggaagttgctggaaatcctgcaatagctcctcatcttcacaagttccatggaatattaaacggaattgatttagatatttgggccccgcgtcccgattagttcattcctgtgatcttacaattcggaaaatgtcatcgaaggcaaacaagctgctaagaaagccttacaacaaaggcttggtttgagaaaatctgatcttcctttggtcggaattatttctcgtttaactcatcagaaaggaatccatctcatcaagcatgcaattgcacgtgccttggaactcaatggacaggttgtattgcttggctcggctccggatcctcatatccaaaatgattttgtgaatttagccaatcaactacattcatctcatgcagatcgtgctcgtctttgtttgaattatgatgagcctcttttctcacttgatatatgctggttctgatttcattctagtcccatcaattttcgagccttgtggattgacacaacttacagcaatgcgatacggttccataccagttgttcgtaaaactggaggactatatgacactgtatttgatgttgataacgataaagctagagcagaagcacaaggtcttgaacccaacggatttaatttcgatggagccgatggtagtggagttgattatgccctcaatagggcgatcacggcttggtacggtgctcgggattggttcaactcattgtgcaagatggtgatggagcaaggactggtcttggaaccggcctgcactcgagtatatcgagctttaccatgcgactaagaaatactagagcttgtacagcactgtatgataccttttaagggttcatccctttcagaacctgctttttcctaccatagttttatctcttaaaacaatcttagctccattatactttgcaaaaattatggatttagtccttatactttacttcaacatttttaatctagtacttttt

SEQ ID NO: 15664 - DNA, 612 bp, Gossypium hirsutum
  Clone ID: GOSHI-09MAY01-C3556_2
cccacgcgtccgcccacgcgtccggccacgcgtccgcccacgcgttcgcgagaaacaaacgagtactggtaaagaaacagtcagttctgaagagaatggtagtgagaaggagagccctcattgtgaagatggcaatctgccagaaagtttggagcataaccttcctgatagtccgtttgcgtctcctgggaaagcctctaaagagtacctgtctttcaacaatgcggtcacggagaaggatggtaccatctcggctaacaataattggattccttcgaccttacttcctgcaaataatgcattagacatgtcatccttcaactccttcaactgccaaatccccaggttctcatccggacaagggacaatcggtatgtacacagggactggcgggccgacttgccccgttggaatatagcttcggacatcatcatcatcatcatcaaatatttatatttttactcactagtttactaccatacaaaatgcatacataaaaaggctatgtttctcttcttgtaatattgttataaatttgttttcagtagtcaagtttggaccacagtaaaaaagccaacatagaagtaaaaaaaacagaaggatcatactgtc

SEQ ID NO: 15665 - DNA, 1310 bp, Gossypium hirsutum
  Clone ID: GOSHI-09MAY01-C3556_1
gttgggtcacctaacagtttgaaagatggaccagtgccatgagttgcttagatctaaatcagctaggcaacaaaggctggctgctgctgctgctgctgttggtgctgctcagataatgggctctggttcttttccatactcaccaaagtccatcaatttagtccttcaacagccccaaaatgatgctcagagggcgccggttttggtggggggtgggtggggccggggcgaccgttcaagtccagcttcaaggcagatatacttgactttcccagctgatagtactttcagagaagaggatgtgtcaaattatttcagcaaatatggacccgttcaagatgtgaggataccataccaacaaaagagaatgtttgggtttgttacttttatataccctgatacagtgaagatgattttagctaaaggaaacccgcatttcgtttgcgattctcgggttttagtgaagccatacaaggagaaagggaaaatcccggacaagaagcaaccacaacaacaaaatgaaaatggaaccctaactggttttgattctagagatccatttgatgttcaacttggtacaaggatgttttacaataaccgagacatattatggaggagaaaattgggggacgaaactgatctgcaacaagcccttgagcttcaaaatagaaggttgatgagtctgcaactccttgatgttaagaaacactcaccaaccctttatggccagtctcttgtacttccacaagagaatagttctagccctgtgccggctatatcggtcactgctgccgagaaacaaacgagtactggtaaagaaacagtcagttctgaagagaatggtagtgagaagggagagccctcattgtgaagatggcaatctgccagaaaagtttggagcataaccttcctgatagtccgtttgcgtctcctgcgaaagcctataaagagtacctgtctttcaacaacgcggtcacggagaaggatggtaccatctcggctaacaataattggattccttcgaccttacttgctgcaaataatgcattagacatgtcatccttcaactccttcaactgccaaatccccaggttctcatccggacaagggaccatcggtatgtacacagggactggcgggccgacttgcccgtggaatatagcttcggacatcatcatcaatattatattttacttactagttactaccataaaatgctccctaaaaaagcatgttcctatgtgatatggaataacttggtttcagtatagtggaacagtaaagcccccctgagtaaccccaggtctctg

SEQ ID NO: 15666 - DNA, 634 bp, Gossypium hirsutum
  unsure (1)..(634): unsure at all n locations
  Clone ID: LIB3583-052-P1-K6-E10
ccccgcgtccngattgattgcttgtataggtggggggaaacaanagttattcagcttctcgaaaatgaatctagaaacggctaggtaagctattgctagaaagaggagaaggagaaggaggaggagaagaagaagaagaagaagagatacatcaaaagtcgttctgcaacttcttcttccgtgcatatctccttgggaaagacttgcttacaatagaaaaattcggtctcgttcaatatatgattctgaagacactgtgcgcgttcttagcacttttgttggaggtctttggtgtttatggtgatggggaattcaaatggtactatgggtacccatacataacagtagttatgaatttcagtcaaatgtgggcactatattgccttgtgcatttctacaatgcaactcatgaaaggcttcgacctataaagccactggcaaaatttatcagtttcaaagctattgtgtttgccacttggtggcaaggagtaggcattgctctgctctgtgcatatggggttctgcccaaactgggaaaagcagactgcattgcaagacttttttatttgtatagaaatggcattgcagccgttgctcatgtatttgtcttctctgcggaaccttatcattttct

SEQ ID NO: 15667 - DNA, 548 bp, Gossypium hirsutum
  unsure (1)..(548): unsure at all n locations
  Clone ID: LIB3582-028-P1-K1-B9
tccacacgttcgncttgaatntgacatctgctggtaaacttcagatgattctgaagacactgtgcgcgttcttagcacttttgttggaagtctttggtgtttatggtgatggggaattcaaatggtactatgggtatgtatgatggttttttgtgcaatcccttgtatgctttcatataaagcctaataaagttggctcttatctgctctcttgcaggtacccatacataacagtagttatgaatttcagtcaaatgtgggcactatattgccttgtgcatttctacaatgcaactcatgaaaggcttcgacctataaagccactggcaaaatttatcagtttcaaagctattgtgtttgccacttggtggcaaggagtaggcattgctctgctctgtgcatatggggttctgcccaaacatgggaaaatgcagactgcattgcaagacttttttatttgtatagaaagtaagttgtgcctgataaacatctctgttcggactttgggcatattctaattttttcggtcgatggataatctctatttt

SEQ ID NO: 15668 - DNA, 869 bp, Gossypium hirsutum
  Clone ID: GOSHI-09MAY01-C3406_1
ctattgtttccgccgtcatttcacaaacagtggtttaccgcattgctcaaccaggctttcatgctcatcggaaccgcaaaagctgtttcatcagggtggaagaaacggagcaagagaacaaattccgcctggtgaacccgttttctgagcgtctgatcaagcacatgcctgccaactttcccaaggagataaaccatctcaacttcagggtggaagaattgaccaagggtttcagtattcgactgctaaaggatgatggtagttctgatctccatgacaacaatttctggactcgtaagctcaagcttgcttcggattttgattcgagctacaaggctatttctatctcatcagggcaattaagacgtgcgaggcttgatacttacacaactgacatccactggtgttcgcttgatactgaagttcattatcgtgacatcaccaacttcgatggaaaattcttcatggttaatatttatggcgttattttggggatggatgagagcttttacaccctggatgaggttcacacatctctggaacaaaaggactgggaatgcgaaaggtatttcgtggaatcatgtggccatctttacttggttgtcagagacttcctcatttgccctactctagttcaatataattatacacttgatgctttcatgaccgaagccaaagatgctaatgtgccggttaaattcaaagtttacaaacggatccctagtggtgaccagcggagtaggttttgttgggtggaggtgaatgatttgggtgatcgtgcattcttcgtcagcactgattgttccttttcctttttgactcgagatacacagggtgtggtgggaactgcatcatctattgtgatgaaa

SEQ ID NO: 15669 - DNA, 693 bp, Gossypium hirsutum
  Clone ID: GOSHI-09MAY01-C3436_1
cggtccgccttccgggtcgacccagcgttcgtcccgcgtccgtttttttcagtgtgttatgggggggtgggttaggcagatttggaaaaatggcggaaacggtaaatctgcgcggagaaagtccggcggttgcgaatccgttaagcgaaccagccgtcggaaatcgcatcgaatatcaattaccacgcgcagttcagtcctcatttctcgccgtgcaagtttgagccagaacaagctttcttcgctacggctgagagtgttcgcgaccgtctcgtcaagcaatggaacgaaactttccttcactatcataaaggtgatccgaaacaaacttattacttatcaatggaatatcttcaaggacgagcctttacttatgcgattgggaatctcggcattcaaaatgcctacgccggggctttgaattaagttaggacatggacccgaagagattgctgggccggagaaagatgccgcacttggaaatggggggttgggaaggcttgcttcttgttttctcgattctatggcaacgttgaatttgcctgcttggggatatggtttaaggtacaaatatgggcttttcaaacagctggtaacaaaacaaggacaagaggaaattgcggaagattggcttgagaatttagtccctgggaggttgttaggcatgatatagtgtttcctgtcagattcttt

SEQ ID NO: 15670 - DNA, 644 bp, Gossypium hirsutum
  Clone ID: GOSHI-09MAY01-C3776_2
cccacgcgtccggtaaattgcaaaaaataaaaaaaaggaaaatcaagaaaatagaacacttgatcagatcagaaactgttcttagtttcccttttttttttttttttgcaagagctgctttgaattcgtaagtggacgccggagattggaagagaaagatgcgcttgatctgttccaagtttcatttccaactcttcccagaagattggtgcttggacgggatgggcagctgcactgcagagtatatggtggatagcaaatactagagaatctattaaggtttcctggctgaattatggcttctgcaagcctaggaaatggtggagcaggtagttcaaggtctgtcaacggtttcaaaagttcttctagttctgttgattggctggggagagaaatgcttgaaatgagattgagagacaaagtggaccatgacgaagacagagacagtgaacctgatgtagttgatggagtgggtgctgaaacagggcatgtgataagaacaaccattggtggtcgaaatggtcattcaaagcagaatgtcagttatattgctgagcatgtggttggaactggttcttttggtgttgttttccaagcaaaatgtcgtgaaactggagaaattattgccatcaaggaggttctac

SEQ ID NO: 15671 - DNA, 1776 bp, Gossypium hirsutum
  Clone ID: GOSHI-09MAY01-C3776_1
tctttttttagtggataacaaatactagtttctataagagtttcctggctgaattatggcttctgcaagcctaggaaatggtggagcgggtagttccaggtctgtcaacggtttcaaaagttcttctagttctgttgattggctcgggagagaaatgcttgaaatgagactgagagacaaggtggaccatgacgaagacagagacagtgaacctgatgtagttgatggagtgggtgctgaaacagggcatgtgataagaacaaccattggtggtcgaaatggtcattcaaagcagaatgtcagttatattgctgagcatgtggttggaactggttcttttggtgttgttttccaagcaaaatgtcgtgaaactggagaaattgttgccatcaagaaggttcttcaagataagcgctacaagaatagggagttgcagattatgcaaatgctggatcatcctaatattgtgtcccttaagcattattttttctcaaaaacagacaaggacgaactctacctcaatcttgttcttgactatgttcctgagactgttcatcgtacagccagaagctacagcaggatgaacacacgaatgcctttaatatatgttaaactctatacgtatcagatatgcagagcacttgcctatatacacaactgcattggtatatgtcaccgtgatattaaacctcaaaacttacttgtgaatccacatacacatcagctgaaactttgtgattttgggagtgctaaaatgctggtaaagggagagccgaatgtttcttacatctgctcgagatattatcgtgctcctgaactcatatttggtgctactgagtacacaactgctatagatatatggtccactggttgtgtgatggctgagttgcttcttggacagccactgtttcctggtgagagcggggtcgaccaattagttgaaatcattaaggttttggggactccaacaagggaggagatcaagtgcatgaacccaaactacaccgaattcaagtttccccagataaaaccacatccatggcacaaggtcttccaaaagcgtttacctccagaagcagtagaccttgtctgtaggttttttcagtactctcctaatttgcgatgcactgctttggaggcttgcattcaccctttctttgatgaattgagggacccaaatgttcgccttcccaacggccgtccgctaccaccactcttcaatttcaagcctcaagagctctctggtatccctcctgaagttgtcaagaaacttattccggagcatgcttgcaagcagaatttattcatggcactgcacacttagcaaccattccaagtttcttgggttcctactagcaaatctgaggccatttgatctgtatcaacataagcaaaagatccctgacccgacttgcagcatcgatgtagtgaaagaagtgttagagaacaagtgagtagaagggaggagaggcaaggctttgaatgctggtgaagctgttttgctgttcattttgtggatgcaattattataagtagtatcaacttgtgttcttaatgtatatgcattggtgatccatagtaatattagaatggtgagaagctatatatgtattttaccatctgctggtaagttttcgtcctgtatctcagctttcttcttcagtaagatcctagtttggcttatggattaagaaattatcccttgttatatataatggtgatctattggtctttcttagtggacctaaaaaccccattgcacctaactggttccgt

SEQ ID NO: 15672 - DNA, 568 bp, Gossypium hirsutum
  unsure (1)..(568): unsure at all n locations
  Clone ID: LIB3826-001-Q1-N6-F3
aaggaaaattataattgttaaaatttgaatcctgaatttaaagacgatgacatgaacttagtaaagcatctcacaaataagtatacataaaaggttatagtaattaagacgattgtcttcaaaggaaaaaaagaagaaaaaaaaaaacaaaaacaaaacaggttcataggcactccaagccttggatctcctttgttctaatgacttggttttcaaacacactattcgtactagaacgatgaagaagacacgggtatggtacttttttttttttttttggctttttacatatgatgataacatatatgatgatacaaatgaaaatggcgtggcaaaagaaacctgggaaaggtagctaagcatgcagcgccatgaataaattctgcttacgagcatgttccggaataagtttcttcacaacgtcaggggggacacccgagagctcttgaggcttaaaattgaagaaggggtggaagtggacggccatttggaagtcgagtgtttgggtccctcaattcatcaaagaatgggtgaatgcaagcctncaaagcagtgcatcgcaaattgg

SEQ ID NO: 15673 - DNA, 498 bp, Gossypium hirsutum
  unsure (1)..(498): unsure at all n locations
  Clone ID: LIB3543-059-Q6-K6-C9
ncccacgcgtccgtnanaaaacaagtgaggggaagggaggagaggcaaggctttgaatgctggtgaagctgttttgctgttcattttgtggatgcaattattataagtagtatcaacttgtgttcttaatgtatatgcattggtgatccatagtaatattagaatggtgagaagctatatgtgtattttaccatctgctggtaagttttcgtcctgtatctcagctttcttcttcagtaagatccaagtttggcttatggattaagaaattatcccttattaaaaaaaaaaaaaaaaaaaaaaaaaaaaaaaaaaaaaaaaaaaaaaaaaaaaaaaaaaaaaaaaaaaaaaaaaaaaaaaaaaaaaaaaaaaaaaaaaaaaaaaaaaaaaaaaaaaaaaaaaaaaaaaaaaaaaaaaaaaaaagggggggcccttttaaaaaaaccaaattttacaccccgggttttgaaaaaatataagttttttttttggggcccc

SEQ ID NO: 15674 - DNA, 475 bp, Gossypium hirsutum
  Clone ID: uC-gsflnu33B080b09b1
cgcatcaatcttttccgcccacgcgtacgcccacgcggcctttgtaccatgatttagacagagatagcgaaccagaagtagttgatggagtgggtgctgaaacagggcatgtgataagaaccaccattggtggtcgaaatggtcaatcaaaacagaatgttagttatattgctgagcatgcagttggaactggttcttttggtgttgttttccaagcaaaatgtcgtgaaactggagaaattgttgccatcaagaaggttcttcaagataagcgctacaagaatagggagttgcagattatgcaaatgctggatcatcctaatattgtgtcccttaagcattattttttctcaaaaacagacaaggacgaactctacctcaatcttggtcttgattatgtaccagaaactgttcatcgtaccgccagaagctacagcaggatgaacacacgaatgcctttaatatttgttaaact

SEQ ID NO: 15675 - DNA, 393 bp, Gossypium hirsutum
  Clone ID: uC-gsflnu33B082a11b1
tctactctatcgggtttacagttttattgatcgtggtggcagatctaaaaaaagcacagatgttatccgaccactatcatcaaaaagattgttaatgttttgccttgagaaagtttacgaaaggtcttctagttgtgtagattggctcgtgagagaaatgcttgaaatgagactgagagacaaggtggaccatgatgaagacagagatagtgaaccagaagtagttgatggagtgggtgctgaaacagggcatgtgataagaaccaccattggtggtcgaaatggtcaatcaaaacagaatgttagttatattgctaagcatgcagttggaactggttcttttggtgttgttttccaagcaaaatgtcgtgaaactggagaaattgttgccat

SEQ ID NO: 15676 - DNA, 532 bp, Gossypium hirsutum
  Clone ID: LIB3585-053-P1-K1-E7
aaaaaataaaaaaaggaaaatcaagaaaatagaatacttgatcagatcagaaactgttcttagtttcctttttttttgttttttgcaagagctgctttgaattcgtaagtggacgccggagattggaagagaaagatgcgcttgatctgttccaagtttcatttccaactcttcccagtttctgactcttaatttcgggaatctgttaggaagattggtgcttggacgggatgggcagctgcactgcagagtatatggtggatagcaaatactagagaatctattaaggtttcctggctgaattatggcttctgcaagcctaggaaatggtggagcaggtagttcaaggtctgtcaacagtttcaaaagttcttctagttctgttgattggctggggagagaaatgcttgaaatgagattgagagacaaagtggaccatgacgaagacagagatagtgaacctgatgtagttgatggagtgggtgctgaaacagggcatgtgattagaacaaccattggtggccgaaatggt

SEQ ID NO: 15677 - DNA, 377 bp, Gossypium hirsutum
  Clone ID: uC-gsflnu33B076a11b1
cgttgtttttcagtggatgacaaacaccagccggtggtggttttaccaggctgactcatggcatctgcaaccctaggaaatggaggagtgggtagtatcaggtctgttaatggttacaaaagttcctctagttctgttgattggctcgggagagaaatgcttgaaatgagactgagagacaaggtggaccatgatgaagacagagatagtgaaccagaagtagctgatggagtgggtgctgaaacagggcatgtgataagaaccaccattggcggtcgaaatggtcaatcaaaacagaatgttagtaatattgctgagcatgcagatggaactggatcttttggcgtagttttccaagcaaaatgtcgtgaaactgg

SEQ ID NO: 15678 - DNA, 312 bp, Gossypium hirsutum
  Clone ID: LIB3083-060-Q1-L1-E3
ctcatcctccatggttatttctcaaggtattgtcggcgtacagcttggttttgtctaggattctgaatagaggaattttgttttaagtcccttgaaataggccgactatgatgtcctttacctgggacacgtaacatttccaactctttccaaaagattggtgcttgtaccggatgggcaactgcactgcagagtatatggtggatagcaaatactagagaatctattaaggtttcctggctgaattatggcttctgcaaacctaggaaatggtgagcatgtagttcaaggtctgtcaacagttcaaaagtc

SEQ ID NO: 15679 - DNA, 729 bp, Gossypium hirsutum
  Clone ID: GOSHI-09MAY01-C3766_1
tgttctccatattgtaattgctatcttggcaggtagttgtaaattccatagcttgccgtagaaatcctttagatcggtctgtattaaataaaaattaggatccaatcgaacatcttgtaatagtttgtaggcactcctcactaaaaaatcaccagacccccccccccgccatactttaaaatcctcgtgaggtgtttctgccagcgggattcgtagaattttctgagcaacatcaactggaaagctatgattaattaagtcagttttccatgtcctgtttgtatcatcaattaaatctacaactaacttgacatcgttatcatttctggtaccccctctccctggatctaatcccggaacccaacaatcatcccatacggatattctggttcctcgtccgactctccagcacaacccgtcttgcagcaatcgcttagcatcctgacattcttccaggtaagtgaaggtaggttacccaaactagcattaagaaaatctgaatgcgggaagtatttatctttgagaacccttgctaataacgaatttggataaaaaagaattctccaaccttgctttgctaatagcgcaatattaaactggcaaagattacgaaatccgagacctcctctttcttttaaatggcaaagatttctccactcagtccaatgaattcctcttctgctaggactattttgccaccaaattctcgctgtaatgctttctaattct

SEQ ID NO: 15680 - DNA, 631 bp, Gossypium hirsutum
  unsure (1)..(631): unsure at all n locations
  Clone ID: LIB3543-047-Q6-K6-H2
cccagcgtccgcccagcgtccgcggacgcgtggggttcatgtatgaatttattccttgagttccaaataaaccacatgccacaacagtaaatcttacattgctcagaggtactcgttcntgaaaacccaggacaatacctaaagatgtgggtgatgtcttcttcccctcttccacatcgaggacatgccgcgtcattactcacccgtttatgttttaaattagctagagtagggatatagttctaagatattctccatattgtaattgctatgttggcaggcagttgtaaattccatagcttgccgtagaaatcctttagattagcctatattaaataaaaattaggatccaatcgagcatcttgtaatagtttgtaggcgccccttactgaaaaatcaccagactgctctcccttccatactttaaaatcctcgtgaggtgtttctgctggtggaattcgtagaattttctgagcaacatcaactggaaagatattctggttcctcatccgactctccaacacaacctgtcctgtaacaatcgcttagcagcccagacactcttccaggcgagggaactgaccagaaaacagtcgtgtgggtgcaaaaatagtattggatgacgtagctg

SEQ ID NO: 15681 - DNA, 343 bp, Gossypium hirsutum
  unsure (1)..(343): unsure at all n locations
  Clone ID: LIB3149-056-Q1-K1-B8
ctttcatcctcaacccttcgagttcagctatgtagtttcaaactntaagagatatactccctccctgtttctgttttctgttcatgtatgagattatgccttgagttccaaataaaccacatgccacaacagtaaatcttacatngctcagaggtactcgttctgaanacccaggacaatacctaaagatgtgggtgatgtcttcttcctctcttcacatcaggacatgccgcgtatactacccgttatgtttaaatactagagaggattagtctagaatctcatatgtatgcttgtngcagagtgtaatcatactcgcgaaatcttaatagcatataataaa

SEQ ID NO: 15682 - DNA, 745 bp, Gossypium hirsutum
  Clone ID: GOSHI-09MAY01-C3736_1
cccacgcgtccgcccacgcgtccgatctcctcaagagacagtacgagctcatcaaagcagacaatgatgcacttcaagctcacaacaaaaagcttcaagcagagataatggcactgaaaggcagagaacctagtgtttgcatcaatctgaataaagaaacagaaggttgttgcagcaaccgaagtgaaaacagctcggatgtgaagctggataacgacaggccgccgcccccggcggctacgattagcagaccagcaagaaccctgtttccaacaggactgttccaagcggcgtcgtcaaattcaagccacgatgatcatcatcaacctcctcaaatggttaaagaagagagcctcatcaccaacatgttctgcaccatcgaggaacaaaccgggttttggccatggcttgaacagcaacaacatttcaattgattcatcatttttcaagttcccgagggagagagaaatgtttgcttagctaaggttggatcatgcgagatgaaaatttttttccccaagtaaaattatattatttttctaagtaaattgcagtgcgggttggtttgcagcagcgctagcatgggccatgaaagaatagaaaggtgattctgtttagctacataataattctaattattgtttcatttttcttgcgttggaatcatgtcttttgtgtactttgagtgcattgaagagagaacccttgaaatgataatatatatatatatattttttctgatttc

SEQ ID NO: 15683 - DNA, 703 bp, Gossypium hirsutum
  Clone ID: GOSHI-09MAY01-C3696_1
tcgccgccaccgtccgaatcccggtcgcccacccgcccgctctactctcatcatcatcttcttcatcctacgactgctccaaatttgacaaccctaattcccttaaacggaaaacgcaaatttctctcttccccaaaacactcttctccttctccgttcctctgtttctcctctaaaaacaatccttccccttccggcgatagtgttcccagtaacttttgcatcattgagggaccggagactgttcaagattttgtgaagatgcagcttcaggaaattgaagataatataaagagcaggcgcaataagatctttctcctcatggaagaggtaaggagattacggatacaacagcggataaagaatgtgaaagttatcaatgagaatggcgaagaagaaacagatgagatgcctgacattccatcttcaattccttttctctctcatgtgacaccaaagacaatgaagcagctctacttcacaagcctggcatttatatctggaataattgtattcggaggccttattgcaccaacactggagctgaaattaggtctaggaggcacctcatatgaagatttcatatgcaacatgcatctaccattgcagttaagtcaggtcgatcctatcgtggcatcctttttagggggccctgggggctctttctgcctgatgctattgaagccacaatgttgaacaacag

SEQ ID NO: 15684 - DNA, 722 bp, Gossypium hirsutum
  Clone ID: GOSHI-09MAY01-C3196_1
cccacgcgtccgaaagttcgaaagggtgagagaagatggtttctctaggcttcagggcctctgggtattgcgggagattgtgtttcccatcataatgaagctgctaacagcattgtgtttaccttacgtattagcccgaggggtgtttcctgtactcggctacccattagtggttaactcagcagtctaccgatttgcatggctaggatgccttggcttcagcttcttgtgcttttgtgcaaagagattccatgtctggttcaccaacctccacaactccattagggacgacagataccttatcggtcggcgacttcataacttcggtgaagactcccaagagaagaaaagtgaagcagggactccctctgaagcaccgctggtttctaatatgaggggcactgaaataatccggcagctcgaccgtgatgctgatgtcgggttgagattgaggcatgttaattaaaaatgatgctaacgaaacacattaggaggggtttttttttttggaaagcttgtatgaatgcattgttaaaatataatttgacaagctgatatttcacaatgctgggtagtatgtggccaagaatggtgttaaaaacagtataattggctgcttaatcttgggcaccagtaaacacggctggtagggttcctcttcggatcttcagccattttgttgccttacaaattgttatttatttaaaaaaaaaaaaaaaaaa

SEQ ID NO: 15685 - DNA, 595 bp, Gossypium hirsutum
  Clone ID: GOSHI-09MAY01-C3146_1
ggaacacaaagcaggagagaaaaaaggagtcagatggaggtggaacgagtccaagccattgtttcttcatctctagctaaagacaatatcccactagagtttgttcgacccgaagatgaacaacctgcaattacaacatttcatggtctcatccctgacatccctgttatcgatttcaaccaccctgatcaggatcatatcatccatttgattgccaacgctagcagggattgggggatattccaggttgtgaaccacgggataccctttcatctaattcaaaaactgcaacaagttggaaaggagttctttgatctccctcaggaagagaaagaagtgtatgctaagccacccggtgcactcacccttgaaggctatggaagcaagatcgggaaagatgttaatggaaagaagaactgggctgatcacctttttcataagatatggcctgcttcatgcattaaccaccagttttggcccaaaaatcctccttcttacagaccagtgaacgaggagtatgcacaggaggtgaggaaagtggtggataaactgttcgaatggctgtcaatggggctagggcttgaaacaaatgttt

SEQ ID NO: 15686 - DNA, 577 bp, Gossypium hirsutum
  Clone ID: AW561918.1
ctcaggtttggaccatgatgaaaacggttgttccagaagtaaaaacagtacactgttttctatgtaagaacacaaagagagaaagaggagagggagcaagaagctaacatctccgatacgcctaaaagggataatgaattattagaacaagttttagaaagaggggaaactaaaatccattgcttgtcctctcaactgaacctttttggtgtgatttcctggtttcgccaacatgatggtttgttctcccatcagcacatgtgttaagaatgttgtccacttgagcggacggatgagcagcagtctccgcggcatcatttcctgcggatcatccagttcctgctgctattgtttatactctggaaccaaggtgaaatatactggtctttctgtatccaatacaacgtcttttggctgccaagacttccaagcaagctgcttccgctcatctaggcgaagtggcaaattccagactctagcaattaacgaatcaattagtaataaagaaaaactgaaaagacagcttgaaatttcttgggccggtcaaagtatgaaaatgaggcttttgctgcccaac

SEQ ID NO: 15687 - DNA, 547 bp, Gossypium hirsutum
  Clone ID: LIB3583-016-P1-K1-B10
caggtaattctttctttcctgatgattcttttctctttccataatccaaccctttaaccctttcggttgagctactcttataatccttccctttttcgcccctattttcttccattttctttccttttcttaaactatcattttccattttctcatcccatcaggtttcgccaacatgatggtttgttctcccatcagcacatgtgttaagaatgttgtccatttgaggggacggatgagcagcagtctccgcggcatcatttcctgcggaccatccagttcctgctgctattgtttatactctggaaccaaggtgaaatatactggtctttctgtttccaatacaacgtctgttggctgccaagaattccaagcaggctacttccgctcatctaggcgaagtggaaaattccagactctaacaattaacgaatcaattagtaataaagaaaaacttaaaagacagcttgaaatttcttgggccggtcaaagtatgaaaatgcggcttttgctgtccaaacatggaacatttcaaaaattcaaatgc

SEQ ID NO: 15688 - DNA, 697 bp, Gossypium hirsutum
  Clone ID: GOSHI-09MAY01-C3166_1
aaacactcctcttaaattcaacatttgatttcatcgcccactgtcgatttctaaaaccctaaaccctaattagtttaaagtccccatcaatcaaaaaagaaagaaagaagtcaaatcaaaaactctaataaaaatgtcttccattgttcttagatctcgaacaatttcaaataatttcagttcaaagattatttctcaaaggggtttatgttcaggagtggtttcttcttcttcggatccttctaaaggaacaacaatttcttcacaatccattctctccgatcagtcgacacctcctcctctggcgccggaagttgccccacaggtttcgggagggaaaatttggagctttgtcaagtacggactcattgcaggtgttactggaactactggctatgctggttatctctcttataagtgttcatgtgaggaagtagatcataaagcaaaggcattgcgggctgcagcgagttatactcctagtgaagatgcttctgctattgataaatatggaggcttgctctactctgctgcaatgacagttccggctaaagcacttgaatcttatttggatctcaggaggttagtggaagagcatttgctggaatatactgaaccaacttcagataagcttcttcctgatttgcatcctctagaacagcatgtttttactcttgtcctagatctgaacgagaca

SEQ ID NO: 15689 - DNA, 495 bp, Gossypium hirsutum
  Clone ID: GOSHI-09MAY01-C3116_1
cccacgcgtccgggctcgtcgccgctctggggattcattgcctccgaagactcccaatcttcgccccaactctgatggctgcggagtgagcaaaaatatggccctcaggtacttggccagcctagaggtacggaggtggccgtacggaggcatgcgtggcgtgcgaaggcatcacgcgcgtgaggagtggctcgaaggggagcctatgcgtggcaacggcggctgaagggttccagaaaccctaatgatttctggaatactttttcaaaataggctaattgggctgaatcgggttttgggttaggtgttgggccactgtaactgggccaatcagatttagtgttcggtcatgggcatttgggctagttgggtttgggtagtggatttgggctaattaggtttgggtagtggtttttgggccattaggcctgctgtaaaaaaatggactgtattattattttttggactgtaatttttaatttttaattttgggtt

SEQ ID NO: 15690 - DNA, 668 bp, Gossypium hirsutum
  Clone ID: LIB3582-057-P1-K1-B11
ccagcgttcttcccgcgtccgtgcctacaaggctctcaatcttcgccccaactccgatggctgtggagtgagcaaaaatccggccctcaggtatgcccctcttcccttttgtttccccttttctcctttaacagatgactaatgtatgtaaaaacaaaaagaaagaaggaaaacgatctgcgtaaaaagaaaagataaccgaaaatcaccttttggaactttttttgatttctgtattccgaaaaatgtgtgtccctccatttacagtgttcgaatggcttctttaaagccccatttatagaaaataaaaaaaaatcaaataaaaaaatgctattgtttttctatttgttgctgcttccgtgtgttcgcatgtatttgcaggcatcacgcgtgtgaggagtggctcgaaggggagcccgtgcgtggcagcggcggctgaagggttccagaaaccctagtgatttctggaatactttttcaaaatgggctaattgggctgaatcggattttgggttaggtgtcgggccactgtaactgggccaatcagatttagtgttcggtcatgagcatttgggctaattgggtttgggtagtaggatttgcgctaattaggcctgctgtaaaaatggactgtattattattttttgagactttaatatttaatttt

SEQ ID NO: 15691 - DNA, 977 bp, Gossypium hirsutum
  Clone ID: GOSHI-09MAY01-C3136_1
ccgggttgacccagcgtttttcttcatcagaagcgagatgatgaggggggagatgaagaagaagaagagatgatgaaggagaagaagaggaagaagaagaagaagtgaagcccaaaaagaagacactcctaagggaagataagaactctgaaggcttaaaaaacggaaaataccccacgcggccgcagagatgcctagcgaggaagagaagcaagcatgcagaaagaaattcagatgataatagcaatgaagaagacagtgggagtgtctctgatgatggtcgctctcaatcttcttctgcaaaggcggtgaagagaaaagaaagcttctgctccagtgtatgggaaacgtgtggaacatctaaagtcggttatcaagtcatgtgggatgagtgttcctccctcgatctacaagagggtcaaacaggtccctgagaataaacgtgaagcccaattaattaaggaactagaggaggttctttccaaagaaggattatctgcaaagccttcagaaaaagaaatcaaggacgtgaggaagagaaaagaaagagcgagagagttagaagggattgacatgagtaatattgtgtcaagttcacgtagaaggtctacaaccagttttgttcctccaccaaagcctaaaataccagatatgagtgatgatgatgaaagtgaagaaagtgatgaggatgatggcgatgatgatgaagataatgatgatgaaaaagctggtgatgatggcaacagccaaagtgaagaatcagaagaagaagaagatggtgacagcgattgaatcttggacgagtttaaacttgcaaggcagtggcttgctcatgggctgttagattatgatgctatattatgtatctgagtttagttttctactgatattttgtagtgtacttggtgtgttgtttagtccttgatagaaaaacattgcttcaatattttttattaggatgtcttatattgttgatt

SEQ ID NO: 15692 - DNA, 444 bp, Gossypium hirsutum
  Clone ID: GOSHI-09MAY01-C3096_7
ttaagcaaaaataaaagtgcccatataagccatggcctccataacgtagaaatcacatcaaacgtgctactttattattattctagtagaaataggttttcataatttattacataaagcctaacaccaagtaggtgatagagttatacaagtacggtacggagcctaagcgtacataatattggatacacggtataaggatcatggacgaggcttgtgtggctcgggatgatgacctggaccacctggtcctggcggtggcgcatgggggcctggtccaggaggaggagcatggcctggaggaggatgatcagcatgtggcggacctggaggcggagcatggggttccggatgtgggtggtggggatggtgaggatggtgggggtctggtggtggtggattatgcattttttctcttcttttcaaatttccccgtcccctggg

SEQ ID NO: 15693 - DNA, 1291 bp, Gossypium hirsutum
  Clone ID: GOSHI-09MAY01-C3096_6
cccacgcgtccgcccacgcgtccggtttaatataaaaggggaaaggggtgcactcggcagaggaagtttggagaggaagaaaaaaaaactctgatacagaaaaaataatcttgtaaaattgacgaagatggtgttggcaaacaaggaaatggtggtctactgcttcgacactttgatcgcccattataacagcgaggaggctgctccgcccgctttcgatgagggccaacacccattgtttgtcacttggaagaaggttgtgaatggtggggagcctcgtctacgaggatgtatcggcacacttgaagcttgtcagttgattaatgggtttagggactatgctctgacgagtgctttgagggaccgcaggttccctcctattcaagctaaagaactgcctaacttagaatgtacagtttctattctgactgattatgaaacagctaataactaccttgattgggaggtaggaaagcatggcataattattgagtttgttgatgattataatacaaggcgaagtgccacatatttacctgaggtgccggcacatgaaggttggactagagtggaggcaattgactcacttatccggaaggcaggcttcagtggccccataaccgagtcgctcaggaagcatataaaactgacccgttaccaaagcacattatttaccatgcactacagtgactatgcctcccatgttaaggcaaccaggggggcagcgcctactattgctggcgctaagctcggaaaccactgattcttccaacagctttttaccagaaaagaaggtaaagctgctttggctaaaatataaggacattatattaaaacaaaagaaaaatgggtggaataggttcgattgtgttccgacccagttgttttagtaattacaagacacctttcaaataacattcttcaaattcatttgattttgaagaaagaaaccaaaagaaaaaaaaaagaaaagaagaagcaatgcctgatgtaaactcaggcatacaagtttgtgtttgctttcatttagacattcatattcctgcaacttgtgggaaacctgtttgctgtaagacaaatctcaatttgacctcgaaatggttctgggaaactatgtatgttcccagcacgacattgtttgtgccttttggttttagttaaatttactttttgcaataaaaaaaaaaataacaaaaaaaaaaaaaataaaaataaaataaaaaataaaaaaaaataaattatttaaaacttatctttttaatttttaaactatttaaaaatttaaaggggg

SEQ ID NO: 15694 - DNA, 444 bp, Gossypium hirsutum
  Clone ID: GOSHI-09MAY01-C3096_5
taagacaaattaatcctcatgctcatgacaaattaagcaaaaataaaagtgcccatttaagccatggcctccataacgtagaaattacatctttattattattatagtagaaataggttttcttaatttattacataagtacggtacccagcctaagcttacataatattgtatacacggtataaggatcatggacgaggcttgtgtggctcgggatgatgacctggaccacctggtcctggcggtggcgcatgggggcctggcccaggaggaggagcatggcctggaggaggatgatcagcatgtggcggacctggaggcggagcatggggttgcggatgtgggtggtggggatgatgaggatggtgggggtctggtggtggtggattatgcattttttctcttcttttcaaatttcacccacgcgtccgcggacgcgtggga

SEQ ID NO: 15695 - DNA, 1990 bp, Gossypium hirsutum
  Clone ID: GOSHI-09MAY01-C3096_1
atgagactgagttcatttatgggcctacggtaatccagggaacacgactctccaccgcttatcaccaaatccttatctttaattcccttcctcacttgttgtcttgttgctccactgtgcacggtttccatatcttttctctcctccattccccaataatttctttccctttttaatgttcttcttctcccccattctcactcccttttagcttcaatttcgtgggttctttggtttacttttcaagggtttctctcttcaaaaaaaccctcgagaaatctatgcgcttaacgcttacttttttattcattcgaggggttcttttccttctcttcttcttgttgttttagagatgggtttggtgtctgttttttgggagattttaaagaaacccacaattggagatgtggtgagggagttgctgatttttatagctcctttatgggttgctgtaattgttggggttttagttggttgggcatggaagccgaagtgggcaaatataggcagggagatgttcatggattgttctggttctaagaattcggctcctgcagaatcttctgagtcttcttccagtggttttggttcccttccgagcttgaatttgatcaagtttcagttgccgagtgctatctcttggatttcagatgacgggcctcaaaaagattctttctttttgtcacctactcttcattccaattgcagttcatcacagaacgagaaggaaaaactgggttttctgacagatgatgatttagagcatttatataaattagttgaagaaaaagatggaggtcctgcttggattcacatgatggataagtccaccccaactatgggatatcaggcttggcaaagagatcttgagattggtcctacacaatatcgtagccggactgttttcgatgatgccactcctgagatggtgagggatttcttttgggacgatgaattccgatcaaaattgaagtgggatgaaatgcttcttagtgccgaaactctcgagtcgtctcccactgatggcaccatgatggtccagtgggttcgaaagtttcccttcttctgcagtgacagagaatacttgataggtcgtcggatttggtcgtgtggtcggacatattactgtgttacaaagggagtaccatatccctctattcctagaaaaaccaaacctaggcgcgttgatttatactattcaagttggtgcattcgtgcagctgaatcaaggaaaggggatggccagctgactgcgtgcgaggtattactttttcaccatgaaaatatgggtataccatgggaaattgcaaagcttggggtcaagctaggcatgtggggaactgtcaggaagattgaccctggcttacgtgcatatcaaaccgaaagagcatcgggagcgcccctttctcattcagcttccatggctcaaataaacaccaaagtaactcaagactatctgacatccttggaaagcaatagtaatgattcatcagagcttgaaacacacaattcgtctgagaaaccagggaagaacaacattcccaaacttgtagttgttggtggggctatcgcggttgcatgtattctagatcgagggctcttaaccaaagctgttatattcggagtagctcgaaggtttgcaaaaatcggaagaaggttgtaatcctgaatatttttgtgggtcaatcgaaggaaaccgcacccaccagcaaagcagattgccattgcaatgaagtgagatgttggggatggatgaatcttctcacttagccgcgtttaaaaggttggaagatggaaagattatattagtttttgcaatatttgggccatataggaagttagaattgggcacaagagaatgggatcagatagttggattttttaaatggccatgtcgaaaacagatcttaaaaccgaaactgagttccttttcttgttcagtggctcttctatttcaatatatatactatttatattaaaaaaaaacaca

SEQ ID NO: 15696 - DNA, 568 bp, Gossypium hirsutum
  Clone ID: LIB3825-018-Q1-N6-A5
aatagataaacggaattgtttaataaataaatgaaattgttatagaaatggttgttgaaattaatctcccacaaataataccactttttactaaataactccaaataatttaatcgaatttgagctttcaaacctcaaaatttgggtgaaaagcggggaattaatgaactcaacctcagtgaaattaatcaatggatatggatgaccatattccactcggcactgcagtcttcaaaacataaatatttgcagagggaaacaatgctgggcttgccaacactggctgtttatcatcatccactcaaaatcttttaaacgcggctaagtgagaagattcatccatccccaacatctcacttcattgcaatggcaatctgctttgctggtgggtgcggtttccttcgattgacccacaaaaatattcaggattacaaccttcttccgatttttgcaaaccttcgagctactccgaatataacagctttggttaagagccctcgatctagaatacatgcaaccgcgatagccccaccaacaactacaagtttgggaatgttgttcttccctg

SEQ ID NO: 15697 - DNA, 570 bp, Gossypium hirsutum
  Clone ID: LIB3543-010-Q1-K6-H4
gaacatattggatctctcacgactacatataatgtgaaacctggacattatattcgctatgatgaccactccctagctatggtgagggatttcttttgggacgacgaattccgaccaaaattgaagtgggatgaattgctttttagtgccgaaactctctagtcgtgtcccactgatggcaccatgatggtccagatgggtccgaaagacaaccttcttctgcagtgacagaaaatacttgataagccaacctatttgcttcgtgtggatccgacatattactgtgctacaaaggcagtaccatatacctctattgctagaaaaaccaaacctaggcacgtagatctatactattcaagaaggagcattctaccatctgaatcaacgaaaggggatggccagctgactgtatgcgaagcattactttatcaccatgaaaatatacgtgtaccatgaggaaattgcagagcttggagtcaagctatgcatgtggggaactgttaggaagattgacacctggcttacgtgcatatctaaccgaaagagctcagcagcgcccctttctcattc

SEQ ID NO: 15698 - DNA, 428 bp, Gossypium hirsutum
  unsure (1)..(428): unsure at all n locations
  Clone ID: LIB3493-041-P1-M1-F4
ccgatcaaaattgaagtgggatgaaatgcttcttagtgccgaaactctcgagtcgtctcccactgacggcaccatggtggtccagtgggttcnaaagttttcctttttttgtagtgacagagaatacttgataggtcgtcggttttggtcattttgtcggtcttatatatgtgtttcaaagtgttgtactatatttacttttttttttataaactatattaattcttgtgtgtttttattatattatttttttatattttgtaaatctttttcttaattgttatccttttttcgacttatttattttaattttgtttacattactatattatttttgattaatttttattttttttttgtatatttttttttttatatttatttcatttttataaattttttttttatattttttctaatatttttct

SEQ ID NO: 15699 - DNA, 388 bp, Gossypium hirsutum
  Clone ID: LIB3146-001-P1-K2-C10
ggccgccctttttttttttttttttacatcatacgtgctactttattattattctagtagagggaggttttcataatttattacataaagcctaacaccaagtaggtgatagagttatacaagtacggtacggagcctaagcgtacataatattggatacacggtataaggatcatggacgaggcttgtgtggctcgggatgatgacctggaccacctggtcctggcggtggcgcatgggggcctggtccaggaggaggagcatggcctggaggaggatgatcagcatgtggcggacctctttttcaccatgaaaatatgggtataccatgggaaattgcaaagcttggggtcaagctaggcatgtggggaactgttaggaagattga

SEQ ID NO: 15700 - DNA, 374 bp, Gossypium hirsutum
  Clone ID: LIB3146-025-Q1-K2-E3
aacaaattgagaaagagaaagctcaaggcatacacctatctgtcctcagcattctcacgatgcccagcacccacatccggaaccccatgctctcgccttcaggtccgccacatgctgatcatactactccaggccatgctccttcttctggaccaggcccccatgcgccaccgccaggaccaggtggtccaggtcatcattccgagccacacaagcgctcgccatgatccttataccgtgtatccaatattatgtacgcttaggctccgtacccgacttgtataactctatcacctacttggtgttaggctttatgtaataaattatgaaaacctatttctactagaataataataaagtagcacgtttgatgt

SEQ ID NO: 15701 - DNA, 496 bp, Gossypium hirsutum
  unsure (1)..(496): unsure at all n locations
  Clone ID: LIB3825-031-Q6-K6-E6
ccccgcgtccggcctgntgtaaactcaggcatacaagtttgtgtttgctttcatttagacattcatattcctgcaacttgtgggaaacctgtttgctgtaagacaaatctcaatttgacctcgaaaggttctgggaaatatgtatgttcccagcacgacaatgtttgtgtcttttggttttagttaaattaactttatgcaaaaaaaaaaaaaaaaaaaaaaaaaaaaaaaaaaaaaaaaaaaaaaaaaaaaaaaaaaaaaaaaaaaaaaaaaaaaaaaaaaaaaaaaaaaaaaaaaaaaaaaaaaaaaaaaaaaaaaaaaaaaaaaaaaaaaaaaaaaaaaaaaaaaaaaaaaaaaaaaaaaaaangggggggggggtttaaaaaaaaaaaaaatttataagggggggtttaaaaaaaataaatttttttttttgggggaaaaaaaaaaaaaaaaaagggggggggtttttaaaaaaggggggaggggggaaaaa

SEQ ID NO: 15702 - DNA, 535 bp, Gossypium hirsutum
  Clone ID: LIB3582-015-P1-K1-G9
agaaaaaaaaactctgatacagaaaaaataatcttgtaaaattgacgaagatggtgttggcaaacaaggaaatggtggtctactgcttcgacactttgatcgcccattataacagcgaggaggctgctccgcccgctttcgatgagggccaacacccattgtttgtcacttggaagaaggttgtgaatggtggggagcctcgtctacgaggatgtatcggcacacttgaagcttgtcagttgattaatgggtttagggactatgctctgacgaggtattaagaccaaagtgaaaaacgtgtaatttggaatttaaattctctcgttctctctttggacatgtatgtgtacaacccaggtaggtgagatatctacaatgagtccaagatgatgtatatagtgagctcattcttaaaactctcatatttttctttatttttttgtcttttaaataaaatttaattcatttgtcctaaacatgaattataaatggtatatataagaaaagaaaatgattttcatatttggaaagtgca

SEQ ID NO: 15703 - DNA, 418 bp, Gossypium hirsutum
  Clone ID: LIB3197-040-Q1-M1-A6
agaaattacatctttattattattatagtagaaataggttttcttaatttattacataagtacggtacccagcctaagcttacataatattgtatacacggtataaggatcatggacgaggcttgtgtggctcgggatgatgacctggaccacctggtcctggcggtggcgcatgggggcctggcccaggaggaggagcatggcataattattgagtttgttgatgattataattcaaggcgaagtgccacatatttacctgaggtgccggcacatgaaggttggactagagtggaggcaattgactcacttattcggaaggcaggtttcagtggccccataacggagtcgctcaggaagcgtataaaactgacccgttaccaaagcacattatttaccatgcactacagtgactatg

SEQ ID NO: 15704 - DNA, 441 bp, Gossypium hirsutum
  Clone ID: GOSHI-09MAY01-C3056_5
cggaactcgactctctcgatcccacgcgtccgcccacgcgtccgccctcgcgtccggtgttttcccctgcacctccgatccactgaatcaattcccatacccaccggaaatggcagccgttacagcagctcagccgcgctcttccaagacagagtcgtacgttgacaacaagcgcaaagaagacatccgccaagccaacatcaaagcagctcgagccgttgccgacgccgttcgaactagcttaggtcctaaaggtatggacaaaatgatctcgaccgccaacggcgaagtcatcataaccaacgacggcgccactatcttgaacaagatggaagtcctccagcccgccgctaaaatgctcgtagacttgtctaaatcgcaagattctgctgccggtgacggtaccactaccgttgtcgtcatcgccggcgcccttcttaa

SEQ ID NO: 15705 - DNA, 642 bp, Gossypium hirsutum
  Clone ID: GOSHI-09MAY01-C3056_4
ttcacgcgtccgcgagaggagtttacatgatgctttgtgtgtggttaggtgtttggttagcaagaggtttttgattgccggtggcggtgctccggagattgaattgtccaggcagcttggtgcttggtctaaggtgatgcatggtatggagggctattgtgcgaggtcatttgctgaagcactggaagttattccttacacattggctgaaaatgcccggttgaaccctattgctattgtgactgagctgaggaatcgacatgctcaaggagagatcaatgctgcgatcaatgtgaggaaaggacagatgactaatatcttggaggagaatgtagtgcagcctttgcttgtaagcacgagtgcaattacactggctacagagtgtgtgaggatgattttgaagattgatgatatcgttaatgttaggtaatttcatgctctggagatgatatgtgtttctctagttatcttttgcatctgttggctatttgaattagtagttatgtttcattttagactcgactatggttagaattatgaaatggcaatctactgccaaatatttgctttcatcgaggatattatatggtggctttttcttgaaaaaaaaaaaaaaaaaaaaaaaaaaaataaaaaaataaa

SEQ ID NO: 15706 - DNA, 1545 bp, Gossypium hirsutum
  Clone ID: GOSHI-09MAY01-C3056_1
ccccgcgtccgcggtatccaccccactgttatatccgattctctccacaggcttcgattaaagccgtcgatgtcctcaccgccatggccgtccctctcgagctctccgatcgcgaatcgttgatcaaatccgccagtactccctcgcgcccccccgcgcgtccccggtcctcaacacttcttgccccgcttgccgttgattccgttctctctgtcgttgatccagcaaagccggatatggttgatttaagagacatcaagattgtgaaaaagctaggggggaccgtggacgatacgcagttggttaaagggctggtcttcgataagaaagcaagccatgcagctggaggaccgaccagaatggagaatgcaaaaattgcggtaattcagtttcagatttcccctcctaaaactgatattgaacagagtattgtagtttctgattatactcaaatggataggatattgaaagaggaaaggaattatattttgggtatgattaagaagattaaagccactggttgtaatgttttgttgatccaaaagagtattctgagagatgcagtcacggatttgtcattgcattatttggccaaggctaagattatggttgttaaggatgttgagagggaagatattgagtttattaccaagactttgaattgtttgcctattgctaatattgagcactttcgagtggagaagttggggcacgcagatcttgttgaggaggtttcactcggggatggaaagattgttaaggttactgggatcaaggatatgggaagaacaactactgttttagttaggggttcgaatcagttggtcctcgacgaagctgagaggagtttacacgatgccttatgtgtggtcaggtgtttagtgagtaaaaggtttttgattgcaggtggcggtgctccggagattgaattgtcgaggcagcttggtgcttggtctaaggtgttgcatgggatggagggctattgtgtgaggtcgtttgctgaggcacttgaagttattccttacacgttggccgagaatgctgggttgaaccgtattgctattgtgactgagctgaggaatcgacatgctcaaggagagatcaatgctgggatcaatgtgaggaaaggacagattactaatatcttggaggagaatgtagtgcagcctttgcttgtaagcacaagtgcaattacactggcaacggagtgtgtgagggtgattttgaagattgatgatattgttaatgtgaggtagttttctgcattggatgatgaaatgtggtcttgttatccaatttagtgcttttgtttcaaatttctgaattggctatctactgccaaatatttgcttgctttgaagattgatgatgttgctaaatgtcaggtagttttctgcattagacgatgaaatgtgttcttgttatctgatttagtgcttttgtttccttattgttttgactatgttttaaacttctgaattggctatttgctgcccttgctttcctcgcggtcctcttgctctttttcttaggttttgtttgtct

SEQ ID NO: 15707 - DNA, 650 bp, Gossypium hirsutum
  unsure (1)..(650): unsure at all n locations
  Clone ID: LIB3543-014-Q1-K6-F4
ccanaacccactctcttcctattttttccctcgcgtattttctagggttttccaccgatccaccctatcatttcccaatccaacgcttcctcttgaaatggctgccgtgactgcagctcagccgcgctcttccaagaccgagtcctacgtggacaacaagcgcaaagaagacatccgccatgccaacatcaacgctgcccgagctgtggctgacgccgtccgaaccagcttaggtcccaaaggtatggacaaaatgatctcaaccgccaacggcgaagtcatcataaccaacgacggcgccaccattttaaacaagatggaagttctacaacccgccgctaaaatgctcgtcgatctctccaaatctcaggactctgccgccggtgacggcaccactactgtcgtcgtcattgctggtgccctccttaagcaatgcctcacccttctctccaacggtatccaccccactgttatatccgattctctccacaaggcttcgattaaagccgtcgatgtcctcaccgccatggccgtccctctcgagctctccgatcgcgaatcgttgatcaaatccgccagtacttcgttgaacagcaaggttgttagccaatactcaacacttcttgccccgcttgccgttgattccgttc

SEQ ID NO: 15708 - DNA, 579 bp, Gossypium hirsutum
  Clone ID: LIB3584-046-P1-K2-B10
cggacgcgtgggcggacgcgtgggcggacgcgtgggcggacgcgtgggtgcagctggaggaccaaccagaatggagaacgcaaaaattgcggtaattcaatttcaaatttcccctcctaaaactgatattgaacagagtattgtagtttcagattatactcaaatggataggatattgaaagaggaaaggaattacattttgggtatgattaagaagatcaaggcaacgggttgtaatgttttgttgattcaaaagagtattttgagggatgctgttactgatttgtcattgcattatctggccaaagctaagattatggttattaaggacgttgagagggaggacattgagtttatcaccaagaccttgaattgtttgcctattgctaatattgagcattttcgagctgagaagttggggcatgctgatcttgtcgaggaggtttcacttggtgatgggaaaattgttgaagttactgggattaaggatatgggaaggactactactgttttgattcgtggttcaaatcagttagttatcgatgaagccgagaggagtttacatgatgctttgtgtgt

SEQ ID NO: 15709 - DNA, 303 bp, Gossypium hirsutum
  Clone ID: LIB3189-015-P1-K1-E3
cagaaccctctctctttctgtctttttccctcgcattttttctagggttgtccacctccaatccactgtatcatttcccagagctggggtgccccttgaaatggctgccgtgactgcagctcagccgcgctcttccaagaccgagtcctacgttgacaacaagcgcaaagaagacattctccaagccaacatcaaggctgcccgagctgtggctgactcctttcgaaccagcttatgacccaattgtatggacaaaattatctcaaccgccttctgctaattcttcaatattcaactatcttt

SEQ ID NO: 15710 - DNA, 912 bp, Gossypium hirsutum
  Clone ID: GOSHI-09MAY01-C3046_1
cacacttcaaattcataaacttatcttttattttacaactttgggtttgattttattctactgggagtgaaagttcaatgtcaagctccttgttcaaatgctaaaagtcaaatatttgtttaattgaaagttgaattcacggttttattccttgttatggattctttgagtttagattatgggtcggtttcgtcaccgatgtcagatagtgggagtggaaatggagcttctcgtccgccgaattttgccggtgaagacgtgatgttagcttcgtgttaccccaagaagcgagcgggaaggaagaaattccgggagactcgacacccggtgttccgaggagttcgccggaggaactccggaaaatgggtttgtgaagtaagggaaccttacaaaaagtcaaggatttggctcgggacttttccgacagaagagatggcggcgcgtgcccacgacgtggcggcgttagctctgagaggaaggttggcttgtttgaacttcgcggactctgcttggagactccctgtaccagcttctaccgatccccacgcctccccccacgcggccgcggaggcagcggaagttttccgacctgttgattccgccggagatagctcaaagacagctgaaaacacggcggtggagggaactaaagagtcggaagaagtgttttttttggacgaagaagcagtgtttgggagagaaaagtttttggcaaacatggcggcggggatgatgatgttttcgcctcacagtggatatgtaaaagatgaacaagaacttgagtttgtctattattgcgagcagttgtggtgctattctatttataggttaaatgtgttggactcaatagaaatttattaatccttttttttgtcgttattgtggagatctgtactaagatatctatttttt

SEQ ID NO: 15711 - DNA, 644 bp, Gossypium hirsutum
  Clone ID: GOSHI-09MAY01-C3066_1
ctaaaagcagagcaattcgagaaaccttttctcagttttcgttctcaaaaacttttggtggtggcccctttatctaaactcggtgaaatcaaataactcgttagagttaactccaccgaatgaactatgctgcgattaagaagcagaggcacctcctttctgggttcagtagatgttcccaatttgaagcgaaaagcccttaattcttgggctgctgttcaagatacctacttctccaccaaggatacatttgagaggcataaggtggtatttacagtaggaacttctatagcttcggttgctaccgcatggtttggatactctttacggcattatcatgaatcaaaagtagatcaaaggcttgaatcaattgagaacgccatgagaaacagtcatcatctcgagcatgcagacttcaaaaaacttgttgacccaggacattccagagctgctgcttgggttgccacggctggtactgctctcattgttggatatggcttgggttggcgaggtggaacatggtatgcaaatagaaagttcagaagggagcagttgaaactactagggcagataaaacctaaaaggtggcaattgctcggacaaatgaaacctcgaggttggcaatttcgtttccttagatcact

SEQ ID NO: 15712 - DNA, 585 bp, Gossypium hirsutum
  Clone ID: GOSHI-09MAY01-C3026_3
aatgcgtagaggaaaaccgctctacttgaacgaggaacgctatgctgctctaactaatatggttgcttctcatggccttgatcggagttcaaaggttcttggtcaaactaccattgataccttcttcgtggtttagtttggtttcatgtttaaggtgttagatatggctgattttgctgttctcttgtttcatattctgttgttagactcttaaatcgaagaacccctggcatgtagagtccaatgccttgacggacaagtcttcaattgaacatattcaggctttagatcaccatgttgatcgggaaccggtttcaaagaagacaacactatgagaaaacagtttggtttcttctataactttccatgttttttcttttcatctctgataagtagagccataaattctaatgtaaagcagttgaaatctttctcaagttaaagggcacatatatatataacatattgtaaatagttcaacattttcactggacagcagctctcatattgtgcttataaattcgctttggtctcacttcaaaaaaaaaaaaaaaaaacaaaaaaaaaaaaaagaacataatactc

SEQ ID NO: 15713 - DNA, 914 bp, Gossypium hirsutum
  Clone ID: GOSHI-09MAY01-C3026_2
ggaatttaaatcttctagtgaatttacattttccttgttgcaaagagttgtccagaacctgagcactacggattctcttcatgccctgcaaagatttagaggtcttcaactatttgcagagtctatatgttctgggcttgtctttgacaaccacagcaccacacataacaaagaagataagctccttcgtatcttgaagcatgatgataaggaagcattatatcctgacattcaattatggaatcgggcatctcatcctgttcttgctcgtgaccctttctcatcactgatttgggttgtcttctgtcttccctgtccatttatctcatgcgaggagtccttgtcatcccttgtgcatattttctatgttgtctctgtgattcaggctttaattgtatgttgtcagagacatggttgtaagaccgatggattagattcccataatcgcctagttactgatatctgtggcattcttggagaaactggttgtgctcattggtattttgtgtcaaatagtgtcgaccattcttgtgatattaaagatatgattcgaagattgagtttcccgtacttacggagatgtgcattgttgtggaagttgcttaaatcgtcttccccagcacctttctgcgaaagagatgatgtgtgggagtcctctcatgcaacaactgacatgatggatacagttgaaagtgcttcagtggagcttaatgaaatagaagaactagagaatatgtttaagattcctcctatagatgttgttcttgaagatgaagtcgtactatcatttgcattaaaatggtttcatcacttcaacaaggtatatgaggcctgcagtttccgaaatgttttctactgcaatcctgcggttccgttcaagttgatgagcctgcctcatgtttatcaagacttac

SEQ ID NO: 15714 - DNA, 1173 bp, Gossypium hirsutum
  Clone ID: GOSHI-09MAY01-C3026_1
ctcgtgccgcttatcttctgccacatcaccattctgtgatagggatactatttgggagtcatttcatgtgacaactgatatgatggatacaactgaaagtaattcagtggagctgaatgaagtacaagaactggagacaatgtttaagattcctcctatagatgttattcttgaggatgaactgtcacgatcatttgcattaaaatgggttcatcatttccaaaaggcatatgaagcctgcagtttccaaaatgttttctactgcaatcctgcggttccctttaagttgatgaccttgcctcatgcttatcaagacctattgcaacgttatgtaaagcagtgttgccctgactgcaaagctgcgcttgttgaacctgcattatgccttttgtgtggtagattgtgctctccaagttggaaatcatgctgcagggagagtggatgcatggttcatgcaatgaactgtggtgctggtattggtgtatttctgttgataaggagaacaacaatcctactgcaaagatgtgcgcgtcaagctccttggccttctccatatttggatgcatttggtgaagaggatattgaaatgcatagaggaaaaccactgtacttgaacgaggaacgctatgcagctctaacttacatggttgcttctcatggccttgatcggagttcgaaggttctaggccaaacaaccattggtacctttttcatggtttaacttggtttcatgatagtggtggtggttaaatctttggcttctttcatatgtcgccatcttctagcaacacatcaattgcatagaaactggttctacaaaactgaagcttgccagtatcctgaaattattgcaaactaaggatcttggacagtgatgtcggcatgtggcgtttttggcttgacatactggtaatcagatctgttcagtggattcaatgctttcccccccccccccttatttttctttggtaatttgtgtcttttacttttctgttaatgaatattgattcttagatcactgtgtttgacgggagaaatggtttggacgtagtatttttcctcattatgggcaaagtggagcaatagtttctgctgcttttatgggtttgtaacatggctgtgtacataatagcacattttctctcgagacaacaattcttcccttttctgttt

SEQ ID NO: 15715 - DNA, 448 bp, Gossypium hirsutum
  Clone ID: LIB3166-013-P1-K1-H12
gacccacgcgaacgaaaacgcgtacaggatctggacacaccgtgtatttagtcttgaatcctgaggcaagggaatgcattatatatcctgacccaccaccccgttattcatcaacgaaggaaccactgacgttctaatgtgtttacaatatagtgctacaacatgattggttactaaaggctagtctacttgagtttctgcatcattttctgatttcaggataactaaatgcgtagaggaaaacctctctacttgaacgaggaacgctatgccgctctaactaacatggttgcttctcatggccttgatcagagttcaaaggttcttggtcaaactaccattggtaccttcttcacggtttagtttggttacatgtttaaggtggtgggtgagagcatttttatccttatgtacctttcatattagcgaccataaggtctaagttaaa

SEQ ID NO: 15716 - DNA, 518 bp, Gossypium hirsutum
  Clone ID: LIB3584-015-P1-K1-C1
gcgcggaaaacatgctgcggtgagagtggatgcacagttcatgcaatgacatgcggtgctggtactggtgtatttcttttgataaggagaacaacaatcctgctacaaagatgtgcacaacaagctccttggccatctccatatttggatgcatttggtgaagaggatattgaaatgcatagaggaaaaccactgtacttgaatgaggaacgttatgctgctctgagctacatggttgcttctcatggccttgatcggagttcaaaggttcttggacaaactaccattggcgccttcttcatggtttagtttggtttcatgatcaagctggtgccggtgcatttgacccagacatcaagtgcatagaaaatggttctgcaaaactgaaggttaccagtatatccccaaatcactttccaaacttaggatcttggattttgatgttagcatgtggccattatgactggacttaactataatcagctgcgaatttgatacggcggatttagccattctct

SEQ ID NO: 15717 - DNA, 428 bp, Gossypium hirsutum
  Clone ID: uC-gsflmaxxa009h11b1
gcgtttacgcgtactcccactcgttcaccgacccgtgggcttagactgccttcatgtgtgaaccgaccttgttcattgtatttctttcctgccaggtggtagatctggctgattttgctgctctgttgtttcatattctgctgttagactcttaaatcgaagaacccctggcatgtctagtccaatgccttgacggacaagtcttcaattgaacatattcaggctttagatcaccatgttgatcgggaaccggtttcaaagaagacaacactatgagaaaacagtttggtttcttctataactttccatgttttttcttttcatctctgataagtagagccataaattctaatgtaaagcagttgaaatctttctcaagttcaagggcacatatatatatcacatattggaaatagttcaacattttc

SEQ ID NO: 15718 - DNA, 1231 bp, Gossypium hirsutum
  Clone ID: GOSHI-09MAY01-C3366_1
gtctctctctctcatagttgtctgcttctctctcttaccattttaacagctcattctctgcatcagcttttctttaacaatgcagacaagaactgtacaagtcaagaacctgtcagatctagctactgagagggagattcacgagttcttttctttctctggtgaaattgagcacattgatatcataagtgaagctagtcaatcaaagactgcatatgttacattcaaggatccgaaagctcttgaaatcgccttgttattatcgggggcaacaatcgttgacaagattgtgacgataatttctgttgaaaattatgtaccaaaacttgagattcatgaatcaagagcggcggacaacattgtgtctattgctcctgctgggcatagtgcatcaaatgatgagcagggcagaacgagtccacctggcagtggaagaatgtatgttaggagggcgcaggatgttgtttctagcatgttggcgaaaggttctgccatacgacaagatgcagttaacaaagctaaggcttttgatgagaaacatcaattgagagccagtgcatctgccaaggtcatgtcgtttgaccggagagtcgggctgactgagaaactgactgtaggaatctcagtggttaatgagaaagtaaaatcagtggatcaaaggttgcaggtgtcggataaaacaatggctgcaatatttgcagcagagaggaaaataaatgacacgggatcagccgtcaaatctagcaggtacgtaactgctgggacagcttggttaaatggtgcgttcagcaaagttgcaaaggctgggcaggttgccggaacaaaaaccaaagaaaagttcaacctagccatgtcaaacttgacagccaaggatggaattgcagtgtaagttggaaatttatggtgttaaggtcgcatcgcatcggatcgccttgttataatgtttcatcgggtggagattcttgtgatagagtgcacaaagttgtgttcagttttgggtattgtggtgtatttgatttgaggttttgtttacaatattattctttgattagtagagggtattgtgttgtaattttcaagccttttagatttggttttcagctcaggaaaagggaaaagaagctgtaattcatgttagcattctgcacgctcactcttttttccgccttaaaagacgagacctcaaattgcaggcttctgtttttttagattgatgtgaaattgaagctcg

SEQ ID NO: 15719 - DNA, 705 bp, Gossypium hirsutum
  Clone ID: GOSHI-09MAY01-C3246_2
accgacccaaaataactataactggattaaccgaccttccaaaatttttaaccgttaaccgaaccgactgttttaaaaaaaaattaatcgaaccgaaattttttcggttaaatcgatcggttaaccgaattaatagaaaattatatggtttttatttttagttaaaaattaaccgaattaaccgaattacccgaattgaatcactacataattaaaaacattacataagtcttgaaattaacacataattgaaatgtaagtctttaatattctccatttatatccatttcttctctccaaaaaatctccatttgcattaaacccttcaactcacgaaagctcacgaatttagggtaggctttgatgcattccaagaaaagtcattttcgatcttgtcaagatcttggatttgttctttaatctttttgatgtcttcttgtgataatgatttttgaatccaatattgagtacacacaagagcttgtacaattttaggagttaaagaactcctatattgatcaagcacacgtcctccggtgctaaatgtagactctgaagcaaccgtaaaaaccggtatagctaacacatctctggccatttttgaaagagtgggaaatctagtgctgttcactttctaccataataaaatatcaaaatcttcaacaaattcctcattagcctcagttagatatttatccaactcag

SEQ ID NO: 15720 - DNA, 400 bp, Gossypium hirsutum
  Clone ID: GOSHI-09MAY01-C3246_1
tttttcctccaccagaccatctatgaaccgaagaatctgtcgttgcaacccatatactatcatcatgcaatgccagctgcaaaatcggatgctcctttgtgcaaagcaaaagactctctagttgtcaagtctgtcaaatataaagaaagatctctaccaccactataaacatgactaaaggttggggtgcttgcaagtgcccaaacagaatccgtatgcacagcatatgaatgcacacagcgttgctgaccaagttcccatagcctgctcatagaatcagacgaccccgataaacaatatctggcctctgggtattagtcaattagtgtgctggacgagaaatggatagcaaaaatggtggattttcccgactgaaaatctgagattcagattgagaaat

SEQ ID NO: 15721 - DNA, 568 bp, Gossypium hirsutum
  Clone ID: uC-gsronu33B012b09b1
tccacgcgtccgcccacgcgtccgcccacgcgtccgtttttgatgagtataagcctccacttcattgtacttgtagccaatcgagtatgccaacacatgtttctctcgttgaaccacaacaaaaaatgaaaaggcgaatgtaggctttgtttaaaaaccatgagttggaaaatggtggtaaggataaaacatctgagttggataaatatctagctgaggctaatgaggaatttgttgaagattttgatattttgtggtggaaagtgaacaaccctagatttcccactctttcaaaaatggccaaagatgtgttagctataccagtttctaccgttgcttcagagtctgcatttagcaccaggggacgtgtgcttgataaatataggagttctttaactcctaaaattgtacaagctcttgggtggactcaagattggattcggaaatcattattgcaaggaagacatcaaaaagattggaggaacaaattcaagagcttgacaaggattgaaatgatataattattgctttattttaataggttcaattttttaccatatcactctta

SEQ ID NO: 15722 - DNA, 515 bp, Gossypium hirsutum
  Clone ID: LIB3583-016-P1-K1-H5
cggacgcgtgggtaaaaacattacataagtcttcgaatcactacataattaaaaacattacataagccttgaaaggactatataattaaaaacattacataagtcttaaaattaacacataattgaaaagtaagtctttaatattctccatttatatccatttcttctctccaaaaaatctccatttgcattaaaccattttcgatcttgtcaagatcttggatttgttcttcaatctttttgatgtcttcttgtgatgatgattttcgaatccaatcttgagtacacacaagagcttgtacaattttaggagttaaagaactcctatatggatcaagcacacgtcctccggtgctaaatgcagactctgaagcaatcgtaaaaatcggtatatctagcacttcatatgtcacgtccaatagattgtgttgatgagctctgtgaaattgatattcttttatgagatgctcagctaaaacgtaatgttgattttagtgttatggccatcaagatga

SEQ ID NO: 15723 - DNA, 401 bp, Gossypium hirsutum
  Clone ID: LIB3146-033-Q1-K1-E3
cggacgcgtgggaaagtcacaactcacaaatctgcaatcgggttctcaacttctcggttctgaatctgaatctcagattttcagacgggaaaatccaccatttttgctatccatttctcttcctgcacactaattgactaatacccagaggccaggtttaatgcaaatggagattttttggagagaagaaatggatataatataaatagagaatgttaaagacttacatttcaattatgtgttaatttcaagacttatgtaatatttttaattatgtagtgattcaaagacttatgtaatgtttttaattatgtagtgattcaaagacttatgtaattttttaattaaaaagaaaacggcctataaaaaaatacttgctgtaattattttacaatctagta

SEQ ID NO: 15724 - DNA, 382 bp, Gossypium hirsutum
  Clone ID: LIB3272-057-P1-N1-C8
agtaagtatacccttcaactcacgaaagctcatgaatttagggtaggctctgatgcattccaagaaaagtctaaacattaaatcaattaaataaataagagtgatatggtaaaaaaattgaaactattaaaataaaacaacaaatataccattttcaatcatgtcaagctattggatttgttcttcaatctttttgatgtcttcttgtgatgatgattttcgaatccaatcttgagtacacacaagagcttgtacaattttaggagttaaagaactcctatattgatcaagcacacgtcccccggtgctaaatgtagactctgaagcaaccgtagaaaccggtatagctaacacatctcttgccatttttgaaagaattgga

SEQ ID NO: 15725 - DNA, 1203 bp, Gossypium hirsutum
  Clone ID: GOSHI-09MAY01-C6_1
cggtccaccactatcacaactcacagcaatattatcacaagcagcagctaaaaaaaaaggcaagaagaaaaatggcgtcagagcaatatcaagctatgaggaatgcaccacaagaggaaaaagaagagcttgatgcaagggcaaagcaaggggagactgtggttcctggtgggactcgtgggaaaagcttggatgctcaaattaacctagctgaagggaggcacaaaggaggggaaacaaggaagcaacaactaggaacagaagggtaccaagaaatgggacgcaaaggtggtctgagcaactctgatatgtctggcggtgaacgtgcagctgatgaaggtgtcaccatcgatgaatccaagttcagaaccaaaaactaaatatcatctcccacgacagaaccctagctactctttttatatataaaccctaataatgtatgtttgttttaggttttaggaagaactgaaccagtttatatgtaacaaaacgctggacatgtttaagctttagcttggtgtctgtaatctaagctatagccctgttgacggtttgttttagtgttattaggactaaaccagtttacatgtaaaaactggacatgtttaaagcttagcttggtgtctgtaatctaagctggagcttagttttttactgtttgttttagtgttttaaatgaggactaaaccagtttatatgtaagaactgggcatgtttaaagcttagcttggtgtgtttctatatggacctagcgttttaccggttaatgatggagttaccattgctgaatctaagttcagcaccagaagctaaaatcatctaccccgaccctagctagtctttatatatatatggagctttgacaaaaccaatttacatgtaagaactggacatgtttaagcttataaacttggtgtctgcaatctaagctatagcccagtgttttaactgtttgttttagtgttctaaatgaggactaaaccagtttatatgtaagagttgggcatgtttaaagcttagcttggtgtgtttttattggactcttagccagagcctagtgttttaacttaaaaatatatggaacttttggtaaatgatcatttactattcgattttttttttgatttatggaaagatatggtgatttttaaaatcgaaataatactaattttaatttttaatatttatatattggtttaattt

SEQ ID NO: 15726 - DNA, 650 bp, Gossypium hirsutum
  Clone ID: GOSHI-09MAY01-C86_38
tcaataatttagtaccaccccaatgaccgatggatgcttgcctttcgaaccaacccataataaggaaaccactttcaatgaaaagaaaaaaaattgttatattgaagtgccaactatgtttaaaaattcatatgttaagtatatacctgccattgaggggccaagagcaacaacacaagccccggttagtgttgccaggtcaactatctgcaaaataagtcaaccagacttgaaaaatggaaatctgattatctatacaaaataagcaattgaaactaccaagtttacaactctaatcacaaatttacgatgtctaggccccggctttagtcttgccaggtcggctacctgggttgcaagcataatccgaagcatctgctagtgtaagcctaccttctgcatcagtgccattaacctcaattgtctttccatttgaagctgtgacaatatctccaggcctcataccctttccacttatcatgttttcacaagatgtttcgataaaccagcagaggtgaaccagcacgctaacgaggcaagcatgaaaaacaggagtaatatcataattcattatgtgatacaatggccatcatccgcgagtgcgatggcaccgacatgaaaaaaaataacatttaatcaaatgagtagaa

SEQ ID NO: 15727 - DNA, 549 bp, Gossypium hirsutum
  Clone ID: GOSHI-09MAY01-C86_32
gtatgtataacgcttttgtttttaagactggttatcttgaatgtaagaatattaaagtgcatccacatccaaacccttgacctgggcattgctctcagcatttttcagcaattctagaatgaatttggcagtttttacaggccatcaactttgtcagttagaatgcctgttctttgcataacctgtaagtccaacaccaccccacaagcgtataaagggtacggcctgtttctgaagcataacatccttgaaatatgtattatcgggcaagcacgttagcttcaatgctcttggcagactgtctaacattgtcagcaccactcctgtccaccttggttgggtcctttccggagaaagcaccgccaccatgggctccccagccaccataggtgtcaataatgatcttacgtccggtgagacctgcatcaccatgaggacctccgattataaatgtgacagatgtgttagaatgatagatagcagtagatttcagcatatcggcctgaaagtcattctcataataaaccatttacaaaatcccgatttaaa

SEQ ID NO: 15728 - DNA, 903 bp, Gossypium hirsutum
  Clone ID: GOSHI-09MAY01-C86_26
tgggaagagattgaacccccccccccccccaccttgtattatatagagaaagagtgaataccaacagcctagaattttaagcatcataatgtagtgaatgaaacaacatctgaatcccatgttgtggcttgagtgaaagacgtggtgcaggtgcgtgaacataggtaggggagacgggtgacagtgtagcgttgcagaatcatggaaagtgcagttttcgcttcagtgattgcaaagctcatgcctacgcaagatcgaggtcccaatccaaaaggcataaatgcagctgcattgtacttagtagcttttgcaatcccttcagcaaacctctctggcttgaaaagattaacatcatctccccataagtcaaggatcatggtgaagtgctatgattcgcatgtcgacctctgaatgtgtaggcaggacaagttttcctaattggacttctcttcctacttctcttatcacgccacttaaaggaggatagagccgtaaagtttcattgataatcatggtaatcgtgttggacaaaaagaaatccaaaaggcaatataaatggtcactgccggtcgcctggccggtcgcgtgggatagtttgcttaccgtctttaatttggccatcccttcagaatctgggttttgattaccaaagacctcaatcacctctgctcttgctttgtcttgccaatcggtgtgtattgctaaaagcagggttgcccatgcaagcaaggaattgactgtttcatgcccagcaaaataaaaagttttacactcatctaccaaatcttgtatcgaaagtctgtttttctcgtccgcctcatgataagcattaacaagtaatcccagaaaatcacagccgaaattatcagcttctccggtcactaccctcttttcccttttttc

SEQ ID NO: 15729 - DNA, 536 bp, Gossypium hirsutum
  Clone ID: GOSHI-09MAY01-C86_20
gaatctttaaaaccaaaattctcatgcattactgtgtcaataaagggcgcataaaatcagataaaccaatataaaattacaaatagcaaaggaaaaaaaatgaatggggcacatcatacgtagattagaaacattcaggggatggcttagatatagggtaagaaacaccaggattattcagcactgtggataaagtaagcagtgagcaggagggatgggcaaagcttggtttaagattgagactcgtcccacttgaggggcttcacaacttcccaggtgaagtcagggtcgtcccttccaaaatgtccataggcagctgtcttcaagaaccggttattgccacccctcttgaggtccaggttgtttgtgatcatgccaggcctaaagtcgaagttctccttcacaatttggagaatttccttgtctggaatctttccagttccctagctgtcaacgaagacagaccagggctccgacacaccaattgcataggagacttgcacgaggcaccttccggccaggccatttgctacaat

SEQ ID NO: 15730 - DNA, 690 bp, Gossypium hirsutum
  Clone ID: GOSHI-09MAY01-C86_19
aaaaaaaactaaaaagttgcacgcaagcggaaataagattggaaccccttaaaaggccccccccaattttttttttttaattaatccttttaagcgtccgcccctattatttttttttattttttttttttttttttgttttattgttttttttttttgacttcaagtgccattaatatattatagcaaaattctcaatacatttttgcaacacgacactgatacaggacacaaactcagaataaccaaaaaaaaaaaagaacaaataaagggagaaaatagaaaaaaaaaaaaagataatgaatagggcactatatgaatgagattagaagcattctggggatgaaaatagagtataggtgagcagcaaggcaatattattcagtactatggataagcaggcactgagacaggcagcagggctgaacttaagattggggcttgtcccacttgaggggcttcacaacttcccaggtgaagtctgggtcgtcccttccaaagtgtccgtaagcagctgtcttcaagaaccgaccattgccacctctcttgaggtccaggttgatggtgatcataccaggcctaaagtcgaagttctccttcacaatttggagtatttccttgtcaggaatctttccggttccgtaactgtccccaaagacagataagggctcaggcacaccaatagcatag

SEQ ID NO: 15731 - DNA, 617 bp, Gossypium hirsutum
  Clone ID: GOSHI-09MAY01-C86_17
ctaacctcagtaagacgagccccaagcttagttgcaaggacatggctaaggggcatgagttctggggtctcatcagtggcatacccaaacatatggccctggtcaccagctccaatttcttctgggcgcttggtgaagtggccatggacaccctgggcaatatcagggctctgttgctcaatattgaccaggaccttgcagttgtcagcatcaagacccacatcatcagaaacaaatccgatagagcggcatgtgtcacggacaatcttctcatagtctacattggctttggtggtaatctctccaaagaccatgaccatgttggtcttggtgcatgtttcacaggcaaccttgctgtcggggtcctgggcaaggcaagcgtccagcacagcatcagagatctggtcgcagagcttgtccgggtgaccctcgttcactgattcagatgtgaatagaaaggtctccattctaacgagcttattgtcacagcctttggaattattcactttcagaggggcaagaatttaagcctgtgacaaaaattactcgcggatctgagtattagctttagagagaaggaagagtgttgagcggaccagaactctaaagcagcgcga

SEQ ID NO: 15732 - DNA, 1419 bp, Gossypium hirsutum
  Clone ID: GOSHI-09MAY01-C86_15
gccaaaacatgaaatccccaaaccattttttatcgtttgggtgcaaaatacagtttcatccacattttattatatattactatttttggagaccaacagcctagaattttaagcatcataatggagggaatgaaacaacaactgcatcccatgttgtggcttgagtgtaagacgtggtgcaggtgcgtgaacataggtaggggagacggtgacagtgtagcgttgcagaatcatggaaagtgcagttttcgcttcagtgattgcaaagctcatgccaacgcaagatcgaggtcccaatccaaaaggcataaatgcagctgcattgtacttagtagcttttgcaatcccttcagcaaacctctctggtttgaaaagattaacatcatctccccataagtcaggatcatggtgaagtgctatgattcgcatgtcgacctctaaatgagtaggcaggacaagttttcctaattggacttctcttcctacttctcttatcacgccatttacaggaggatagagccgtaaagtttcattgataatcatggtaatcgtttttaatttggccatcccttcacaatttgggttttgattaccaaagacctcaatcacctctgctcttgctctgtcttgccaatcggtgtgtattgctaaaagcagagttgcccatgcaagcaaggaattgactgtttcttgcccagcaaaataaaaagttttacactcatctaccatatcttgaatcgaaagcctgttttcctggtccgcctcatgataagcatttacaagtaatcccagaaaatcacgaccgaagttatcagcttctccgttcactactctctctcccttttttttaacaatcctcatcacagaatcatgtatcatttgggcaattctttctgattcaatttcatcagcagatttccaaaacttgctgatgatgggaatctttgcttttaaaatatttctgcctgcaattactgtcaacttcatcagcatcgctcaaaatctttctccccttccaagtaactgctaccaaaggcggttctggatatcacttctgaagtcaataatctgaactcttggaacacttctatctctttgccctccttacttttccatttctcaagcatggtttcaacgctagcaactactgctggagtcatattttttaagctctccccatgaaaggcataattggccagtttcctttgccttgcccatttctcacgttcggttgaagcaagcccatcgcctattagcttgacgaagaaatatgaagtctttggctttcgaaaagctttgtcactgtttttaaggacctctttgaccagatctgggtctgtaatttgcagttgagctcgaattccattccaactaagaaaagtgctcccgtatttgttgatccaggagtaaacatgagac

SEQ ID NO: 15733 - DNA, 554 bp, Gossypium hirsutum
  Clone ID: GOSHI-09MAY01-C86_13
agagatcacaaccagtttccaatggcacccaaagccgagaagaagccagccgagaaaaagccagccgaggagaaaaaagccgagaaagtcccagctgagaaaaaaccaagagccgagaagaagctccctaaagaagcgggggacaagaagaagaagcgaagcaagaagagcatcgaaacctacaagatctacatcttcaaggtgctgaagcaagtccatcctgatatcggcatttccagcaaagccatgggtattatgaacagcttcatcagcgacatcttcgagaagctggctcaagaatcttcgaggctcgcacgctataacaagaagcccaccatcacctcccgtgagattcagactgccgtaagattggtcctgcctggggagttggccaagcatgctgtttcagaagggaccaaggcggttacaaagttcaccagttcttagtttccaaaaatctgggaaatatggttttgttgtaaaaatcagtagctttttgtgggtcttcctgtaatttgcggagcttaaatggaaatttaaccatattttgaatt

SEQ ID NO: 15734 - DNA, 1202 bp, Gossypium hirsutum
  Clone ID: GOSHI-09MAY01-C86_11
gaaaaaacttggttccataattttactttaaacaatctcaaaggatatatacacacacgtatatatgtatatatctagcttccctttccttccccccttaattaccaaatgttttattcatgaaatggatctcacggtacccaacaaacaaaggttttcaatccttctcaagttcttcatttaagaggagtttttcagcacccattccaccaaagttgagacgccaaagccggttgctacgcgcttcttttcattccagacagggccagccaagtcaatgtgcatccattgtactttttcatcaacgaactgtttcaagaacagagcagctgtgatagcaccacctggacgaccaccggtatttaccatatcagcaactcctgatttcatagactcccaatagctttcctctagtggcatcctccaaaatttctcaccactgatctctgaagcttcgaatacctcctttgcaagttcatcactaggtgtgaagacgcctgcaatcgacggtccaagagcgacaatacaagccccagttagtgttgcctggtcgactatcttctagacaccttggttgcaagcatataccaaagcatctgcgagtgtaagcctgccttctgcatcagtgttattaacctcaatagtctttccattagatgctgtgaggatatctccaggtctcatacccgttccacttatcatgttttcacaagatgcatcaatgtaatgatcctcaactccaggaggtttgatttgcccgagagctttcgctgcaccaataactgctgcagaacctcccatgtctatcttcatgacatccgcacgtgtgggaggtccagtcttgatattgtagccaccactgtcaaaagtcaatccttttccaactaatgctaacttggctttaataggtccactcgagggtttgtagcacaaatggatgaaataagggggattatcagatgctgcagcaactcccaggtaagatcccatcttcaactccttgcattgctctgcggtcaagatgtttgcagatataacatcgctgtacgaggaagcaattttcgaagcctcttctgctagtgcagcgggggtaagtacattggctggtgagttcacaagctctcttccaaatactatggcagaagaaacatcttcagcatacttgagctcctgaacacaaaggagcaactgcaaaagaaaat

SEQ ID NO: 15735 - DNA, 743 bp, Gossypium hirsutum
  Clone ID: GOSHI-09MAY01-C86_9
ctttctaaaattagagattaaattgtacaatcaatatatcctcaagaatcacaagacgttcgtacattcagagcaaattactatagacatcaatttatgcctcaaatttcattatcaagcatggtttcatcgctagcaactactgctggagtcaattttttaagctctccccatgataggcataattggccagtttcctttgccttgcccatttctcacgttcggttgaagcaagcccagtcgcctattagcctgtcgaagaaatatgaagtctttggctttcgaaaagctttttcactgtttttaaggacctctttgaccagatctgggtctgtaatttgcagttgagctcgaattccattccaactaagaaaagtgctcccgtatttgttgatccaggagtaaacatgaggcacgactctgggaaatatatcgtgtgtcaagcccataggtttggtagatgcttccatgagcatttgggcagcttctttgttgtttccatggataaattcataaggaggtcctctgattccttgtgaattcatgatgaactgtacccgttgaggtatccaccaatacttgtagaaaacattgagcaaagcaacgaagaggtagaggcataaaaaagctgtaagcaggattagaagttttcccatggtctccattttcttatgttcaccgatcagattttgcatctgttatggtaatctgggttttgcaaggtgacagtcaccacatttcgc

SEQ ID NO: 15736 - DNA, 2110 bp, Gossypium hirsutum
  Clone ID: GOSHI-09MAY01-C86_8
ggagaaggaaaagattattggtaaaaaagcttttatgtagttataacattgtaggaacaagctacaaaaagcaaaggaaaacagagcagtattccaacaacaagcttcttatttatcggacagatcttacagaacccaacaacctcgaacaggttgttctcctttttcggtctgccaccgtcacaacagagcatgttccaagctttcatttaagaagaagagttcttcagaacccattccaccaaagttgagatgccaaatccagttgccacatgcttcttatcattcaagacaggcccagccatgtcaatgtgcatccactttactttttcatcaacaaattgtttcaagaacagagctgcattgatagcaccgccttgacgaccgccggtatttaccatatcagcaactcctgatttcattgattcccaatagctttcctctaatggcatcctccaaagtttctcaccactggcctctgatgcttgaaataactcctttgctagatcatcattgggtgtgaagacgcctgcaattgagggtccaagagcaacaacacaagccccggttagtgttgccaggtcaactatcttctcaacaccttggttgcaagcataaaccaaagcatctgctagtgtaagcctaccttctgcatcagtgttattaacctcaattgtctttccatttgaagctgtgacaatatctccaggcctcataccctttccacttatcatgttttcacaagatgcaacaataaaatgaacctctactccagaaggtttgatttgtccaagggcttttgccgcaccaaaaacagctgccgaacctcccatgtctactttcatggtttcgatcgaggaaccaggtccagtcttgatattgtagccaccactgtcgaaagtcaatccttttccaactaatgctaacttggttttaacaggtccgcttggtggtttgtagcataaatgaataaaatgaggaggatttgcagatgctgcagcaactccgagataagatcccatcttcaattccctgcattgctcctcggtcaagatgtttgcagacagaacatcactgtacagtgaagcaatctttgaagcctctgcggctaatgcagcaggggtaagtacgttggctggtgaattcacaagctctcttccaaatattatagcacaagaaacaacttcagcatacttgatcttcttctctatctctggtccagttccaagaccaagaatatccagagatttaagcggacgcgtgggcggacgcgtgggcgctcatcgaacttccgatttgctttttgaaacgcaagaaagaagagaaatctcaatggcgccgaaagccgagaagaagcccgctgagaagaagcctgccgagaagccaacggaggagaaaaagtccaccgtcggcgagaaagccccagcggagaagaagccaaaggccggcaagaagcttcccaaggaaggtccaggggccggagataagaagaagaagaaagccaagaagagtgttgagacctacaagatctacatcttcaaggtcctgaagcaagtccatccagatatcggtatctcaagcaaagctatgggaatcatgaacagtttcatcaacgacatcttcgagaagctggctcaagaatcttcaagactggcaaggtataacaagaagcccaccatcacttccagggaaatccagacggctgttagacttgttcttcctggagaacttgccaaacacgccgtttccgaaggcaccaaagccgtgaccaaatttactagttcttgaatttgatggaatttgggaatttagggttagtgttttcccctccattttgtcagcgtagttttgatgactgtaagtacttgtgtcacttatggatttgaaaaggaagaccctttttcttttgggttatataaaattgctaatgtttgcctatattacgactgtctttatcaaggatgttgataaataaccacagcaccataaatataattaaatgagtatgcaaaagaattaatgattattacagttgcttctaagaaagaaaaagctggtggaaaatgctttactattgatcaacttgctttgagggcaccttttggtaaaa

SEQ ID NO: 15737 - DNA, 647 bp, Gossypium hirsutum
  Clone ID: GOSHI-09MAY01-C86_6
gcactttctaatctttaaaatcacaactagtttccaatggcacccaaagccgagaagaagccagcatgagaaaatagccagccgagggagaaaaaagccgagaaagccccagctggagaaaaacccaagagccgagaagaagctccctaaagaagcggggcacaagaagaagaagcgaagcaagaagagcatcgacacctacaagatctacatcttcaaggtgctgaagcaagtccctcctgatatcggcatttccggcaaagccatgggtattatgaacagcttcatcaacgacatcttcgagaagctggctcaagaatcttcgaggctcgcacgctataacaagaagcccaccatcacctcccgtgagatccagactgccgtaagattggtcctgcctggggagttggccaagcacgctgtttccgaagggactaaggctgttactaagttcactagttcttagtttccgtaagtctaaaatgtcaaagaattgtagttttgtataatttattttatttgagagttgcatttagttagtttaagatatatttttcatgcctttttgattagtagaaaaggttggtctcaaagaaatgaaaggtggattttattattaatattaaaccccatttggcccttacatt

SEQ ID NO: 15738 - DNA, 1547 bp, Gossypium hirsutum
  Clone ID: GOSHI-09MAY01-C86_5
aatttaaatccaggcggataacttttttttgttgctgcttgttaattccaatgccatcaatataagcaaaattctcactcagttttgcaacaccgacgctgataaaaagacacataaatcaaaacaagcatcgataaaagaagaaatagaaaatgaaaatgaaaaagggcattataagtatgagattagatatttccggtaggagctacgaaacatcgggattattcagcaccgcggatgagaaaagcacggggcagtacggacggggggacttcaagattgaggcttttcccatttgaggggcttcacaacttcccaggtgaagtcggggtcgtcccttccaaaatgtccataggcagctgtcttcaagaaccggccattgccacccctcttgaggtccaggtcgatggtgatcattccaggcctgaaatcaaagttctccttcacaatttggagaatttccttgtcaggaatctttccagttccgtagctgtttacgaagacagacaagggctcgggcacaccaatagcataggagacctgcacgaggcacctgcgtgcaagcccattagctacaatgctcttggcagcttgcctaacgatgtaagctccactcctgtccaccttggttgggtcctttccagagaaagcaccgccaccatgggctccccagccaccgtaagtgtcaatgatgatcttacgaccggtaagacctgcatcaccgtgaggaccaccaatgacaaagcggccagatgggttgaggtggaagattgtcttcccatcaagatacttttcaggaatgacaggcttgataacatgctctttgaggtcagcagcaatttcatcgtttgtaacagtctcatcatgctgggtggagatgaggacagtgtgaacacgaaccggaaccatggctccattatcgttgttgtactcaacagtaacctgggttttaccatcaggccttagccaagggcaagtcccattcttcctaacctcagtaagacgagccccaagcttagttgcgaggacatggcttaggggcataagttcaggggtctcattagtagcataaccaaacatgtggccctggtcaccggctccaatctcttcgggacgctttgtaaagtggccatggacaccctgggcaatatcaggactctgctgctcaatattaacaaggaccttgcagttatcagcatcaagacccacatcatcagaaacaaatccaatggagcggcatgtgtcacggacaatcttctcgtagtctacattggccttggtggtaatctctccaaacaccatgaccatgttagtcttggtgcatgtttcacaggcaaccttgctgtcagggtcctgagcgaggcaggcgtcaagcactgcatcagagatctggtcacagagcttgtcagggtgaccctcgtttactgactcagatgtgaatagaaaggtctccattctaagcctggaaagataatgccgaacggatctgagtctttagttgcgagagtgcttagctgaccagaattctaaagaagcggacgcgtggg

SEQ ID NO: 15739 - DNA, 595 bp, Gossypium hirsutum
  Clone ID: GOSHI-09MAY01-C86_4
cggtcgcactttcgaatcttcagaatccacaactagtttcaaatggcacccaaagccgagaagaagccagccgagaaaaagccagctgaggagaaaaaggccgagaaggccccagctgagaaaaaaccaagagccgagaagaagctccctaaagaagccggggacaagaagaagaagcgaagcaagaagagcattgaaacctacaagatctacatcttcaaggtgctgaagcaggtccatcctgatatcggcatttccagcaaagccatgggtattatgaacagcttcatcaacgacatcttcgagaagctggctcaagaatcttcgaggctcgcacgctataacaagaagcccaccatcacctcccgtgagattcagactgccgtaagattggtcctgcctggggagttggccaagcatgctgtttcagaagggaccaaggcggttacaaagttcaccagttcttagtttccaaaaatctaaaatacaaaaaaaaaactgggaaatatggttttgttgtaaaattcattagctttttgtaggccttcctggtattcgcggagcttaaatggaaatttaaccatattttgaattt

SEQ ID NO: 15740 - DNA, 1578 bp, Gossypium hirsutum
  Clone ID: GOSHI-09MAY01-C86_3
ccttttatagtaaagaaagaataagtagagaaaaaaaaaaatatctaccatattttgattaaggtagccaagaattccattaagcaatcataagaggaagattgtttacttccagtggcatcaatataagcaaaattctcatacatttttgcaacacgacattgacaggacacaattaaaggtgaaagagaacaaataagaaaatgaaaatgaaaatgaatggggggcatcatatgtatgagattagagacattcgaggacagccaaagctggattttaagactgaggcttttcccacttgaggggcttcacaccttcccaggtgaagtccgggtcgtcccttccaaagtgtccgtaggcagctgtcttcaaaaaccggccattgccacccctcttgagatccaggttgatggtgatcataccgggcctgaagtcgaagttctccttcacaatttggaggatttctttgtcaggaatctttccagttccatagctgtctacaaagacagacaagggctcaggcacaccaatagcataagagacctgcacgatgcaccttcgggcaagcccattagccacaatgctcttggcagcctgcctaacaatgtaagcaccactcctgtccaccttggtagggtcctttccagagaaagcaccgccaccatgggctccccagccaccataggtgtcaataatgatcttacgaccagtgagacctgcatcaccgtgaggaccaccaatgacaaagcggccagatgggttaaggtggaagattgttttctcatctaggtacttttcagggatgacaggcttgataacatgctctttgaggtcagcagcaatttcatcatttgtaacagtttcgtcatgttgggtggaaatgaggacagtgtgaacacgaacgggaaccatggcacccttgtcattgtagtactcaacagtaacctgggttttaccatcaggccttagccaggggcaggtgccattcttcctaacctcagtaagacgagccccaagcttagttgcaaggacatggctaaggggcatgagttctggggtctcatcagtggcatacccaaacatatggccctggtcaccagctccaatttcttctgggcgcttggtaaagtggccatggacaccctgggcaatatcagggctctgttgctcaatattgaccaggaccttgcagttgtcagcatcaagacccacatcatcagaaacaaatccgatagagcggcatgtgtcacggacaatcttctcatagtctacattggctttggtggtaatctctccaaagaccatgaccatgttggtcttggtgcatgtttcacaggcaaccttgctgtcggggtcctgggcaaggcaagcatccagcacagcatcagagatctggtcgcagagcttgtccgggtgaccctcgttcactgattcagatgtgaatagaaaggtctccattctaacgagctgtgacaaaaattactcgcggatctgagtattagatttagagagaaggaagagtgttgagcagaccagaactctaaagcagcggaactgcgtccgcccacgcgtccgccc

SEQ ID NO: 15741 - DNA, 1548 bp, Gossypium hirsutum
  Clone ID: GOSHI-09MAY01-C86_2
acttcaagtgccattaatatattatagcaaaattctcatacatttttgcaatacgacactgatacaggacacaaactcagaataaccaaaaaaaaaaaatcaagggagaaaaaaggataatgattagggcactatatgaatgagattagaagcattctggggatgaaaatagagagtataggtgagcagcaaggcaatattattcagtactatgaataagcaggcactgagacaggcagcagagctgaacttaagattggggcttgtcccacttgaggggcttcacagcttcccaggtgaagtctgggtcgtcccttccaaagtgtccgtaagcagctgtcttcaagaaccgactattgccacctctcttgaggtccaggttgatggtgatcataccaggcctaaagtcaaagttctccttcacgatttggagtatttccttgtcgggaatctttccggttccgtaactgtccacgaagacagataagggctcaggcacaccaatagcataggagacttgtacgatgcatctgcgggcaagtccatttgctacaatgctcttggcagcctgcctaacaatgtaagcaccactcctgtccaccttggttgggtcctttccagagaaagcaccaccaccgtgggctccccagccaccataagtgtcaataatgatcttacgtccggtgagacctgcatcaccgtgaggaccaccaattacaaagcggccagatgggttaaggtggaagattgtcttctcatcaaggtacttctcagggatgacaggcttgatgacatgctccttgaggtcagcagcgatttcatcgtttgtaacagtctcatcatgttgggtggagatgaggacagtgtgcacacgaactggaaccatggcaccattgtcattgtagtactcaacagtgacctgggttttaccatcaggccttagccaggggcaggtgccattcttcctaacatcagtaagacgtgcaccgagcttagttgcaaggacatggctaagaggcatgaattcaggggtttcatcagtggcataaccaaacatatgaccctggtcaccggctccaatctcttctggacgctttgtaaagtgtccgtggacaccttgggcaatatcagggctctgctgctcaatgttaaccaagaccttgcaattgtcagcatcaagaccaacatcatcagaaacaaatccaatggagcggcatgtatcacgaacaatcttctcatagtctacgttggctttggtggtaatctctccaaagaccatgaccatgttagtcttcgtgcatgtttcacaggcaaccttgctgtcagggtcctgggcaaggcaggcatcgagaacagcatcagagacctggtcgcaaagcttgtcagggtgtccctcgtttacggactctgatgtgaatagaaaggtctccattctagttctgggacaaagaaatccgagcggatctgagtctttggttgctaagagggaggagagagtgttgagtagaccagacctctagagaagcggaaccccccgccccgccgggg

SEQ ID NO: 15742 - DNA, 1180 bp, Gossypium hirsutum
  Clone ID: GOSHI-09MAY01-C86_1
cggacgcgtgggctcaatgatgtctacaacacacttgctagtattcctacttggagtggtgactctcaccactcccacatttggtacctatgagtcaccaaattatgggaaaccccctactcctgtattcaagcctcccaaggtgaaaccaccaccatatgaacctaagccaccagtgtatgaaccaccaaaaaaggagaagcctgaacctaagccaccggtttatgcacctccaaagaaagagaagcatggacccaaaccaccaatgtatgaacctccaaagaaggagaagcctgagccaaagccaccagtttatacacctccaaagaaagaggagcctaaacctaaaccaccagtatatgaacctccaaagaaggagaaacctgagccaaaaccaccgatttatacacctccaaagaaagagaaacctgaacccaaaccacccgtatatgaacctccaaagaaggagaagcccgagccaaagccaccggtttatacacctccaaagaaagagaaacctgaacccaaaccaccagtgtatgaacctccaaaaaaacctccaatgtacgaacctaagccaccaaaaccaccggtttatacacctccaaagaaagagaaacctgaacccaaaccaccaatgtatgaacctccaaaaaaacctccaatgtatgaacctaagccaccgaagccaccggtttatacacctccaaagaaagaaaaaccagaacccaagccaccaatgtatcaacctcccaacaacccaccaatatatgagccaaaaccacctaagccaccagtttatgcaccaccaaaggaagaaaagccaaaacctaaaccaccagtttatgagcctccggcacatgagccaccatacggtcactatccaggacatccacctttggggaagcctcaatagaatgctcccatcgactagccattcccaacaattgagctactagaaaaattagtatttataataagaggaactgccggctgatgttctgttttattcttgtatggaatgtagtaatgttttctttcatgtttgaagagagaccagttgctcatggctgtactcattcgaatgcttattctatatcttcttctttctcaatgagcaatatcctgatgatttcaaataaatttcaaacgccaattgcacgtttatttgacggaacga

SEQ ID NO: 15743 - DNA, 751 bp, Gossypium hirsutum
  Clone ID: AI726536.1
ctcaatgatgtctacaacacacttgctagtattcctacttggagtggtgactctcaccactcccacatttggtacctatgagtcaccaaattatgggaaaccccctactcctgtattcaagcctcccaaggtgaaaccaccaccatatgaacctaagccaccagtgtatgaaccaccaaaaaaggagaagcctgaacctaagccaccggtttatgcacctccaaagaaagagaagcatggacccaaaccaccaatgtatgaacctccaaagaaagagaagcctgagccaaagccaccagtttatacacctccaaagaaagaggagcctaaacctaaaccaccagtatatgaacctccaaagaatgagaaacctgagccaaaaccaccgatttatacacctccaaagacagagatacctgaacccaaaccacccgtatatgaacctccaaagaaagagaagcccgagccatagccaccggtttatacacctccaaataaagagaaacctgaacccaaaccaccagtgtatgaaactccacaaaaactccaatgtacgaacctaagccaccaaaccacggtttattcactccaaagaaagagacactgaacccaaccacaatgtttgaacctccaaaatacctccctgtatgaacctaagccaccgaatccacgtgtttatacacctccaaaaaacaaaaaaaaattctgccgcgcccccgccgtggaactctaatcccctcataatgaatcc

SEQ ID NO: 15744 - DNA, 626 bp, Gossypium hirsutum
  unsure (1)..(626): unsure at all n locations
  Clone ID: AI730900.1
atttttttttttttttttttttttttttttttttttttttttttttttttttaagcatcaatctaaaacaactattataggatataaggagcgtaaattacaataaagtgaaggctgaaaaaaatgggcaaaataaaaagccaaaaaagcaaaaccattaaaaaagacgaaacatgaacccaaaccaccagtgtatgaacctccaaaaaaaacctccaatgttcgaacctaagccaccaaaaccaccggtttatacacctccaaaaaaagaaaaacctgaacccaaaccaccaatgtatgaacccccaaaaaaacctccaatgtatgaacctaagccaccgaagccaccggtttatacacctccaaagaaagaaaaaccagaacccaagccaccaatgtatcaacctcccaacaacccaccaatatatgagccaaaaccacctaagccaccagtttatgcaccaccaaaggaagaaaagccaaaacctaaaccaccagtttatgagcctccggcacatgagccaccatacggtcactatccaggacatccacctttggggaagcctcaatagaatgctcccatcgactagccattctcaacaattgagctactagaanaattagtc

SEQ ID NO: 15745 - DNA, 684 bp, Gossypium hirsutum
  Clone ID: AI727708.1
gtctacaacacacttgctagtattcctacttggagtggtgactctcaccactcccacatttggtacctatgagtcaccaaattatgggaaaccccctactcctgtattcaagcctcccaaggtgaaaccaccaccatatgaacctaagccaccagtgtatgaaccaccaaaaaaggagaagcctgaacctaagccaccggtttatgcacctccaaagaaagagaagcatggacccaaaccaccaatgtatgaacctccaaagaaggagaagcctgagccaaagccaccagtttatacacctccaaagaaagaggagcctaaacctaaaccaccagtatatgaacctccaaagaaagagaaacctgagccaaaaccaccgatttatacacctccaaagaaagagaaacctgaacccaaaccacccgtatatgaacctccaaagaaggagaagcccgagccaaagccaccggtttatacacctccaaagaaagagaaacctgaacccaaaccaccagtgtatgaacctccaaaaaaacctccaatgtacgaacctaagccaccaaaaccaccggtttatacacctccaaagaaagagaaactgaaaccaaaccaccaatgtatgaaactccaaagaaggagaagccgagccaaagccacggtttatacacctcccaagatagagat

SEQ ID NO: 15746 - DNA, 573 bp, Gossypium hirsutum
  Clone ID: AI726420.1
ctcaatgatgtctacaacacacttgctagtattcctacttggagtggtgactctcaccactcccacatttggtacctatgagtcaccaaattatgggaaaccccctactcctgtattcaagcctcccaaggtgaaaccaccaccatatgaacctaagccaccggtttatgcacctccaaagaaagagaagcatggacccaaaccaccaatgtatgaacctccaaagaaggagaagcctgagccaaagccaccagtttatacacctccaaagaaagaggagcctaaacctaaaccaccagtatatgaacctccaaagaaggagaaacctgagccaaaaccaccgatttatacacctccaaagaaagagaaacctgaacccaaaccacccgtatatgaacctccaaagaaggagaagcccgagccaaagccaccggtttatacacctccaaagaaagagaaacctgaacccaaaccaccagtgtatgaacctccaaaaaaacctccaatgtacgaacctaagccaccaaaaccaccggtttatacacctccaaagaaagagaaacctgaacccat

SEQ ID NO: 15747 - DNA, 529 bp, Gossypium hirsutum
  Clone ID: uC-gsflnu33B083d07b1
tcgtttacgcgtccgccagtcgtctccacacacccgaatatccgcttaaaacctttgaacagcacctaaacgagagtaaaatgaaccctttgttaactgcccatatatgaacctacaaagaaggagaagcccgagccaaagccaccggtttatacacctccaaagaaagagaaacctgaacccaaaccaccagtgtgtgaacctccaaaaaagcctccagtgtacgaacctaagccaccaaaaccatcggtttatacacctccaaagaaaaagaaacctgaacccaaaccaccagtgtgtgaacctccaaaagagcctacagtgtacgaacctaagccaccaaaaccaccggtttatacacctacagagagagaaaaaccagaacccacgccaccaatgtatcaacctcccaacaacccaccaatatatgagcccaaaccacctaagccaccagtttatgcaccaccagaggaagagagccaaaacctaaaccaccagtttatgagccttcagcatatgagccaccata

SEQ ID NO: 15748 - DNA, 621 bp, Gossypium hirsutum
  Clone ID: AI730247.1
atttgcgtacaggcgcctctttaaatctactgtatctatgaccctgatataaaattcggcaccatgcaccagtgtatgaacattataaacacaatgatacaaacatattgtggttttcttctcttttcatcttttaattgctggggttgctccggaaaccccctactcctgtattcaagcctcccaaggtgaaaccaccaccatatgaacctaagccaccagtgtatgaaccaccaaaaaatgagaagcctgaacctaagccaccggtttatgcacctccaaagaaagagaatcatggaccccaaccaccaatgtatgaacctccaaagaaggagaagcctgacccaaatccaccagtttatacacctccaaacaaacaggagcctaaacctaaaccaccactatatgaacctccatagaacgataaacctgagccaaaaccaccgatctatacacctcctaataaatacaaacctgaacccattacatccgtatattatcccccaattatagataatcccgacccttacccatcggtttatacacctcccaatcaattataaacctgaatctacaccactaatgtatgaaccctcataaaaacttccaatgtactaacgc

SEQ ID NO: 15749 - DNA, 529 bp, Gossypium hirsutum
  Clone ID: AI730343.1
ttttttttttttttttttttttttttttttttttttttttttttttttttttttttttttttttttataccaaatcaccattcattgagccaaaaaaaagcatccatgacaaaaaaccaaatttccacacaggaaaaaaattgaaaaaaaaaaaaatgaaaaaaatggttacccaaaagccaaaagtcaccaccaccagtttatgagcctccggcacatgagccaccatacggtcactatccaggaaatccacctttggggaagcctcaataaaatgctcccatcgactagccattcccaacaattgagctactaaaaaaattagtatttataataaaaggaactgccggctgatgttctgttttattcttgtatggaatgtagtaatgttttctttcatgtttgaaaaaaaaccagttgctcatggctgtactcattcgaatgcttattctatatcttcttctttctcaatgagcaatatcctgatgatttcaaaaaaaaaaaaaaaaaattctgcggccgccaccgt

SEQ ID NO: 15750 - DNA, 416 bp, Gossypium hirsutum
  Clone ID: LIB3145-035-Q1-K1-G5
cttttcccatcagcatattcctatttgttttcctcactaattcggatgccttttatgaagtgattgctcagattttgtattaatattccttttggtgtttttgcaatgtgcagaactagaatggagacctttctattcacatcagagtctgtaaacgagggacaccccgacaagctttgcgaccaggtctctgatgctgtgctcgatgcctgccttgcccaggaccctgacagcaaggttgcctgtgaaacatgcaccaagactaacatggtcatggtctttggagagattaccaccaaagccaacgtagactatgagaagattgttcgtgatacatgccgctccattggatttgtttctgatgatgttggtcttgatgctgacaattgcaaggtcttggttaacattgagcagca

SEQ ID NO: 15751 - DNA, 531 bp, Gossypium hirsutum
  unsure (1)..(531): unsure at all n locations
  Clone ID: LIB3582-029-P1-K1-F5
cccacgcgtncgnccacgcgtncgcccacgcgtccggttacaaatgatgaaattgctgctgacctcagagagcatgttatcaagcctgtcatccctgaaaagtacctagatgagaaaacaatcttccaccttaacccatctggccgctttgtcattggtggtcctcacggtgatgcaggtctcactggtcgtaagatcattattgacacctatggtggctggggagcccatggtggtggtgctttctctggaaaggaccctaccaaggtggacaggagtggtgcttacattgttaggcaggctgccaagagcattgtggctaatgggcttgcccgaaggtgcatcgtgcaggtctcttatgctattggtgtgcctgagcccttgtctgtctttgtagacagctatggaactggaaagattcctgacaaagaaatcctccaaattgtgaaggagaacttcgacttcaggcccggtatgatcaccatcaacctggatctcaagaggggtggcaatggccggtttttggagaca

SEQ ID NO: 15752 - DNA, 494 bp, Gossypium hirsutum
  Clone ID: uC-gsronu33B164h05b2
ccagtattcaagcctcccaaggtgaaaccaccaccatatgagcctaagccaccggtttatacacctccaaaaaaagagaagcctgaacccaaaccaccagtgtatgaacctcctaagaaggagaagcctgaacctaaaccaccagtatatgaacctccaaagaaggagaaacttgagccaaaatcaccggtttatgcacctccaaagaaagagaaacctgaacccaaaccacccatatatgaacctccaaagaaggagaagcccgagccaaagccaccggtttatacacctccaaagaaagagaaacctgaacccaaaccaccaatgtatgaacctccaaaaaagcctccaatgtacgaacctaagccaccaaaaccatcggtttatacacctccaaagaaaaagaaacctgaacccaaaccaccaatgtatgaacctccaaaaaagccttcaatgtacgaacctaagccaccaaaaccaccggtttatacacc

SEQ ID NO: 15753 - DNA, 632 bp, Gossypium hirsutum
  unsure (1)..(632): unsure at all n locations
  Clone ID: LIB3543-043-Q6-K6-C11
ctccgcggnacgcgtgggntttcaacaggtgggtggggggagaaaaaatcaaagaatctctaatgaaaaagcgagagaaagaaaaactccaatcacattcttcgaactagtttcttatttcttttttcaatttctttgtattttagtgtgcctgtacgtttttacattcaatcttcgtgtggggggcggaacgctgaaaaatggctttatatagccaaaactaagggtctgtttgatagggggaaaatattttccggaattggttttccccattttccaatgtttgtttggaggaaaatattttccttttgtaaaatcaattccacaacacgggtaaaatcatctcatctttccggaaaatgtcttaccccttagaaatcggtaagacattttccacagctcaactattcacctttgaaaccctttccacagctcctttcttcaccctttccacagctcctctcttcaccctatcgattgcagcatcatcatctctgcctcatcttctctgctagttcacctcttctctttgcttgcctcgttagcgtgctggttcacctctgctggtttatcgaaggtaaaattgcaagctctaggttaggggatctgttgatttctacaagttttattgc

SEQ ID NO: 15754 - DNA, 526 bp, Gossypium hirsutum
  unsure (1)..(526): unsure at all n locations
  Clone ID: uC-gsflnu33B059a01b1
cctacgcgttcgagaaagaggggcacgggctatgagtgactgcatagtccctgacagagcccagaggggagatgatcactttcctcggcgttacaaaaacgaaagaagccggtgcccaggggcccatgttgggtttggctcctaatgagacccttgaccttatgcccctaagccatgtcctcgcaactaaccttggaggtcgtcttactgatgttaggaagaatggtacttgcccttggtaaggcctgatggtnaaacccaggttactgttgagtacaacaacgataatggagctatggttccggttcgtgtcacactgtcctcatctccacccagcacgacgagactgttactaacgatgaaattgctgctgacctcaaagagcatgttatcaagcctgtcatccctggaaagcacctcgatgagaagacaatcttccaccttaacccatctgggcggtgtgtcattggtggccctcacggtgatgctggtcttactggacgtaagatcatcattgacacttatg

SEQ ID NO: 15755 - DNA, 489 bp, Gossypium hirsutum
  unsure (1)..(489): unsure at all n locations
  Clone ID: AI726351.1
attttttttttttttttttttttttttttttttttaacttaataatgttgcagcttgttaattccaatgccatcaatataagcaaaattctcactcagttttgcaacaccgacggaagaaaagccaaaacctaaaccaccagtttatgagcctccggcacatgagccaccatacggtcactatccaggacatccacctttggggaagcctcaatagaatgctcccatcgactagccattcccaacaattgagctactagaaaaattagtatttataataagaggaactgccggctgatgttctgttttattcttgtatggaatgtantaatgttttctttcatgtttgaagagagaccagttgctcatggctgtactcattcgaatgcttattctatatcttcttctttctcaatgagcaatatcctgatgatttcaaataaatttcaaatgccaattgcacgattatttatcaaaaaaaaaaaaaaaa

SEQ ID NO: 15756 - DNA, 358 bp, Gossypium hirsutum
  unsure (1)..(358): unsure at all n locations
  Clone ID: uC-gsflmaxxa091h02b1
cccactttttcgtccgcttctctagaggtctggncactgaagactttgaactccctcttagcaaccaaagactcagatccgctcggatttctttggcccagaactagaatggagacctttctattcacatcagagtccgtaaacgagggacaccctgacaagctttgcgaccaggtctctgatgctgttctcgatgcctgccttgcccaggaccctgacagcaaggttgctgttgcaatgtgagccagggctgttagggttccctttctcagaatactgggcctatcgggctagtaattgataatggggcctgggcattgtaaatttggggttaaaattagggtatgtaacttggact

SEQ ID NO: 15757 - DNA, 421 bp, Gossypium hirsutum
  unsure (1)..(421): unsure at all n locations
  Clone ID: LIB3493-029-P1-M1-D2
gccatatgtttggttattccagtgaggaatcctcagaattcagtgcctctcanccatgtccttgcaactaagcttggtgcacgtcttactgaggttaggatgaatggtacctgcccctggctaatgcctttttgtaaatcacaggttactgttgattactacttcgtttttggtgccatgtgttcattttttgtttacactttttttcttttttttttcttcatttattaatttttattttattttttttaattttttattttattttttagtagtgtagtttatttatttttttatttacttttttcatttattttttttttttttttttttattatttttattctttttttttttttatttattttctttttattttttttattatcttatttttttttttttttttttattattttta

SEQ ID NO: 15758 - DNA, 412 bp, Gossypium hirsutum
  Clone ID: LIB3148-038-Q1-K1-H11
cccacgcgtccgctttccacagctcctttcttcaccctttccacagctcctctcttcaccctatcgattgcagcatcatcatctctgcctcatcttctctgctagttcacctcttctctttgcttgcctcgttagcgtgctggttcacctctgctggtttatcgaagcatcttgtgaaaacatgataagtggaaagggtatgaggcctggagatattgtcacagcttcaaatggaaagacaattgaggttaataacactgatgcagaaggtaggcttacactagcagatgctttggtttatgcttgcaaccaagatagttgacctggcaacactaaccggggcttgtgttgttgctcttggcccctcaattgcaggtggttcgaaaggcgttttcacacccaatgatgatct

SEQ ID NO: 15759 - DNA, 448 bp, Gossypium hirsutum
  Clone ID: LIB3189-046-P1-K1-A3
gatgtctacaacacacttgctagtattcctacttggagtggtgactctcaccactcccacatttggtacctatgagtcaccaaattatgggaaacgccctactcctgtattcaagcctcccaaggtgaaaccaccaccatatgaacctaagccaccagtgtatgaaccaccaaaaaaggagaagcctgtacctaacccaccggtttatgcacctccaaagaaagagaagcatggacccaaaccaccaatgtatgaacctccaaagaaggagaagcctgaaccaaagccaccagtttatacacctccaaagaaagaggagcctaaacctaaaccaccagttcttagatgccaaaaatccgggaaattatggtttgttgtaaaaatcagtagctttttgtgggtcttcctgtaatttgcggagcttaattggaaatttaaccatattttg

SEQ ID NO: 15760 - DNA, 320 bp, Gossypium hirsutum
  unsure (1)..(320): unsure at all n locations
  Clone ID: LIB3083-009-Q1-L1-F2
aacagggtcgcaggctganaattcncacagtaaccgttatatatgagaaacctgagccaaaaccaccggttggtacacctncgaagaaagagagacctnaacccaaaccacccgtttatgaacctccaaagaaggagaagcccgagccaaagccaccggtttatacaccttcaaagaaagagaaacctgaacccaaaccaccagtgtatgaaccttcaaaaaaacctccaatgtactaacctaagccaccaaaaccacctgtttatacacctccaaagaaagaaaaaccttaacccaaaccaccaatgtatgaacccttc

SEQ ID NO: 15761 - DNA, 583 bp, Gossypium hirsutum
  Clone ID: AI726913.1
ggatatatacacacacgtatatatgtatatatctagcttccctttccttccccccttaattaccaaatgttttattcatgaaatggatctcacggtacccaacaaacaaaggttttcaatccttctcaagttcttcatttaagaggagtttttcagcacccattccaccaaagttgagacgccaaagaaggagaagcctgagccaaagccaccagtttatacacctccaaagaaagaggagcctaaacctaaaccaccagtatatgaacctccaaagaaggagaaacctgagccaaaaccaccgatttatacacctccaaagaaagagaaacctgaacccaaaccacccgtatatgaacctccaaagaaggagaagcccgagccaaagccaccggtttatacacctccaaagaaagagaaacctgaacccaaaccaccagtgtatgaacctccaaaaaaacctccaatgtacgaacctaagccaccaaaaccaccggtttatacacctccaaagaaagagaaacctgaacccaaaccaccaatgtatgaacctccaaaaaaacctccaatgtatgaacctaaa

SEQ ID NO: 15762 - DNA, 477 bp, Gossypium hirsutum
  Clone ID: uC-gsflmaxxa076c05b1
gttcaccaaattgcttggtcgcatttattaccacaaagcaggctcttctacccctggttattcgcttcgtaccttctcaggacattctggtaacgttatgtcacttgacttccacccaactaaggatgaccttatttgctcttgtgatggtgatggcgaaattagatactggagtatcaaccacgggagctgtgcaagagttttcaagggtggtactgctcctggtacggcccagttaagatttcaacctcgctttggaaagtatcttgctttagctgcggagaatgttgtatcaatattggatgccgaaactcaaacttgtcgacactcattacagggacatacaaagctaatcattatccttttttctcccttgattttttttttttttggttattctgagtttgtgtcctgtatcagtgtcgtattgcaaaaatgtatgagaattttgctatatatattaatggcactcgaagt

SEQ ID NO: 15763 - DNA, 492 bp, Gossypium hirsutum
  unsure (1)..(492): unsure at all n locations
  Clone ID: LIB3147-026-Q1-K1-F7
ggacgcgtcctcccactcgtccgcccactttttctcccacgcgtccgcaaaacccagattcaaagaagatggccaaattaaagacgattaccatgattatcaatgaaactttacggctttatcctcctttaagtggcgtgataagagaagtaggaagagaagtccaattaggaaaacttgtcctgcctacacattcagaggtcgacatgcgaatcatagcacttcaccatgatcctgacttatggggagatgatgttaatcttttcaagccagagaggtttgctgaagggatagcgaaagctactaagtacaatgcagctgcatttatgccttttggattgggacccttaacctgcagtggcatgagcttttcaatcactgaggcgaaactgcacttntcatgattctgcaacgctcacttttaccgtcttccctacttatgttcacgcacctgcactacgtcttacactcaagccacaacatgggatgcat

SEQ ID NO: 15764 - DNA, 447 bp, Gossypium hirsutum
  unsure (1)..(447): unsure at all n locations
  Clone ID: LIB3135-053-Q1-K1-B6
cccacgcgtccgcccacgcgtccgcccacgcgtccgggaagagaagtccaattaggaaaacttggcctgcctacacattcagaggtcgacatgcgaatcatagcacttcaccatgatcctgacttatggggagatgatgttaatcttttcaagccagagaggtttgctgaagggatagcgaaagctactaagtacaatgcagctgcatttatgccttttggattgggacctccatcttgcgttggcatgagctttgcaatcactgaggcgaaaactgcacttatgttcacgcacctgcactacgtcttacactcaagccacaacatgggatgcagntgttgtttcattcactacattatgatgcttaaaattctaggttgttggtccccaatatagtaatatatagtaaaatgtggatgatactgtactttgcaaccattcgatgat

SEQ ID NO: 15765 - DNA, 387 bp, Gossypium hirsutum
  Clone ID: uC-gsronu33B149a04b1
cttattcatacatatgatgcccctcattcattggcattttcctttttcttatttgttctctttcacctttaattgtgtccttctgtcaatgttgtgttccaaaaatgtatgagaattttgcttatattgatggcactggaagtaaacaatcttcctcttataaaaaaaaaaaaaaaaaaaaaaaaaaaaaaaaaaaaaaaaaaaaaaaaaaaaaaaaaaaaaaaaaaaaaaaaaaaaaaaaaaaaaaaaaaaaaaaaaaaaaaaaaaaaaaaaaaaaaaaaaaaaaaaaaaaaaaaaaaaaaaaaagggggggcccctttaaaggaaccaaattttactccccgggggttgggaagaattattttttttttggggcccccaaaataa

SEQ ID NO: 15766 - DNA, 449 bp, Gossypium hirsutum
  Clone ID: uC-gsronu33B077h05b1
gaaaccttacggctctatcctcctttaaatcgcgtgatgagagatttaggaagagatgtccagttaggaaaacttgtcctgcctactcatttagaggtcgacatgcgattcatagctcgtcagcacagatcctgacttatggggagatgatggtaaccatggccaaccattgaagacagctgcttacggacactttggaagggacgacccagacttcacctgggaatgctgtgaatcccttaatgtgggacatgccccaatcttaagttcagccctgctgccctgtctcagtgcctgcttatccatagtactgaataatatttgccttgctgctcacctatactctattttcatccccagaatgcttttaatcttattcatatagtgccctattcattatccttttttttttttctattttctcccttaatttgttctttttttttttg

SEQ ID NO: 15767 - DNA, 373 bp, Gossypium hirsutum
  Clone ID: uC-gsronu33B008a05b1
atcgttctgttcctcaagaggggtggcaatggccggttcttgaagacagctgcctatggacattttggaagggacgaccccgacttcacctgggaagttgtgaagcccctcaaatgggaaaagcctcaatcttgaagtgcgcccgtccgtactgccccgtgcttttctcatccgcggagctgaataatcccgatgttacgtagctcctaccgcaaatatgtaatctcatacttataatgcccgttggcacaatgacttgctatatcttctttgatcgatgccacgatggatttatgtgtctttttatcagacccggtgttgcaaaactgagtgagaatcttgcttatattgatggcattggaattaaataaaa

SEQ ID NO: 15768 - DNA, 415 bp, Gossypium hirsutum
  unsure (1)..(415): unsure at all n locations
  Clone ID: LIB3189-028-P1-K1-G6
atcttttatgcctccgtctccaacgccgatcacggcgtgaacccaggttcctaggcgggtacgcctctgacgtggcttggtgaagggcgtacgactcanaggaggcgcgcgacgtgcggtggaggggcgctgggcgtgggcacgagcagcagcttgccactttgctagaaaaaaagtttaagttattgggctaaaagcttgggctagggtttagtctattttttatttattttgggcttaaagttggactgtttgattctttggtttgggagttgtgtttaatgaaccaccaaaaaaggagaagcctgaacctaagccaccggtttatgcacctccaaagaaagagaatcatggacccaaaccaccaatgtatgaaccttcaaagaaggagaagtctgagccaaagccaccagtt

SEQ ID NO: 15769 - DNA, 369 bp, Gossypium hirsutum
  Clone ID: LIB3196-021-P1-M1-A10
gtgatggtgaaattagatactggagtatcaaccacgggagctgtgcaagagttttcaagggtggtactgctcctggtacggcccagttaagatttcaacctcgctttggaaagtatcttgctttagctgcggagaatgttgtatcaatattggatgccgaaactcaaacttgtcgacactcattacagggacatacaaagctgatccattccgtatgctgggacttgtcaggtgagcttctagcatctgtcagtgaggactctgtcagagtttggagctttagatcagggagtgaaggggaatgtgttcatgaatggagttgtaatggcaacaagtttcactcttgtgttttcaatcctacgagtcctt

SEQ ID NO: 15770 - DNA, 325 bp, Gossypium hirsutum
  unsure (1)..(325): unsure at all n locations
  Clone ID: LIB3147-029-Q1-K1-G9
cccacgcgtccgcccacgcgtccgcccacgcgttcgtgacatggctgggcctgtcttgaatgatgagaagcatgtggcaactggatttggcatctcaactttggtggaatgggttctgaagaactcttcttcttaaatgaaagcttggaacatgctctgtcgtgacggtggcagaccgaaaaaggagaacaacctgttcgaggttgttgggttctgtaagatctgtctcatgaataagaagcttgttgttggaatactgctctgttttcctttgctttttgtagcttgttcctacaatgttataactacataaagctnttttacc

SEQ ID NO: 15771 - DNA, 203 bp, Gossypium hirsutum
  unsure (1)..(203): unsure at all n locations
  Clone ID: uC-gsronu33B154f01b2
gctctctttcacctttaattgtgtcctgtcaatgtcgtgttgcaaaaatgtatgagaattttgcttatattgatgccactggaagtaaacaatcttcctcttatgattgcttaatggaattcttggctaccttaatcaaanatnaaaaattaaaaacttaataaaaataaaaaaaaaaaaaaaattaaaaaaaaatccattat

SEQ ID NO: 15772 - DNA, 882 bp, Gossypium hirsutum
  Clone ID: GOSHI-09MAY01-C56_2
gcggtaactttttcagccgcagccatgccaaacgtagttactttttaaaacacctttttgtggaacaaagagtgcaagaaacacacttgcacaaggtcacacagcctaataatgacacgatagctatggctgcacaggacacgcaccgttacgaccgaaaacaatcctgttacggtggtcagaccaaaccattgttccacaagaaggcaaagaccacctagaagattgtgctaaggcttcaactgccatgttacaagcacgtttcacaacatccaatcaagcggtgcttgcactctgagattggtggagacaacaaggggaaaggaacatctctgttttaaacgtgttattcatggtatcttgttatggttgctttactttatatggagtagtttgaacttacaagactggaatggaattttgtcctgcttgccttggctcctaccaatatgttcggcgggaaaaccaccattacaacgcaatcaatcacatttccctctcaaaacccccgtcaaaacttaacttctggttgtcctgttctagtgtcttaatccttcctttcctctcttttctatgttatttttttttttttccagtcatttaatttcaatttattgtccttctcttttaaagattccattctgcaatatacttttttgaccttttttaaattcctctctttttaaatctcttatttattctatctttccttatttatcttcattcccttcacactatattccttccctatctttctccttaattttttactctctacttactcattttatcttattcccatacatttctattttatatttcattttctttttcactcttttttcttaatcttatcttcttttttctccttttaatttttta

SEQ ID NO: 15773 - DNA, 632 bp, Gossypium hirsutum
  Clone ID: GOSHI-09MAY01-C56_1
tttcttcgcctccgcgcttttcagccgcagccatggtgaacgtacctaagaccaagaagacctactgcaagagcaaggagtgcaggaaacacactttgcacaaggtcacacagtataagaagggcaaggatagtttggctgcacaggggaagcgtcgttacgaccggaaacaatccggttacggtggtcagaccaaaccagtgttccacaagaaggcaaagaccaccaagaagattgtgctaaggctgcaatgccaaggttgcaagcacgtttcacaacatccgatcaagaggtgcaagcactttgagattggtggagacaagaaggggaaaggaacatctctgttttaaacgtgttattcatggtatcttgttatgtttgctttactttatatggagtagtttgaacttacaagactgtaatggaattttgttaaatttgcttagtttcttctgatgaagttttgcagttttctaactgttaccaaatgtttcactggcaattttgagttcaatttgttttaataactcttgttaataatcacctaaaataatttattttttttcttattatattatattctttttatttctttttttatttctttactatcatttttttttttaaatttt

SEQ ID NO: 15774 - DNA, 242 bp, Gossypium hirsutum
  Clone ID: LIB3147-008-Q1-K1-B11
cccacgcgtccggtttgctttactttatatggagtattttgaacttacaagactgtaatggaattttgttaaatttgcttagtttcttctgatgatgttttgcagttttctaactgttgaaaaaaaaacattaatatatgataaaaacgaaacaatgccaaaaacatttttggaaaaaatcatatgaaaatactgaaaaaaacactgaaaacacataaaacgacaaacgctaatgaacatag

SEQ ID NO: 15775 - DNA, 759 bp, Gossypium hirsutum
  Clone ID: GOSHI-09MAY01-C46_2
aaaaaagaggggacccccgggcctggggaatttcggcccaagtccaaatctattccaccaccacggttgagggcattacggggttcgtaccgaaggacagcgcattcaaggctcttacgaagccttcattgtcaaatctaactgatgatcagttcaaatcagtgctcctttaccatgccttgccacgatactatgcccttgcggacttcaatgacctaagtgagaaaggccctattagtacacttgctggtggccaatacactttgcaattcaacgacgagtctggtaccgtccgcctcgattccggatggagcaaagcaaaagtcaccagcgcagtacacacgtccaagccagtcgcagtctatcaagtcgataaggtccttcttccggaggccattttcgggaccgacatacctccgacacctgcacctgccccggctcttggtattagcccatcagctgacactccatcagcagcaaaatccgaagaaactggttcctcatcaaagccttcgtcttcgggttcatcctcacctaggatcatgatgaactcgggcatttggactctgctggttttggcattcttaggtggatggctggttctatttttctgagatggtataattttatggtatggggttctcaatttactgtgatttttagaccccattttctttcatatgtatgttactgtgtgttactatacaaagaatgttattgtgtgttaaaaaaaaaaaaaaaaaaaaaaaaaaaactcga

SEQ ID NO: 15776 - DNA, 1068 bp, Gossypium hirsutum
  Clone ID: GOSHI-09MAY01-C46_1
cccggacgcgtgggctttctctctgaattcctccaagttaggagtttggagagtggtcaccgctgaagcaaaacaaatttcttgggggaaaagaaaatggagttttccatgatttttatgattagcttctctgtattgattttgtgctcctcactggcatatggtcaagttgcaatgagcacaaacccgacaccgtcaccctcaccagcaccggcaccgacaccggcatacacaaatatcaaagacttactctctgtggcaggtccatatcacaagttcctgggctacctcgagtcgactaaattaatcgacacgttccaaatccaagccaacaacacggttgaaggcattacgattttcgtaccgaaagacagcgcattcaaggctcttacgaagccttcattgtcaaatctaactgatgatcagttcaaatcagtgctcctttaccatgccttgccacgatactatgcccttgcggacttcaatgacctaagtgagaaaggccctattagtacacttgctggtggccaatacactttgcaattcaacgatgagtctggtaccgtccgcctcgattccggatggagcaaaacaaaagtcactagcgcagtacatacgtccaagccagtcgcagtctatcaaatcgataaggtccttcttccggaggccattttcgggaccgacatacctccgacacctgcacctgccccggctcttggtattggcccatcagctgacactccatcagcagcaaaatccgaagaaactggttcctcatcaaagccttcgttttcgggttcatcatctcctaggatcatgatgaactcgggcatttggactcagctggttttggcattcttaggtggatggctggttctctttttctgagacgttataattttatgttgaaaggggggcacatatggggttctcaattttctgtgatttttagaccccattttctttcatatatatgttactgtgtgttattataaaaagaatgttattgtgtgttaagaatatggttgtgttataattaccatttcaattttaccggacctttgcctt

SEQ ID NO: 15777 - DNA, 493 bp, Gossypium hirsutum
  Clone ID: GOSHI-09MAY01-C76_27
gaaataaacggggagactctgaggagaaataatatcggccccgccttcgaaactctccacaggggtaacctaattaaaagtcctttttctccttttttccccccctgaaatctaagttcttttatcgagaccaaagcagaaaagggaaaaaaaaagagggagatggggttgtcttttacaaagcttttcagccggcttttcgccaagaaggagatgcgtattttaatggtgggtcttgatgcagctggtaaaactactattttatacaagctcaagctcggtgaaatagtcaccactatcccaaccatcgggttcaatgtcgagacagtggaatacaagaacatcagcttcactgtttgggatgtcggtggccaagacaagatccgtcctttgtggaggcactatttccaaaacactcaaggtctcatttcgtggtggatagcaatgacagggaccgtgttgttgaacaagggatgaactgcacaggatgttg

SEQ ID NO: 15778 - DNA, 659 bp, Gossypium hirsutum
  Clone ID: GOSHI-09MAY01-C76_25
tcggtcgtattccgttttggatctatcattctccaaatccccgtaaaaacactgaaagacagctcctttgatttcgagggaggggtgtagatcttcgcttctctccttcgattgtcttcgcgtaataatcgtacacatttctctcagacatgaaaaatggggctatctttcacaaagctattcagtcagcttttctccaagaaagagatgcgcatattgatggttggacttgatgccgctggtaaaaccacaattctttacaagctcaagttgggagagattgtcactaccattcccaccataggtttcaatgttgagaccgtggaatacaagaacatcagtttcactgtttgggatgttggtggccacgacaagatccgaccattgtggaggcattacttccaaaacacacaaggacttatttttgtggttgatagcaatgatcgcgatcgtgtggttgaggctagagatgagttacataggatgttgaacgaggacgagttgagggatgctgttctgctagtattcgcaaacaagcaagatcttccaaatgctatgaatgctgctgagattactgacaagcttggtcttcattctctccgccagcgccactggtatatccagagcacatgtgccacttccggtgaaggactgtacgc

SEQ ID NO: 15779 - DNA, 722 bp, Gossypium hirsutum
  Clone ID: GOSHI-09MAY01-C76_23
cgcgcggacgcgtgggttgcctctttcaattctctgggcacccctctcagatcttccaatctctcaccatccagaataaaaggatggggctttcttttgctaagttgttcagtcgcctgtttgccaagaaggaaatgcgtattctgatggtgggtcttgatgctgctggtaagactaccatattatacaagttgaagctcggagagattgtcaccacgattcccactattgggtttaatgtggaaactgtggaatataagaacattagcttcaccgtttgggatgttggaggtcaggacaagattcgacctttgtggaggcactacttccaaaatactcaggggctaatctttgttgtggatagcaatgatcgtgatcgtgttgttgaggccagggatgagcttcaccgtatgctaaatgaggatgagctgagggatgctgtgctgcttgtatttgcaaacaagcaagatctaccaaatgctatgaatgctgctgagatcactgataaacttggtcttcattccctccgtcagcgccactggtatattcagagtacgtgcgctacctctggtgaagggttgtatgagggtctggactggctctccaacaacatagctaacaaggcttgaggcggttggtagaaggtcggtgacatttacatttgggctagcaatctttgtggaattcggatatgtatatttctattttatgatacgttgcgt

SEQ ID NO: 15780 - DNA, 1160 bp, Gossypium hirsutum
  Clone ID: GOSHI-09MAY01-C76_21
tcctctctccctcctcccccccctcccctcctccccccctctttagcaagaaatttacagggctgagaaaacaaaataacaaattcttcaacctttgatacagggtgtgaacagaggtggagtcccagaagtataatggataaaaccacaataatacacacatcatggctattattagcgagtgtagtattacagtggcatcacattgtatagttacatccaaatccaatgcgtacattatctccacacgatggaagtgcaggaagctgttggaagcatcagcgctaattcagtaaactgcagctgaattggccatctactaccgatagcttctcagcttttgtaactgcatctaatggaagaggagcaaagcttcgagatgagccgtagaagtgcgggaagctgttggaaccatctacaacttcatatatcaatccatctccaagcttcttagcatcaatttgaagaaggtacaaatccagcttgacgttggagaaaaaattctgcagtgtcggcttcacctgatgaagggagctgaggtgaatgaaaccacagcatttgtctaagtcaccgccaaaagcggatccattcttttgcaatgcttcccattcctcagcagtgctaattctgtagacgaattctccctcttcacctgcagccattgtttacgctcagcaatagataattgtgataactgcgttgtagcgactaggcttaatagtattattaattagcttggacgtgtatccttatgggctttttatctaaatcaagctccgcagtccatatatataaataaaaggctcttaactccaggctttaccttctagcgttagttcgttcagcgccttcgattccaatagagatagagagagaggaggagatcttcgcttctctccgtcgttctgctccatttgataaccgcttgcagttctctcagacgtgaaaaatggggttgtctttcacaaagctattcagccggcttttcgccaagaaggagatgcgtatactgatggttgggcttgatgctgctggtaaaaccaccattctttacaagcttaagttgggagagattgtcactaccattcctaccatcggtttcaatgttgagaccgtggaatacaagaacatcagcttcacggtttgggatgttggtggcc

SEQ ID NO: 15781 - DNA, 847 bp, Gossypium hirsutum
  Clone ID: GOSHI-09MAY01-C76_20
cttcgattccaatagagatagagagagaggaggagatcttcgcttctctccggtcggtctgctccatttgataaccgcttgcagctctctcagtgcttgacagacgtgaaaaatggggttgtctttcacaaagctattcagccggcttttcgccaagaaggagatgcgtatactgatggttgggcttgatgctgctggtaaaaccaccattctttacaagcttaagttgggagagattgtcactaccattcctaccatcggtttcaattgttgagaccggggaatacaagaacatcagcttcacggtttgggatgttggcggccaggacaagatccgaccattgtggagacattacttccaaaacacacatggacttatttttgtggttgatagcaacgatcgtgatcgtgtggttgaagctagagatgagttgcacaggatgttgaatgaggatgagttgagggatgctgtcctgctagtatttgcaaacaagcaagatcttccaaatgctatgaatgctgctgagattactgacaagcttggccttcattctctccgccaacgccactggtacatccagagcacatgtgccacttctggtgaaggtctgtatgagggactggactggctttcgaacaacattgcaaacaaggcatagatggcatcattgagttgttagtctcaccaatgctggccccttttagagttccggatgttcatcccgttcaagtgtttttggtttttcgtgttcatttgtttcttgcaaacattgccatttgttacttgtagtttaacaataattaataaattgtttggtttccttcgggggattatcccgcgtagctg

SEQ ID NO: 15782 - DNA, 1010 bp, Gossypium hirsutum
  Clone ID: GOSHI-09MAY01-C76_19
agcttctttcagccgcgcctatttaatggcaaacaagcactagaaaaaaatggggaaatccgagagaaaaaaaatccaccggtatttgccaaaaagagatgcgtatactgatggttgggcttgatgctgctggtaaaaccaccattctttacaagctgaagttgggagagattgtcactaccattcccaccatcggtttcaatgttgagaccgttgaatacaaaaacatcagcttcactgtttgggatgttggtggccaagacaagatccgaccattgtggagacactatttccaaaacatgcaagacttattttcgtggttgatagcaatgatcgtgaccgtatggttgaagctaaagatgagttgcacacgatgttgaatgaagatgagttgaaggatgctgtgcttctagtatttgcaaacaagcaagatcttccaaatgctatgaatgctgctgagattaccgacaagcttggccttcattctctccgccagcgtcactggtatatccagagtacatgcgccacatctggtgaaggactgtaccagggactggactggctctcaaacaacattgcaaacaaggcatagatggcgtaattgacttgtcagtctcagaaaatgccagccccttttggaattattgatgtttctacgtccgttaaaatgttttggtttttcatgttcttttgtttcttgcaaactttgtcatttgttgcttcttgtagtttaagaataattggtaaaattttcggtttctattgttggtcttggtagttggaaaaaaaaaatgtattgttttccccaatctcgaggtcattccattcttgatggaaattaacaggttaagtcggtttctttaatctttaaatataaagataccagatttctttggattctttacaacaatacaaaaaaaaaaaaaaaaaaaaaaaaaaaaaaaaaaaaaaaaaaaaaaaaaaaaaaaaaaaaaaaaaaaaaaaaaaaaaaaaaaaaaaaaaaaataagg

SEQ ID NO: 15783 - DNA, 518 bp, Gossypium hirsutum
  Clone ID: GOSHI-09MAY01-C76_18
gtgtaataaatagccccgaagcccaaccccttcccccattgaatttgatattttcgaagataaaaaaggatggggctgtcttttgctaagctgtttagtcgactgtttgccaagaaagagatgcgaattcttatggtgggtcttgatgctgctggtaagactaccattttgtacaagctcaagctcggtgagattgtcactaccattcccaccattggctttaatgtggagaccgtagaatataagaacattagcttcactgtttgggatgttggtggtcaggacaagattcgacctttgtggaggcactatttccaaaacactcaggggctaatctttgttgttgatagcaatgaccgtgaccgtgtggttgaggccagggatgagcttcatcgtatgctaaatgaggacgagctgagggatgctgtgcttcttgtgtttgcaaacaagcaagatctgccgaatgctatgaatgctgctgagattactgataagcttggccttcactcccttcgtca

SEQ ID NO: 15784 - DNA, 622 bp, Gossypium hirsutum
  Clone ID: GOSHI-09MAY01-C76_17
cccatgcgtccgcccacgcgtccgcgataaaacttttgaaagagttaaatgtgtgtgctatttgtgctttttatgcctcgtattcaattaaacagcagagaaataaacggggggactccctcaagaaaaccacaacagatttcagatcctccttccaagctctgcagaaagtactgtgagcagaaagtggaaagcaacgatggggctgacatttacaaagctctttagccggctttttgccaagaaagagatgcgtattttaatggtgggtcttgatgcagctggtaaaaccaccattttgtacaagctcaagctcggcgaaatcgtcaccacaatccccaccattggattcaatgttgagactgtggaatacaagaacatcagcttcactgtttgggatgttggtggtcaggacaagattcgtcctttatggaggcactatttccagaatactcagggtcttatttttgtggtggatagcaacgacagggaccgtgttgttgaggcaagggatgagttgcacaggatgttgaatgaggatgaactgagagatgctgttttgcttgtatttgccaacaagcaagatctttccaatgcaatgaatgctgccgaaataactgat

SEQ ID NO: 15785 - DNA, 652 bp, Gossypium hirsutum
  Clone ID: GOSHI-09MAY01-C76_14
cggacgcgtgccctcgcgtccgtctcaagctctctctgcctctctttctaccatttgcttcaaaatcaaatccaaaatctctctgcgattttctccaaagggatcagcaattagggaagagaaatggggctgacattcacgaagctttttagccggctttttgctaagaaggagatgcggattttgatggtgggtcttgatgcagccggtaagactaccatcttgtacaagctcaagcttggagaaattgttaccaccattccaaccatcggatttaatgtggagactgtggaatataagaacatcagtttcactgtgtgggatgttggtggtcaggacaagattcgtccgttgtggaggcattacttccagaatacacagggtctcatcttcgtggttgacagcaacgacagagaccgtgttgttgaggctagggatgaattgcatagaatgttgaatgaggatgagctgcgagatgcagtattgcttgtatttgcaaacaagcaggatcttccaaacgcaatgaatgctgctgaaataactgataagcttggtcttaattcccttcgacagcgtcactggtacatccagagcacctgtgcaacatctggttgaaggctttataggtctggattggctttcaacaacatac

SEQ ID NO: 15786 - DNA, 799 bp, Gossypium hirsutum
  Clone ID: GOSHI-09MAY01-C76_13
cccacgcgtccgaaacacttaaagcgctaaaataagcagagaaataaacggggagactctgaggagaaataatatcagatcctccttctaaactctccacaaagaaaagggaaaaaaaaagagggagatggggttgtcttttacaaagcttttcagccggcttttcgccaagaaggagatgcgtattttaatggtgggtcttgatgcagctggtaaaactactattttatacaagctcaagctcggtgaaatagtcaccactatcccaaccatcgggttcaatgtcgagacagtggaatacaagaacatcagcttcactgtttgggatgtcggtggccaagacaagatccgtcctttgtggaggcactatttccaaaacactcaaggtctcattttcgtggtggatagcaatgacagggaccgtgttgttgaagcaagggatgaactgcacaggatgttgaatgaagatgaattgagagatgccgttttgctcgtttttgccaacaaacaagatcttcccaatgcaatgaatgctgctgaaataactgataagcttggtcttcattctctccgccagcgccactggtatatccagagtgcatgtgcaacttctggagaaggcctttacgagggactcgattggctttccaacaacattgctagccaggcttgagggaggatgggtgtttggccaattggccaaacttcctgcatcaactttttccccgagttttaaaaattcgaagcccttttcccatttcccttttcaaaagtttgtggagattccattaggtttttt

SEQ ID NO: 15787 - DNA, 822 bp, Gossypium hirsutum
  Clone ID: GOSHI-09MAY01-C76_12
cggacgcgtgggcgcggatccctctgcgattatctccaaaggtagagaggataaatggggctgtcattcgctaagcttttcagccggctttttgccaagaaggagttgcgtattttgatggtgggccttgatgcagccggtaagaccaccattttgtacaagctcaagctcggcgagatcgtcaccactatccccaccatcggattcaatgtggagactgtggaatacaagaacatcagcttcactgtttgggatgttggtggtcaggacaagattcgtcctttatggaggcactatttccagaatactcagggtctcattttcgtggtggatagcaacgacagggaccgtgttgttgaggcaagagatgagttgcacaggatgttgaatgaggatgaactgagagatgctgttttgcttgtatttgccaacaagcaagatcttcccaatgcaatgaatgctgccgaaataactgataagcttggtcttcattctctccgtcagcgccactggtatatccagagtacgtgtgcaacttctggggaaggcctctatgagggccttgattggctttccagcaacattgctagtaaggcatgagaaaggatcagtgtattggttgttagttagacttgttgaaactctggcaactcttgaagaggatatagcttcctgtttatccagcaacgtttgtaatgacagaatatttagctttgtttaatctttttacttggaattttcattttctttaatgtatttgtgttaaatattcggacttgttatggtttatatcggaaaaaaaaaatagtaacattgcatgtc

SEQ ID NO: 15788 - DNA, 975 bp, Gossypium hirsutum
  Clone ID: GOSHI-09MAY01-C76_10
tctcactctttgcctcttctgactgttggctaataatggctccaaagaaggctggagtgagcaaaagggtttttaacaaaggttcatggacagctgaggaagatagaagattggctaaatatattgagattcatggtgcaaagagatggaaaacaatcgccattaaatcaggtttgaatcgatgcggcaagagttgcaggttgagatggttgaactacttgagacctaacattaagagaggcaacatatcagatgaagaagaggacttaattattaggcttcataaactgctgggaaacaggtggtctttgattgctgggagacttccagggcgaacagacaatgaaattaagaactactggaattcccatttgagcaagaaaatgataaaccatgatgtcagaacagaacaaacttcctcctcggaacaaattgtgcctcacaaagcatgggaaactgtccagatggaagaagaagaggtagtaaaaggaagtgatgaaattgaaaactctgaattcagcattgatgtggacgaattctttgacttctcaacggaaggttgctttggtttggattgggtgaataagttccttgaacttgatgaccaacaggatccattagcaatggtataataagtttgtaattaacatgtttccttgaataaataaataaataaagagatgttctcaggcattatctcgtcttattattattatttttcaatcattctcctttccccctcatttttcatctgagacagtcggattgttcggattgttgttatgcctttatttgcattttgtgatgatcattaatttagttgggaacttatggctatattgtaactaaaaaactggctggttggatatataattcctttggattaaaaaaaaaaaaaaaaaaaaaaaaaaaaaaaaaaaaaaaaaaaaaaaaaaaaaaaaaaaaaaaaaaaaagcaaacggggggacggcccaa

SEQ ID NO: 15789 - DNA, 1045 bp, Gossypium hirsutum
  Clone ID: GOSHI-09MAY01-C76_9
gtgcccattcgcacgcaaggacggttcctttgatttcgagagtagatattcgctcgcttctctctttcgtcgaactccgcgtaataatcgctcatatttctcgcagacgtgaagaatggggctgtctttcacaaagctgttcagccggctttttgccaagaaggagatgcgtatattgatggttggacttgatgctgctggtaaaaccaccattctttacaagctcaagttgggagagattgtcaccacaattccaaccattggtttcaatgtggaaactgtggaatacaagaacatcagctttactgtctgggatgttggtggccaggacaagattcgtccattgtggaggcattacttccaaaacacacaaggactcatttttgtggttgatagcaatgatcgtgatcgtgtggtcgaagccagggatgagttgcacaggatgttgaacgaggatgagttgagggatgctgtgctgctggtatttgcaaacaagcaagatcttccaaatgctatgaatgctgccgagatcactgacaagcttggccttcattctctccgtcagcgccactggtacatacagagcacatgtgccacttccggtgaaggactgtatgagggactggattggctctcaaacaacattgcgaacaaggcttaaatgaaacaattgaaccgacggtcacactaacaatggccccattttgatgttctggatgtccatctcgttcaagtgttctggctttctttttttatatttcttattccctgcaaacattacccatttgtcacttgtagtttaaagaataatttgagtaaatttcgatttcctttgttgtattacctccatagctgcaaaaggaaagaaaaaggttttctcctagtttggggcagtttctacgttgtggcaaaattatatacataatctagtacaacttatgttgaagcagtacataaatcttgatgaatcccaaggttttgtggctttggagaatgctttggagaatggatttgatatgctccaaaatttgatgaaaatttataa

SEQ ID NO: 15790 - DNA, 888 bp, Gossypium hirsutum
  Clone ID: GOSHI-09MAY01-C76_8
ttgctccaattgcgtaataaatagccccgaagcccaaccccttcccccaccccgcgtccgattttgtgagtgttaaacattgtttgcctttcatttctttctctattccttgttgcttcctcggcagcctctcggtttctgagtaatataaaaaaggatggggctgtcttttgctaagctgtttagtcggctgtttgccaagaaagagatgcgaattcttatggtgggtcttgatgctgctggtaagactaccattttgtataagctcaagctcggtgagattgtcactaccattcccaccattggctttaatgtggagaccgtagaatataagaacattagcttcactgtttgggatgttggtggtcaggacaagattcgacctttgtggaggcactatttccaaaacactcaggggctaatctttgttgttgatagcaatgaccgtgaccgtgtggttgaggccagggatgagcttcatcgtatgctaaatgaggacgagctgagggatgctgtgcttcttgtgtttgcaaacaagcaagatctgccgaatgctatgaatgctgctgagattactgataagcttggccttcactcccttcgtcagcgccactggtatatccagagtacttgtgccacctctggcgaagggctgtatgagggactggactggctttccaacaacattgctaacaagggttgagggttggttgaattccagtcatatcttcaggcagctatcctattattttctgggtccttttttaagttttacaggaaatgtatcagattgtgttatataattaatatatattcgccgtactactgaaattaggcgcctgcctgctttgtagattgatttctcaaataatttttttctatatgatc

SEQ ID NO: 15791 - DNA, 555 bp, Gossypium hirsutum
  Clone ID: GOSHI-09MAY01-C76_6
cggacgcgtggccggaacccgtggccggacccgtggccggacccgtggccggacccgtgggctggacgacagttcctttgattttgagagaaaagagagagagagagaagagtagatcttggcttctctccttcgttcgattccgcttaattatagcccgcgtttctctcagacgtgaaaaatggggctgtctttcacaaagctatttagccggcttttcgccaagaaggagatgcgtatactcatggttgggcttgatgctgctggtaaaactaccattctttacaagcttaagttgggagagattgtcactaccattcccaccatcggtttcaatgttgagaccgttgaatacaagaacatcagctttactgtttgggatgttggtggccaggacaagatccgaccattgtggagacactacttccaaaacacccaaggacttatttttgtggttgatagcaacgatcgtgatcgtgtggttgaagctagagatgagttgcacaggatgttgaatgaggatgagctgagggatgctgtgctgctagtattcgc

SEQ ID NO: 15792 - DNA, 946 bp, Gossypium hirsutum
  Clone ID: GOSHI-09MAY01-C76_4
ctaagctctcgtttctcaaatttctctctcattcgcttttcttccgtttggctcaaattcaaaattctctcgcggatccctctgcgattatctccaaagggatcaacaggtagagaggataaatggggctgtcattcgctaagcttttcagccggctttttgccaagaaggagatgcgaattttgatggtgggccttgatgcagccggtaagactaccattttgtacaagctcaagcttggagagattgtcaccactattcccaccatcggatttaatgtggaaactgttgaatataagaacatcagtttcactgtctgggatgttggtggtcaggacaagattcgtcctttgtggaggcattacttccaaaatacacagggtctcatcttcgtggttgacagcaatgacagagaccgtgttgttgaggccagggatgaattgcatagaatgttgaatgaggatgaactgcgagatgctgtgttgcttgtatttgcaaacaagcaggatcttccaaatgcaatgaatgctgctgaaataactgacaagcttggcctccattcccttcgacagcgtcactggtatatccagagtacgtgtgcaacatctggtgaggggctttatgagggcctagattggctttccaacaacatagctaacaaggcctgaagctattaagaagatttttgctatgtgggaagttctggaagcaggggggagcattatctcgtcttattattattatttttcaatcattctcctttccccctcatttttcatctgagacagtcggattgttgttatgcctttatttgcattttgtgatgatcattaatttagttgggaacttatggctatattgtaactaaaaaactggctggttggatatataattcctttggataattttctttgcgactgatctatttcagagttttttgggtttt

SEQ ID NO: 15793 - DNA, 997 bp, Gossypium hirsutum
  Clone ID: GOSHI-09MAY01-C76_3
taactccaggctcccccgcgtccccccaggcggctgagcgccttcgattccaatagagatagagagagagaggaggagatcttcgcttctctccgtcgttctgctccatttgataaccgcttgcagttctctcagacgtgaaaaatggggttgtctttcacaaagctattcagccggcttttcgccaagaaggagatgcgtatactgatggttgggcttgatgctgctggtaaaaccaccattctttacaagcttaagttgggagagattgtcactaccattcctaccatcggtttcaatgttgagaccgtggaatacaagaacatcagcttcacggtttgggatgttggtggccaggacaagatccgaccattgtggagacattacttccaaaacacacaaggacttatttttgtggttgatagcaacgatcgtgatcgtgtggttgaagctagagatgagttgcacaggatgttgaatgaggatgagttgagggatgctgtcctgctagtatttgcaaacaagcaagatcttccaaatgctatgaatgctgctgagattactgacaagcttggccttcattctctccgccaacggcactggtacatccagagcacatgtgccacttctggtgaaggcttgtatgagggactggactggctttcgaacaacattgcaaacaaggcatagatggcatcattgagttgtcagtctcaccaatgctggccccttttagagttccggatgtttatcccgttcaagtgtttttggttgttcgtggtcatttgtttcttgcaaacattgccatttgttacttatagtttaacaataattgataaattgcttgtttcctttgtggtattatcccgatagctgaaaaaaaaaaagaaacttccccaagtttgggcagctattttcttggtggaaatttaaggatagcaagcttcttgaatgcttcttttaactcggcaataaatgagagcctttcttctttagt

SEQ ID NO: 15794 - DNA, 955 bp, Gossypium hirsutum
  Clone ID: GOSHI-09MAY01-C76_2
ccccgcgtccgccccgcgtccgccccgctggtcccccctggaggacagttcctttggttttgagagaaaagagtagatcttggcttctctccttcgttcgattccgcttaattatagcccgcgtttctctcagacgtgaaaaatggggctgtctttcacaaagctatttagccggcttttcgccaagaaggagatgcgtatactcatggttgggcttgatgctgcgggtaaaactaccattctttacaagcttaagttgggagagattgtcactaccattcccaccatcggtttcaatgttgagaccgttgaatacaagaacatcagctttactgtttgggatgttggtggccaggacaagatccgaccattgtggagacactacttccaaaacacccaaggacttatttttgtggttgatagcaacgatcgtgatcgtgtggttgaagctagagatgagttgcacaggatgttgaatgaggatgagctgagggatgctgtgctgctagtattcgcaaacaagcaagatcttccaaatgctatgaatgctgctgagattactgacaagcttggccttcattcactccgccagcgccattggtatatccagagcacatgtgctacttccggtgaaggactgtacgaggggctggactggctctcaaacaacattgcaaacaaggcataggtgtgacatgactgagttggcagtcttacaacccttttggattttatgaatgtctgcccccgttttatgtgttattttttatggtttttcacgtttgttgcaaacactgccatttgttacttatagtttaagaataattgacaaagtttgggaccgttatttcctagcgggaattgatggttagccagtttaattacccttttaatgtaaaatatacataatatatacatatattttttttccttcattcctggaatgctggtttta

SEQ ID NO: 15795 - DNA, 948 bp, Gossypium hirsutum
  Clone ID: GOSHI-09MAY01-C76_1
cccacgcgtccgcccacgcgtccgcccacgcgtccggtagatcttctttcaaccgcgcctaataaccgctcggatttttctcagacgtgaaaaaaatggggctgtctttcaccaagctattcagccggctatttgccaaaaaggagatgcgtatactgatggttgggcttgatgctgctggtaaaaccaccattctttacaagctgaagttgggagagattgtcactaccattcccaccatcggtttcaatgttgagaccgttgaatacaagaacatcagcttcactgtttgggatgttggtggccaggacaagatccgaccattgtggagacactatttccaaaacatgcaaggacttattttcgtggttgatagcaatgatcgtgaccgtgtggttgaagctagagatgagttgcacaggatgttgaatgaggatgagttgagggatgctgtgctgctagtatttgcaaacaagcaagatcttccaaatgctatgaatgctgctgagattaccgacaagcttggccttcattctctccgccagcgtcactggtatatccagagtacatgcgccacatctggtgaaggactgtacgagggactggactggctctcaaacaacattgcaaacaaggcatagatggcgtaattgacttgtctgtctcagaaaatgccagcccctttcggaattattgatgtttctacgtccgttaaaatgttttggtttttcatgttcttttgtttcttgcaaactttgtcatttgttcttgtagtttaagaataattgataaaattttcggtttctattgttggtcttggtagttggaaaaaaacaatgtattgttttccccaatctaaaaaaaaaaaataaaaaaaaagaaaataacaggttaagtcgcgttctttaatctttaaatataaagataccagattcctttggattctct

SEQ ID NO: 15796 - DNA, 542 bp, Gossypium hirsutum
  Clone ID: LIB3585-005-P1-K1-C4
cggacgcgtgggtgaatacccaaaggtctgtttgaaacgctggaggacagttcctttggttttgagagaaaagagtagatcttggcttctctccttcgttcgattccgcttaattatagcccgcgtttctctcagacgtgaaaaatggggctgtctttcacaaagctatttagccggcttttcgccaagaaggagatgcgtatactcatggttgggcttgatgctgcgggtaaaactaccattctttacaagcttaagttgggagagattgtcactaccattcccaccatcggtttcaatgttgagaccgttgaatacaagaacatcagctttactgtttgggatgttggtggccaggacaagatccgaccattgtggagacactacttccaaaacacccaaggacttatttttgtggttgatagcaacgatcgtgatcgtgtggttgaagctagagatgagttgcacaggatgttgaatgaggatgagctgagggatgctgtgctgctagtattcgcaaacaagcaagatcttccaaatgc

SEQ ID NO: 15797 - DNA, 512 bp, Gossypium hirsutum
  Clone ID: uC-gsflmaxxa002f07b1
cggacgcgtgggcggacgcgtgggaaatttcttgcgtagttttatctgatctgtgtcttcgaagcctcacgtgaaaaatggggctgtctttcacaaagctatttagccggcttttcgccaagaaggagatgcgtatactcatggttgggcttgatgctgcgggtaaaactaccattctttacaagcttaagttgggagagattgtcactaccattcccaccatcggtttcaatgttgagaccgttgaatacaagaacatcagctttactgtttgggatgttggtggccaggacaagatccgaccattgtggagacactacttccaaaacacccaaggacttatttttgtggttgatagcaacgatcgtgatcgtgtggttgaagctagagatgagttgcacaggatgttgaatgaggatgagctgagggatgctgtgctgctagtattcgcaaacaagcaagatctatcaatgctatgaatgctgctgagattactgaccagcttggccttc

SEQ ID NO: 15798 - DNA, 496 bp, Gossypium hirsutum
  unsure (1)..(496): unsure at all n locations
  Clone ID: uC-gsronu33B132a05b1
gccgcggttttcccggggcgccccacgcgtgcttacgcgtccgaccgcggcggctttggttctgagagaaacgagagagagagagaagagtagatcttggcttctctccttcgttcgattccgcttaattatagcccgcgtttctctcagacgtgaaaaagggggctgtctttcacaaagctatttagccggcttttcgccaagaaggagatgcgtatactcatggttgggcttgatgctgctggtaaaactaccattctttacaagcttaagttgggagagattgtcactaccattcccaccatcggtttcaatgttgagaccgttgaatacaagaacatcagctttactgttgggatgtttggtggccaggacangatccgaccattgtggagacactacttccaaaacacccaagactatntttgtggttgatagcacgatcgtgatcgtgtggttgagctgagatgagttgacaggatgttgatgaggatga

SEQ ID NO: 15799 - DNA, 425 bp, Gossypium hirsutum
  Clone ID: LIB3120-011-Q1-K1-G1
tcgggatgtttaatgaaattagaccgaaaagaattccgtgcatctacaatcatattttgattttgggtctgtgaattcccgaaggtgtgtttgaaacgctggacgacagttcctttgattttgagagaaaagagagagagagagaagagtagatcttggcttctctccttcgttcgattccgcttaattatagcccgcgtttctctcatacgtgaaaaatggggctgtctttcacaaagctatttagccggcttttcgccaagaaggagatgcgtatactcatggttgggcttgatgctgctggtaaaactaccattctatacaagcttaagttgggagagattgtcactaccattcccaccatcggtttcaatgttgagaccgttgaatacatgaacatctgctttactggtcgggatgttggt

SEQ ID NO: 15800 - DNA, 572 bp, Gossypium hirsutum
  Clone ID: LIB3825-031-Q6-K6-H6
taatttgtagtttcatgttgataccgggaatacaagacatcagcttcacgttggatgtggggccaggaaggtctgaatttagttttcattcaaagagttattgacttaattttaaataggcaaaaaactcgggtgtgttataatgtgctctgcttattcatatgattagaatttcatgttctcacatattctataagcatctaagcatcttgataacctgaatacatgtagttccattgaagggagaacacaagttggtgttcgacaggtattagcgatattggatgcttagtactcaaaattggaccttacgttttgagtatatcttagatatattagagtaatggaaacgtgagtatagattttgattctctattattctaccggcaaatttgctatttctgatatagatccgaccattgtggagacattacttccaaaacacacaacgacttattttttgtggttgatagcaaccatcgcagatcgtgtgagctgacagctcgagatgcattgcacaggcatgttgaatgtatgtacttgggcatacaagcctattattaatgggcaac

SEQ ID NO: 15801 - DNA, 552 bp, Gossypium hirsutum
  Clone ID: LIB3825-031-Q6-N6-H6
cgggtaaataccacaaaggaaacaagcaatttatcaattattgttaaactataagtaacaaatggcaatgtttgcaaaaacaaatgaccacacaccaaaacacttgacgggtaaacatccggactctaaaggggccagcattggtgagactgacaactcaatgatgccatctatgcctgcagttattagcatagataaatataaggagaaactgacagaaaccaaactgaatataatctgcaacttatcgtttaaatataagtcaaaagtcatgaggcataagcttaccttgtttgcaatgttgtatcgaaagccagtccagtccctcatacaagccttgaccagaagtggcacatgtgctctggatgtacctataaaacatattatatagagggttaaaatactgatccacaaatagagaccattagagagagagaccaagagagaattgttcatcttaccagtgccgttggcggagagaatgaaggccaagcttgtcagtaatctcagcagcattcatagcatttggaagatcttgcttgtttgcaaata

SEQ ID NO: 15802 - DNA, 556 bp, Gossypium hirsutum
  Clone ID: uC-gsronu33B130c12b1
ctctgtatatccatggctgacatggaaacaactggagtaccccccttttagcacactctcaagctgagaggaagtcgtcaacacaatacgcagcatgagtttcaacgtagggactgggcgagccatggacatcagcctcactgtacgggttgtaggcgggccggacaaggtacggcctgtatgatcgcactgttttcagaatgctgaagttcatattgtcgtggtggatcgcaacgacagggaccgtgctgttgaggcaagagatgagttgcacaggatgttgaatgaggatgaactgagagatgctgttttgcttgtatttgccaacaagcaagatcttcccaatgcaatgaatgctgccgaaataactgataagcttggtcttcattctctccgtcagcgccactggtatattcagagtacgtgtgcaacttctggggaaggcctctatgagggccttgattggctttccagcaacattgctagtaaggcatgagaaaggatcagtgtattggttgttagttagacttggtgaaactctggcaacttttgaaga

SEQ ID NO: 15803 - DNA, 523 bp, Gossypium hirsutum
  Clone ID: LIB3585-050-P1-K1-G3
tttgatttcgagagtagatcttcgctcgcttctctctttcgtcgaactccgcgtaataatcgctcatatttctcgcggacgtgaagaatggggctgtctttcacaaagctgttcagccggctttttgccaagaaggagatgcgtatattgatggttggacttgatgctgctggtaaaaccaccattctttacaagctcaagttgggagagattgtcaccacaattccaaccattggtaagtcaatgatttgccccatggagttgtaacatttttttttccttcatttgagttttatttcaaattgagataacattataatcttgtaggtttcaatgtggaaactggggagatcaagaacatcatctttactgtctgggatgttggtggccagaacaaggtaactagttttagtttttattcaaacatatcaccattgactgttaagattaaagattgcatgaaaagaaaatctggcgtctcttttgaaggcttgtagattttgcatcataccaatacttggaa

SEQ ID NO: 15804 - DNA, 385 bp, Gossypium hirsutum
  Clone ID: LIB3166-022-P1-K1-B9
ttagcgttggtctcaagccctttctttcaaaatcaaagtctgatgtggtctctgcaattgtcttcaaagggatcaacaactagggaagagaaatggggctgactttcaccaagctttttagccggctttttgccaagaaggagatgcgaattttaatggtgggtcttgatgcagccggtaaaactaccatattgtacaagctcaagcttggagagattgtcaccactattcccaccatcggatttaatgtggagactgttgaatataagaacatcagtttcaccgtgtgggatgttggtggtcaggacaagattcgtccattgtggaggcattacttccagaatacacagggtctcatctttgttgtggatagcaatgacagaga

SEQ ID NO: 15805 - DNA, 485 bp, Gossypium hirsutum
  Clone ID: LIB3147-021-Q1-K1-A12
ccattggtttcaatgtggaaactgtggaatacaagaacatcagctttactgtctgggatgttggtggccaggacaaggcattacttccaaaacacacaaggactcatttttgtggttgatagcaatgatcgtgatcgtgtggtcgaagccagggatgagttgcacaggatgttgaacgaggatgagttgagggatgctgtgctgcttgtatttgcaaacaagcaagatcttccaaatgctatgaatgctgccgagatcactgacaagcttggccttcattctctccgtcagcgccactggtacatacagagcacatgtgccacttccggtgaaggactgtatgagggactggattggctctcaaacaacattgcgaacaaggcttaaatgaaacaattgaaccgacggtcacactaacaatggccccattttgatgttctggatgtccatctcgttcaagtgttctggctttctttttttatatt

SEQ ID NO: 15806 - DNA, 316 bp, Gossypium hirsutum
  Clone ID: LIB3493-047-P1-M1-A3
gtttgaaactctggaagacacttcctttgattttgagagaaaagagtaaatcttgggttgtctccttcattcgattccgcttaattataacccgcatttctctcagacgtgaaaaatagtctgtctttcacaaagctatttagccatcttttcgccaacaaggagatgcgtatactcatggttgtgctagatgctgcgggtaaaactaccattctttacaagcttaacttgggagagattgtcactaccattcccaccatctatttcaatgttgagaccgttgaatacaagaacatcagctttactgtttgggatg

SEQ ID NO: 15807 - DNA, 521 bp, Gossypium hirsutum
  Clone ID: uC-gsronu33B144g04b1
cttactcgtgggcggacgcgtgggcggacgcgtgggcggacgcgtgggcggacgcgtgggcggacgcgtgggcggacgcgtgggcggacgcgtgggcggacgcgtgggcggggagactctgaggagaaataatatcagatcctccttctaaactctccacaaagaaaagggaaaaaaaaagagggagatggggttgtcttttacaaagcttttcagccggcttttcgccaagaaggagatgcgtattttaatggtgggtcttgatgcagctggtaaaactactattttatacaagctcaagctcggggaaatagtcaccactatcccaaccatcgggttcaatgtcgagacagtggaatacaagaacatcaggtttactgtttgggatgtcggtggccaagacaagatccgttctttgtggaggcactattttcaaaacactcaaggtctcatttttgtggtggattagaatgacagggaccgtgttgctgagcaagggatgactgcccaggatgtgatga

SEQ ID NO: 15808 - DNA, 401 bp, Gossypium hirsutum
  Clone ID: LIB3585-009-P1-K1-E12
gaaactcttgatatggtcgatcttgatgtcattttcatcggtgacgaaaggcatgcggtgagaactctcttgctgttgcatatgcaatcatttccaaagggatcaacaagtacagaggataaatggtgctgtcatgcgctaaggtgctaatactgttgtatgacaataaggagatgcaatatcagatggagggccttgatgcagccggtaagactaccattatgtacaagctcaagcttggagagattgtcaccactattcccaccatcggatataatgtggaaactgttgaatataagaacatgagttacactgtctaggatgttggtggtcaggacaagattcgtgctttgtggaggcattacttcgaaaatacacagggtctcagttttcgggttgac

SEQ ID NO: 15809 - DNA, 364 bp, Gossypium hirsutum
  Clone ID: LIB3272-059-P1-N1-H12
aagatgataaaataaaaaatatcaacttaattaagtcgaaatattttcactccctaagaactcccatttccgaaagtcacgagtatagttgaggttaaacaaagcgcatatcgcaatatcatatctaataaacattccgtcgttacgaagaagtttcgtatggcagaggaagctatcttggccagagttgagctaacaatcaaacacccatcctccctcatgccttgctagcaatgttgttggaaagccaatcgagtccctcgtaaaggccttctccagaagttgcacatgcactctggatataccagtggcgctggcggagagaatgaaaaccaagcttatcagttatttcagcagcattcat

SEQ ID NO: 15810 - DNA, 439 bp, Gossypium hirsutum
  Clone ID: LIB3189-041-P1-K1-B11
cggaccggaactgaatgcccgggtcgaggcgacgcgtccgaaaaagggtatttgctttgccaatatagttgccttcaaaattttgctcctgtttcatggaataagggttgcatatcaagttttgctctggctttaacgtggagaccgtagaatataagaacattagcttcactgtttgggatgttggtggtcaggacaagattcgacctttgtggaggcactacttccaaaacactcagggtctaatctttgttgttgatagcaatgaccgtgaccgtgtggttgaggccagggatgagcttcatcgtatgctaaatgaggacgagctgagggatgctgtgcttcttgtgtttgcaaacaagcaagatctgccgaatgctatgaatgctgctgagattactgataagcttggccttcactcccttcgtcagcgccactg

SEQ ID NO: 15811 - DNA, 385 bp, Gossypium hirsutum
  Clone ID: LIB3083-022-Q1-L1-C1
gttgtgtcaaatcttttgaattttgaattcttcgcgtgggttaatgggatctaaatctcggaagcgtcacgtgaagaatggggctgtctttcacaaagctgttcagccggctttttgccaagaaggagatgcgtatattgatggttggacttgatgctgctggtaaaaccaccattctttacaagctcaagttgggagagattgtcaccacaattccaaccattggtttcaatgtggaaactgtggaatacaagaacatcagctttactgtctgggatgttggtggccaggacaagattcgtccattgtggaggcattacttccaaaacacacaaggactcatttttgtggttgatagcaatgatcgtgatcgtgtggtcgaagc

SEQ ID NO: 15812 - DNA, 308 bp, Gossypium hirsutum
  unsure (1)..(308): unsure at all n locations
  Clone ID: LIB3145-010-Q1-K1-C9
ctgaatatggtgttgttccnataaaggttaaacacatgtttgatgtctgttaagtctcggcatatgttgattgtgagcgggtaacattggtgtttatgttttgagtacatcttagatcttgttagatctgttggatttataaacaaagtgcttatggaatttgttcatctcaattatacaccttgcttctttttttttttttttttttttgactttcttcaaagattcgtccattgtggaggcattacttccaaaacacacaaggactcatttttgtggttgatagcaatgatcgtgatcgtgtggtc

SEQ ID NO: 15813 - DNA, 270 bp, Gossypium hirsutum
  Clone ID: LIB3135-014-Q1-K1-H2
gacccacgcgttcgcccacgcgtccgcccacgcgtccggttggattttttttgcaaaaaaaaatcaaattctactgatggttataggaattgatatgtggattttagtgcttgacagacgtgaaaaatggggttgtctttcacaaagctattcagccggcttttcgccaagaaggagatgcgtatactgatggttgggcttgatgctgctggtaaaaccaccattctttacaagcttaagttgggagagattgtcactaccattcctacc

SEQ ID NO: 15814 - DNA, 390 bp, Gossypium hirsutum
  Clone ID: LIB3083-011-Q1-L1-A8
gacggttcctttgatttcgagagtagatattcgctcgtttctggctttcgtcgaactccgcgtaataatcgctcatatttctcgcagacgtgaagaatggggctgtctttcacaaagctgttcaaccggctttttgccaagaattgagatcttatattgaagtgtggacttgatgcttctttttaaatccttatttttttactatccctagtttttatagtattttttactcttttttcattctctttgttttatatttgttatttttttattttttttttctttttttattattttttttttttataatattctattttttttttttttttttttttatttttttatttttttttatcttttattttctatattttttatatttttttt

SEQ ID NO: 15815 - DNA, 356 bp, Gossypium hirsutum
  Clone ID: LIB3149-053-Q1-K1-A8
acgggttgatcttctttcaacctctcctaataaccgctcggatttttctcaggggggagaaaaatggggctgtctttcaccaagctattcagccggttatttgccaaaaaggagatgcgtatactgatggttgggcttgatgctgctggttaaaccaccattctatacaagcttaagttgcgagagatagctactaccatgaacaccatcggctctatgaaagaaccgtgctatactatgactatatcttcactgtttgggatgatcgtcgccaatacaagatccgaccattgtggagacactaatttcaaaacatgcaacgacttattttcgtgggagatatcaatgatcgatac

SEQ ID NO: 15816 - DNA, 286 bp, Gossypium hirsutum
  Clone ID: LIB3083-107-Q1-L1-E9
ctcgtgccggatatttattttggagctagcattccgataaatggatcaacaactagggaagagaaatggggctgactttcaccaagctttttagccggctttttgccaagaaggagatgcgaattttaatggtgggtcttgatgcagccggtaaaactaccatcttgtacaagctgaagcttggagagattgtcaccactattcccaccatcggatttaatgtggagactgttgaatataagaacatcaggttcaccgtgtgggatgttggtggtcaggacaagat

SEQ ID NO: 15817 - DNA, 383 bp, Gossypium hirsutum
  Clone ID: GOSHI-09MAY01-C66_29
ctttgagtatgcagtaagaatcctgctaaaaagattcgcaacctcctcgagttcatgtgcatcatagaaccaaataccatttatttcctgagaagcattgcggtatagtagatatttatcctgaacttcatactcaaaatctcccaagaggttttccaccaaattatcagtattgcgtctattcatcacaataaactgaaacctaggctgcgtattcctcttgacagcaaaaagagatccttcgacatcttttcgactccattggctaaggtcgatgttgaactcatagaaggcgacatgagcagcggtgataagaatttcttcgacgaaagggtcgatgcgacggagaaccgttaaattgaggagtttcgcggacgcgtgaa

SEQ ID NO: 15818 - DNA, 796 bp, Gossypium hirsutum
  Clone ID: GOSHI-09MAY01-C66_28
cccacttctttcggcattaccatcaagcctcaaaccgataggtgggtcttccctgaaaccaacaccggcatcattgtgttggctgaaggacgtctcatgaacttgggttgtgctactggccaccctagctttgtcatgtcatgctcgttcactaaccaggtgatcgcccagctggagctgtggaaggagaaggcaacaggcaagtacgagaagaaggtgtacgttttgcctaagcaccttgatgagaaggtggctgctcttcaccttggaaagcttggggctaacctcaccaagctcaccaaggatcaagctgactacattagcgtccccattgagggtccttacaagccccctcactacaggtactgaggagagaatacgagcgcgcgtgcgcccgccggccggagagagggagagtgttggactagaaaaaggaaccatacaacgggatggtttgagtgtttgtttttactaaaatttattgatgatttgtggttagatggttagattttgatttatataggtgttagagtgatggatgtatttaatgttttgttgttttttattctatttttagtattttataaatccttggttttccatcttaaatatattgtactattttatcttttttatttagtttgtattatttatctatttatgactctttctgattttatctttttttaatatttcatttcttttaatggtcttatggtattgtacttatgtttttgttgcttttctctttatctattattctctcttatctatatttatttacttcttattttat

SEQ ID NO: 15819 - DNA, 648 bp, Gossypium hirsutum
  Clone ID: GOSHI-09MAY01-C66_24
tcctaggactgagacctttcgtgaagaggatcatgatgtatcagcaaggctgattagctggtggaaccacacttcgaatagccaaagatttggctgaaaataacacggacgctagtgttacagtgaaatgcatatgcaccgccttgagacctatcctggtgttaaacgcatcaccattaagccttaaaccgataggtgggtcttccctgaaaccaaaactggcatcattgtgttggctgaaggacgtctgatgaacttggggtggggccactggacacccaagttttgtcatgtcctgctcgttcactaaccaggtgattgcccagctcgagctatggaaggagaaggcaactggaaaatatgagaagaaggtttacgtattgccaaagcacctcgacgagaaagttgctgcacttcacctcggcaagctcggagctaagctcactaagctcactaaagatcaagctgattacattagtgtgcctgttgaaggtccttacaagccttctcattacaggtactgagggggacagttaatgagtttttatcgagaaagaaaaagcattcggatgggaaaatgatgtgggatttggtctcttcttgtttgaagatgaccaaatggtttgaaataaaagtgttttgagggat

SEQ ID NO: 15820 - DNA, 633 bp, Gossypium hirsutum
  Clone ID: GOSHI-09MAY01-C66_20
gaagaagaagaagcaagccgagaaagaagaagaagaaatcaaccgaaagtgcgggaaatacgagagggaaaatatgaaggtgaaaaaccctgaagctcatcttcccattgccgttttcctcgtcgccagtgtcttgaaagaaaaaagaacaggcgaaagtcagaagccctgttacgtaatgaggaacagaagggttgctcaggtgtccactagcgacgacgaggatgaagtaccgatgactcgcagacggtctcggtccgaagataagagaccagaaaggaagaggaagaaaatgaagttacaagatgaagacgatgaagaggtggatgagcagatggaatccgagaagaaggtgtacgttttgcctaagctcctcgacgagaaggtggctgctcttcacctcggcaagctcggggctaacctcaccaagctcaccaaggatcaagctgactacattagcgtccccgttgagggtccttacaagcctcctctctacacgtacctgtaggatagaatacgagagatagagaatgctagagtcagactcaaaaaaggaaccataccacgggatgggttgatagtttgtttgtactaaaatttattgatgatttgtggatagagggttcgattttg

SEQ ID NO: 15821 - DNA, 960 bp, Gossypium hirsutum
  Clone ID: GOSHI-09MAY01-C66_19
cgaaagaagcgcacaaagccaggagaggatgggggcaccctaaatctaagatcacccaccttgttttctgcactacttctggtgtagacatgccgggtgcggactaccaacttaccaagctcctaggactgagaccttccgtgaagaggatcatgatgatcagcaaggctgctttgctggtggaaccgtgcttcgtctcgccaaagatttggctgaaaataacaaggacgctcgggttctggtggtggctccgagatcacggctgcacttttcgtggaccctcgatactcacttggattctctggtgggcaagcacttttgctgatggcgctggagctgtcatcataggcgctgaccctgattccaaatctgaacgcccactattccagtttgtatcagttgcttatcaatctgttctgatttttattttgcaattgacggacacttgcgtgatgtcggcctcaatttccatttgttgaaagacgtgaccgggattgatctcaaagaacattgaaaaaagcttggttgaagcattcccaccaattggcatctgggactggaactccatcttctggatcgctcaccctggtggccctgcaatacttgaccaaatcgaagccaaactatgtctcaaagaagacaaactcagggctacccgtcatgtgctgagcgagtttggcaacatgtcaagtgcatgtgtgttatttatcatggacgagatgagaaagaaatcccttgaccaaggtatgcccaccaccggtgaagggtatgagtggggtgtccttttcggattcggtccaggtctcactgtggaaactgttgtgctacacagtatacctacacgggcaaactgacccagacaaaaagtgagacgatcgtgtggcttggagaggatgatacaatataatttttctatttatatgtgatatttttttccaaataaaatatgctattttgtgt

SEQ ID NO: 15822 - DNA, 707 bp, Gossypium hirsutum
  Clone ID: GOSHI-09MAY01-C66_18
tgataatgtttgcaagtgaaccgttctccacatactcaaggattatatgcaggtgagttgttgtcttcaatgatccaagatacttgacaatgtttttatgattcaaattctacaaataattcaaataagataccaaaacccaactttttaccatcagtaatgagaccagcagcagtaactaactaccatgaagatggccagtgaaaagcaaaaaattaacaggaaaattaaaagggattgatagttgcaacatagccaaccagcagtaagacatctgcagtgcacatttgcagaactcatgagcatcaaacatacaagggagaacactgatgtagcattataacaagcaaaatgttaaaaagcaccaaaatgcagttaaggcttaaaggagggagttaccttcaataactcaattcaatgtcaagattacttgaggataacaagcaacaggaaggcaagacatgtaacaaggaacataagctacaagcttttgtgactaaacaaattccaaaagcacaagaacaactaatttcaatgataataacaaaagaaagaaagaaactttactaaaaaaaaaaaaggcggggatgacttactaaagagtatcaggtggtccgataattgtaacactccattcaaagatattgttttcatcaaccaatccggccgagaacccatcaacccggacgcgtgggcggacgcgtggg

SEQ ID NO: 15823 - DNA, 580 bp, Gossypium hirsutum
  Clone ID: GOSHI-09MAY01-C66_16
tcccacgcgtccgcccacgcgtccgatcagaatcagttgcaaataagatagagagagagagagagagttggactagaaaaaggaaccatacaacgggatggtttgattgtttgtttttactaaaatttattgatgatttgtggttagatggttagattttgattttgataggagtttgcgtcccgcgcggccggtaagttttggtggaaaagaaatgaggtctctgcttgaagaagaccaaatggggtctgaataaggtgatggggattgtgtgggagatgatatttcgccattggtgcagtccagttttgctgcatctggttttcaattaattaatcaaaaaaaagatgattttcactttctaaaaaaaaaaaaaacaaaaaaaaaaaaaataaaaaaaaacaaataataaaaaaaataaaaaaaaaaaaacaaggacaagcctccactaaaagttccaccctaataactctattcatcgggggccgccctttttaggtacccaacctttcttccccttccttgccccgtctttttctttttttgtgccccccaaaatctatcctctcgcccctttttt

SEQ ID NO: 15824 - DNA, 861 bp, Gossypium hirsutum
  Clone ID: GOSHI-09MAY01-C66_12
acgaggaaaagaacatatattcttttcattattatataacaaaaatcagtacaacaatatggttattatacatacgattccattttcttgcaatgttgaattgatggaactctacgagtatctactactgacaggtgacaaaattttggctacatatttaatttctcaatgttctcattatttctagtctaataataaaaacaacagcaccttctcaggcaactccacagatggaaaaggaagagttgcatagctaggccacatgaatattttgtgagtttcttcatattctagttcattggtgtcaaatccaccatcaacacctccttttgttgctgaccaccctcatccctgccattatctactttttcagcttcaactgataaaatctcatccaaagcagatgatccagtatcaagagtgttgagaacatccacttggtttgcttcagcttctgacttaacagaatctgattctatcgaatgcccttctcctcgagttcatgtgcatcatagaaccaaataccatttatttcctgagaagcattgcggtatagtagatatttatcctgaacttcatactcgaaatctcccaagaggttttccaccaaatcatcattaacagcttcaacattcgcaggagattcatcattagggcttgaaagcattgatatgatactcaatacaatactttcaactgtatggactggcatccagcgctaacttgcaagctcgtaatcatttggatcatcacctggaggatgaagaattgatatgcaaacagatatatgtttaaatttactactaatatctaattagatcccacttctgagatacatgcgaagaaggcatgttcatcgga

SEQ ID NO: 15825 - DNA, 725 bp, Gossypium hirsutum
  Clone ID: GOSHI-09MAY01-C66_11
tcaaatggtattttacaaggacattaagattcatgagccacatctttcccttaataaattaaggcacttacgtcggttacggatgtagagccgaagcaccacaatagcaaaccgatcataacatttcttgtgaccgtctaacgcagcggtgaccttctcgaattcatctctcctctctctccattccttgcagcttcaacatttgcgggagattcatcattagggctggaaagcattgaaatgatactcaacacaatactttcgactgtatgtactggcatccagcgctcacttgcaagctcgtaaccatttggatcatcacccggaggatgaagaattgatatgcaaccacgcccatccgcgtaaacattaggatgccaaacctctgacgtaaatttcaccgctggagggctgtttggataattaggtggaaagctcatgatggcattaaaaaatcccccttcataaagagtatcgggtggtccaataatcgtaacactccattcaaagatattgttctcgtcaaccaatccggctgagaaaccatcaaccggattcttacaaagatctttgagctgcttttgaaggaggagactggcttgagatgccatataaacaattgagagaagcagagcttaaaagaaaagctctgtcatttgcagagacaagccaagtaagaaaaaaaaccaaccaaaaaaaaaaaaaaaaaaaaaactcgagactag

SEQ ID NO: 15826 - DNA, 1214 bp, Gossypium hirsutum
  Clone ID: GOSHI-09MAY01-C66_10
cgataatccggatagggattgatgtagatctaacgactcactatcctttggtacaatacatatacccaatggcttgcttacattgcatcaatatatgcctgaatgccaggcgtgccgcaccggacttgtcatattctacgagcaaggacaccataattgatcgaaactatgaggctatgctctctcgcgtatgctatggatagatactgctgttggctactgacaaggaatgagtcacctatgttccccgctgattatgcttcttgaagaagaatctgttgcattgtgatgcttcacgcgtttaatgcgtaaattgagaggaaatttccggtgcaccgatagttcggtcggggttgaaacacagctttgtagtttggcgacggtaactcaagttatcgacccgaaacttcatcagcacttagagacgctaggtggaggtgattatctctttgctttccgaatgctaatggtcttatttcgtcgagagttctcattttgcgattccttatacttatgggagatgatgtgggctctggaatatgatccggacttgttctaccagtacgaagattcgggttcagatatggagaaaaccgaaggtgctaaagtaagacagaaatcaacacgaaagtgcgggaaatacgagagggaaaatatgaaggtgaaaaaccctgaagctcatcttcccatttccgttttcctcgtcgccagtgtcttgaaagacaaaagctcaacgctactgcaggaagctcgcggtctggacgatgtagttcagattctgaatgacataactgggaacttagatgccaagaaagcatgcataggggcaatgaaacttcataagaaatacttaaaaaaggcgcaggcaactccttcaactcagaagctctttccattcaccttgtgatcacaggcacaggcaagtccttcaactcaaaaactctttccattcatcatgtgatcacaggacaagataacatagcataagggagatggaggcgcattttcggccccagttgtttttttctctcgtggattgaacaacttggtttcggagaagagaatgatacattttgtggattagggattacagaattctatagctgctgatgctatagaagcattgtttactccataccaatccattgttgtatgagcatttctgagtttcattttctttcaagaaatacaaacaacaacctaggtattttgcc

SEQ ID NO: 15827 - DNA, 1298 bp, Gossypium hirsutum
  Clone ID: GOSHI-09MAY01-C66_9
tccggcccgacgtcgagcgataacgctgagtttcagatcgtattgacgataattaaagagggttgacagcaaatccgaagaaattacgaagatgaaggagagattggttggtgtttctgaagaaaccacgactggggttaaaaggctttatcaaatgcaggctaatggaaccttgttgttccctgctattaatgtcaatgactctgtcaccaagagcaagtttgataacttgtatggttgccgccactctcttcctgatggtttaatgagagccaccgatgttatgattgccggaaaagtcgccgttgtctgcggttacggtgatgtcggcaagggttgtgcctcagccttgaaacaagccggagctcgtgtcatcgtgaccgagattgatccaatctgtgcccttcaagctcttatggaaggactccaagtcctaactcttgaagatgttctttcaacagctgatatctttgtcaccacaacaggtaacaaggacatcatcatggttgatcacatgaagaagatgaaaaacaacgccatcgtttgcaacatcggtcatttcgataacgagatcgacatgttaggcctcgagaattatccaggtgtcaaacgaatcaccatcaagcctcaaaccgataggtgggtattccccgataccaagacaggtatcatcgtgttagccgaaggacgtctcatgaacttaggatgtgctaccggtcatcctagcttcgtcatgtcttgttcgttcacgaaccaagtgattgcacagctcgagctatggaaggagaaatcaaccggaaaatacgagaagaaggtttacgttttgccgaaacatctcgatgagaaagtcgctgctcttcaccttgggaaacttggggctaagctcactaagcttaccaaggaccaagctgactacattagtgtcccaattgaaggtccttataagcctcctcattacaggtactgaggagagaatttgaggcagaatcaataacgaaaacggtacattcagacgattccatcgtttgcatctgaattattgttagattgttaggtttttgattaatgtaggagtttttgtttgggtcatgggaaaggtttgggggtaattgtctttcattgggaaagttttaaataaggtattgggacagtgtggtagataaaatcataatagttgccattgatgcagttatattgcatctgatccatttatcaattaattatatatccaaaaagaagtaatttgatttcacttgtttattaaatatttattaataatatttaattatgcttggtgg

SEQ ID NO: 15828 - DNA, 570 bp, Gossypium hirsutum
  Clone ID: GOSHI-09MAY01-C66_8
cggtccggtatttgtattaagaatcgccctttagtgatcagtgaggtgaagaaaaatgtcttgctgtggtggaaactgcggttgcggctccggttgcaagtgcggcagcggctgcggcggttgcaagatgtaccctgagatgaactttgctgagcaaaccacaaccgggacacttgttcttggcgtggcaccccggaaagtgcactttgatggagctgaaatggaaactggggctgaaaatggctgcaaatgtggagataactgcacttgcaacccttgcaattgtaaatgagaaaaaaaagctaagcatattatggaagctgatctaaataatatatgatgtatttgggtttttactattagaataaagcagctatggttcattaggtgttttgcttcttgtatccatggttgcttggtttgtgtatgtgtgtgtgtatatagtgaaatgaaattattttaactagctttgttgtgttactgccatgttatataactgatgaatgaatgaaggaaagctctatttgccttttgcttaaaaaaaaataaaaaacaaaaaaaaaaataaaa

SEQ ID NO: 15829 - DNA, 588 bp, Gossypium hirsutum
  Clone ID: GOSHI-09MAY01-C66_7
gtccgcccacgcgggttgttttcgatttttgtattaagagtcgccctttggtgtttttctaattcaatcagtgaggtgaagaaaaatgtcttgctgtggtggaaactgcggttgcggctccggttgcaagtgcggcggcggcggcggctgcggctgcggcggttgcaagatgtaccctgagatgaactttgctgagcaaaccacaactgagacacttgttcttggcgtggcaccccggaaagtgaactttgatggagctgaaatggaaactggggctgaaaatggctgcaaatgtggagataactgcacttgcaacccttgcaattgtaaatgaggggaaaaaaaaaaccgaagcatattatggaagctgatctaaataatatatgatgtatttgggtttttattattagaataaagcagccatggttcattaggtgttttgcttcttgtatccatggttgcttggtatgtatagtgaaatgaaagtattttaactagctttgttgtgttactgccatgttatataactgatgaatgaatgaaggaaagctctatttggcttttgctttctaaaaaaaaccccttttt

SEQ ID NO: 15830 - DNA, 854 bp, Gossypium hirsutum
  Clone ID: GOSHI-09MAY01-C66_6
ctcaacgctatctttttgttccttttccaagggagagtgtgatctgttcttcttcacttcatttcactaacccatggctctttccgtcgagaaaaccaacaccggcatcattgtgttggctgaaggacgtctcatgaacttgggttgtgctactggccaccctagctttgtcatgtcatgctcgttcactaaccaggtgatcgcccagctggagctgtggaaggagaaggcaacaggcaagtacgagaagaaggtgtacgttttgcctaagcaccttgatgagaaggtggctgctcttcaccttggaaagcttggggctaacctcaccaagctcaccaaggatcaagctgactacattagcgtccccattgagggtccttacaagccccctcactacaggtactgaggagagaatacgagagagggagagagagtgagagagagagagggagagagttggactagaaaaaggaaccatacaacgggatggtttgtttttactaaaatttattgatgatttgtggttagatggttagattttgattttggtaggagtttgtgtgtggggtggatggtaagttttggtggaagagaaatgaggtctctgcttgaagaagaccaaatggggtttgaataaggtgatggggattgtgtgggagatgatattttgccattggtgcagtccagttttgctgcatctggttttcaattaattaatcaaaaaaagatgcaactttgctttcaaaaaataatttttttttattttttttatttattttttttttttttttttttttaattttattattttaattttttttttattttaattttttttataattttttttatat

SEQ ID NO: 15831 - DNA, 883 bp, Gossypium hirsutum
  Clone ID: GOSHI-09MAY01-C66_4
acaaatgaccatttcatgataaaaaagcgggactcacaaagaacgtttgccaacaaacacttaccaacaaacgcgtttgaataccgggaaactgttttcagagtaattacattactccagtcaaaaccaaaacaaaaaaagggagagtttttaagtaaagtgttgagattttttcatatggcattctacaaggacactcgcagtgttatcgaccaaagctccccacacaatcaattgaaggcattccctgggtactcaaatattgtcaagaagaagcagcggcaatggatcataacattttttgggaccgtctcacgcagcggctaaccttcctcttgaattcatctcttgtctctctccattcttttgcagcttcaacattcgcaggggattcatcgttagggctggaaagcattgatatgatactcaaaacaatactttcaactgtatggactggcatccagcgctcacttgcaagctcatagccatttggatcatcacccggaggatgaagaattgatatgcaaacacgcccatcaggataaacattaggatgccaaatctctgatgtaaatttgactgttggagggctgtttggataatttggtggaaaactcatgatagcattgaaaaatcccccttcataaagagtatcaggaggtccaataattgttacactccattcaaagatattgttctcatcgaccaatccagccgagaacccatcaaccggattcttacaaagatctttgagctgtttttgaaggaggaggctggcttgagatgccatgtaaaagatgagagagagagagagagagctgagaaaaagctctgggatttcaagatagcaaaagtaaaagaaaatttataagcaggcactccg

SEQ ID NO: 15832 - DNA, 1506 bp, Gossypium hirsutum
  Clone ID: GOSHI-09MAY01-C66_3
gtaaagaataaatttggaaccctaagggggccccccgatttaaggtttgagggggaaaccccgggaaattgggggaaaaggggggggaaaaagggaaagggcgggggctaaggggcccgccaaaattaacgttaaaagggggggaaaccccaaaccccccccggtttaaaggccccgaaaagggggggttcccttttccctttaagggggggaaaattttgggagggggaattgggggggcctttttttttttaaacccccttggggaaagggggattttttccaaggggtttaatttgggaaaacccgggtttttcccctttaaaaatttttaaaaaaccgccccggggggggggttaaaaaaaattattttggggggaatgggggtttccccccgggggggcccccgaaaatttttttttttttttttttttttttttttttttttttttttttttttttttttttttttttttttttttttttttttttttttttttttttttttttttttttttttaagataaataaatagcatgtaataaaaagacaatttgttcatcaaaataaagagttaaagtcacgaatgagacgttatgatgatatgagactgctactcaaaacactactaaacaaaaccagaaccaaaacgctttcgaatacaaaagaacactaccacttaaaagcacaataaataaaaatagaaagagatagggaaagggaaggggaaggggaaggggaaggggaaggggggctttaagttttaaggcactccctaggttcacaaggactctgcggtgtaatcagccgcaactcatctccctacatgataaaaattaaggcattccacgggttcatatattctagagaaggaacagcagcaacagccatcattgatcacaacatttcttgcgaccgtcggacacagcggccaacctttctcttaaattcatctttcctctctctccactccttagcagcttcaacattcgcaggagattcatcattagggcttgaaagcattgatatgatactcaatacaatactttcaactgtatggactggcatccagcgctcacttgcaagctcgtaaccatttggatcatcacctggaggatgaagaattgatatgcaaacacgcccatcaggataaacattaggatgccaaatctctgatgtaaatttcactgttggagggctgtttggataattgggcggaaagctcatgatggcattgaaaaatcccccttcataaagagtatcaggtggtccgataattgtaacactccattcaaagatattgttttcatcaaccaatccggccgagaacccatcaaccggattcttacaaagatctttgagctgtttttgaaggaggaggctggcttgagatgccatataaacaaacaaaagaaaagaatagtgagggttctagagagagagggagaggttaaaaaagccctgcgatttgaagagagaagcgtccgcgtgggtcttcccggccgg

SEQ ID NO: 15833 - DNA, 1906 bp, Gossypium hirsutum
  Clone ID: GOSHI-09MAY01-C66_2
ctcgctcattgctatctttttgttccttttccaaggggagtgtgatctgttcttattcactccatttctctaacccatggctctttccgtcgagaaaaccgccgccggccgcgagtacaaggtcaaggacatgtctcaggctgacttcggtcgtctcgagatcgagttggccgaggtcgaaatgcccggtctcatggcttgccgagccgagttcggccctgcccaacctttcaagggagccaaaatcaccggttctcttcacatgaccatccagaccgccgtcctcatcgaaaccctcaccgccctcggagctgaagtccgttggtgctcttgcaatatcttctctacccaagaccatgccgccgccgccattgcccgtgactcggcagccgtgttcgcctggaaaggtgagaccctccaggaatactggtggtgtaccgagagagcccttgactggggtcccaccggtggacctgatctgatcgtggatgatggtggcgatgctactctgttgatccatgaaggagttaaagccgaggaggtttatgagaaaaccgggcagctcccagatccgtcttccaccgacaatgccgagtttcagattgttttgaccataattagagatgggttgaaggcagatcccaagaagtatacaaggatgaaggagagattagttggtgtttctgaggaaactacaaccggtgttaagaggctttatcagatgcaggccaatggaaccttgttgttccctgctattaatgtcaatgactctgtcaccaagagcaagttcgataacttgtatggatgccgtcactctcttcccgatgggttgatgagagctaccgatgtcatgattgctggtaaggtcgctgttgtctgtggttatggtgatgtcggcaagggttgtgctgctgccttgaagcaagccggtgctcgcgtcattgtcaccgagatcgatcccatctgtgcccttcaggctctcatggaaggacttcaagttttgacccttgaggatgttgtctccgaggctgatatctttgtcaccaccactggtaacaaggacatcatcatggttaaccacatgaggaagatgaagaacaatgccattgtttgcaacatcggtcacttcgacaatgaaattgacatgctcggtctcgagaattatcctggtgtcaagcgcattaccatcaagcctcaaaccgataggtgggtcttccctgaaaccaacaccggcatcattgtgttggctgaaggacgtctcatgaacttgggttgtgctactggccaccctagctttgtcatgtcatgctctttcaccaaccaggtgatcgcccagctcgagctgtggaaggagaaggcaaccggcaagtacgagaagaaggtgtacgttttgcctaagcaccttgatgagaaggtggctgctcttcaccttggaaagcttggggctaacctcaccaagctcaccaaggatcaggctgactacattagcgtccccattgagggtccttacaagcctcctcactacaggtactgaggagagaatacgagagagagagagggagagagttggactagaaaaaggaaccatacaacgggatggtttgattgtttgtttttactaaaatttattgatgatttgtggttagatggttagattttgattttgataggagtttgcgtgtgggatggatggtaagttttggtggaaaagaaatgaggtctctgcttgaagaagaccaaatggggtctgaataaggtgatggggattgtgtgggagatgatatttcgccattggtgcagtccagttttgctgcatctggttttcaattaattaatcaaaaaaaagatgattttcactttctaaaaaatcaactctgggtcgtggggcgttctctcgttccgcttt

SEQ ID NO: 15834 - DNA, 1953 bp, Gossypium hirsutum
  Clone ID: GOSHI-09MAY01-C66_1
ccccccccccacgcccccgccttcaattcctcatttcaagggagagagtgtatcagtgtttcttcccctcttttacttaatttctctccgccatggctctctccgtcgagaaaaccgccgccggccgtgagtacaaggtcaaagacatgtctcaggctgacttcggtcgtctcgagatcgagttagctgaggttgaaatgcctggtttaatggcttgtagaaccgagttcggccctgcccaacctttcaaaggagccaaaattactggttctcttcacatgaccatccaaaccgccgttcttattgaaacccttaccgccctcggagctgaagtccgttggtgctcttgcaacattttctctacccaagaccacgctgccgctgccatcgctcgtgactccgccgctgttttcgcttggaaaggggagaccctccaggaatactggtggtgtactgagagagcccttgattggggtcctactggtggacctgatctgatcgtcgatgatggtggtgatgctactttgttgatccacgaaggtgttaaagctgaggaagtttatgagaaaactggtcaactcccagatccggcttcgactgataacgctgagtttcagattgttttaaccattatcagagatgggttgaaagcagatcccaagaagtatagaaggatgaaggagagattggtaggtgtttctgaagaaactacaactggagttaagaggctttatcagatgcaggccaacggtaccttgttgttccctgccattaatgtcaatgactctgttactaagagcaagttcgataacttgtatggatgccgtcactcacttcccgatggtttgatgagagctactgatgtgatgattgccggcaaggtcgccgttgtctgtggttatggtgatgtcggaaagggttgtgctgctgccttgaagcaagccggtgctcgtgtcattgttactgagattgatcccatctgtgcccttcaggctctcatggaaggacttcaggttttgaccctagaagatgttgtctccgaggctgatatcttcgtcaccacaaccggtaacaaggacatcatcatggttgatcacatgaggaagatgaagaacaatgccattgtttgcaacattggtcactttgacaatgaaatcgatatgctcggtcttgagacctatcctggtgttaaacgcatcaccattaagcctcaaaccgataggtgggtcttccctgaaaccaaaaccggcatcattgtgttggctgaaggacgtctgatgaacttgggatgtgccactggacacccaagttttgtcatgtcctgctcgttcactaaccaggtgattgcccagctcgagctatggaaggagaaggcaactggaaaatatgagaagaaggtttacgtattgccaaagcacctcgacgagaaagttgctgcacttcacctcggcaagctcggagctaagctcactaagctcactaaagatcaagctgattacattagtgtgcctgttgaaggtccttacaagcctcctcattacaggtactgagagaagagttgatgagtttttatcaagaaagaaaaaacatccggatggtttgattgtttcttgttttactgaaatttcatgatggttaggtttttgttttatttttagagttttttttgtgtttgggtgatgggaaagtgcctgggggtgggaaaatgatgtgggatttggtatcttcttgtatgaagatgaccaaatgggtttgaaataaaaatgttagggatgtgtggaagattatatagtatttgccattaatgcagtcttgttttgctgcattgcttttttttaaagcaattttattttatatacttcaataccaacatgggatattcactaatatttgatactatatactaaaattaaataaaaaaaaaaaaaaaaacaaaaaggggccgcccttttt

SEQ ID NO: 15835 - DNA, 522 bp, Gossypium hirsutum
  Clone ID: LIB3585-005-P1-K1-F10
cccacgcgtccgttcaattcctcatttcaagggtgagagtgtctcagagtttcttcccgtgtggacttaatttctctccgccatggctctctccgtcgagaaaaccgccgccggccgtgagtacaaggtcaaagacatgtctcaggctgacttcggtcgtctcgagatcgagttagctgaggttgaaatgcctggtttaatggcttgtacaaccgacttcggccctgcccaacctttcaaaggagccaaaattactggttctcttcacatgaccatgcaaaccgccattcttattagaaacccttaccgccctcggagcttaccaccgggagcgtccttgcaacactctatataccaacgactacactgacgatgacatccgtcgagactccgccgttgttttcgcttggaaaggggagaccctccaggaatactggtggtgtactgagagagcccttgattggggtcctactggtggacctgatctgaacgtcgatgatggtggtgatgctattttgttga

SEQ ID NO: 15836 - DNA, 596 bp, Gossypium hirsutum
  Clone ID: LIB3829-017-Q6-K6-B8
ctccctttctattactttaagtgtctttgcactttgagcatatgttttaccagaggcttttatctttaagcagttatttggggtggtatagtgagcgacaatatggagcagctgagaaaccagaggacggttcaacaacaacaacaacaagaagaggagcttgaggagatgcaccatggcccgttccctgtggaacaactccaggagttgggcattgcatcccttgacgtaaagaagctcaaggatgcaggtctttgtacggttgaatctattgcttacgccccaaggaaagatcttcttcagatcaaaggaatcagcgaagctaaagttgacaagatcatggaagctgtctccaaactggtcccattgggtttcaccagtgctagccagctccatgctcagaggctggagataattcagataacatctgggtcaagtgaacttgataaaattttggaaggtggaattgagacaggatccattactgaaatatatggtgagttccgttctggaaagactcagctttgtcacactttatgtgtcacatgccaacttccattagatcatagaggtggtgagggaaaagcaatgtacat

SEQ ID NO: 15837 - DNA, 530 bp, Gossypium hirsutum
  unsure (1)..(530): unsure at all n locations
  Clone ID: LIB3543-028-Q1-K6-A11
gggcggaacacctgcggggggggtggggggggttaaaccctctccttttatctgggctttggtacttggtatactcggcgacaaaatggagcagcagagaaacccaaagatggctcaacaacagcagcaacaagaggagcttgacgaaatgcagcacggtcccttccgtgggggggaggttcatnttttttggcattgcagccctggacgtaaagaagctcaaggatgctggtctttgtacggttgaatctgttgcttataccccaaggaaagatcttcttcagatcaaaggaatcagtgaagctaaagttgacaagattatggaagccgcttccaaattggttcccttgggcttcaccagtgctagccagctccatgctcaaaggttggagataattcagataacatctgggtcaagtgaacttgataaaattttggaaggtggaatcgagactgngtccattaccgagatatatggtgagttccgttncggaaagacacagctttgtcacacattatgtgtgacatgc

SEQ ID NO: 15838 - DNA, 452 bp, Gossypium hirsutum
  Clone ID: LIB3189-007-P1-K1-E8
atttgtattaagaatcgccctttagtgatcagtgtggtgaagaaaaatgtcttgctgtggtggaaactgcggttgcggctgcggtgtgcaagtgcggcagcggctgcggcggttgcaagatgtaccctgagatgaactttgctgagcaaaccacaaccgggacacttgttcttggcgtggcaccccggaaagcgcactttgatggagctgaaatggaaactggggctgaaaatggctgcaaatgtggagataactgcactcgtaacccttgcaattgtaaatgagaaaataaagctaagcatattatggaagctgatcttaataatatattatgtatttgggtttttctattttaaattattttttattatttattttgttcatcttttttttttttttttcttttagtattatcattttgtttactaattatttttattattttttatatt

SEQ ID NO: 15839 - DNA, 469 bp, Gossypium hirsutum
  Clone ID: uC-gsflnu33B028e12b1
ctggtgcgcctgctggctagccgccgcggacagtgtaccggggcgaccgcaccgcggccgcttattctggcggagatttggaatcctaatgtttatgctgatgggcgtgttagcatatcaaatcttcatcctccaggggatgatccaaatgggtacgagcttgcacgtgagcgctggatgccagtccatacagcggaaagtattgtattgagtatcatatcaatgctttcaagccctaatgatgaatctcctgcgaatgttgaagctgctaaggagtggagagagaggaaagatgaatttaagagaaaggtcggccgctgtgtccgacggtcgcaagaaatgttgtgatcaatgatggctgttgctgctgttccttttctagaatatatgaactcgaggaatgccttaatttttatcatgtacggagatgagttgcggctgattacaccgcacaatccttgtgaaccta

SEQ ID NO: 15840 - DNA, 427 bp, Gossypium hirsutum
  Clone ID: LIB3493-022-P1-M1-D6
gcttgcaagtgagcgctggatgccagtccatacagttgaaagtattgtattgagtatcatatcaatgctttcaagccctaatgatgaatctcctgcgaatgttgaagctgctgtaagtgattgccgactttcttgattcagtgattcctctcttttgttgcggtttggcattccgttgatgttctaacgtggtttctatccttctattaaggcttctagtgtaacaaaactttctttaaaatatgcttatttgatcggtctcattttatcattaattaaaatgactcagatttgtgcttttaacattcacttggttttctttccctttgctatcaatcatctatctgtatgatctcgtcacacaaccattgtcatcagcatctcgttctattgagtatcatgcggcacaatgcaccatgctagtttt

SEQ ID NO: 15841 - DNA, 536 bp, Gossypium hirsutum
  Clone ID: LIB3828-002-Q1-N6-F4
ccaccaaacataattaaatattattaataaatatttaataaacaagtgaaatcaaattacttctatcagatgcaataaaactgcatcaatggcaactattatgattttatctaccacattgtcccaataccttattcaagagtttcccaatgaaagacaattacccccaaaactttcccatcacccaaacaaaaactcctacattaatcaaaaacctaacaatctaacaataattcatatgataaagtgcaataaaaagaagaaaaaaaaacgatggaaccgtcggaatgtaccgttttcgttattgaattctgcctcaaattctctcctcagtacctgtaattaggaggcttataaggaccctcaattgggacactaatgtagtcagcttggtccttggtaagcttagtgagcttagccccaagtttcccaaggtgaagagaagcgactttctcatcgagatgtttcggcaaaacgtaaaccttcttctcgtattttccggttgatttctccttccatagctcgagctgtgcaat

SEQ ID NO: 15842 - DNA, 342 bp, Gossypium hirsutum
  Clone ID: uC-gsflnu33B137d03b1
tcgttcgcgtgggttttttttttttttaagataaataaatagcatgtaataaaaagacaatttgttcatcaaaataaagagttaaagtcacgaatgagacgttatgatgatatgagactgctactcaaaacactactaaacaaaaccagaaccaaaacgctttcgaatacaaaagaacactaccacttaaaagcaaaataaataaaaatagaaagagatagggaaagggaaggggatgggaaaatgatggggaatttggtctcttcttgtttgaagatgaccaaatggtttgaaataaaagtgttttgagggatgtgtggaagaatatatagtatttgcctt

SEQ ID NO: 15843 - DNA, 336 bp, Gossypium hirsutum
  Clone ID: LIB3829-017-Q6-N6-E2
aagcaaaagccaaatagagctttccttaatgtacattcagtcaattatataacatggcagtgacacaacaaagctagttaaaatactttgatttcactatacataccaagcaaccatggatacaataagcaaaccacctaatgaaccatggcatgatttattctaataataaaaacccaaacacattatatactatttagatcagcttccatattatgctccggttttttttttacggtgattaacaatcagcaagggtagcaagagcagtgatgaacacatttgcagcaaaacttcagactgagagtacatttaaggtccatcaaagcgcatttt

SEQ ID NO: 15844 - DNA, 419 bp, Gossypium hirsutum
  Clone ID: LIB3148-003-P1-K1-A4
gcaaaccacaaccgggacacttgttctttttgtggcactttggaaagtgcactttgatggagctgaaatggaaactggggctgaaaatggctgcaaatgtggagataactgcacttgcaacccttgcaattgtaaatgagaaagaaaaagcatccggatggtttgattgtttcttgttttactgaaatttcatgatggttaggtttttgttttatttttagagttcttttttgtgtttgggtgatgggaaagtgtctggggatgggaaaatgatgtgggatttggtctcttcttgtttgaagatgaccaaatggtttgaaataaaagtgttttgaaggatgtgttgaagaatatatagtatttggcttaattcattcttgttttgctgcattggattttttaaagcaatttcattttat

SEQ ID NO: 15845 - DNA, 375 bp, Gossypium hirsutum
  Clone ID: uC-gsflnu33B062c08b1
tcgaaattactggatctcttcacatgaccatccaaaccgtcgttcttattgaaacccttaccgtcctgggagctgaagaacgctgtgctcttgcaagagtttctgtactcgagatcacgctggagataacgtagctcgagactaacccaatgatgtggttaagaacaggcgggaacacgaggagcttgacgaaatgcagcacgggagctttcgtgtggagcagctctaggcttccggcattgcacgcctgggattaaagaagctcaaggatgctgggctttgacggttgaatctggtgcttataccccaaggaaagatcttctttagatcaaaggaatcagagaagctaaaggtgacaagattatggaagccgct

SEQ ID NO: 15846 - DNA, 256 bp, Gossypium hirsutum
  Clone ID: LIB3148-050-Q1-K1-F5
cccacgcgttcgcctacactttcgtccacgctttcgttcacacgttcgctcacgcgtacgggaggcttgttcttggcgttgcaccccttatagagcactttgattgatcttaaatggaaactggggctgaaaatggttgcaaatgtggagataactgcacttgcatcctttgtaattgtaaatgataaaaaaaagcttatcatattatggaagctgatctaaataatatatgatgtatttggggtattactattta

SEQ ID NO: 15847 - DNA, 367 bp, Gossypium hirsutum
  Clone ID: LIB3083-109-Q1-L1-H6
caaatattggttcataaactcgagtagcttggttgactgtaggtgattagaaggtttcaaatatttgattttgagttttacctcgtaatggtgttgccagttgccattcaatttagctttatcgaatttatctcgcagcagtcttatgagctgttataattaagagaataattattctctcatctgggaaatataactcgtttatttttaacacaaattctcaaaatttcagtgaagggggatttttcaatgccatcatgagctttccacctgattacccaaacagccctccaacaatgaaatttacaacagacgtttggcatcctaatgtttatactgatggcacttgttgcatatcaattcttca

SEQ ID NO: 15848 - DNA, 342 bp, Gossypium hirsutum
  Clone ID: uC-gsflnu33B066h11b1
gttcgtgttccctgccattaatgtcaacgactttgttactaagagcaagttcgataacttgtatggatgccgtcactcactttccgatggtttgatgagagctactgatgtgatgattgccggcaaggtcgccgttgtctgtggttatggtgatgtcggaaagggttgtgctgatgccttgatgcaagccggtgctcgtgtcattgttactgcgatcgatcccatccgtgccctttaggctctcatggtttgccttcacttgtcctgtccctatcagatgctgtattctaggcttcatatcttctctactacattcattaatcatcacatctttattttctt

SEQ ID NO: 15849 - DNA, 417 bp, Gossypium hirsutum
  Clone ID: LIB3135-031-Q1-K1-H6
cccacgcgtccgcccacgcgttcgcgaccagtatggacaagttgaagacttggttggatgagaaggaggctgatatcttcgtcaccacaaccggtaacaaggacatcatcatggttgatcacatgaggaagatgaagaacaatgccattgtttgcaacattggtcactttgacaatgaaatcgatatgctcggtcttgagacctatcctggtgttaaacgcatcaccattaagcctcaaaccgataggtgggtcttccctgaaaccaaaaccggcatcattgtgttggctgaaggacgtctgatgaacttgggatgtgccactggacacccaagttttgtcatgtcctgctcgttcactaaccaggtgattgcccagctcgaactatggaaggagaagggcactgggaaatatgaga

SEQ ID NO: 15850 - DNA, 358 bp, Gossypium hirsutum
  Clone ID: LIB3147-055-Q1-K1-F5
cgggtcgcccacgccttcggccaaggcttccgcccacgcttccgcccacgcttccgcccacgcgtccgcccacgcgtccgggggcgcgtccgtttgacaatgaaatcgatatgctcggtcttgagacctatcctggtgttaaacgcatcaccattaagcctcaaaccgataggtgggtcttccctgaaaccaaaaccggcatcattgtgttggctgaaggacgtctgatgaacttgggatgtgccactggacacccaagttttgtcatgtcctgctcgttcactaaccaagtgattgcccagctcgaactatggaaagagaaagcaactggaaaatatgagaagaaagtttacgtatt

SEQ ID NO: 15851 - DNA, 348 bp, Gossypium hirsutum
  Clone ID: LIB3147-035-Q1-K1-B3
ttacaagaagaagaagcggtgcatgaagagagttggactagaaaaaggggccatgcaacgggatggtttgattgtttgtttttactaaaatttattgatgatttgtggttagatggttagattttgattttgataggagtcatgcgtgtgggatggatggtaagttttggtggaaaagaaacgaggtctctgcttgaagaataccaaacgggctctgattttggtgctggggattgtgttggagatgatataaatgcatctggtggaaccaagtttgatgcagttggtgttggcttacttagtctacttatcgaagatgtttacttgccaatggatcttattgactac

SEQ ID NO: 15852 - DNA, 408 bp, Gossypium hirsutum
  Clone ID: uC-gsronu33B127a02b1
gttatttagatgttggaaagggtccttctggtggggggcactatgacagtgctcgtggctttcatactgagattgatcccatcttagcccttcaggctcttatggaaggacttcaggtcttgacacctagaagacgttgactccgaggctgatatattcgttaccacaaccggtcacacggacatcatcatggttgatcacatgaggaagatgaagaacaatgccatcgtttgcaacattggacactctgacaatgacattgatatgctcggccttgagacctatcctggagttaaacgcatcaccattaagccttataccgattggtgggcctttcctgaaaccaacactggcatcattgtgctggctgtaggacctatgatgaacctcggatgtgccactggacac

SEQ ID NO: 15853 - DNA, 311 bp, Gossypium hirsutum
  Clone ID: uC-gsronu33B139h01b1
ctcacgcgtccgcccactcgtccgcccacgcgtccggtttgcgtgtgggatggatggtaagttttggtggaaaagaaatgaggtctctgcttgaagaagaccaaatggggtctgaataaggtgatggggattgtgtgggagatgatatttcgccattggtgcagtccagttttgctgcatctggttttcaattaattaatcaaaaaaaaagatgattttcaaaaaaaaaataaaaaataaaaataaataattttattaaaaaaaaacaaaattctaaaattttttcctcttttaatttttccttttttttt

SEQ ID NO: 15854 - DNA, 313 bp, Gossypium hirsutum
  Clone ID: LIB3149-016-Q1-K1-C7
cttgttactggatatgggctttacgaatttgtccttaacgactgctctggggttttgggtggcaacaatgggcttgctgagtcgggatggtttatcgggttttggctaatcgttaaaagcatgatcaaaaaactgagattatcatttatgataccttggactactctatatgaaaggggatttttcagtgctatcatgagttttccaccaaattatccaaacagccctccaacagtcaaatttacatcagagatttggcatcctaatgtttatcctggtgggcgtgtttgaatatcaaattcttcatcctccg

SEQ ID NO: 15855 - DNA, 184 bp, Gossypium hirsutum
  Clone ID: LIB3493-043-P1-M1-H8
ttttgtattaagagtcgccctttggtgtttttctaattcaatcagtgaggtgagggggaatgtcttgctgtggtggaaactgcggttgcagctccccttgcaagtgcggcggcagtgcagctgttgcaagatgtaccctccaatgactttttttgatcaacgccacactcacccactacttctt

SEQ ID NO: 15856 - DNA, 808 bp, Gossypium hirsutum
  Clone ID: GOSHI-09MAY01-C16_1
cccacgcgtccgcccacgcctcacgcctggccaactgtcaaagtttctctctctctctctctctctctattgttgaagttcataagcttttgtatcaatggctgaagtccgtgaccgcaacctgcctcaccaagttcaagttcacccacagtaccgtttcgacaatacaaccggaggcggttacggtgcaaagaactatcacagtggaccatcaacaagccaagttctagccgtccttacacttctccccattggtggtacactgcttgcattagccgggttaacactggccggcaccgtcattgggctgatgctagccacaccgctgttcatcatcttcagcccagttcttgtcccagctgccattgccattgccatggcagtgacggggttcttgtcgtcgggggcgtttgggttaacagggttgtcgtcgttgagttacgtgcttaacaggctgaggtacgcaacagggacggagcagctagatttagaccatgcaaagagaagggtacaggacatggcagagtatgtggggcaaaagacaaaggaagttgggcagaagattgagaacaaggcacatgaaggtcaagttggaaggacttgaagatgataacagggcttttgggaataaaaaagaatgtaggttttttgttttttgtttttggggggggggggttgtattatgttgttagcgtgcatgtgtggttgaatgatgtgggttttgcttcaattccatgtatgtttcctttttatgtcttaatcatgcttgtttttttactctaaataaaatatactctactttttaagg

SEQ ID NO: 15857 - DNA, 499 bp, Gossypium hirsutum
  Clone ID: LIB3582-015-P1-K1-B11
gtgaaagcccatctctctatccatctatatattgtggctgctaatacgcggacctatgattggttggggtccgactctacaacctgccgcaccaagttcaagttcacccacagtaccgtttcgacaatacaaccggaggcggttacggtgcaaagaactatcacagtggaccatcaacaagccaagttctagccgtccttacacttctccccattggtggtacactgcttgcattagccgggttaacactggccggcaccgtcattgggctgatgctagccacaccgctgttcatcatcttcagcccagttcttgtcccagctgccattgccattgccatggcagtgacggggttcttgtcgtccggggcgtttgggttaacagggttgtcgtcgttgagttacgtgcttaaccggctgaggtatgcaacagggacggagcagctagatttagaccatgcaaagagacgagtacaggacatgacagagtatgtggggca

SEQ ID NO: 15858 - DNA, 484 bp, Gossypium hirsutum
  Clone ID: LIB3582-003-P1-K1-B3
gccacgcgtgcggtcaactgtcgaagagagtgtctatctggctctatatattgatgaagatcataggctctgggatcactggctgaagtgcgcgaccgtaactctgtcgcaccaagatcaggttcacacacagtaccggatcaacaatacaaccggaggcggctacggagcatagaactatcacagtggaccatcaacaagccaagctctagccgtacttacacttctgaagattggtggtacactgcttgcattagccgggttaacactggccggcaccgtcatcgggctgatgctcgccacaccgatggtcatgatcttgagaccagatctcgtaccagctgacattgccattgccatggcagtgacggggttctcgtcgtgcggcgcggttggcttaacaaggttagacgacttgagttacgtgcttaaccggctgatgtatgcaacagggactgagcagctcgatttagaccatgctaag

SEQ ID NO: 15859 - DNA, 478 bp, Gossypium hirsutum
  unsure (1)..(478): unsure at all n locations
  Clone ID: LIB3582-057-P1-K1-B1
cccagcgtccggtcaactgtcaaagtttctgtctgtgtcgctctctctattgttgaagttcataagcttttgtatcaatggctgaagtccgtgtaccgaaacctgccgcaccaagttcaagttcacccacagaaccgattagacaatacaaccgggggcggctaccgtgcaaagaactatcacagagcgaccatcatacaagccaagttctagccgggttaacactggccggcaccggcattgggctgatgctagccacaccgctgttcatcatgttcaggccaaatgttggaccagctgccattggcattgccatggactggactgagttcttgtcggccgatgcgtttgagataacagggttgtgcgaccctgagttacgcgcttaactcggctgaggtatgcaacagggtancgagcaggtagatttataccatgcaaagagacgacggcaggacatgacagagtatgtggggca

SEQ ID NO: 15860 - DNA, 413 bp, Gossypium hirsutum
  Clone ID: GOSHI-09MAY01-C36_4
gaacgtgaggtcggaaaagagaagtttaagataggaatgtataaagaagcatgcaagatttgtactcgccaatgcactgcttcaactttggatgattttttgacacttgatgcttataattatatcgtcattcatcatccaaaggatgtttcttctaagctttgatgaagcttccatgaaagcttagaattatggggtttgagtgaaaaaaaatagtgccattgctaaataagcaaataatcataattgtggtttttacgggaaatggttcaataaggtatgttttatttcaagggtgggttttaatggattatttgaaagttttcatttaagtcattagacttataaaattgtagtcgtttgactttttctgtttggaccgcttgcaccaatagaaagtttttttttccttc

SEQ ID NO: 15861 - DNA, 743 bp, Gossypium hirsutum
  Clone ID: GOSHI-09MAY01-C36_2
gttgacattcaacaaagtgatgaaaattatgttacatgaatttgcagggaagcaaagaatggaatagtgtgtttgataaggcagaaaagatggcaggcattagagaaaggaagcataagagcaacagttctaatcgaaacactaccagcagtcttccaaatggatgaaatcctttatgagctcagggatcactctgttggtctcaactgcggccgatgggattatattttcagctacgttaagaccttccaaggtcacccggaccggttgttgccggatcggggtcaagttggtatgacccaacacttcatgaggagttactccgatctcctcatccgaacctgtcatcgacgcggcgtccatgccatgggcggtatggtatgtatgaatttaattatgacattttaattcatgtagttcgtagatatggggggtgttcatgaattagatcgaatcagatttgaattgaactaatatatttgtatcaacatcatacatagttctccaaattaaaaaattattaaaaatctaaaggaaactaaaaatcttagtcaatcggtttgtaccaattcccgctctaactgatccaaaacccttttctgaatcaatacctgatcaattctaatttaactagtttgaccggctatctgatctggttgaatcatccttgccattacatgcagattttaaattaatttgggttttaaaggtcgataaagttcaatggcttatcaggcgccata

SEQ ID NO: 15862 - DNA, 2056 bp, Gossypium hirsutum
  Clone ID: GOSHI-09MAY01-C36_1
cggtccgattccggcccgggcccgcgccccccgccgcgtccgtccattttcaaaattaagggtttttagtaaccaaattgattggccttgggagttacggttacactgcaccatcttccaaaaaaatcaacgcctacgatgttcctcaaggcgtcgatattcgtggtcgattcgatgaagaattcgctaagattttaacaaaggatgccttacaattcgtcgctgatttgcagagagagttcaggaaccatattaagtacgcgatggaatgtcgcaaagaggcgaaaagacgacacaatgaaggggcgttgcctggtttcgatcctgcaacgaggtatattagagaagggaaatggacttgtgcgccggttccgcctgcggtggctgatcggagggtcgaaattacagggccggtggagaggaagatgatcatcaacgctcttaactcgggagctaaagtgtttatggctgattttgaggatgcactgtcaccaagttgggaaaatcttatgagaggtcaaataaacttaaaggacgcagtggaaggaacaataacgttcaacgacaaagcaaggaacagggtttacaagctgaataatgaaatagcaaggctatttgttcggccacgaggttggcacttaccggaggctcatattttcatcgacggggagcctgcaactggttgtctagtggattttggcctttatttttaccacaattatgccactttccgcaacactcaaggtcaaggctttggacccttcttttatcttcctaagatggagaattcaagggaagcaaagatatggaatagtgtgtttgataaggcagaaaagatggcaggcatagagaaaggaagcataagagcaacagttctaatcgaaacactaccagcagtcttccaaatggatgaaatcctttatgagctcagggatcactctgttggtctcaactgcggccgatgggattatattttcagctacgttaagaccttccaaggtcacccggaccggttgttgccggatcggggtcaagttggtatgacccaacacttcatgaggagttactccgatctcctcatccgaacctgtcatcgacgcggcgtccatgccatgggcggtatggcagcacaaattcccattagagatgatccaacagcaaatgaagcagcctttgaacttgtaagaaaagataaacaaagagaagttaaagcagggcatgatggaacatgggcagctcatccaggtctcatcaaaacatgcatggaagttttcaccaacaccatggggaactctccgaaccaaatcgaaactgtcaagcgcgaagacgcttccaacttaactgaagacgatttattacaaaggcctcgaggtgttcgtacgatggaaggccttcgtttgaacactcgtgtcgggatccaatacttagcagcttggttaaccggttcgggttcggtcccgctttataacctaatggaagatgctgcgacagccgagatcagtagggttcaaatctggcagtggttgaaatatggtgttgaattagacggtgatggacttggggttcgagtgaaccatgtgttcgggcgagtggttgaagaagaaatggctcggatcgaacgtgaggtcggaaaagagaagtttaagaaaggaatgtataaagaagcatgcaagatttttactcgccaatgcactgcttcaactttggatgagtttttgacacttgatgcttataattacattgtcattcatcatccaaaggatgtttcttctaagctttgatgaagcttccatgaaatcttagaactatggggtttgagtgaaaaaaaaaatagtgccattgctaaataagcaaataatcataatcgtcattttcactgtgggtttttaagggaaatggttcaataaggtattgtagatgatgttttatttccagtgttggttttataatgtattattcgaaagttttcattcaagtcactaggtttataaaattgttgtcgtttggctttttctgtttggaccgcttgcaccaatagaaagttctcttttcctcc

SEQ ID NO: 15863 - DNA, 492 bp, Gossypium hirsutum
  unsure (1)..(492): unsure at all n locations
  Clone ID: LIB3826-002-Q1-K6-A3
acctaatggaagatgctgcgacagccgagatcagtagggttcaaatctggcagtggttgaaatatggtgttgaattagacggtgatggacttggggttcgagtgaaccatgtgttcgggcgagtggttgaagaagaaatggctcggatcgaacgtgaggtcggaaaagagaagtttaagaaaggaatgtataaagaagcatgcaagatttttactcgccaatgcactgcttcaactttggatgagtttttgacacttgatgcttataattacattgtcattcatcatccaaaggatgtttcttctaagctttgatgaagcttccatgaaatcttagaactatggggtttgagtgaaaaaaaaaaaactaaaaagataatataagaaggaaatgaacagnccattnaacccatatttgatcttgggatcgaccaggttaacgttctcatgttcgatgatgctaaatgattcatccactctgggtgtccattta

SEQ ID NO: 15864 - DNA, 345 bp, Gossypium hirsutum
  Clone ID: LIB3135-014-Q1-K1-E4
agcatgcaagatttttactcgccaatgcacttcttcaactttggatgagtttttgacactggatgcttataattacattggcgattcatcatccaaaggatgtttcttctaagctttgatgaagcttccatgaaatcttagaactatggggtttgagtgaaaaaaaaaatagtgccattgctaaataagcaaataatcataatcgtcattttaattgggggttttaaagggaaatggttcataaaggatttggaaataaggtttaattcaagggtgggttttaatggattaattcaaaggttttaattcaggcaattaggttattaaattggtggccgttgggtt

SEQ ID NO: 15865 - DNA, 1211 bp, Gossypium hirsutum
  Clone ID: GOSHI-09MAY01-C26_1
tagatcgcgggcggccgctcgccacattataataataacaataattctctttctgtttctctggtttaaacatgggtatgggtttaaggaatggatttcttttgattttatcttgtgttgttacactttccctctcagttttggggcgacctgccactttccttgaagattttagaatcacttggtctgattctcatattaggcaaatcgatggagggagagccatccaacttgttctcgaccaaaattcaggctgtggatttgcttctaaaaggcagtatttgttcggacgtgtcagcatgaaaatcaagctcatccccggcgactccgccggaacagtcaccgccttttatatgaattctgttacagatgctgtgcgagatgagctagacttcgagttcttgggaaaccgtaccgggcagccatatacggttcaaaccaatatctatgcccatggaaagggtgacagggaacaaagggttaacctttggttcgatcctgctgcagatttccatacttactcaatcatgtggaaccatcatcagattgtgttctatattgatgaagtgccaattagggtttataagaacaatgaagctagaaatatcccatacccaaaactccagccaatgggagtttattcaacgctgtgggaggctgatgattgggcaacaaggggaggtctagagaaaattgattggaccaaagctccgttcttagcttattacaaggacttcgacattgaaggatgtccggttccagggccagtaaactgtgccacaaacagtaggaactggtgggagggcactgcttatcaagcccttaatgccatggaagctaaaagatataggtgggttcgtatgaaccacgtgatatacgattactgcaccgacaagtcccgttacccggttaccccaccggagtgcatgtccatcatctgaaaatccaaacccaagtgacgtttcgtgtcctattttacgtacatatgtacctccctttatacaaataatagagccatgcaaaaattgggttttaattgtaaagggaaaaataagtgtgcattgcatataattgtggaagtaaaaagtcaattcctatttgtctgtatttggtgcattctgttttgtgccaataaaagctttcttcaaaagatgtaatttattaattttcaacctttagttctcaattaaaaaaaaaaaaaaaaaaaattc

SEQ ID NO: 15866 - DNA, 420 bp, Gossypium hirsutum
  Clone ID: LIB3148-051-Q1-K1-A10
caaaatttcaacctatgggggtatattcgactctatgggaagctgatgattgggcaacaaggggaggacttgagaaaattgattggagcaaagcaccatttttggcttattacaaggattttgacattgaagggtgtccagttccagggccagcaaattgtgctagtaaccctaggaactggtgggaaggtactgcttatcaagctcttaatgccatggaagctaggagatacaggtgggttcggatgaaccacatgatctacgattactgcaccgacaagtctcggtacccggtcaccccaccggagtgcatggcaagtatatgaagtactatcaagagttcccattattccatatccaactgaactgtccagaatatttgatataccaatatgtttcttgtcatatatactttgatgt

SEQ ID NO: 15867 - DNA, 452 bp, Gossypium hirsutum
  Clone ID: LIB3493-045-P1-M1-D2
ttttgttttgcttttctcttgtgttcttgcaatttccttttgtgtttggggtaagccggctacttttcttgatgattggcggattacttggtctgattcccatattaggcaaattgatgagggaaggccatccaacttgttctagaccaaaattcaggctgtggagttgcttccaaaaggaattatttgttcggacgtgtcagcatgaagatcaagcttatacctggtgactccgccggaacagtcaccgctttttatatgaactctgatacagatacggtaagagatgagctagacttcgagttcttgggaaatcgtagcggccagccttatactgtccaaaccaatatctatgctcatggaaaaggagatagggaacaaaagggtaacctttggtttgatccttctgcagaattccatacttacactattaatgtgaaatcatcatcata

SEQ ID NO: 15868 - DNA, 392 bp, Gossypium hirsutum
  unsure (1)..(392): unsure at all n locations
  Clone ID: LIB3166-019-P1-K1-G8
ccgggccgacccacgcgnccgcccacgcgtccgcaataattctctttctgaaatacntgttcaaacatgggtatgggtctgacgtatttatttcttttgatgccacccccccctcttacactttccctctcatttttggggctacctgccactttccttgaagattttagaatcactttttctgattctcatattatgcaaatctatggagtgagagccatccaacttgttctctaccaaaattcaagctttggatttgcttctaaaatgccacatttgttttgtcgtttcaacatgaatatcatactcatacctcacgactccgtcggagcagtcacctccttttatattaattttttttacataatcttattctatatttatctatactt

SEQ ID NO: 15869 - DNA, 363 bp, Gossypium hirsutum
  Clone ID: LIB3120-048-P1-K1-H4
cccacgcgtccgcttctaagttcaaaacattgatgacaatggcaactctaagcagtgcttggcgttttcatcttctcttgtttccttgcatgttcgatctcggtttcgggacgacccaccactttcctcgaagattttagaatcacttggtccgattcccatatcaagcaaatcgatggagggagggccattcaacttattctagaccaaaattcaggctgtggatttgcttccaaaagacagtatttgtttggacgtgtcagcatgaagatcaagcttatccccggtgacttggccggaaccgtaaccgccttttacattgaattctgatacgggacactgttatgagacgaggcttagatt

SEQ ID NO: 15870 - DNA, 550 bp, Gossypium hirsutum
  Clone ID: GOSHI-09MAY01-C896_2
cttctgtagaagctgtgaagtaagcaaaatgggagaggcagaggtgggtagcaaagacaaaagatggagtcttcaaggcatgactgcacttgtcaccggtggtaccaaaggcatcgggcatgcaatcgtggaggaattagctggacttggagccattgtgcatacatgttctcgaactgaaaccgagctcaacgattgcttactcgaatggaaagcaaagggttttcgagttacaggttcagtgtgtgatgtttcgaatcaagctcaaagggaaaatctattaagcactgtttcctctgcgttcaatggaaggcttaacatcctgataaataacgttggaacgaatatagggaaaatggtgacggattacacggcggaagatgtttcgtttttgacgagcaccaacttcgaatcggcttataacattagtgtattggcacatcccttttgaaagcttccgccgctgcaagcgttgtgtttatttcttcaattgttggtgcattacctatatataccgcgcctatattaggagccaccaaagaggccatga

SEQ ID NO: 15871 - DNA, 976 bp, Gossypium hirsutum
  Clone ID: GOSHI-09MAY01-C896_1
cccacgcgtccgcccacgcgtccgccaaaacggagtcttcaagatggagtcttcaaggcatgactgcacttgttactggtggaaccaaagggctcgggcatgcaattgtggaggaattagctggattcggagcggttgtgcatacatgctctcgaactgaaaccgagctcaacaattgcttactcgaatggaaagcaaagggttttcgggttacaggttcggtgtgtgatgtttcagatcaaactcaaagggagaatctgttaaacactgtttcctctgaattcaacgggaagcttaacatcctgataaataatgtcggaacgaatacatcgaaattggtgacggattacacggcggaagatgtttcgtttttgacgagcaccaacttcgaatcggcttataacattagtgtgttggcatatccccttttaaaagcttcaggtgctggaagcgttgtgtttatgtcttcaatggctagtctattacccgcatactttggggctatatatgcttccaacaaagctgccatgaaccagcttgcgaaatacttgtcatgcgattgggcaagagataatattagggttaatgctattgtaccttcggtcgtcaaaacagccctctttgacgagtgtttcgaagctaataaagaaggattagaggcaaccctaaaccgaacaccattaggacgggttggacagccaaaggaagtgtcacctatggtggcgttcctgtgcctaccagcggcttcatatgtaacggggcaggttatgagtgttgacggcgggatgagcgtgaatggcctctcctttcctaaggaaatcatgaaagaaacaaagagccatgaactcaagtatgtaagatgaaaatcgagatgaattggacatgggtaagccatgagaaaagaataaaaaaacaagtttgtcaacccggaaaggcaaaagacgcaacatacactaaaaaatgcccttaatggccg

SEQ ID NO: 15872 - DNA, 771 bp, Gossypium hirsutum
  Clone ID: GOSHI-09MAY01-C886_1
cggacgcgtggggccaaaaatcaaatctagagaaaaaagttgggaaagtgttcctcctgacaagttgactgtagtctgcaatggcatggaaggatcatatattccaaatcttcatttagttgtatgtgagtgcggtgcatgcgggtcaaaaaagtatacactaagtgaatgggagcggcatacaggctgtagagcaaaaaaatggaagtatagtgtgaaagtcaaggacacaatgacaactctggaaaaatggattgttgattacaatgcccatggtgttcatactctaaagctagataagcagaagctaattggttttttgcaagaaaaatatgagcctgttgatgcaaagtggacaacagaaagatgtgctgtatgtagatgggtcgaagactgggattataacaaaattataatctgcaacaggtgtcaaatagctgttcatcaagaatgctatggggcaagtaatgttcaagatttgacatcttgggtttgtagggcttgcgaaacacctgatattgagagggagtgttgcctttgccctgtgaaagggggtgctttgaagccaactgatgtggagtcactatgggttcatgtcacatgtgcctggtttcggcctgaagttggtttcttggatcatgagaagatggaacctgctgttggagtcctcagaattccacccacttctttcttgaagagttgcgtgatttgtaagcaaactcatggttcctgcactcaatgttgcaagtgttcgacttattttcatgtgat

SEQ ID NO: 15873 - DNA, 555 bp, Gossypium hirsutum
  Clone ID: GOSHI-09MAY01-C876_1
cccacgcgtccggcctttctctgaaacttggactggtcttatgctgtcgcaatgattttgttacaatggcaacccaaatttggagagtgcatcatgtggctcggaatatagtagcattggatcacgaaactcaaagatgaatcaaaagttattgtagaggattatccggcatcgatgagattgatcgagtaaatgctacccaaaaaggcagcgacatgatcgaaggtgccggaaatacagccggtaagtatctaaactgtaagcatcttgaaatgaagaaatgtaaaaatttgactgttaaagtgacaaacccctgttgaacacttgtacacgcatcactgcacagtttatctgcaaatcccaatttcaatatggttagtcaaatcaaaatcatggagaacaaatgaaaggacctaacagaatcatgcggtagaactaccatggacgcccctgttaagacacatattatatttagtcctctttactcaaaaaatggacaaattaatctctatacgttagttcaaagaactaattagtcatttttattaaagaatt

SEQ ID NO: 15874 - DNA, 814 bp, Gossypium hirsutum
  Clone ID: GOSHI-09MAY01-C866_2
ttccacgcgcccgccctcccgcccgccctcgcgccccccctcgcgtccgcctcctttcactttttacactcttctaattccactatattttcccctctcagtttctcagtaaccaaacagagcacaaaataccaggaaaccgcaataaaaatgactgacgcttccgaggaagccaagcaaatcgagaagctctacgaatttggcgaacgcctcaacgaggctaaggataagtctcagaatgtgaaagactacgaaggaatcatcgatgccacgaaaacaagcattaaggcgaagcaattggctgcgcagctaattccccgcttcttcaagttcttccctaaccctctccagccgtgctcttaatgctcatttcgatttgattgaagaagaagatttagcggttcgagtgcaagcgattcgtgggcttcctttgttttgtaaggatacaaaggagtacatttctaaaatagtagacattttagggcaactccttactgctgatgagattgtggagcgtgatgctgttcataaagccttaatgtctgtattaaggcaggatgtgaaggaacttattggaataattgaagggcaggctgatttagatgcacaatttgacgtctctgatgcagatcatattgataggttgatatcgtgtctgttcatggctattccattttttgtgaggggtgcacctggcagcaagtttctcaactacttaaacaaacacattatacctgtttttgataagcttcccgaggaacggaagctggatttgctcaaagctttaacagaaattttctcttacacaacacca

SEQ ID NO: 15875 - DNA, 956 bp, Gossypium hirsutum
  Clone ID: GOSHI-09MAY01-C866_1
cttaatgttaacattgttgaagtttcactctctcagttatcccgatccttaaatccaccaaatgactgactcttccgacgaagccaagcaaatcgagaagctctatgagttcggcgaacgcctcaacgaagctaaggataagtctcagaatgtgaaagattacgaaggagtcatcgatgcaacgaaaacaagcttaaaggcgaaacaattagctgctcagctaatacctcgctttttcaagttcttccctaacttatccagccgtgctctcaatgcacatttcgatttgattgaagaagaagatttagcggttcgagtgcaagcgattcgtgggcttcctttgttttgtaaggatacaaaggagtacatttctaaaatagtagacattttagggcaactccttactgctgatgagattgtggagcgtgatgctgttcataaagtcttaatgtctgtattaaggcaggatgtgaaggagtccttgacagcactattcaagcacatttggaatgttgaggaaccaagtcaagatgacactattcgtgacaaggttttgtgctttatacgagataaggtttttcctcttaaagctgatctcttgagacccccagaggaaatggaaaggcacataactgatttaattaaaaagagtttaggagatgtaactggagctgaattcaggatgtttatggactttttaaaaagtttgagcatatttggggagaaagctcctcctgagcgcttgaaggaacttattggactaattgatgggcaggctgatttagatgcacaatttgacgtctctgatgcagatcatattgataggttgatatcgtgtctgttcatggctattccattttttgggaagggtgcacctggcagcaagtttctcaactacttaaacaaacacattatacctgtttttgataagcttcccgaggaacggaagctggatt

SEQ ID NO: 15876 - DNA, 727 bp, Gossypium hirsutum
  Clone ID: GOSHI-09MAY01-C806_1
cccatatctattttcggcggcaacatcggagaggcaccactaccagcgccaattcccagaccttcttcttcagttgtacattctcaaatcaaatcaaatcaaatcgtacactgaaaaaagcttaacgaaaatggtgcgtatagaagaaaagcaaggcacgatagtgcctagttcgatgccccagcaacaaaaccctctgcagcaattgcaagctaagttcaaggaagtggagaacggtttcagggcttggttatccaagcaacccttgccagtcgaggcgactgttgtaaccaccaccggcgcagctcagggcgctgctatcggtgctttaatgggtaccctcaccaatgatatttcgtcctctcttcaaactcctcctcaagcttccctaaatcctcaagctatggcttctttcaaacaagcccaggctctatcagggggtcctttggtacaagctcgcaactttgcggtgatgaccggtgttaatgccggcatatcttgtgttatgaaaagattgagagggaaagaggatgtgcaatctagcatggcggcagcttttggttctggggccatgttttctttagtcagtggcatgggtggaccgaatcaggctgcaaatgcggtcacttctggtctatttttcgcacttgtgcaaggcgggcttttccagttgggcaaaagttttctcaaccacctggtgaggatgtgaattatacagaacaagatc

SEQ ID NO: 15877 - DNA, 389 bp, Gossypium hirsutum
  Clone ID: uC-gsronu33B147g09b1
ttcactcgtccggtggtacctctaatgaaatacaactagcattgtctctccaaagaccaaaaaatataagaatacaaaactaaaacaaataaaaaaaaaatcgtacactgaaaaaagcttaacgaaaatggtgcggatagaagaaaagcaaggcacgaaagtgcctagttcgatgccccagcaacaaaaccctctgcagcaattgcaagctaagttcaaggaagcggagaacggcttcagggcttgggtatccaagcaacccttgccagtcgaggcgactgttgtaaccaccaacggcggaagtcaaggggctggtattggtgctttaatgggtaccctcaccaatgatattttggcctctcttcaaactcctccttaagcttccctaa

SEQ ID NO: 15878 - DNA, 534 bp, Gossypium hirsutum
  Clone ID: LIB3582-049-P1-K1-H10
gtgttattggaattgttgctaaaggctttagattcttcaagctccatggacatttcagaagactctgaaagtggcctggatagacatactgcattggacgattggcagcttgtgataagaaaattttcgaataaggaaccagaattgcttctggcccttcttcaaaggattctttatatgatcgggacaaatgaggcatcaaaatccgaaacaggtaaacacaaatttatattgacttggttgtacgtcccttttgaatgtcgtactttctacgtaattcggtttactttccgattcttgtttagtaggccatccgacagcttcagagggtagaccggaggcttgccaagtagaacatgtctcatctttgtttgcatggctagttagacatttagaattaaaaggaaaaagcgtgtcaaatgcaattctactggagctactgcgtaaatgtctgttggtggcgtctttacgtaacaaccatctcatggattctgcccttcatattgcacagttggttggaaacagtgttctaat

SEQ ID NO: 15879 - DNA, 530 bp, Gossypium hirsutum
  unsure (1)..(530): unsure at all n locations
  Clone ID: LIB3828-016-Q1-K6-H6
naaattatgcatttcctgctgggtgtgtctgtttttcaggtcctaagaaactgttagtaaaaccttgaaagtcttgtaagtttatattctacttcatcctcggaagtagtgtctgtgttattggaattgttgctaaaggctttagattcttcaagctccatggacatttcagaagactctgaagtggcctggatagacatactgcattggacgattggcagcttgtgataagaaaattttcgaataaggaaccagaattgcttctggcccttcttcaaaggattctttatatgatcgggacaaatgaggcatcaaaatccgaaacagtaggccatccgacagcttcagagggtagaccggaggcttgccaagtagaacatgtctcatctttgtttgcatggctagttagacatttagaattaaaaggaaaaagcgtgtcaaatgcaattctactggagctactgcgtaaatgtctgttggtggcgtctttacgtaacaaccatctcatggattctgcccttcatttgcac

SEQ ID NO: 15880 - DNA, 1709 bp, Gossypium hirsutum
  Clone ID: GOSHI-09MAY01-C596_1
ggccgcacccgtccgttgggccccttgttgccaggctctgccttgagtggttccagcttctcatgtccgtgttcgaggggagttcaggaaatctggccccttcgcctttcccttccgggtttccagttccggtttttgatgccctcgttcttactgcttccaggatcctccacagggaacccatttgcttccaaatcaacatccccgactccgattcaccggtcgtagtggttggcgatcttcatggccaattgcatgatcttcccggcccgccccagcttccgggctttcctgcccaaaatcggatctggggcttcgttggggattatgttgacaggggagcttggggtcttgagactttcttgctcttgctagcctggaaggttttcatgccgcatagagtgtttctccttcgtggaaaccatgaatccaaatactgcacctctacttatgggtttgagaggggggtgcgggcaatgcctggggataaaggtaagcatgtgtatcgaaaatgtttgggatgctttgaaggactacctttggcctctataattgctgagcgtgtatatactgctcacggggggcttttccgcagcatttctgtcactccttctagaaggtcaaaagggaagaagaatcgtaggatttatctcatccctgaagccaacgccttatgccttggttctttggaggaattatctaaagctcgaagatcagtcctcgatcctccttgggaaggattgaatttgattcctggtgatgtgctatggtcagatccatcaatgaaacctggtctttccccaaataaggagagaggcattggcctgttatggggccctgactgcacggtggaattcttaaaaaagttcaaactaaagctaattatcaggtcgcatgaaggcccagatgcaagagaaaaaaggcctggtcttggaggaatggatgaaggatacacaatagatcatgatgtggaatcggggaaactgataactgtatttagtgctccagactacccacaatttcaggcaacagaagagagatacaataacaaaggagcatatgttgtactaaagccccctggttttgataatcctgaatttcatagttttgaagcaattaccccaagacccaaggtgaatccatactatgactttgaggaggtgattgattctgatgaagacttggatttagcttcaatggtgactactgacttgtaatggccaggctctatttgcttttcatgatcactattcattagttttgaaagttgtacatggtattaatgagttttcattaatataattatttggtaacaaaaagcatgttcctttcactttgaagctgtttgttatgccgtaaaagaaacctatccttgtgttaaattaatatgatttatttatagttaaatggtagagtaaatgggcggacagacagacagacaggatgtgatggtagttgtagactagtggcagttgtatttttttttttttttttgttggtgttgtagagttgatgtagctttgatgggaggtcaaacatttagtttttgccctttttaagtaagttgatatactaaatttttgtttgtgcattaaaaaaaaaaaaaaaaaagggcggccgcccttttttttttttttttaaatcgcataagttcaaatctgttcatattaaactaaaaaaaaaaacaattacagcaactagcaattagt

SEQ ID NO: 15881 - DNA, 363 bp, Gossypium hirsutum
  Clone ID: GOSHI-09MAY01-C556_5
gaattctcgaggaagaagttggacttgaccggacaggagctgaccgaggagaaggaattggcttactcatgcctctcatgaatgcattcatcatttccataatctgtttggaagaggagtggtttgccttaataggattagctgcagttttgaataaaaaaccgttctagatgaactgctagtgattgcgaagcgacgtcctctgatcgagatcttcattttacttgtcacttgttcatggatattgtgggtattttaccggtaatcccggattttatgctccaattttaaatgggttaatcgacactgttggtgacccaaatataactgattctaagcagcttttgtttatacttagttgtg

SEQ ID NO: 15882 - DNA, 439 bp, Gossypium hirsutum
  Clone ID: GOSHI-09MAY01-C556_4
aggcgtgcgcccacgcgtccgcggacgcgtgggtaaatttctacttcactctctccacttaactcttccatctgtacgggatcgttttgtgtggtctgcggtctccatcaatggcgaaagaaccagttcgcgtcctcgttactggagctgcaggacaaattgggtatgcccttgtacccatgattgctaggggagtcatgttgggtgctgatcagcctgtaatccttcacatgcttgatatcccacctgctgcagaggctttgaatggagtcaagatggagttggtggatgctgcttttccccttctaaaaggtgttgttgctactactgatgttgttgaggcgtgcactggagtcaacattgcagtcatggttggtggtttcccaaggaaggaaggaatggaaaggaaggatgttatttcaaagaatgtgtttattta

SEQ ID NO: 15883 - DNA, 1409 bp, Gossypium hirsutum
  Clone ID: GOSHI-09MAY01-C556_1
aatacctccgattcttagcgttttctcccacgcgtccgctctgctcgaaatcttcttcattctcattctctctccactgaactcttgctaaacggtatcgttttagtcagtctttcatcaatggcgaaagaaccggttcgcgtcctcgttactggagctgcaggacaaatcgggtatgctcttgtacccatgattgctaggggagtcatgttgggtgctgaccagcccgtgatccttcacatgcttgatatcccacctgctgcggaggctttgaatggtgtcaaaatggagttggtggatgctgcatttcctcttctaaagggtgttgttgctacaactgatgctgttgaggcatgcactggagtcaatgttgctgtcatggttggtggtttcccaaggaaggaaggaatggagaggaaagatgttatgtcaaagaatgtgtctatttacaagtctcaggcttctgccttggaacagcatgcagctcctaactgcaaggttttggttgttgctaaccctgccaacaccaatgcattgatcctgaaggaatttgcaccttcaatccctgcaaagaacattacctgtttgacaaggctggatcataacagggcactaggtcaaatctcagagaaactaaatgtccaagtttctgatgttaagaatgtgattatttggggtaatcattcatcaactcaatatcctgatgtcaatcacgcaactgttatgactccatctggagaaaagccggttcgcgagcttgttaaggatgatgcatggttgaatggagaattcataaccactgtccaacaacgtggtgctgcaatcatcaaagctaggaaactctcaagtgcactatctgctgctagtgctgcttgtgatcacattcgtgattgggtccttggaactcccgagggcacatgggtttccatgggggtttactctgatggttcatacaatgcaccagctggggtcatctattctttccctgtaacttgtaagaatggagaatggacaattgtccaagggctggcaattgatgaattctcgaggaagaagttggacttgaccggagtggagctgaccgaggagaaggaattggcatactcgtgcctctcatgaatgcattcatcatttccataatctgtttggaagaggagtggtttgccttaataggattagctgcagttttgaataaaaaaccgttctagatgaactgttagtgattggtaagcgacgtcctctgatcgagatcttcattatacttgtcacttgttcatggatattttggatattttaccggtaatcccggattttaagctccaattttaaatgggataatcgacactgttggtgactttttttttttttgtctatctagggcattgtttactgtgaatctcaaaaaaaaa

SEQ ID NO: 15884 - DNA, 448 bp, Gossypium hirsutum
  Clone ID: LIB3148-021-Q1-K1-E6
cccacgcgtccggcgcagtacaacggagagttgtatgctgcgttcgggaaggatgaatcgctcccgaaaaggaatctattgattctctcccaattggttggaccgtaggtgcgatgatttacttcacgggcgaggtctctggttcaagtccaggatggcccagctgcgccaaggaaaagaatagaagaagcatctgactccttcatgcatgctccacttggctcgggggatatagctcagttggtagagctccgctcttgcaattgggtcgttgcgattacgggttgggtgtctaattgtccaggcggtaatgatagtatcttgtacctgcaatcatcaaagctaggaaactctcaagtgcactatctgctgctagtgctgcatgtgatcacatacgtgattgggtccttggaactccagagggcacatgggtttccatgggggtgta

SEQ ID NO: 15885 - DNA, 456 bp, Gossypium hirsutum
  unsure (1)..(456): unsure at all n locations
  Clone ID: LIB3585-026-P1-K1-A8
cccacgcgtncgcccacgcgngcgcccacgcgaccggactctcagctctaaggcttcgttcattctcactctctctccactgaactctagctaaacggtatcgttttagtcagtctttcatcaatggcgaaagaaccggttcgcgtcctcgttactggagctgcaggacaaatcgggtatgctcttgtacccatgattgctaggggagtcatgttgggtgctgaccagcccgtgatccttcacatgcttgatatcccacctgctgcggaggctttgaatggtgtcaaaatggagttggtggatgctgcttttcctctttctaaagggtgttagttgctacaacctgatgttagttgaggcatgcactaggagtcaatgttgctgtcatggttggtggtttcccaaggaaggaaggaatggagaggaaagatggttgtcaaagaatgtgctatttac

SEQ ID NO: 15886 - DNA, 402 bp, Gossypium hirsutum
  unsure (1)..(402): unsure at all n locations
  Clone ID: LIB3197-033-Q1-M1-G3
ggttcatacaatgcacctgctggggtcatttattccttcccagtaacttgtcgcagtggagaatggacaattgtccaagggctggcaattgatgaattctcgaggaagaagttggacttgaccggagcggagctgaccgaggagaaggaattgggcatactcctgcctctcatgaatggattgaccatntattcaatgtgtggtatggtatgctntggtaggatagcagcagttttgaataagaaagggattctagatgaactgttaatggtggggaaagccgccttncccgatcttgcatctttaagaatgggttttctgtttttattactgaccccagagttcagatcgattntaaatgggggataagcaaagaactattgtcatncatacgaatgtatg

SEQ ID NO: 15887 - DNA, 319 bp, Gossypium hirsutum
  Clone ID: uC-gsronu33B100h06b1
gtttgtcttaataggattagctgcagttttgaataaaaaaccgttctagatgaactgttagtgattggtaagcgacgtcctctgatcgagatcttcattatacttgtcacttgttcatggattttttggatcttttccctacttttcttgttttttattttctctatttccttttttctttcttctactcctttttttctattcctcctactttttcttttctctcttttttttctttcttttttcttcttttttctttaccttattcttcttctttttttcttctattatctaccttcccctcccttttctctctttt

SEQ ID NO: 15888 - DNA, 314 bp, Gossypium hirsutum
  Clone ID: LIB3148-022-Q1-K1-B3
cttgtcacttgttcatggatattttggatattttactgtaatcccggattttatgctccaattttaaatgggttaatcgacactgttggtgaccaaaaaaaaaaaaaaaaaaaaaaaaaaaaaaaaaaaaaaaaaaaaaaaaaaaaaaaaaaaaaaaaagaaaaaaaaaaaaaaaaaaataaaaaaaaaaaaaaaaaaaaaaaaaaaaaaaaaaaaaaaaaaaagggggggcctttttaaaaaaacaaagtttattttctcttgcttggaaaattaaaatttttttttaggggcaccaaaataaaattaaatgg

SEQ ID NO: 15889 - DNA, 274 bp, Gossypium hirsutum
  Clone ID: LIB3149-037-Q1-K1-F10
atctgtttggaagaggagtggtttgcctttataggattagctgcagttttgaataaaaagccgttctggatgaactgttagtgattggtaagcgacgtcctctgatcgagatcttcattatacttgtcacttgttcatggatattttggatattttaccgtaatcccggattttatgctccaattttaaatgggttaatcgacactgttggtgacctatttaaaaaaaaataaccatattaaaacttttgatagaactctaaaatcaatccacc

SEQ ID NO: 15890 - DNA, 211 bp, Gossypium hirsutum
  unsure (1)..(211): unsure at all n locations
  Clone ID: LIB3083-014-Q1-L1-E7
tgttctagaaatcttctttattctcatncttttttcactttagcgcggcgaaacagnatcgggggaggcagnctttcatcaatggcgaaagaaccagttcgcgtcctcgttactggagctgcaagacaaatcgggtatgctcttgtacccatgattgctaggggagtcatgttgggtgctgaccaacccgtgatccttcacatgcttgata

SEQ ID NO: 15891 - DNA, 681 bp, Gossypium hirsutum
  Clone ID: GOSHI-09MAY01-C516_1
ggaatttcgtactaattattttttccatcattttctcctgttttctcagcaaccaaacgggggtgaggggcagcaataatgcagtcgttcattagtgggagtatccgcttgggtcaaagacaaggtttctgcagatggaacagtgcacatttcaaagcctctaccagagcttttctgcctactcacagtggcaacagcctaatccatggaaccaacgattcaatcaaatcttccgagaatcatctcctgcaacttctaggaacaagatttggatcccaaacaaaagaattgatgtttcccagcagctctggtggatgtttgattccaagtttgtctccattggctgcaatgatgtcttcatcttctagcagatatatgacaacagctgcctcacctacaatggattcttctgaatctgtcactgatgtgcctactcgaattaaatttaagaggcttgataaaactgccaggcacataatgcagattgtggaataaggaagcagtggaggaacttaaagggccaaagggagatacctgaaaataaaccccggctaacatggtgccactccaaagtggaagttacctgaaaaccaaaccgacctgtttcaacccataaaagggttatccgttaatacccagaaacgtattgctggccctgaataccaccttcccggaataacc

SEQ ID NO: 15892 - DNA, 735 bp, Gossypium hirsutum
  Clone ID: GOSHI-09MAY01-C506_2
gtcttgcgtccgctttttgctcccccctcccctgttcatttcgatcttcaaaagagaaaagaacccttcaaatttcgaagattctccatgtattcgaagattctcgtgatcctcgacaaactcgctgtgatcgcttatcaaaacagatctttgattcttgatctgtatcgttgctgtgcctgtttcggaaaccttttctggtgtggtgaaagaggaaagatggtttcgttgcaaggaccggtgatttgcccagccgttcggagcaaacagtgtggggtttacatgccaccggcgaacgggcctttcccgagggcaaaattgtatagaagtgatatatggggatatcgagggataactgatggaaagaataaggcgcgtgctatttttcgtcaactcaaattacgtaagtgcaggaccacggtgcagtgtactttcagttcatcttctgatgggaatggaagcatggccgagaatttcaacgaaaatgatgaagactatgtaaattccagtgtgcttgaagctgttgaggtgaggagtggagctgatggattcatgattaaaatgagggatggtaggcatttaagatgcgtccctaacaatcctcaaggtgggcatctgccggattatgcaccacaccctgccatcgttctgaagatggaagatgggaccggtcttcttcttccaatcattgttttggagatgccaagtgtgttgctcatggcaacagtgcgcaat

SEQ ID NO: 15893 - DNA, 718 bp, Gossypium hirsutum
  Clone ID: GOSHI-09MAY01-C506_1
gctgatccttaacttgtcggtttatttacttactttccgtttttctcgattttctcttttattttccttcttttttcccttcgtttttttttctttgattttgatcatcaaaaaaggcttctttcataacacaagctttccttcaacttccaaagattcgttctgaaagagggaccaaaaagaaagatggtttgtttgcaaggaccggtgatttgccccgccgttgatagcaagcaagttggggtttatacgctgccgtttaatgggccttttccgaggactagattgcatcgaagtgatatatggggatatagagggatagttgatggaaaaggtaagccacgtggcatttccggtcacctgaaacggcggaggaggtttaacaccacggtgcagtgtatgtttagttcatcttccgatgggaatggaagtatggctgagaatttcaatgagaacaatgaagattatgttaattctagtgtggttgaagctgttgaggtgaggagtggagctgatggatttatgatcaaaatgagggatggtaagcatttaagatgtgtccataacaatcctcaaggtggtcatctcccggattatgcaccgcatcctgctatcgttctgaaaaggaagatgggaccggtcttcttctcccgatcattgttttggagatgccaagtgcgttgcttatggcagcattacgtaatgtccaaatcgctag

SEQ ID NO: 15894 - DNA, 1183 bp, Gossypium hirsutum
  Clone ID: GOSHI-09MAY01-C536_1
aaaattttaagatttaattttaatatgttcattttaatagctagttgatctaataagaacaagagtatagtattcaagtggtggtatgtcggttagattttgtttcaaaaatagtggtccaattaacatgcaagtcctctatgatgctatccatatacaatttggccacttcaacttttacctatcacatttttatggtttctcaactaagtcctttccagtaaaattcccattcggtactcgttttatttgtcttcacatatcccagcttaaataacccaaaaaatgctaatggcttagtagagcaattaggcaatatctgtttttaaatgtattcaatggtatgtccatttgaatcagctgaaaatttcaccaattccctttgcaaagtgcttactaaaatactggattccatttctggattacatttaggcggacacggtgaggatttccccgataaagtaggtatcttaatacaatgatcaatttcccggtatcaatcctggttccatttaattgcctatgctaatttctcattttatcattattattttccttttaatggattatcctcgtatctgtttttctccgaactgcgtattttgagaatatttttagtacgtgtacatatcttgtattgcctctgtattgttcaggctcttgcatgggcccttggtattcattgcgttgaaggttgtagttcatttactagctgttgaagatattgacggaagttgtatcagcagtgagaagaggtagtttgtgtgttgggagtttgcatatgtcagctttgattagcatcggaaatcaatgtatttgagctttggtcgattttcaagatttatggatttataaagagtggagcttgggacgcaccagatgaagagctcgatgcttttgccggttctattggtagaaggcttctactgggattagttttgaagaagtgtttgatacgagaggtacatatgtcaaatgtgtaaccggttccatttacatattaaaaaattttcagtggacttcggtcccgtggtttttccccctttgtggggttttccacgtaaatttggtgtctttctatattcttatgttcattcgttattaagccgaaggtgaatcgcgtcacagtattgattccattcgaaggtatgaaagaaatggtatcccattaattctttctact

SEQ ID NO: 15895 - DNA, 794 bp, Gossypium hirsutum
  Clone ID: GOSHI-09MAY01-C526_4
gctggggaaagctttcactgtataactgctccgaaagaaaagggaaaaaaaagaagagaaagattcttgcttaaccatggcggagaaggcagtgactattaggaccaggaagttcatgaccaacaggctactttccaggaaacaatttatcattgatgttttgcatcctgggaggcccaatgtttccaaggctgaactaaaggagaagcttgctagaatgtacgaggttaaggaccccaattcaatttttgtgttcaagttcacaacccattttggaggtggtaaatctaccggatttggtttgatatatgattctgttgagaatgcaaagaagtacgagcccaagtataggctaatcaggaacggactcgattccaaggtagagaaatcgagaaagcaaatgaaggaaaggaagaaccgggctaagaagatccgaggagtaaaaaagaccaaggccagtgaagcagcaaagaagaagtgagataaaaggatttgaaaaagaagaggtgaagttgatgctgtaacttagagccaatgttttccaacacgagtgtccaggtgttcttcaatctgttttgtttttgaaaaaaaaaaaaactggattttggtgttcatctgatgtttaatattatttatgcagcagattttgatatatttagtgagtgtaatactttgttatttccattgaagttcccttcctttattttgccatttagcttcttctttttccttctaaaatattagaaaaagacatttaattatttttttctatataaatactagacttttaagtt

SEQ ID NO: 15896 - DNA, 733 bp, Gossypium hirsutum
  Clone ID: GOSHI-09MAY01-C526_3
atagcatttaccattgacctgtgccggcaaggagatgagatgatttatgcttggccatggctgacaaggcactgactattaggaccaggaagttcatgaccaacaggcttctttccaggaagcattttatcattgacgttctacatcctgcacgacccaatgtttccaaggcggagttgaaggaaaacctctctagaatgtatgaggtgaaggaccccaattcaatctttgtgttcaagtttaggactcattttggaggtggaaaatctactggatttggtttgatttatgattctgttgagaacgccaagaagtacgagcccaagtacaggctgatcaggaatggactcgataccaaggtagagaaatcgaggaaacaaatgaaggaaaggaagaacagggctaagaagatccgtggagtaaagaagaccaaggccagtgaagcagcaaagaagaagtgagagctaaaaggcaaaactcgtgcttatcacagagccaatgcttttcaacattgttttttagggttcttgaatcttttgttttggaaaccagatttttggtgttgttatctgatgtttagttatattattacgatctgatttttcttattttgagaattctttcatggcatattttgaaatatcccatgttttgccattgatattgtcaggcagtacttgctctctttctaccaaatcttgaatcctaaaaaaaaaaaaaaaaaattgatgcg

SEQ ID NO: 15897 - DNA, 884 bp, Gossypium hirsutum
  Clone ID: GOSHI-09MAY01-C526_2
cggacgcgtgggcggacgcgtgggtgccgctgtttgtaacttttggtgcttccactgcgccaaaaccaagaaaagaggaagatatttgcttaaccatggcggacaaggcagtgactattaggacaaggaagttcatgacgaacaggctcctttccaggaaacaattcatcattgatgttttgcatcctgggaggcccaatgtttctaaggcggagttgaaggagaagcttgctagaatgtatgaggtgaaggacccaaattcgatctttgtgttcaagttcaggactcattttggaggtggtaaatctactggatttggtttgatatatgattctgtcgagaacgcaaagaagtatgagcccaaatacagactgatcaggaatggactcgacaccaaggtggagaaatcaaggaagcaaatgaaggaaaggaagaacagggctaagaagatccgtggagtaaagaagaccaaggccagtgaagcagcaaagaagaagtgagctaaaagggatgaaagaaaaggtgaaatctatgtctatcttagggtcagtctttttcaacagcttttgtttactagcctcgcctcaagtgtttaggtgtccttgaacctgatttaccattttgttttcgaaagtggattttgatgttgtattatctgattgctctaatttgagtaaaaaaaaaaaaaaaaaaaaaaaaaaaaaaaaaaaaaaaaaaaaaaaaaaaaaaaaaaaaaaaaaaaaaaaaaaaaaaaaaaaaaaaacaaaaaaaaaacaaaaaaacaacaaacaaacaaaaaaaaaaaaacgggggggggcccttttagggaccccattttctctccccggggtttgcaaaattaaactttttttatgggcccccca

SEQ ID NO: 15898 - DNA, 750 bp, Gossypium hirsutum
  Clone ID: GOSHI-09MAY01-C526_1
cccacgcgttcgcccacgcgtccggctgattttaaagctgcacccgaagccaaaagaggaaaggaaaaaggaggattgtttgttttgcgatggcggacaaggcggtgacgatcaggacaaggaagttcatgaccaacaggctcctttccaggaaacaatttgtcattgatgttttgcatccagggaggcccaatgttgccaaggcggagctgaaggagaagctttctaggatgtatgaggtgaaggacccaaattcgatctttgtgttcaagttcaggactcattttggcggtggcaaatctactggatttggtttgatttatgattctgtcgagagtgcaaagaagtacgagcccaaatacaggctgatcaggaacggactcgataagaaggtggagaaatcaaggaagcaaatgaaggaacggaagaacagggctaagaagatccggggagtaaagaagaccaaggccagtgaatcagcgaagaagaagtgaggtaagatgcccggaacggaaaaaggcgaggatcgcgcttatcttaaagccgatgtttctcgagagcgatgcataagtagtctgaagtttttaggtgttcttgaacctatatttttggaaactgagtttggtgttatttgattatttagttatacgctacttatagtatctgattatcctattttgaaatattttagtgttatgcagttttatttccagataatatagaacataaataatttattatgattttatt

SEQ ID NO: 15899 - DNA, 601 bp, Gossypium hirsutum
  unsure (1)..(601): unsure at all n locations
  Clone ID: AI055244.1
gctgtttgtaacttttggtgcttccactgcgccaaaaccaagaaaagaggaagatatttgcttaaccatggcggacaaggcagtgactattaggacaaggaagttcatgacgaacaggctcctttccaggaaacaattcatcattgatgttttgcatcctgggaggcccaatgtttccaaggcggagttgaaggagaagcttgctagaatgtatgaggtgaaggacccaaattcgatctttgtgttcaagttcaggactcattttggaggtggtaaatctactggatttggtttgatatacgattctgtcgagaacgcaaagaagtatgagcccaaatacaggctgatcaggaatggactcgacaccaaggtggagaaatcaaggaagcaaatgaaggaaaggaagaacagggctaagaagatccgtggagtaaagaagaccaaggccagtgaagcagcanagaagaagtgagctaaaaggatgaaagaaagagatctatggggcctctgaaagtgtgaaggtgagattatggctttgctgaagtgagtcatgccgaaattatgtgttgaaataggcatgaatgaccacactctagattaa

SEQ ID NO: 15900 - DNA, 258 bp, Gossypium hirsutum
  Clone ID: uC-gsflnu33B023h03b1
cttgcgaaagccttcagagcatttaccattgacctgtgccggaaaggaaataagaagattttgcttgaccatggctgacaaggcagtgactattaggaccaggaagttcatgaccaacaggcttctttccaggaagcaatttatcattgacgttctacatcctgtaagacccaatgtttccaaggctcacttgatcgtactgccctctctaaatcttctttttccattccctttttcatctttccttttcttctatct

SEQ ID NO: 15901 - DNA, 947 bp, Gossypium hirsutum
  Clone ID: GOSHI-09MAY01-C486_1
aatgaatattgtattgttcctgattggttgcataaaatgttttggggctatgggcatgcttctgctgcacagtggataaacatgcctgatcttctggagacagtggatttcaaagatacttttcttaatgcaggccatctgaaagagagtttttcacattatcaggtttgctttgttgattcagatggtatggaaactttggatccaagaccaccattccgcatcaagcttcctcggtcacttaaaagtgatactcatgctccatcagaaaatggaagatctgatactggtgtcagtgatgccaagatggtagatgcttgtgttgagaaagaaaaactaattggggaagcatatatccctgctgacccaggtccttatcctcaagatcaaccaaaacagaactctgttagatttacacctactcagattggagcaatcatatcaggtattcagcctggattaactatggttgtgggtccaccaggaacggggaaaactgatacggcagtgcaaatattgaatgttctctatcacaattgcccgtcccagagaacattaataattactcattctaatcaagctttgaatgacctttttgagaagataatggagagagatgtgcctgctcgctatcttcttcgtcttggtcagggtgagcaagagctagcaactgacttggacttcagtaggcagggccgtgtgaatgctatgcttgttcgacggctggaactgcttagtgaggtagagaggcttgcaaggtcactacaacttcccgaagatgtagggtatacttgtgaaactgctggatatttttggttgctccatgtatattcacgctgggagcaatttattgctgcgtgtgcgggtaatgaagataaaccggcatttgtccaagaccacttccctttcaaagagttcttctccaacaccttttagcagtctttact

SEQ ID NO: 15902 - DNA, 412 bp, Gossypium hirsutum
  Clone ID: GOSHI-09MAY01-C446_8
ttgtctacaagaaaactgcatccgtcttgtgcttgaccacggttaagaacgaggataagatggaattcagcaaaatcctcgaggcaatcaaggccaacttccccgcccggcccgatgagtacaggaagaagtggggaggtggtatcatgggctcgaaatcacaagccagaaccaaggcaaaggagaagcttcttgcgaaggaagccgcacaaaggatgacttaagccaaccattactccctttggttaccaagtcaaatttactcctttgcccgaggattacttatatattttctagtttaactttcaaaacatcgagtagctgctgtttgtgatgtaactctgtgccttttcttaatgaaaattatgcccaaaccatcaacaaaaataaaaacgtataaaaaaattaaacc

SEQ ID NO: 15903 - DNA, 358 bp, Gossypium hirsutum
  Clone ID: GOSHI-09MAY01-C446_6
cccacgcgtccgcccacgcgtgacgcccacgcgtccgcccacgcgtgcgagttactcattgagtgtaaccctatacccatcaatagatattaatttgttgtcatccattagtagtctaaattaatgcatataaataatgtcagattgtctaatgcacgcacgacagaatctatatcccattgcttcatgtgtttttgaaaaaagagttattgcgctcattttgccccaattaaaattttactcctttgtccgaggattacttatttattttgtagtataactttcaaaacaccgagtatctgctgtctgtgatgcaattttgtgcccaaaccatcatttatgctgagcgatcttactt

SEQ ID NO: 15904 - DNA, 615 bp, Gossypium hirsutum
  Clone ID: GOSHI-09MAY01-C446_5
atgatgtggatccgatagagttggtggtgtggctccctgctttgtgcagaaaaatggaagtgccttattgcatcgtcaaggggaaatcacgtttgggatcgattgtccacaagaaaactgcttcagtcctgtgcttgaccacagtcaagaatgaggataagtcccacgcctccgaaatcctcgaggcgatcaaggcgaacttcaatgataagtacgatgagtacaggaagaagtggggaggtggtatcatgggatccaagtcacaggcccgaaccaaggcaaaggagaagcttcttgcaaaggaagctgcacagaggatgacttaaaagatcaccatttttatccttccggttgtactttcagttttgttttcgattttgtttagattaaatggtcctctttttaagtaaaagctgcaatcaactttcaaactttagtttcttttctttttaactgaggaatatttatagatttctgtttgaacttttgaaataactttctagctactgttttgatgaaattttgtgggcttataatgaaaaactatcaattatgcggttgatttacaatacatataatgtttgcttccaatatagagatacttactgatcaaaa

SEQ ID NO: 15905 - DNA, 416 bp, Gossypium hirsutum
  Clone ID: GOSHI-09MAY01-C446_4
ggggaaatctcgtttgggatcgattgttcacaagaaaactgctgccgttttgtgcttgaccacagttaagaatgaggataagttggagttcagcagagtccttgaggccatcaaggcaaacttcaatgacaaatatgaggagaataggaagaagtggggaggtggtgttatgggctccaaatcacaggccagaaccaaggcaaaagagaggcttcttgccaaggaagctgctcagaggatgacctagaaatgttcattttttcctatctataatcaccattaatggtgttttctttttcttttttgattaaatgctcctttgctgtcagctgcatttgactctctttttaagtttttttttttttggcagaggaataattattatcattctagtgaaaactttcaaagccccctta

SEQ ID NO: 15906 - DNA, 1177 bp, Gossypium hirsutum
  Clone ID: GOSHI-09MAY01-C446_3
cggcgcgtgggttcgccgtttccgtctaacccaaaaaaaaccttggaaaagcttcaggaggttccaaaatggccccaaagagaggaggaaaggtagttgtgccggccaagaagaaacagagaggttgtgaatccattgtttgagaagcgtccaaagcaattcggtattggaggagctttacctccaaagaaggatctgcaccgttttgtgaagtggcctaaggttgttcgcattcaaaggaaaaagaggatccttaagcagaggttgaaagtcccaccagcactgaaccagtttacaaagactcttgataaaaaccttgcaacaagtctgttcaagttgctcctcaagtataggccggaggacaaggcggccaagaaggaacgtctcctgaagaaagcccaagctgaggctgaaggaaaagctcccgaaacaaagaagccaattgttgtaaaatatggactcaaccacgttacctacctcattgagcagaaccaggcacaattggttgtcatcgcccacgatgtggatcccatagagctggtagtctggctccctgctttgtgcagaaagatggaggtcccctactgcattgtcaagggggaaagcacgtttgggtatcgattgtccacaagaaaactgcttctgtcttgtgcttgaccacggttaagaacgaggataagatggagttcagcaaaatcctcgaggcaatcaaggccaacttcaacgacaagtacgatgagtacaggaagaagtggggaggtggtatcatgggctcgaaatcacaagccagatccaaggcaaaggagaagcttctcgcgaaggaagccgcacaaaggatgacttaagccaaccattgttcccttccagaggttccctctggttaccaagtcaaattttactcctttgcccgaggattacttatatattttgtagtttaactttcaaaacaccgagtagctgctgtttgtgatgtaattttgtgcccaaaccatcatttatgctgagcgatcttacttaaatagtcgtgtatgatatatataatcagtttcgtcctcttgactaaaaagcaactctttttcttaaggtttatttattatgttaattgagtaccaacattggaggtgtttttatcattttatataaaaaataaaaaaatacatatgcttttttagttttt

SEQ ID NO: 15907 - DNA, 1025 bp, Gossypium hirsutum
  Clone ID: GOSHI-09MAY01-C446_2
gtttggtgttatatgctagaacatatgttgttggcatgcgtgcagtgtaccgcattccataatcttatttggttcattggtaaatgcagggccccaagcgaggtggaaaggtggccgtcccagccaagaagaaacaagagaaggttgtcaatccattgtttgagaagcgtccaaagcagtttggtattggaggggctctacctccaaagaaggatttgcatcggtttgtgaagtggccaaaggttgtccgcattcaaaggaaaaagagaatccttaagcagaggttgaaggtcccacctgcattgaaccagtttaccaagactcttgataagaaccttgcaacaagtttgtttaagttgcttctcaagtacaggccagaggacaaggcagccaagaaggaacgtctcctgaaaaaggcccaagctgaggctgaaggaaaagcccccgagtctaagaaaccaattgttgtgaaatatggacttaaccatgttacctacctcattgagcagaacaaggctcaattggtggttattgctcatgatgtggatcccatagagttggtggtgtggctccctgctttgtgcagaaagatggaggtgccttactgcatcgtcaaggggaaatcacgtttgggatcgattgtccacaagaaaactgcttccgtcttatgcttgactactgtcaagaatgaggataagttggacttcagcaaaatccttgaggctatcaaggcaaacttcaatgacaaatacgatgagtaccggaagaagtggggaggtggtatcatggggtccaagtcacaggccagaaccaaggcaaaggagaagcttcttgcaaaagaagctgcacagaggatgacttagaaataccatagtttctcccccaggcagcttgggttttacttttattttctatttttcttgattgattaagtggccctgagtagtcagctgcaacttgtgtttaagtggatttgctttcccctttattgatttgatggaattgtcattagaagttcatctttc

SEQ ID NO: 15908 - DNA, 1094 bp, Gossypium hirsutum
  Clone ID: GOSHI-09MAY01-C446_1
gaggcgtccgcccacgcgtccgcccacgcgtccgcccacgcgtcgggttttcttccgccgttctaaatcacagaaagcttggaagaagaacttaaggaggtgcaaaacatgggcccgaagagaggtggaaaggtggctgtccccgccaagaagaaacaagagaaggttgtcaatccattgtttgagaagcgtccaaagcagtttggtattggaggggctctacctccaaagaaggatttgcatcgatttgtgaagtggcctaaggttgtccgcattcaaaggaaaaagaggatccttaagcagaggttgaaggtcccaccagcattgaaccagtttaccaagactcttgataagaaccttgcaacaagtctgttcaagttgcttctcaagtacaggccagaggacaaggcagccaagaaggaacgtctcctgaaaaaggcccaggctgaggctgaaggaaaagcccccgagtctaagaaaccaattgttgtgaaatatggacttaaccatgttacctaccttattgagcagaacaaggctcaattggttgttattgctcatgatgtggatcccatagagttggtagtgtggcttcctgctttgtgcagaaaaatggaggtcccatattgcattgtcaaggggaaatcacgtttgggatcgattgtccacaagaaaactgcttccgtcttgtgcttgaccacggttaagaacgaggataagctggaattcagcaaagtactcgaggcaatcaaggcaaacttcaatgacaagtacgacgagtacaggaagaagtggggtggcggcatcatgggctccaagtcacaagcccgaaccaaagcgaaggagaagcttcttgcaaaggaagctgcacagaggatgacatagaggaattaatagaccttttgccgcagttcgtgtttttgattaaatagtcttttgtagtaaggtacgatcgattttcgactcgggtttactctcttttccggaggaacattcatatacttttgtggttgaactttctaaatgcctagtttgttgtttgtgctgaagttttgtgattttctaatgaattgtcaatcaatgtttttattttt

SEQ ID NO: 15909 - DNA, 487 bp, Gossypium hirsutum
  Clone ID: LIB3582-030-P1-K1-B10
cccacgcgtccgcccacgcgtccgagccgttcttcttaaaccacaaaagcttggaacaagcttaaggaactgcagaaatggccccaaagagaggtgtaaaggttgctgccccggccaagaagaaacaagagaaggttgtgaatccactgttcgagaagcgtccaaagcagtttggtattggcggggcactacctccgaagaaggatctacatcgatttgtaaagtggcctaaggttgtccgcattcaaaggaaaaagaggatccttaagcagaggttgaaggtcccaccagcattgaaccagtttaccaagactcttgacaagaaccttgctacgagtctattcaagctgcttctcaagtacagaccggagggcaaggcagccaagaaggaacgtctactgaaaaaggctcaggctgaggctaaaggcaaagcccctgagtctaagaaaccaattgttgtgaaatacggacttaaccatgttaccta

SEQ ID NO: 15910 - DNA, 333 bp, Gossypium hirsutum
  Clone ID: LIB3147-046-Q1-K1-B5
cccacgcgtccgagatttttaattagggaagcttggaagaaggaggttcaaaaaaatgggccctaagagaggtggaaaggttgtggctcctgccaagaagaaacagccggagaaggttgttaatccattgtttgagaagcgtcccaaacagttcggtatcggaggagctttaccttcaaagaaggatctgcatcgattcgtgaagtggccgaaggttgttcgaatccaaaggaagaagaggatccttaagcagagattgaaggtcccaccagcgttgaaccagtttaccaagactcttgataagaaccttgcaacaagtttgttcaagttgct

SEQ ID NO: 15911 - DNA, 708 bp, Gossypium hirsutum
  Clone ID: GOSHI-09MAY01-C476_1
cccacgcgtccggccgggcaaaatggcttttccattcctcttcaattcctgctgtatttccttattcagactttcatccgcggagtgcacctctaatcctgcaagggattgaaatcgagatcccattattttctcttcagaaatactgtttccttttttgtttccttccggagtgacgcacctggtctgctgctccactagcatccaggggccataatccttacctctgaccgtgcgtagaatgtggagatgcttgaattgttgactccacctccttcaccggctctgggagatgagggggattcacgcggctttcctggttgtgcccatagcattcacatgagaaagataccacaagtaagttttcagattcgatctttcggaggctgccattaataaagagctgagaaatcaatggtttccttaaattgacatagacacccatattagcaaaacgacccctcgccctgctaccaatgctgaaatccaagttgttcatggtgcgaccattcccccaatctccattaggatctgctttttgtataggtggttgggaagacctgggaatcgaatctaggtaagaaccatataagggtagagtagccccaggttaaaatcaattgtctcaggctggactgttaggtattggttgaaataaccacggaccctggataaaatcttttcatagtcttcggccctttggaattg

SEQ ID NO: 15912 - DNA, 760 bp, Gossypium hirsutum
  Clone ID: GOSHI-09MAY01-C466_3
cccacgcgtccgcccacgcgtccgcccgggcggagcggccgtcggtgcaggtttctttcccgcccgtccgccctcgcctccggtcctggtaaaatcaagaatgatgggagactctggctgcaaaaacactcttgattgtttcattagaactttgaggaatgagggattccttgccttttataaggggtttgttcctaattttactcggctgggatcttggaacgtggttatgttcttgactcttgagcaagccaagaaagctttccggggggaattatattatgattgattttagtttgcaatcaggaagacacaccttttacttgcatattgtgtcttcgatctcaaggagaatattttttgatcaaagaaataaggtaggagcattgcccaaatctctttttcgtataacttaccatttttcttagacaaaatagtattactgtaacaatcaatgttatctggacttgggagaaagtgttttcaattttttccaagtatttatttttccatatattttggaggatcacacctcttaatttccatgttagaatccatgtcaaacacaaattttttaagtaaaaaaatgaagagtttggataacatagatgaactattgagtgaagttttaagagtcagtaattagattacgcctatcttgtcaactggtgtcctaccaaacaaactgaaaattggcaaatatttttccacattgtatttggaatcatgtaatattcttaacatttgtgggaggttcaag

SEQ ID NO: 15913 - DNA, 622 bp, Gossypium hirsutum
  Clone ID: GOSHI-09MAY01-C466_2
aaaaaaaatactgaaaataacaggaaagaagatgaacgggagtgagaattgagaaacccagttgcacaaccttcaatggttgcgaatgaagccatttttttaattacccagtttcatacgtatatatatcttgcttttcattttcttttcttctttcactgttactcaaccaacttctttttttttcccctttttttattggcccagatctcagctacccattcctcatcttcagttcctaatggcagatcttaagttttctttcgctgaaacttttctttgtagtgcttttgctgcttgttttgctgagttctgtaccattcctttggacactgccaaagtcagactccagctccaaaagaaagcagctggtgacgaagttaatttaccaaaatataggggcttgttgggtactatggctaccattgctaacgaagaaagattatcagcactttggaaaggaataggtgctggtttacatcgccaatgcatttatggaggtctaaggatcgggttatgtgaacctggcaaaacgctattaggtggtgctgattatgttggtgatattccggtgtaccaaaaaattatagcagctctattgactggtgctctagctattaca

SEQ ID NO: 15914 - DNA, 882 bp, Gossypium hirsutum
  Clone ID: GOSHI-09MAY01-C466_1
ggaaagaagatgaaagggagtgagaattgagaaacccagttgcacaaccttcaatgggggcggaggatgccgtttccctgttgccccaccttcattcatctcagctacccattcctcatcttcagttcctaatggcagatcttaagttttctttcgctgaaacttttctttgtagtgcttttgctgcttgttttgctgagttctgtaccattcctttggacactgccaaagtcagactccagctccaaaagaaagcagttggtgacgaagttaatttaccaaaatataggggcttgttgggtactatggctaccattgctaaggaagaaagattatcagcactttggaaaggaatagttgctggtttacatcgccaatgcatttatggaggtctaaggatcgggttatatgaacctgtcaaaacgctattagttggtgctgattatgttggtgatattccgttgtaccaaaaaattatagcagctctattgactggtgctctagctattacagtcgctaatccaactgatcttgtcaaagttcggctgcaagctgaaggaaaatttccagccgggattgccaggcgttattatgggactttggatgcatactacaccatagttagagaagaaggactagcagcactgtggactgggcttggtcccaacattgcacgaaatgccattgtaaatgctgctgaactagccagttatgatcaagtgaaacagacaattttgaagatccccggattctcagacaatgtccctacacatcttctagcaggtcttggtgcaggtttctttgcagtctgtattggttctccaattgatgtggtaaaatcaagaatgatgggagactctggctacaaaaacactcttgatt

SEQ ID NO: 15915 - DNA, 502 bp, Gossypium hirsutum
  Clone ID: uC-gsflnu33B090c11b1
tttatatgatgaaagggagtgagaattgagaaacccagttgcacaaccttcaatggttgcgaatgaagccatttttttaattacccagtttcatacatctcagctacccattcctcatcttcagttcctaatggcagatcttaagttttctttcgctgaaacttttctttgtagtgcttttgctgcttgttttgctgagttctgtaccattcctttggacactgccaaagtcagactccagctccaaaagaaagcagttggtgacgaagttaatttaccaaaatataggggcttgttgggtactatggctaccattgctaaggaagaaagattatcagcactttggaaaggaatagttgctggtttacatcgccaatgcatttatggaggtctaaggatcgggttatatgaacctgtcaaaacgctattagttggtgctgatatgttggtgatattccgttgtaccaaaaaatatagcagctctatgactggtgctctagct

SEQ ID NO: 15916 - DNA, 988 bp, Gossypium hirsutum
  Clone ID: GOSHI-09MAY01-C796_3
ggacgcgtgggtacgcatagcaactggtcagtctgaagattggattcgggaattttctcacgggaagcagctgaaaggtttggtgatgaaaatgaaaggtcaagggccatgactgaaatgaatggtgtgtattgctcaagtagacctatgagaattggtgttgctactcccaagaaagcatccggatatcggcaacagtattcttcacaagctgtggtattggctggtggacatgcatcaaatggtgctgtagcccaaggttctcaatacgataatgattcaaataatgcaaccatatttgttggaggacttgactccgatgttagtgatgatgatctcagacaacccttttcccagtttggtgagatcgtctctgtgaaaataccacctggaaaaggttgcgggtttgtgcaatttgtgaacaggaagaacgctgaggaagcaatccagagtttgaacgggccaaccatagggaagcagactgtccgtctttcttggggtcgcaatgtaaacaaacagtggagagccgattcgggtaaccagtggaatggaggatattatcaagggcaagtatatggtggttatggttacggctatgctatgccatcaaatcaggatccgagcatgtatgctgcagctgctattccgggtgcatcttaacaggggtttaagagatgaaagcatgtctgagaattaacaatggcttgtaatttgaactttcaggtgaagtttttaagatttttttcatcagatttcccaattaggtaggatgggttttgcttgctgctttagctggatcttcaggttaaagaattttgttgccggatttatttacaactttaaattgtgtttgagagttttctttttcttcgtttttttaatgtgttgggaagattttcgttttctctaaaattttttatttgttcagaatcagttccctgacaattaaaaaggtggagtttatccccaattttttgaatgttgcagc

SEQ ID NO: 15917 - DNA, 1591 bp, Gossypium hirsutum
  Clone ID: GOSHI-09MAY01-C796_2
ctaccacctttttttttgttctctctttcgcctatttttacggtggaacagtgaaaaaaacaataccgagaacgttagatcacgtggttatcgacataccaagatgcagtcaaccaacggtactgatttgagctcaaaacaagaacaaaaacaacagccgccgccgcaacaacccccgcagtgggtggcgaaccagtggatgggagccatgcagtacccgacgacggcggctatggtaatgatgcagcagcaacagatgatgatgtaccctcatcattatatggcttataataatcatttccagtaccaacaatatcaacaacagcaaggtaaacagcaataccagcagcagcagcaaagctattcaacgaaacaacaacaacatggatctaactcggatgaggttaaaacgatctgggttggtgacctattcattggatggatgagagttatcttcatagttgcttttctcacactggagaggtttcttctgtaaagatcatacgcaataagcaaactggtcagtctgaaggatatggattcgtggaattttactcacgggaagcagctgaaaaggttttgcaaagctataatggctctttaatgccaaatactgagcagcctttccgtctgaactgggcttcgttcggtgtgaacgaaagacgatctgatgctggctctgatctgtctatattcgtaggagatttggctgccgatgtaactgatacggtgttgcatgaaaccttttctagtaaatttcaatcggtcaaaggagcaaaagttgttatcgattcgaataccggtcgttcgaaaggttatggtttcgttcggttcggtgatgaaaatgaaaggtcgagggccatgactgaaatgaatggagtgtattgctcgagtagaccaatgaggattagtgttgccactcccaagaaagcatttggatatcagcaacagtattactcacaaggtagacaagcatcgaatggtgctgtggaacaaggtcttcattctcataatgactcgaacaatgctactatttttgttggaggacttgactcggatgttagtgatgatgatcttagacaacccttttcccagtttggtgagatcatctctgtgaaaataccgcctggaaaaggatgtgggtttgtgctatttgcaaacaggaaggacgctgaggaagcaatccagagcttgaacggaacaaccataggcaagcagaccgtccgactttcttggggtcgaagtattggaaacaaacagcggagagctgattctggaaaccagtggaatggaggttattatcgacggcaaggctatggtggttatggttacggttacggtgcaactccaccaagtccgggtcctagcatgtacgctgctgcagctgccgttcctagtgcttcttaagagtggtgaggtatggaagttttaacaagttattcattatttaagtaggattggttttgattgctgctttagcttgatattcagattacataagttttgtagctggattttgtttttgtatcttttggacttgtattttacaactttattaatatgttattttacaatttacaaaaaatgaaat

SEQ ID NO: 15918 - DNA, 1589 bp, Gossypium hirsutum
  Clone ID: GOSHI-09MAY01-C796_1
ctttcttttcgatcgggaaaagaaaaaaacacccagagtctcagatcaccctgttctttaaatcaagatgcagtcaaccaacggttctgatctgagctcaaagcaccaaaaacagcagcccccaccgccgccgcagccacagcagcctcaatggatgccgaaccaatggatgggagctatgcaatacccggcggctgctatggcaatgatgcaacaacaacagatgatgatgatgtatcctcctcatcattacatggcttataataaccctcattttcattatcaacaacagtatcaacaacaacagttgcataaacaacaacaaggatctaattcagatgaggttaaaacgatctgggttggtgaccttcttcattggatggatgaaacttatcttcatagtttcttctctcaatctggcgaggtttcgtctataaaaatcatacgaaataagcaaaccggacagtctgaagggtacggattcgtggagtttagctctcgagcaacggctgaaaaggttttacagagctgtaatggttctctgatgccaaatacagagcagcctttccgtctgaactgggcctcgttcggtgtgaacgaaagacgatctgatgctggctctgatctatctatattcgtaggagatttggctgccgatgttactgatacagtgttgcatgaaaccttttctagtaaatttcaatctgtcaaaggagcaaaagttgttatcgattcgaataccggtcgttcgaaaggttacggtttcgttcggttcggtgatgaaaatgaaaggtcgagggccatgactgaaatgaatggtgtgtattgctcaagtagacctatgagaattggtgttgctactcccaagaaagcatccggatatcagcaacagtattcttcacaagctgtggtattggccggtggacatgcatcaaatggtgctgtagcccaaggttctcaatatcataatgactcaaacaatgctaccatttttgttggaggacttgactcggatgttagcgatgatgatctcagacaacccttttcccagtttggtgagatcatctctgtgaaaataccacctggaaaaggatgtggatttgtgctatttgcaaacaggaaggacgctgaggaagcaatccagagcttgaacggaacaaccataggcaagcagactgtccgactttcttggggtcgaagtattggaaacaaacagcggagagctgattctggaaaccagtggaatggaggttattatcgacggcaaggctatggtggttacggctacggttatggttatggctatgcaacaccaccaagtccaggtcctagcatgtacgctgctgcagctgccgggcctagtgcttcataagagtggtgaggtatggaaattttaacaatggcatgtaatctgaaaaaattgcagaaaaggttattcattatttaagtaggatcgccctctcattgctgctttagcttgatgttcagattacataagttttgtagctggattttgtttttatatcttttgggcatgtttttagaactttattaatatgttattttacaatttcgattttgtgtttgag

SEQ ID NO: 15919 - DNA, 630 bp, Gossypium hirsutum
  Clone ID: GOSHI-09MAY01-C746_1
cggacgcgtgggcaagatttgttaagagaaaaaaaaaaaagaaagaaggaaaagagaagtctagtttggtaagtgaaatggaagcagggaaaggaacggggtcatcttctccttccataactactcaactctttggctctagagagccaccttcatcttctaatgaaggttttaaagggctctattatctcctcaatctaaggtgtcaggaggaaggtattttcgccctggtacgggtggctttaccacaggattcccggaatgtgccccagaatgcaaagcctacaaccaacggtaatcattctaaagggcatgcaggtgaagtccgaagtgcagaaaatgggagagttgggttccacctatcaggagcaaatagtagaaccatgtcttctaaggtccttcgatctactatggtggccaagacatatacattcgatcccacagtgaccaggactctggcttgaacgatgatagtgaagaagatgtaccggggttgcctccgaggggactctggaagatctgtctatatggaaagttcacgccatctacgtgcatatcaggtcataggagatcagatgcagtcgtctggtctactattcatggactgactacgatcgacatgcgacagat

SEQ ID NO: 15920 - DNA, 657 bp, Gossypium hirsutum
  Clone ID: LIB3582-047-P1-K1-F2
tcccttttcacacacgtcgttttcatcggtttaccttggaacccatacgatcccttccccttcccctttcgctttccctttagttttgaaaaaacccatacgataccttggaaccaaatgcagcaattaatcacaggggataacttgtttagcatagtaaaaaatatgataatcgaagttttggatccttatttaggaaggctacagaaccaaaagctcacaaatcctgttagtattcatggagatcttgaatctagcagaggagctgagatttgcaacaacatacaagtaatgaggttttaagggctctattgtctcctcaatctaaggtgtcaggaggaaggtattttcgtcctggtatggtggctttaccacaggattccctgaatgtgccccggaatgcaaagcctacaaccaatggtaatcattctaaagggcatgcaggtgaagttcgaagtgcagaaaatggaagagtgggttccatctatcaggagcaaatagaaccatgtcatctaagttcatcgatctactatggtggccaagacatatacattcggtcctgcagtgaccaggactctggattgaacgatgatagtgaaagagatcaatcgaggatctgtctattattgagagttcacttgccaatctacgtgcata

SEQ ID NO: 15921 - DNA, 710 bp, Gossypium hirsutum
  Clone ID: GOSHI-09MAY01-C776_1
cttttcttttcgtctttttctcccctcttaaagggcctggcatgctctgagctttgctttgtctgtttcaatcttcctcactcttattctgcctttccctttcctcttcttcattgattgaggttaagattgatcattccctgaattttgagactgtcggtttcatcagcgtgcaaaattaccgcttttcttggtttccgactatcatcagctgaaatttcatttttcaaaatacggctgttttttgttatttctatattgacactaggcataagaggtggacaatttgaaagcctctagcaataatatgggcctatctgaattctggtttgcaatcttcaagtcaggttcatgctgaagatggaccagtttgtgggggaggccttagtcagaatgggaagttcagctatggctatgcaagctctccagggaaaaggtcttcaatggaagatttttatgagacaaggattgatggggttgatggagagttagttggtctttttggagtcttcgatggtcatggaggtgcccgggctgctgaatatgtgaagcaaaacctttttagtaatttgatcaggcatccaaagttcatttctgacaccaaatctgcaatagctgatgcatatagtcatacagactctgaattttaaaatcagaaaataaccagaatagggatgctggatctactgcttctacggctatactcgttg

SEQ ID NO: 15922 - DNA, 1238 bp, Gossypium hirsutum
  Clone ID: GOSHI-09MAY01-C716_1
gtcgacccagcgttttgggagctgcacctattttaacaaagcgggaggttttatgatagtcttgcaaaacactggtcgaccagggtcatgttcttgacctttttgcatctgcacttgatcaggttggagttgctgaaatgaaagttgcaattgaaaggacaggtggacttgttgttctagctgaaagttttggtcattctgtattcaaagactctttcaagcgtgtctttgaagatggggaacagtctcttggcctatgttttaatggcatgcttgagataggttgttcaaaagagatcaaggttcagggaatcattggaccttgcacatcattggagaagaaaggacctaatgtttctgacacggtcattggggagggtaacacgacaacatggaaaatgtgtggccttgacaagagtacttgcttgacagttatatttgatctttcatcaactgatcaatcaaatgttccagaaactgtgaatccacagttctatttgcagtttctaacaagttatcaagaccctgaaggtaaaacacttattcgagttacgactgtgacaagacaatgggcagacatttctgttagtactgaggaattaatacacggtttcgatcaagagactgcagctattgtgatggcacgaataacttccctgaaaatggagacagaggaggggtttgatgctacaaggtggttagatcggaatctcattcgattttgttccaaatttggcaactaccgggagaatgatccatcatctttttcattaaacccttgcttttctttgtttcctcaatttattttcaatctacggcggtcacaatttgtacaggtttttaacaacagtcctgatgaaactgcatattttcgcgtgttgttaaacaaggaaaatattactaatgcagcagttatggcccaaccatcattaatatcatattcgttcaactcaccgccccagccagcattattggatgtggcttccatttcggctgatcgtattctcttgctggattcatatttcagtattgttgttttccatggtatgacaatagctcagtggcgcaacatgggttaccagaaccagcccgaacatcaggcatttgcactgcttttgcaagcaccccaggatgatgcacaaatgattattcggcgaacgcttccctgtccctagattggttgtatgtgatcagcatggatcccaagcaagatttttattggcaaaattgaacccatc

SEQ ID NO: 15923 - DNA, 636 bp, Gossypium hirsutum
  Clone ID: LIB3582-047-P1-K1-C4
cccacgcgtccggtttgatgctacaaggtggctagaccggaatctcattcgactttgttccaaatttggcgactaccggaaggacgatccatcatcttttacattaaacccttggttttctttgttccctcagtttatgtttaatctgcggcggtcgcaatttgtacaagtttttaacaacagctcagatgaaactgcctattttcgcatgttactaaacagggaaaatattacagatgctgctgttatgatccaaccatcattaatatcatattcattcaactcactgccccaaccagcattattggatgtggcttccatttcggctgatcgtattctcttgctggattcatatttcagtattgtaattttccatggcatgacaatagctcagtggcgcaacatgggttaccagaaccagcctgaacatcacgtatgttcattttggtcatgcttactgaatctagtgctaaatgtatatttatttagaacccttacattcataatgtggtaattttcaatcatgcctaaaggtatagtagtactaattctgaggtccctttaagtcttgaaggatgatgattcttattttgattctactggttctttttgagagcttattttaacgactgacag

SEQ ID NO: 15924 - DNA, 529 bp, Gossypium hirsutum
  Clone ID: GOSHI-09MAY01-C706_4
gactaattaacttccactacatccaaattcaagtccatttgctgtgctgtgagtgaattggagagagatgaaagggggaaaattgccccagatggcaatgaagcgagaaagaggagcgagaaaggagactccaaatccctcaatgcctatttcaagcagaggaagtcacgaacagaagacttcaaatgccgggatcttgaaggagaaaatcagaaacaaataagagaatcgggaaatgaaaataagggcaagccgggaaaagggttcttcgcttgctatctgctaacctctctcagccctcgtcataaaggccacacctatatcggatttactgtgaacccactgcgtcgaataagacagcacaatggggaaatggggtgtggtgcttggaggacaaagagccgacgcccgtgggatatggttgggtgcatatatggttttccaaccaatgtatctgctcttcagggccggtgggcctggcagcttcctcgtgtttcagaggcgtgaggcaagcagctgcaactttaaa

SEQ ID NO: 15925 - DNA, 806 bp, Gossypium hirsutum
  Clone ID: GOSHI-09MAY01-C706_3
gtacccatcaactatctcaaagattaattagaggggttttatgcaatgtcaccctactcttgtttaatcggttttctcaaattaattgtcttaaatttgacgaattaacttccactacatccaaattcaagtccatttgctgtgctgtgagtgaattggagagagatgagaagggggaaaattgccccagatgcaatgaagcgagcaagaggagcgagaaaggagactcgaaatccctcaatgcctatttcaagcagaggaagtcacgaacagaagacttcaaatgccgggatcttgaaggagaaaatcaggaacaaataagagaatcgggaaatgaaaataagggcaagccgggaaaagggttcttcgcttgctatctgctaacctctctcagccatcgtcataaaggccacacctatatcggatctggttaacttattccagcgactgcagcagagtatcttctcactctagaaggtgagcttgtgcctgcgctcaccatcaaggactctgtcgcttctcccttgccttacaagtgttttctcacgtgctttctcagctcttctcctccattttggcaggaaaacctgagtcacgaggccttgttgtcgtttcattttcctggaatccatgttttatttggatttgctgaaaaacaaaggaactgacgtcgcttcatcggataaacggattccaattttaaattgttacagtgatccacctggttggaaggatcaattaacacgtagtggaaacttcacacctcttccccactgaaactttgggtttcgaatactgctaatgtc

SEQ ID NO: 15926 - DNA, 660 bp, Gossypium hirsutum
  unsure (1)..(660): unsure at all n locations
  Clone ID: LIB3582-047-P1-K1-B2
cccacgcgtccgcccacgcgtccgcccacgcgtccgctcgagtgttttgaatggtacatgacatgttccaaggcttttattagattcgtatttacaccctttgaggtttatctgagtaaattcaattttaactcgatgtttacttggttatgatctttaaattcaaatttcgcttttttcccttcaaattttccgtgttgtttcttttatggttcatgtttgattcgttatcacttaccatgaagaaattgatgctactatctatgtggcttaataagtcatttaaataatatcagcttgcagttgttttcctttgatatgaggttctctagtaaaaaattcaagctgaccaaacagtttgcagtttgaactatttatataacggcagtgttgcctaattgcagatttactgtgaacccactgcgtcgaataagacagcacaatggggaaatagggagtggtgcttggaggacaaagagccgacgcccgtgggaaatggttgtgtgcatatatggttttccaaccaatgtatctgctcttcaggtcgtatatataatatatattctatattttatatatagnctataacatggttgtattcgaatctgttgcatcaccttttgggcttagtagaaaactggcaggttatgattaaaatgc

SEQ ID NO: 15927 - DNA, 585 bp, Gossypium hirsutum
  Clone ID: LIB3583-046-P1-K1-C7
ccccgcgtccgccccgcgtccgccccgcgtccgcaaattgatgctactatctatgtggcttaataagtcatttaaataatatcagcttgcagttgttttcttttcctatgaggttctctagtaaaaaattcaagctgaccaaacagtttgcagtttgaactatttatctaacggcagtgttgcccaattgctgatttactgtgaacccactgcgttgaataagacagcacaatggggaaatagggagtggtgcttggaggacaaagagccgacgcccgtggggaatggttatgttcatttatggttttccaaccaatgtatctgctcttcagcgactgcagcagagtatcttctcactctagaaggtgagcttgtgcctgcgctcaccatcaaggactctgtcgcttctcccttgccttacaagtgttttctcacgtgctttctcagctcttctcctccattttggcaggaaaacctgagtcacgaggccttgtcgtcgtttcattttcctggaatccatgttttatttggatttgctgaaaaacaaaggaactgacgtcgcttcatcggataaacggattcaaa

SEQ ID NO: 15928 - DNA, 391 bp, Gossypium hirsutum
  Clone ID: GOSHI-09MAY01-C726_5
atcgtgaatgtataaaaccctagtttggctcccacggttattctcctcagataagtagtcccccagagtctcttccctcatctacccccaaatctcctcacattatgtctttggtggccaacgaagattttcagcacattttacgtgtgctgaacaccaacgttgatgggaagcagaagattatgtttgcattgacctccatcaagggtatcggaaggcgattcgctaacatcgtttgcaagaaggctgatgtcgacatgaacaagagggctggtgaattgactgcacaggagttggacaatctcatgaccattgttgcaaaccccaggcagtttaaaatccctgactggtttttaaataggcagaaggattacaaggacgggaagtattc

SEQ ID NO: 15929 - DNA, 912 bp, Gossypium hirsutum
  Clone ID: GOSHI-09MAY01-C726_3
gcacgcgcccgtactgaccggcccgacccacccacgcgtctcctcattggtatacttcaaagctcatctgtcaacccagagccccttctctccgccgaatctcctttttctcccgtaaaaatgtctctggtggccaacgaagattttcagcacattttgcgtgtcctgaacaccaacgttgatggaaagcagaagattatgtttgctttgacctccatcaagggtatcggaaggcgtttcgccaacattgtttgcaagaaagccgatgtagacatgaacaagagggctggtgaactgactgcacaggaattggacaatctcatgacgattgtggcgaacccgaggcagtttaaaatcccagattggtttttgaacaggcagaaggattacaaggatggaaagtattcccaagttgtgtccaatgctctcgacatgaagttgagagatgacttggagcgcttgaagaagatcaggaaccaccgtggtctgaggcactactggggccttcgtgtacgtggtcagcacaccaagactactggtcgccgaggaaagactgttggtgtgtctaaaaagcgttgaattcttcataacataatctatagtatgacgaggcagatatttatttctttgcttttaagcgatgtttgcatcaaagacaaaattttggatttggttttgttgttttagttggttttttaaaccttgcagacaagtagtgtttctcttttaatcgattgtttgatctttttatcaattgagattaaggatacctgctttgatagttaaagattacacatgttttcttcacctcaagtccaagtcctgaagaattggtggcgtccatgaccagattgggttattcacatatgggtattaacctcacatggttgttcatgttgggtgctcatattt

SEQ ID NO: 15930 - DNA, 706 bp, Gossypium hirsutum
  Clone ID: GOSHI-09MAY01-C726_2
tccacgcgtggcctccgctgtttattcgcttcagctcatcacttcccatgctctctcctcctccctcaccaaatcaaaatgtctctggtggcgaacgaagactttcagcacattttgcgtgtactgaacaccaacgttgatggaaagcagaagattatgtttgctttgacctccatcaagggtattggaaggcgtttcgctaacattgtttgcaagaaggctgatgtcgacatgaacaagagggctggtgaattgactgcacaggagctggacaatctcatgaccattgttgcaaaccccaggcagtttaagatacctgactggtttttgaataggcagaaggattacaaggatgggaagtattcccaagttgtgtctaatgctctcgacatgaagttgagagatgacttggagcgattgaagaagatcaggaaccaccgtgggctgaggcattattggggtcttcgtgtacgtggtcagcacaccaagaccactggtcgcagaggaaagactgtaggtgtctctaagaagcgttgaatgtttcatatatgttgtcaggcagagtgtttatttccttggtttatacgcatcctttgcaccagtggatgtgacattttgttttgagttggcctaaatatctcagacaagtagtgttttaattaatcaattgttcgtttgatcattgtttgtgctacatgttttgttt

SEQ ID NO: 15931 - DNA, 791 bp, Gossypium hirsutum
  Clone ID: GOSHI-09MAY01-C726_1
gaatgtataaaaccctattttgggggccacgggtattctccgctgtttagtcgcttcagctcttcaccccccagagtctcttccctcatctacccccaaatctcctcacattatgtctctggtggccaacgaagattttcagcacattttacgtgtgctgaacaccaacgttgatgggaagcagaagattatgtttgcattgacctccatcaagggtatcggaaggcgattcgctaacatcgtttgcaagaaggctgatgtcgacatgaacaagagggctggtgaattgactgcacaggagttggacaatctcatgaccattgttgcaaaccccaggcagtttaaaatccctgactggtttttaaataggcagaaggattacaaggacgggaagtattcccaagtcgtgtctaatgctcttgacatgaagttgagggatgatttggagcgtttgaagaagatcaggaaccaccgtggtctgaggcactactggggccttcgtgtccgtggtcagcacaccaagactactggtcgcagagggaagactgtcggtgtgtctaagaagcgttgaaggcttcatatatattttggaaaaattgatgtagtcttgcagagtgttcatttccttgaatgtaagcactgtttgcacgaagacaaattttggatgtgatttttttttgttgtttcttgacaagtggtaagactgtagtagtgttgggtctttatcggttgctattaggaatacttgcgttactgaatatttctagattaaatggttttaatttggtttg

SEQ ID NO: 15932 - DNA, 530 bp, Gossypium hirsutum
  Clone ID: LIB3583-041-P1-K1-A2
cccacgcgtccggtaatgagacgtagatatggcgatttacccttctctgctcaatctgtccctgctggcgaactaagacgtgtagcacattttgcgtgtgctgaacaccaacgttgatggaaagcagaagatcatgtttgctttgacctccatcaagggtattggaaggcgtttcgctaacattgtttgcaagaaggctgatgtcgacatgaacaagagggctggtgaattgactgcacaggagctggacaatctcatgaccattgttgcaaaccccaggcagtttaagatccctgactggtttttgaataggcagaaggattacaaggatgggaagtattcccaagttgtgtctaatgctctcgacatgaagttgagagatgacttggagcgattgaagaagatcaggaaccaccgtgggctgaggcactattggggtcttcgtgtccgtggtcagcacaccaagaccactggtcgcagaggaaagactgtaggtgtctctaagaagcgttgaatgtttcatatatgtt

SEQ ID NO: 15933 - DNA, 402 bp, Gossypium hirsutum
  Clone ID: LIB3272-005-P1-K1-F1
aaaaaaaacactacttgtctgagatatttaggccaactcaaaacaaaatgtcacatccactgctgcaaaggatgcttataaaccaaggaaataaacactctgcctgacaacatatatgaaacattcaacgcttcttagagacacctacagtctttcctctgcgaccagtggtcttggtgtgctgaccacggacacgaagaccccaatagtgcctcagcccacggtggttcctgatcttcttcaatcgctccaagtcatctctcaacttcatgtcgagagcattagacacaacttggcctccgctgtttattcggttcaactcatcactttccataaacctttcctgctccctcaccaaatcaaaatgtctctgggggcgaacgaagactttcagcacatttt

SEQ ID NO: 15934 - DNA, 332 bp, Gossypium hirsutum
  Clone ID: LIB3149-042-Q1-K1-H5
cgctgtcaaaaatggttttggtgttcatctaacattttcaacacatattacgtgtgttgagcaccaacgttgctggaaagctaaaaattatgtttgcttagacttacatcaagggtatcggaaggcgttttgctaacattgtttgcaagacggccgatgtcgatatgaacaagagggctggtgagttgactgcacaggaactggacaatctcatgaccattgttgccaaccacaggcagtttaaaattacagactggtttctgaataggcaaaaggattacaaggatggaaagtattcccaggttgcttctaatgctctcgacatgaaattg

SEQ ID NO: 15935 - DNA, 330 bp, Gossypium hirsutum
  Clone ID: LIB3148-028-Q1-K1-D10
cccacgcgtccgctttgaatgtaagcactatttgcaggaagacaaattttggatgtgatggtttttgttgtttctagacaagtggtaagactagtagtgttgggtctttatcggttgctattaggaatacttgcgttactgaatttaatttggtttgaatgataattgtctttggaatttgtgttggtttgccaaaaaaaaaagataataaaaaaaaaaaagaagctataacaaaaaaagaaaaaactaaaaatttaaatatcgcaatcaaacaatacaaaacttaataccgacctaccaaatattccaatggctatggggcggcctttt

SEQ ID NO: 15936 - DNA, 1271 bp, Gossypium hirsutum
  Clone ID: GOSHI-09MAY01-C696_5
agaagatattccccatttattaattcataaaccaatcttacaataaaacattaaaatccctccttcccttaaacctcccttcttcttcctcttctgtttcgagctgtgattttctatttttatttttgcaaaatagtagagagagatggcgccgaatgatcccaaacaaagcggtggtttctttgcgtccatcgctagcagtatatctaattttggtagcgccatgactaaatcagtcaacggtttaatgggatatgaagggcttgaagttgttaatccagaaggcgggactgaagatgccgaagaagaagcaaggagaggaagatggaaacaggaggacagggaaagttactggaaaatgatgcaaaagtatataggttctgatgttacgtcaatggtgacacttccagtacttatttttgagccaatgtcaatgctgcagaaaatggcggagttgatggagtactcatacctgctagatctggctgatgaatgcgaagatccttacatgcgattagtgtacaccacttcatgggctatatctgtctactatgcctatcaacgtacctggaaaccattcaatcccatacttggtgagacttatgaaatggttaatcatggcggcattacttttatagctgaacaggttagtcatcaccctcccgtccgcgccggtcaggctgaaaatgaacatttcatttatgacatttcttctaaagtgaaaaccaaatttttgggaaactcaatagatatctatccacttggaaggacccgtgtgactctcaaaagagatggcacagtttttgatttggttcctcctctcacgaaagttaacaacttaatttttggacgaacctgggttgactcatcaggggagatgatcatgacaaacttgacaacaggcgacaaagccgtgctatattttcaaccgtgtggttggtttggagctggccggtatgagattgatggatacgtgtataattccgctgaggagccaaagatattgatgactgggaaatggaatgagtcaatgagttatcaaccttgtgatagtgaaggggaaccacttccaggcactgaactaaaggaggcatggaaacttgctgatgctccaaaaaatgataaattccagtacacacattttgcgcataagattaacagctttgatactgctccaaagaagctattggcatctgattctcgcctacgtcccgacagatatgcactagagcagggtgacctctctaaggcaggctttgaaaagacagttt

SEQ ID NO: 15937 - DNA, 862 bp, Gossypium hirsutum
  Clone ID: GOSHI-09MAY01-C696_4
gttctttggagctgtataccatttttttcacattttcggctttcaaaactctttcctgttctttgttcctcttccgcagagctggtcggtatgagattgatggatacgtgtataattccgctgaggagccaaagatattgatgactgggaaatagaatgagtcaatgagttatcaaccttgtgatagtgaaagggaactacttccaagcactgaactaaaggaggaatggaaacttgctaatgctccaaaaaatgataaattccagtacacacattttgtgcataagattaacagctttgacactgctccgaataagctattggcatctgattctcacctacgccccgacagatatgcactagagcagggtgacctctctaaggcaggctttgaaaagagcagtgatggagaaacttttatatcagccgatgatctacgtataaatctttggaacttggaaattagcaatcaaactttcaatattgtcgatgtaaagcctgtaaacatggaggatctaactgatcaagaacagaagaaaacgaaattagatcgggggaagttgaaagtagtcgagtagtcgactgtgtccgtcgatatccgagattttggaattcgttatgagctcggggatcatcagaaagccttatcacactatcgacagttacttttggttctttattaagttgtttttgaatatatggcatgtatagcatagtcgaaatgttgattttgggtcaatttatatatgaaattaatagccatgcgaaaatggcttattttcttttgtttgagtttggtattgatgcatataatgttggattgatttggctatgagataaactaaataccgaatgtatttat

SEQ ID NO: 15938 - DNA, 1230 bp, Gossypium hirsutum
  Clone ID: GOSHI-09MAY01-C696_2
aacatcagcagagtttcatcctacccactgtaatacgttggcatatagcagttcaaagggctcaattcgcgtaattgatttgcggcagtcagcattgtgtgattctcatgccaaattgtaagtgttttgcttgatttatgtacatttttactaagaaaagcatgctatggatcttgatctgtgagggtatatttgcaattagcttttggtatcctttactaataatgattgctattctatgccacaggtttgaagaaccagaggcacctggttctagatcattttttacagagataatcgcctcaatctccgatatcaaatttgccaagggatggaagatatattctcagccgtgattacatgactcttaagttatgggacataaacatggattccggtccagttgcaacattccaggttcacgaatatttaagacccaagttgtgtgatttgtatgaaaacgattcaatctttgacaaatttgagtgttgcctaagtggtgatggattgcgagttgcaacaggttcctacagcaatctattccgtgtatttggttgtgcccctggaagcactgaggcaacaactttggaagccagcaaaaatccaatgaggagacaagttcagacaccctcaaggccttccagatccctaaacagcataacacgtgttgtacgacgagaaaccctcggagttgatgcaaatggaaactctcttgatttcacgacaaagttgctgcacttagcgtggcaccccaccgaaaacttgatagcttgtgttgctgctaacagcttgtacatgtactatgcataaaagatggtccaagaagcaatgtatttcctgggttaactttttttttgggagctggtagcaaaaccttctttcactttcctgctgaccatcgcgttaaatgctacatcgactcttaacacttttggtagccctaaaatccatagcacatcctagtatcgaggtcaagaaatatcttagcagggaagaaacatatctttgttctcgggtaggcagctcaattctcttttcccctttcccccctcatctccgaaacccgaaaattttcttttccctcccgtaatcttctttcaaagtagaaggtggagttatgtttctaagacgtgttgggttgaagttagcagaaaatatgattgtagcaaaaggatgttcaaaatatttggcacaaggttcaaaggtaactgtaaattatttttttttctt

SEQ ID NO: 15939 - DNA, 1224 bp, Gossypium hirsutum
  Clone ID: GOSHI-09MAY01-C696_1
acgaagatcaattctatttcaaacccccgcgtccgcccacccgtccgatcagccgatgatctgcgtataaatctttggaacttggaaatcagcgatcaaagtttcaatatcgtcgatgtaaagcctgcaaacatggaggatctaactgaggttataacatcagcagagtttcaccctacccactgtaatacgttggcatatagcagttcaaagggctcaattcgcctcattgatttgcggcagtcagctttgtgtgattctcatgccaaattgtttgaagaaccagaggcacctggttctagatcattttttacagagataattgcctcaatctccgatatcaaatttgcaaagggacggaagatatattcttagccgtgattacatgactcttaagttgtgggacatcaatatggattcgggtcctgttgcaactttccaggttcatgaatacttaaggcctaagctgtgtgatttgtatgaaaatgattcaatctttgacaaatttgagtgttgcctaagtggtgatggattgagagtggcaacaggttcctacagcaatctattccgtgtattcggttgtgcccctggaagcactgaggcaacaactctggaagccagcaaaaatccaatgagaagacaagttcagactccctcaaggccttccaaatccttaagtagcataacacgtgttgtcagacgaggacccataacaggagcagaaaaccccggagttgatgcgaatggaaatgcttttgatttcacgacaaagtggctgcacctagcttggcaccccacagagaactcaatcgcatgtgctgcagcaaacagcttgtacatgtactatgcataaaagatcgtccaagaagaaatgtatttgcttggttaacttgtttccagttgctgatgacaaaagctcctttccctttccctttcccctcccaagtcccaaccagtgagtgacaggctaccttgattctcccccttccgcgccccttaaaatctgtagcgaatgctatagtatcggaccaagaaatggctgccatagatccccgaggaagcaaacccatatatgttccccggcacgcagtttggttcctctttaccgatgacttcacctcttaaaccctaaaaaattggccattcttttattaaccccttatgttttaaccccccccccatgaaaagtggaattaacgtttcccaaatttgtttcgggttggg

SEQ ID NO: 15940 - DNA, 605 bp, Gossypium hirsutum
  Clone ID: LIB3826-002-Q1-K6-G4
cggacgcgtgggcggacgcgtgggtccaaatggaaaatattatcttgttgattctggatatcctcaaatgaaaggttatcttgggccatatagaggtcagcgatatcatttacctgacttccgtagaggtagaccgatatctggtaaagaagagatattcaatcattcacattcatcattacgtagtgtgattgaacgaacttttggtgttttgaaaaaaatgggccattttaagggatatgccaagttatagttttgaaaagcagacgatgatcgttgttgatacaatgacgatacacaattttatccgaaaacatgtcagccgaaatgatgcagattttatggaatacgaagatattaattggccatatgagaataatattgattcagaaaatgcgcatggtcgagaaaatgatgatgatgatgatgatgacgacgacgatgatgatagtgatgatgacggtgaatcaaacaattcaagtggttttgaaatggaattaacaagagatgctatagcttctagtttaatgaattcactttaaattggaaatgctactgtaaaatttttagtatttatatttgatatataaatattaccccttttt

SEQ ID NO: 15941 - DNA, 625 bp, Gossypium hirsutum
  unsure (1)..(625): unsure at all n locations
  Clone ID: LIB3828-013-Q1-K6-H9
cttgtcttctccctaacgttctttccccctcagctggttgtttggagctgtatacccaatttttttcacattttcggctttcaaaactctttcttgttctttgttcatcttccgcagagcaggccggtatgagattgatggatacgtgtataattccgctgaggagctaaagatattgatgactgggaaatggaatgagtcaatgtcaaccttgtgatagtgaaggggaaccacttccaagcactgaactaaatgaggcatggaaacttgctaatgctccaaaaaatgataaattccagtacacacattttgcgcataagattaacagctttgatactactccgaagaagctattggcatctgattctcgcctacgtcccgacaggcatgcactagagcagggtgacctctctaaggcaggctttgaaaagagcagtttaaagtgatgatgatgacgacgatgatggtgatgatgacagtgaatcaaacaattcaagtggttttgaaatggaattaacaagagatgttatagcttctagtttaatgaattcattttaaattgtaaatgctattgtaaaatntttagtatttatatttggtatataaatattatccctttttaaaa

SEQ ID NO: 15942 - DNA, 409 bp, Gossypium hirsutum
  Clone ID: LIB3145-038-Q1-K1-A4
gaaggtcaaaaaaatttctgaaatgaatttggaccctccaaaagctgtaggaaatggccgtgtggctagttcaagtaattctaatagtcccacactttgtcttgcaaatggaggttcctctggcaatgatttttctttcccaccaggaggcctgccatcattgcgtttgcctgtggtaacaagtcaggaaaccaacctagtagctagatgtcgaagagtatatgcccatgctcatgattatcacatcaattccatttcaaataacagtgacggcgaaacttttatatcagctgatgatctgcgtataaatctttggaacttggaaatcagcaatcaaagtttcaatattgttgatgtaaagcctgcaaacatggaggatctaactgaggttataacatcagcagaattc

SEQ ID NO: 15943 - DNA, 243 bp, Gossypium hirsutum
  Clone ID: uC-gsflmaxxa094a09b1
tattaaagatagagagaagatattccccaggggaaaataaaaccaattttactttataaacaccaaaatccctccttcccttaaacctcccttcttcttcctcttctgtttcgagctgtgattttctatttttatttttgcaaaatagtagagagagatggcgccgaatgaccccaaacaaagcggtcgttccctcgccttccttccttcgccctttctccaacctttctctcctcttctcct

SEQ ID NO: 15944 - DNA, 658 bp, Gossypium hirsutum
  Clone ID: GOSHI-09MAY01-C686_1
caccaccattatttacttgaatcactgtaaaacacacatttgggtctctctttgctaaaacccagaaatattaaacctttcttcaatctatatgatggctcaaggggcttctaattgcctctttttatcccctttgtttcttcttcttcttatctgctcttctgttgagatttcaactagggtagctgcattttatgttgaggtatcaacaatggtggattttgtgggaaaacggcttattggggaagaaaagaagggctttgtttattctcgtagggagcttattggtgttaaaaaaacagctcagcatgatcttatcatccctccaccggcgacctttccgacaccgaatatcatcaccgtgcctgctacgaatcctgttgaaacaccggcggcgatcccggctacgacgccggtcacggtgccctctacgaatcctaacaacgcgacaactgtaccggtcacgaatccagtcacgacgcctgcgcctatcacggtgccgggtgcaggggcacagcagccggtgacgaatccggtaacgacttaatccggccccgacgggtggtgtcccggcgagcacaccggtgacaacaaatccactcccaccacctgttagtacaaatgcccctgcagttccagggcaagagtggtgtgtagc

SEQ ID NO: 15945 - DNA, 584 bp, Gossypium hirsutum
  Clone ID: GOSHI-09MAY01-C656_2
ctccaaaccgcaagtctactcgctctcgttctttggctactgaggatctgagaagcttcatcgccaaattttacagagttcattgaaacaaattagctagtttcatgggtttgtcgtctattggcactgctactgaaggcatgcaactctgcatatttgatttgagaagaggccaacatgaagggcaagaacttgataaaattttgtacttctttcctcctgatttgcccttttcgactcaactctctgtggttgggctcagcgaagggcttattacattcacgcgaattttctctccggaggctgcttgcgacgttatagaggcagagaggcactctcatgtcttttacgaggcagagccagatatttggatggttatgatagtggagaaaagtaaggagccggaagccatatggcggattgatgcattaagagaggttctcaaggaaattcactctcttttcattatgtttcatggatctattagagctttgcttgacaaagaacctggcggaggactaactcgtgctcatttataccctttcatcatggattatctaagagatttctggttgggaagaaac

SEQ ID NO: 15946 - DNA, 744 bp, Gossypium hirsutum
  Clone ID: GOSHI-09MAY01-C656_1
aattgtgtagctttttttgcgttccaatcttcctttttctgtttatttcaatcaggttcattgaaacaaattagctagtttcatgggtttgtcgtctattggcactgctactgaaggcatgcaactctgcgtatttgatttgagaagaggccaacacgaagggcaagaacttgataaaattttatacttctttcctcctgatttgcccttttcgactcaactctctgtgattgggctcagcgaagggcttattacattcacgcgaattttctctccggaggctgcttgcgaggttatagaggcagagaggcactctcatgtcttttacgaggcagagccagatatttggatggttatgatagtggagaaaagtaaggagccggaagccatatggcggattgatgcattaagagaggttctcaaggaaattcactctcttttcatgatgtttcatggatctattagagctttgcttgacaaagaacctggcggaggactaactcgtgctcatttataccctttcatcatggattatctaagagattttctggttgggaagaaactcctgttgccatcattccgtgactgtttaaaggaacgaaggactgtacagatgctaactgtaggacgagaggctgcaattgaagttcagacacttgtcagactattagaatcttctgctggcaacgcaccatgctcctcgctcgttttatttcaagacttgctcgtgtccacaacactttc

SEQ ID NO: 15947 - DNA, 863 bp, Gossypium hirsutum
  Clone ID: GOSHI-09MAY01-C606_1
cccacgctttcccagcaagcacctctcttcttaactgtaaatttcaaatctctcctctaccttaatcatggctactatttaccgccttgccactctcatgctcttctgctttatccaactcagcttctccgagttggttcaagagcaacccttggttttgaagtaccacaacggtccactcttgaaaggcaagatcaccgttaatctcatctggtacggcaagtttacacccatccaacgctccataatcgttgatttcatcaactctttgagttccgataaggccacaatggttccttccacgtcgtcgtggtggaaaattactgaaaagtacaagggtggttcttctaccttagctgtaggcaaacaaatccttctcgaaaattacccgctcggtaaattccttgaaaacccacatttacgggcattggccagtaagttcaacggcgttgataccatcaacgtaatccttacttccaaagacgtcgccgtagaagggttttgtatgaggtgtgggactcacgggtcaacccgggttggacgtggtcctgttcgtgggacttatatttgggtcggaaactcggagactcagtgtccgggtcaatgtgcttggccttttcatcaacctatttacggtccacaaaccccccctttggttgctcctaacggagacgttggagttgacgggatgattattaatttggctacgcttttgggaaacaccgttaccaacccgtttaacaatgggtattttcagggcccggcgaatgctcctttggaagccgtttccgcttgttccgggatgttcggttcgggttcgtacccgggatatccggtaaggtgttggtggagaaaagacaggg

SEQ ID NO: 15948 - DNA, 409 bp, Gossypium hirsutum
  Clone ID: uC-gsflnu33B022f11b1
agttggtgcttgatgtggtgctgagagggtatagtgggtacaatacaaggtgggcgctgaaggtacttgatagggtttttcccacggtgggtcacgacggtgcggcatgctgcgtcgacagtttgctggaaccgtgtttttcgtagctaatgatgcttgcctccctgatagattcgctgctcttcaacacgatccacttgatgagctcatgcagaactctacactatatagtgctctcactttaggaggttttatgcaactatctcatttcctttctaggctcccaatggttcctttcacgacgctgtggtggaaaattactgaaaagtacaagggtggttcttctaccttagctggaggcaaaacaaatccttctcgaaaactacccgctcgggtaatatccctcttc

SEQ ID NO: 15949 - DNA, 1618 bp, Gossypium hirsutum
  Clone ID: GOSHI-09MAY01-C636_1
tccacgcgtccgcccacgcgtccccccacctgcccttttctttgtaataatcgaactcccctcccgtcctctttcccgatttgtcttcttcattgccccgccatggcttgtgttagcttcgctaaactcaacgcgccgtcatcctcttggatcggtggccagcagtctctccctcaacgctccggatcatccgctcggctcgccactcgcagagtctcactcccgatccgtgctggcgcttacaccgacgaactcatcaaaaccgccaaaactattgcttcacctggtcgtggaatactggcaattgatgaatcgaatgcaacatgtgggaagagattatcttctattggcttagacaatactgaacccaaccgccaggcttacagacagcttctgctcacaactcctggcctcggagaatatatttccggtgccattcttttcgaggaaacactttaccagtcaactacagatgggaagaagtttgttgatgtcttgcacgaccagaaaatcgtacctggcatcaaagtagataagggtttggttcctctacctggatcaaacaatgaatcttggtgccaaggcttggatggattgtcatcaagatctgccgagtactacaaacaaggtgctcggtttgccaagtggagaacagtagttagcattccttgtggtccttctgctctggctgttaaggaagctgcatggggacttgcacgttatgctgccatttctcaggacaatggtcttgtgccaatagtggaacccgagattcttctggatggtgaccaccctattgagaggactcttgaagtagctgagaaagtttgggcagaagtcttctactacttggctgagaacaatgttatatttgagggcatcttactcaagcccagtatggtaaccccaggggctgaacacaaggagagggctaatcctgagactattgccaaatatacgctcacaatgctgaaaaggagagttccaccagctgttccaggaataatgtttttgtctggaggacagtcggagatggaagccacattgaacttgcatgcaatgaaccagagccccaacccatggcacgtttctttctcttatgcacgtgcattgcagaacactgtactaaagacatggcaaggacgtccagagaatgttgaagctgcacagaaggctcttttggtgcgtgcaaaggcaaactctctggctcaactcggaaaatactctgccgagggtgaaagtgaagaagccaagaaaggaatgtttgttaagggctatacctattaaggcgtaagacactgtaatatctggtttttgggcatctatggctttttgtgcgaggattattacttgctgttagataagttttttacatattattgttatgcctcctgaaactagggaggttgaataagttacttgggagagtagaagaaacaatcctcgaatcacttcccttgacgccttttgaacgaaacaggttcatatttaagatagtttatttggctggcagatcaatttcaatcaattttaggcttggatgattttgtatttcgatgttttttttttttttgaagatatttcaagttcgggttaaaaaaataaaatttattttttt

SEQ ID NO: 15950 - DNA, 654 bp, Gossypium hirsutum
  Clone ID: AI054483.1
ctgcccttttctttgtaataatcgaactcccctctcgtcctctttcccgatttgtcttcttcattgccccaccatggcttgtgttagctttgctaaacacaacgcaccgtcatcctcttggatcggtggccagcagtctctccctcaacgctccggatcatccgctcggctcgccactcgcagagtctcactcccgatccgtgctggcgcttacaccgacgaactcatcaaaaccgccaaaactattgcttcacctggtcgtggaatactggcaattgatgaatcgaatgcaacatgtgggaagagattatcttctattggcttagacaatactgaacccaaccgccaggcttacagacagcttctgctcacaactcctggcctcgaagaatatattttcggtgccattcttttcgaggaaaccactttccagtcaactacagatgggaagaagtttgttgatgtcctgcaccaccagaaaatcgtacctggcatcaaagttaataatggtttgggttctctacctgcatcaaacaatgaatcttggtgccatgcttggatggtttgtcatcaagatttccgatatctccaacaagtctcggttgccaatgagaccatattagcatcttgagcctatgtctgctgttagagcac

SEQ ID NO: 15951 - DNA, 463 bp, Gossypium hirsutum
  Clone ID: LIB3147-054-Q1-K1-A9
cccacgcgtccgcggagatggaagccacattgtacttgcatgcaatgaatcagagccccaagccatgtcacgtttctttctcgtacgcacgttcattgcagaacactgtgcttaagacatggcaaggacgtccagagaatgttgaagctgcacagaaggctcttttggtgcgtgcaaaggcaaactctctggctcaactcggaaaatactctctgcgagggtgaaagtgaagaagccatgaaaggtttgttcgttttgggctatacctatttatgcgtatgacactgtaatatctggtttttgttctttaaaggcatatttgtttctatgttttcaacttttcttttagttatgaaattgtattatctattttttttctttcttatttttgattttaatacatttatttatttggcaatgtttttttatttataaaaattttccctttttttatgcctttttt

SEQ ID NO: 15952 - DNA, 435 bp, Gossypium hirsutum
  Clone ID: LIB3083-052-Q1-L1-H7
ataacggtctggttcctatacctggatcaaacagggaaggttggtgtcaaagctaggctggattgtcatcaagatctgccgagtactacaaacaaggtgctcagtttgccaagtggaaatcaatatttagcattccttgtggtccttctgctctggctgttaatgaagcttcactttgactctctctttatgctaccatttttttacccacaaaggtcttgtgccaatattgagaacctcgaattcttttggatcgacaccaccctattgataagactcttgaagtaactgatatatgttgtacataagtcttttactactttgaagataacaatgatacatttgtaggcatattactcaatcccaatcttgtaaccacaagttctgaacacaatgagaggtctaatcctgatactattgccaaatatactccta

SEQ ID NO: 15953 - DNA, 1157 bp, Gossypium hirsutum
  Clone ID: GOSHI-09MAY01-C626_1
gcgagtttgttttttttgttttcattttgttgggttttggttttttttttgtttgtttctctataaaaaacatcgccggccgcggattttactcttttcacaaacaaaaaaaagggggggttttgatctttgatcaggtgagtggagtaccatgaagttttgtaggagcttaagcatattgatcgaaaaagcgttgcctgatgggagagataagttttttccttacaaggatttgaaaaacccgttgaatttgatttaccccaaagatgcgagcgagaagcatcctaacaaacggcccaaattagattcattggacggcggggatggggtggacagcgaggtttccaaggaggtgatggatttcgttttgttgttggaaaatgaagtggagaaattcaatacctttttcgttgagaaagaagaggattatgttatcaaatggagggaactgcaagatagagcagaaaaggccaaagcatcagatggagggttgatgaatgttgggagggagattgtggattttcacggagagatggttctgttggagaattacagtgcccttaactatacaggactagtgaagataataaagaaatacgacaagcgaagcggtgctcttgttcgcttgcccttcattcaaaaggtcttgcaacaaccgttctaccggaccgatgttcttaatgagcttgtgaaggagtgtgagatggtacttgatcgtcttttctccacaaatgaaccatcggcgttacctgatgtaaccaacgagaaagaccacaaacctgatacttctagcagaagtaatgaaaacttgctcaaagttccaaaagaacttgcagaaatcaaggatatggagaacatgtatatgaagcaaactttgtcagcactacacgtcttgaaagagatccggagcggaagctcaaccgtgagcgtgttctcactgccgcctttgcaaaatcgtgcattggatgatcagaagaaaattactgtgttagaacaggcagccaaataagctcccacctttccttttctttgtttctttttgtttaacatatactgctgcaagatacttacaaagctttgtatcctaaatccaatttctgcttggaacttgtatgacaccttttcatagttaaaaaccataacataagtgctagttt

SEQ ID NO: 15954 - DNA, 595 bp, Gossypium hirsutum
  Clone ID: LIB3825-003-Q1-K6-B11
gtggttttgatctttgatcagctgagtggagtagcatgaagttttgtaagagcttaagcatattgatcgaagaagcgttgcctgattggagagataagtttttgccttacaaggatttgaagaagcagttgaagttgatataccccaaagatgggagcgagaagcagcctaacaaacggcccagattagattcaatggacggtggggatggggaggacagcgaggtttccaaggaggtgatggatttcgttttgttgttggaaaatgaagtggagaaattcaatacctttttcgttgagaaagaagaggattatgttatcaaatggagggaactgcaagatagagcagaaaaggccaaagcatcagatggagggttgatgaatgttgggagggagattgtggattttcacggagagatggttctgttggagaattacagtgcccttaactatacaggtactaatctgttttcttttcaccttagtccatcttttcagcaaatgacttaaagcatagctggaactaattgatgttccgacctcagtcgtgccttacgtttttcaaaattcgagaatgttatttgtggaattcaatc

SEQ ID NO: 15955 - DNA, 474 bp, Gossypium hirsutum
  Clone ID: GOSHI-09MAY01-C196_4
ctctcgcgttcgcccactcgtacgaccacgcgtccgctctgatttttcgaaattgataggattatcttacgtttgcgatcggacgtttctcatcgggatcaccgctcgtttgttcttattcggatcggagcgattcctctctaaatttaaagttcggtattcaataaaatgcactttaagcttaataatattgtttccttcatgtggttgcttgaattattggtttaggtaacgtgccaagcaaatgtttttgtttgaattttagtgatgccttgaatttttatttagctttccgtttggtttatgagagaatttgatgagaaacggtaggaaaaagacagtgattgaaattatgcgtttccttctctagaggacaaacatgaacgctgtgggaactaggagagctggttgattattgttacggtggttcctatttagcttaagatcgtgaaattttgattgattgttgatttt

SEQ ID NO: 15956 - DNA, 1127 bp, Gossypium hirsutum
  Clone ID: GOSHI-09MAY01-C196_3
ataagacgtagtcattactttgtcttgttccaaattatggggtcagcccgagcagctatgattcatttccagaaactttcccacgcggccgtctcaattggcaagggccaagaaataaaagaatctgtgctaatagggtttctactaaaagctgactatctacctagaaatgaatgggtggtgagcaaccagcttggtttatattcgactaaaaatcttctggtagttggagattttcttgtagaacttgattttgtgagagaaatgattaagttccaaataaggtcaattatttctgaagatttaccttctcaagttataaggatgtgaaagttttaagtgatgagtaaaaactattctcagaggagagacttggtgcagaaatgtgatagaggtaggcttgttgttgtggacaacaacgcagaaaaattttgcaatcaatcactctttcccgttttggtttttttcttttcattagagaatatgtttgattctttgatatattgcttttaccataggttgggacgtctatggtcgtctccagtatagttggatttgggtccagaacttcaagcaatcaagttatcatgcaatgctattgctttctaattcactgctggaggctctggagttcctcagtgctgcattattcttgtttttgtgggggtctttccctccgtcgacgcgttcggatgaatccttcgcttggtagtactcctgtttggagcttttcaacctttcttggattatttggttgctgattccgactggtcgccagcagcgtacaagaaagcatcaatttgatggagtgcttccctgacttgttcaagccactagatatgtttaaaatattggaatctttgctaaatttgttattatctgcaagtttttaggctttgcaccagcttgtaagataacatacggtttgatctggaaatgtcattttcaatggaagaaatggaaattaagaaaaaaaatttcgaaaaaaaaaaaaataaaacaaaaaaaaaaaaaaaaccttaccatctaaaaaaaaaaaacacaacaaacataaaaataaaaccaatcaactttcatttctgtaaccttaaatataacaaactcccacctcctctaaaaaccccaaa

SEQ ID NO: 15957 - DNA, 1786 bp, Gossypium hirsutum
  Clone ID: GOSHI-09MAY01-C196_2
ggattatattacgtttgcgatcggacgtttctcatcgggatcaccgccgtttgttcttattcggatcggagcgatttctctctaaatttaaacaaggaaatcccagattgatattgcactacatgtgggatgtgggaaatgtgaaaattttgtgttggcttggtacctcaaaatgtgcggttgattgcagctgacgaaggacgccacagttttgatatatgtactttgaattttatttgctcctgccgctttgattagaattcattagggatttgtgtgcggatctcttttttaatattagctgcacgtgttgaagatgctcaaggctgcaaaacccctaggattagctggtttgcatgacccttctttccccggagattcacatcttttcgggttatgaaatttggtagcgtacacagtcaaggggctgaagcaagttggatgctaaatttgtcttccatatctcagccaattgatacttctccaagttgccatttccgttcatttcttcctcagatttgaaccttcattgcatttgctcgattttgctaatgacaaacacttgtttttagatacatcgtcactttgctgctgattttttatcttccccctcccccacgccgacggaagagtggtgataacataagacgtagtcattactttgtcttgtcccaaattatggggtcagcccgagcagctatgattcatttccagaaaccttaggagggtgtattcacaattggcaagggccaagaaataaaagaatctgtgctaatagggtttctactaaaagcttactatctacctagaaatgaatgggtggtgagcaaccagcttggtttatattcgactaaaaatcttctggtagttggagattttcttgtagaacttgattttgtgagagaaatgattaagttccaactaaggtcaattatttctgaagatttaccttctcaagttataaggatgtgaaagttttaagtgacgagcaaaaactattctcagaggagagacttggtgcagaaatgtgatataggttgggacgtctatggtcgtctccagtatagttggatttgggtccagaatttcaagcaatcaagttatcatgcaatgctattgctgtctaattcactgctggaggctctggagttcctcagtgctgcattattcttgtttttgcgggtttctttttgtaggtctacttatcttgatgaatccttcgcttggagtactgctgattggagctgttcaacctttcttggattattttgttgctgatttcgactggtctgcggcatgtgtagaagaaagcatcaatttcttggagtgcttgcctggcttgttcaagccactagctatttttaaaatattggaatctttgctaaatttgttattatctgcaggtttttaggctttgcaccagcttgtaagatatcgtacggtttcatctggaaatgtcattttcaatggaagaagtggaaattaagcattctggagctgaagagcttagctatcagcaacaaaatgaaagctgcgaagcatttgaagaagaggcgaggggatcattctcatcacagtcaggtggaatttgtgtggataaacaagaatcaaatgatgcagaagcaactgaattgctggacaaggggtttatggagtatggttgcccacattatcgaagaaggtgccggattagagctccctcgtgtggtgagatatttgattgtcgtcactgtcataatgaggcaaagaacaatatcaatgttgaccagaagctcagacatgatct

SEQ ID NO: 15958 - DNA, 1688 bp, Gossypium hirsutum
  Clone ID: GOSHI-09MAY01-C196_1
ataaaatgctctgatttttcgaaattgaaaggattatattacgtttgcgatcggacgtttctcatcgggatcaccgccgtttgttcttattcggatcggagcgatttctctctaaatttaaagtttttaggctttgcaccagcttgtaagataacatacggtttgatctggaaatgtcattttcaatggaagaagtggaaattaagcattctggagctaaagagcttagccgtccgcgacaaaatgaaagcttcgaagcatttgttgaagaggcgaggggatcattctcaccacagtcaggtggaaaccgtgtggataaacaagaatcaaatgatgcagaagcaactgaattgctggacaaggggtttatggagtatggttgcccacattatcgaagaaggtgccggattagagctccctgttgtggtgagatatttgattgtcgtcactgtcataatgaggcaaagaacaatatcaatgttgaccagaagctcagacatgatctcccacgccgtcaaatcagtaaggttatttgttctctatgtggcacagaacaagaggctcaacaagtttgcatcaactgtggtgtttgtatggggaagtatttctgcaactcctgcaaactttttgatgatgatacatcgaagagacagtatcattgtgacggttgtgggatctgtaggattggagggcaggagaacttcttccattgccacaagtgtggttgctgctattcaattcttctgaaaaaaagccatccctgtgttgaaggagcgatgcaccatgactgtcccatatgctttgagttcttgttcgaatcgagacagaatgtaactgttctgccatgcggacatacaattcacacaaattgtttcaaggaaatgagggaccatttccaatatgcctgccctctgtgctccaaatcggtttgtgacatgtcaaaggtctgggagaaattcgacgaggagatcgcagctgcgccaatgccggaacagtaccataacaaaatggtctcgatcctttgcaacgattgcgagacaaaatctctagttcggtttcatgtcctggctcagaaatgcccgaattgcaagtcatacaatactaggcaaacacgaggctgaagtggcttagagtgggatgtagaaaccgacttggatggcatattttccaaatcgatgcatcaagcattgggttctggttaagcttctgcaacgtgtattggtaccagtcgtggcgcatggttccttcgggggttcggtttagtgcttggtattttcaattcttttgtagatgattcaatcaataggccaacaaataagcatttgcttttatggtcctctgtttagatttcctaccttaatgtaggacaagatggctgtttcatcctttcatattttctagaaaatgtaacatttttccttgtcgttaagagtcaatacttttatcgtacccggtgtcagtagaatccttgttttattcggcgcagctcccttcatatacaagctcgcaatatacatatactcagtaacgaggatttcagtttcaaagactatcaagactttgactttgtggttttaagtcaattgaaatctttttaaattataaaatatatagttttattaaaaaaaaaaaaaaaaaaaaaaaaaaaaaaaaaaaaaaaaaaaaaaaaaaaaaaaaaaaaggggggg

SEQ ID NO: 15959 - DNA, 768 bp, Gossypium hirsutum
  Clone ID: GOSHI-09MAY01-C186_3
accacgcgtccgcccacgcgtccgctgcctatgaagtggatggatagtaaaacaagagtccccattgctagattggcattcttggagtagctctccataataaccttccatccattcgtcaccttgataagcttgcttttcctttctggcttttcccatttgggactcactgtttgagcttgtgttttcacagaggatctccataaaagatatcaagagccatccatggtttttgaagaacttgcccagggaactgacagaggcagctcaagctgcctactataggaaagaaaacccaactttctcccttcaatccgttgatgaaatcatgaaaatagtcgaagaagcgaaagtagctcctccagtatcacggtctattggtggctttggctggggtggagaagaagatggggatgcaagggaagaagatacagagcaagaggaagaggaagaagaagatgagtacgagaagacagtaaaggaggtacatgctagtggagaagttcatgtctcttaaaaacttgttagtatatgcttttcaattcgagttctgtgtttagtccttgtgttcatatgatgtcggtttctacctaggacctggtgtcgaataaacaaactgtaaattatggtcttggggcaaagatgtttgtgcagtctttttatgattgtttaggttgtgttgctattgaaagtcggaagttggaagtactgggatttgaagcattacccaattgggatcaacttcataattgtgggttggtaatgtct

SEQ ID NO: 15960 - DNA, 716 bp, Gossypium hirsutum
  Clone ID: GOSHI-09MAY01-C186_2
ctgattttgctctgtcatgatttgaatttttgttcaatgttccttttactttccttcaaatctctccaatctccaccgctacttccgccacttcggccaccgccgcgaatttccgatttataatgtgtttgtattaattgttacctgttacgatttgtgaataattgagttagggttttcgatttatcttgatttatttgtaaaggaaaagggaaaaaggaaaagaaaataaaagatggacaagtacgagctggtgaaagacataggatctgggaacttcggcgtagcgaggttgatgcgtaacaaagaaaccaaagaactcgtcgccatgtaagtatatcgaccgtggacaaaagattgatgagaatgtggcaagggagattataaatcatagatcactacgtcatccgaatataattcggttcaaagaggtggttttgactcctacacatcttgcaattgtgatggagtatgcagctggtggtgaactctttgagcgaatttgcaacgctggacgattcagcgaggatgaggctaggtatttttttcagcagttgatctcaggagttagctactgtcatgccatgcaaatatgccatcgagatctgaagttagagaataccctgttggatgggagccctgctcctcgtctgaaaatctgtgatttggttattcaaagtcatctctactgcattcaagacccagtcaactgttgg

SEQ ID NO: 15961 - DNA, 1800 bp, Gossypium hirsutum
  Clone ID: GOSHI-09MAY01-C186_1
ccccgcgtccgccccgcgccccccccgcgtgcgggcaaataaaataatttataaaccttttttctcttcataaatgcactgatttttgctgtctttcaaagactgagaaaaaaaattccatattctttactttccttcaaatctctccaaatctccacatccaccgtcatctccgccgtccaccgccgctacgtgtttcgattcgtaatgtgttgaatgtaaatcgatacgtgcttggatttgtgaataattgagttagggttttgatttatctgatttatttaaaagaagaaaaaaaaatatggagaagtacgagctggtgaaagacataggatctgggaactttggtgtagcgaggctgatgcgtaacaaggaaaccaaagaacttgtcgccatgaagtatattgaccgtggccacaagattgatgagaatgtggcaagagagattataaatcatagatcgcttcgtcatccaaatataattcggttcaaagaggttgttttgactcctacacatcttgcaattgtgatggagtatgctgctggtggtgagctctttgagcgaatttgcaacgctggacggttcagcgaggatgaggccagatattttttccagcagctgatctcaggagttagctactgtcatgccatgcaaatatgccatcgagatctgaagttagagaatactttgttggatgggagccctgctcctcgtctgaaaatctgtgatttcggttactcaaagtcatctttgctgcattcaagacccaagtcaactgtcggtactcctgcttatattgcaccagaagttctttctcggagagaatatgatggcaagatggctgatgtatggtcatgtggagtgactctttacgttatgttggttggtgcttacccatttgaggaccaagaggatccaaagaattttaggaaaactattagtagaataatgtcagttcaatacaaaatcccagactatgttcatatatctcaagattgcagacacctactttctcgcatatttgttgctagcccctccaggaggatctccatcaaagatatcaagagccatccgtggtttttgaagaacttgcccagggaactgacagaggcagctcaagctgcctactacaggaaagaaaacccgacgttctccctccaatctgttgatgaaatcatgaaaatagtcgaagaggccaaagtcgcccctcgagtatcacggtctatcggaggctttggctggggtggagaagaagatggggatgcaaaggaagaagatgcagaagaagaagtagaagaagacgacgaagaagatgagtacgagaaaacggtaaaagaggtacatgccagtggagaaattcacgtctcttaaggaaaaaagagagtaatatatggtttccaaacgatggagttttggtgtcttttagtgcttacatatgttcttataaatatgatgtcagttttttgctataggacctgggtgttgaataaacaacctgtaaattagtgtgttttggaccagaagtttgtgcagtctctaatatgattttgtagggtgtattggtactgattaggtaggtggaaactacagggatttgaagcctgcctagttggtaagttgggtaaatgtagtggtctacactttttagagtaaaatggaagatctgtcatctatgagtcctataagtttgatttcttccatcataaagtggtatgttatgtctagaggtgcgactccataaaatttaagaaattaccaatattatcttttaagtaactatagaaaaatagctcgagggg

SEQ ID NO: 15962 - DNA, 518 bp, Gossypium hirsutum
  Clone ID: uC-gsflnu33B061e06b1
ttcttcccacgcgtccgcccacgcgtccgccggaagttctttctcggagagaatatgatgacaaaagattgatgagaatgtggcaagggagattataaatcatagatcactacgtcatccgaatataattcggttcaaagaggtggttttgactcctacacatcttgcaattgtgatggagtatgcagctggtggtgaactctttgagcgaatttgcaacgctggacgattcagcgaggatgaggctaggtatttttttcagcagttgatctcaggagttagctactgtcatgccatgcaaatatgccatcgagatctgaagttagagaataccctgttggatgggagccctgctcctcgtctgaaaatctgtgattttggttattcaaagtcatctctactgcattcaagacccaagtcaactgttggaactcccgcatatattgcaccagaagttctttctctccgttttctctccttacttgtatggcagccaatttgaagagtggtggagggat

SEQ ID NO: 15963 - DNA, 887 bp, Gossypium hirsutum
  Clone ID: GOSHI-09MAY01-C176_1
gcattctccatgctgtaggccagatggaaatgcgatctgatctcatggatgctcatatgtatgcattcaagaggtctgtcctgcaagaagttttagacataaaggatacgtttcaaagcttgaaagaggatgtacttccttatcttgtccggagccagctgaaatccgaggccttactaaatagaacaccgcaaggtgaagaaaacagtaacgagaaggttagttcccagaacaatcaagcattcatctctcgaatccttgctaacgcatctaccccaagctttcacggactctattctgagaatcccgatggttcttcttctactcggaaaacccataaatgctgtgtttatattgcaagcagcagcagttattgtgtgcgcttaaattccattcaagcttttatggacataaatcgatatgtcactggtgatgcagatcatctgctaagtcctaataatattataggtccttcaccgaagctcggaaccaaaactactgtggggccaaactgtaggctgggtgaaggttcggaaatgggtgacaaatgccaagtaaaacggtcaatcattggtcgtcactgccggataggttcccatgtgaaggctgtcaattcagttgtcatgaatcatgttaccatcggcgatggctgtataatacagggctccgtgatttgcagcaacgttcagctacaagagcgcgttgtattgaaagattgccaagtcggagctggttttgttgtcactgccggaagtgagtataaggcagaatctttggctaaaaaggagaaatgagtgaaagctgtatctctgaattacttagaaaaaaagaatgcctgtctcgactcttgactcccggcccgtctcgtttttgctttcgagacagta

SEQ ID NO: 15964 - DNA, 900 bp, Gossypium hirsutum
  Clone ID: GOSHI-09MAY01-C166_2
cccccccggcccgctagatttttagaccaaaccatggatcttattcacaagttcctcaacctcgtagctcctacattcaccttcttttcatttgtctttttattgccacccttttatttcttcaacttcttcctttccatcttacgctccgttttcagtgagaatgttgctaggaaagtcatcgtcatcacaggcgcttcttccggtataggagagcatttggcatacgaatatggtagaagaggagcaaggttagctctgacagcaagaagagagaaatcactgcaagaaattgctgatagagctcgtgatttggggtctcccgatgttattgtaattcgtgctgatgtttctaaagttgatgactgtagacgacttgttgaggaaaccgtgaatcatttcggaagatgtaagtctataacttatgtatgtgcatgtataaataacagcggacagtcccggagccgagaccactcctaatttataaaatttataaattaataagagtaaaattagactttagacaaaataataataataatttaatttaatttacatttttaccatagtttgccaaaaaaaaaaaatttggctccgcgactgacaactgatactgttagttaatatgtcatggtctggttatggatacagtggaccatctagtaaataatgcaggaatcaatacagtctgcatgtttgaagatgcacctccagacatgtcccttttcagagctataatgggacatgattttctaattagctatatctagattcaggtcagtgtttttttctttatgtttctaaaactgtcactgcaggacacaaatttctggggttcggtttatacaacccgatttgcagttccacaccttaaaaacagcaaaggcaagatcgttgtca

SEQ ID NO: 15965 - DNA, 1237 bp, Gossypium hirsutum
  Clone ID: GOSHI-09MAY01-C166_1
cccacgcgtccgcggacgcgtgggttcatccaattctccattctctctagatttttagaccaaaccatggatcttattcacaagttcctcaacctcgtagctcctacattcaccttcttttcatttgtctttttattgccacccttttatttcttcaacttcttcctttccatcttacgctccgttttcagtgagaatgttgctaggaaagtcatcgtcatcacaggcgcttcttccggtataggagagcatttggcatacgaatatggtagaagaggagcaaggttagctctgacagcaagaagagagaaatcactgcaagaaattgctgatagagctcgtgatttggggtctcccgatgttattgtaattcgtgctgatgtttctaaagttgatgactgtagacgacttgttgaggaaaccgtgaatcatttcggaagattggaccatctagtaaataatgcaggaatcaatacagtctgcatgtttgaagatgcacctccagacatgtcccttttcagagctataatggacacaaatttctggggttcggtttatacaacccgatttgcagttccacaccttaaaaacagcaaaggcaagatcgttgtcatgtcttcagcagcttcatggatgaatgatccaagaacaagcgtctacaatgcaagcaaagcagcattgacagcctttttcgatacattaaggattgaacttggatccgaggttaagataacaattgtaacacctggttttatcgagtctgaaatcacccaaggcaaattccttcaaagagatggtaacatggaagttcagcaagacatgagagatgtacaagtgagttctatcccagtagcgtcggccagtgggtgcgcccaggcaatagtgaacagtgcaagcaaaggagatcggtacttaactcagccatcatggttcagggtgacttacctgtggaagatgtttttcccggaactggtggaatggggttacatattatcccatttctcgaggccaggagctccacaccagcaagcaccaagcaagaagatattggatttcactggtcttaagaatgttgtttatccatcatccatccaatcacctgagattaagaactgattaattcatgtgcaccaaccccattctgtttcagtactcaagtcatatgtttgaaagttctatccatgtatgtatgtccactttgggaaagctctaatgataaactagtgtgtgttgtaat

SEQ ID NO: 15966 - DNA, 356 bp, Gossypium hirsutum
  Clone ID: LIB3583-029-Q6-K1-H6
atttacgttgtcacgaacgtaactgttcctcttcacgtcagctacatcgtatgaggaacagttacccacgcgacgcgtgatatcaaagagtgatacagcgtattacctgcagttgtaagtagaattctagctggaagcgctgtgtacttgaccagccgctactcagggtagggtagcattagcatactaatatggtcgaagaggagcaaggttagctctgacagcttgatgagagatgtcactgcaagaaattgctgatagagctcgtgatttgggatctcccgatgttattgtaattcgagctgatgtttctaaagttgatgactgcagacaacttgttgaggaaaccgtgaatc

SEQ ID NO: 15967 - DNA, 1369 bp, Gossypium hirsutum
  Clone ID: AF155124
aagcagtggtatcaacgcagagtggccattatagccggggaccgctaccaaagaaatatctaattgatcatattttatctatttcgctctggcagcttctgctttcgttctctctaatggcctccacaattcccattgtcacactacttattgtgatgctttcttgccatgctgccaatgctcagctttctcccaacttctatgcaagctcttgccccaatcttcagaccatcgtccggaatgccatgagtcgggccgttaaccgagagacccgaattggggcctctattctccgtttgtttttccatgactgctttgttaacggttgtgatggatcgatactgctagatgacacggcgacgttcacgggcgaaaagaatgcagtgccgaaccgaaactcggctcgaggtttcgaagtgatcgataccataaagactaatgtggaggctgcttgcagtgctactgtttcttgtgcagatatattagcacttgctgctagagatggtgttgccctgcttggaggacctacatggcaagtacccctagggcggagagatgcaagaacagccagccaaagcgcagccaacaaccaaatcccatcaccattcgctaacctcgcaactctaacctcttcgttcgctgccaaaggcctaagcacacgagacctgaccgccctatccggtggccacacgatcggcctggctcgatgcaccactttccgcggtcgcatctacaacgacaccaatatcgatgcgaattttgcagccaccagacgggccaactgccctgcttccggtggtgataacaacttggctcctcttgatatacagactcctactcggttcgacaacgattacttccgtaacctcgtggctcgaagagggctgcttcactcagaccaggagctcttcaatgggggatcacaggatgctcttgttagaacctacagcaacaatcctgctaccttttcggctgattttgctgctgccatggtgaagatggggaacattagtcctcttactggaacacaaggggagatcagaaggaactgcagggtggtcaactgattgttatgcccatatccaattatcggttatttcaataagttccatggaatgagttgaagactaaattataatggttaaattctggtattagtccatatactttaagaaagttgtggatttcatttgtgtactctaatttggttatttttagttaccataactttaaaattttaaaattttagtctttatcaaatgataattgttaaatttattaagtcctactatttctctgttggaacatttttaaatatttatagtattgcaataactataaaaaaaaaaaaaaaaaaaaaaaaaaaaaa

SEQ ID NO: 15968 - DNA, 350 bp, Gossypium hirsutum
  Clone ID: LIB3272-009-P1-K1-H2
gatggatcaatgcaatgctactgtttattgagcaaatctatcagcactctctgcgagagatgaaatcgccctgcttggacgacctacatggcaagtgcccgtaggccgaacagatgcactatcatgcagtctaagcgctctctgcatcgaaattccatcaccatatgctaacctgacagctctaacctacttggtcgctgccaaaggcctaagcacacgagacctgaccgccctatccggtgccacacaatcggcctggctcgatgcaccactttccgcggtcgtatctacaacgacaccaatatcgaagcgtattgagcagacaccatgacggtccaactgccctgctt

SEQ ID NO: 15969 - DNA, 1426 bp, Gossypium hirsutum
  Clone ID: GOSHI-09MAY01-C106_1
gaaataagaaaaaaaggcatttctttcatcttaaagagacagcgaggaagccacgaagataatagagtgattttcaatctccattttaagggtgtggaacaatgggtgctggaggcagaatgtcggttccaacgagtccaaaaaaacccgaattcaactcactgaagcgagttccatactcaaagccacccttcactctgagtgaaatcaagaaagccatcccaccacactgtttccagcgctccgttttacgctcattctcatatctcctttacgactttatattggcctctcttttctaccatgtggccaccaattacttccctaaccttcctcaggctctctccaacgtggcttggcctctttattgggccatgcaaggttgcattttgaccggcgtttgggtcatagcccatgaatgtggccaccatgctttcagtgattatcaatggcttgacgacaccgtgggccttatcctccactcttctctcttagttccatatttctcttggaaatatagccaccggcgtcaccattctaacaccggttccctcgaaagggatgaagtgttcgttcccaagaaaaaatctggtttaagatggtgggccaaacacttcaacaatccaccgggtcggtttctgtcaatcaccattcaacttacccttggttggccgctttacttagctttcaacgttgccggccggccttacgacaggttcgcttgccactatgacccttacggccccatattttccgaccgggaacgactccaaatctatatctctgacgccggcgtcctcgctgtcgcctatgcgctctaccgtctcgtgttggccaaaggggtaggttgggttattagcgtttatggggtgccattattggtggttaacgccttcttagtaatgatcacgtatttgcaacacactcacccatctttgccgcactatgattcctcggagtgggactggatgagaggagctttatcaactgtggacagagattatgggattttaaacaaggttttccataacataaccgacactcatgtggctcatcatttgttttcgacaatgcctcactatcatgccatggtggccacccaggcgataaagcccatattggggggatactatcagttcgatgggatgcctgtctataaggcgatatggagggaggcgaaggagtgtctctacgttgaaccagatgagggcgacaaggacaaaggtgtgttttggtttagaaacaagctttaaatatttgcattttaccttaggcatgttctagtcgttgatgttttaaggatattttagccgacatacttggttttcctttttgggactttttagctttgtatttgcagacaataatcttgttcactattaaataatggtagaaataaatacacagcatggattggcaataaaaa

SEQ ID NO: 15970 - DNA, 658 bp, Gossypium hirsutum
  Clone ID: GOSHI-09MAY01-C136_3
ccctcgcgtccgaccaaagcccccccttgccgaccaggaaattaaataagcagttcagactttaaggattctgcttcatcatggtcaacgcgactaaagggctggtcgatgctcgtgacatttccatgccacagtattatatggacgtgagagccgtgccacccacagatctgaacaagaacactgagtggttcacctatccaggggtttggaccgcttatatcttgatcgttttcttttcgtggctcatggttttatctgtatttggcacctctccgggaatcgcttggaccattgttcatctcacccatttctttgttacatatcacttctttcactggaaaaagggaacaccatttgctgatgaccaaagtatttacaatggcttgacttggtgggagcaaatagataacggcaagcaactcactccaaacaggaagtttttgactgttgtacctgttgtgctgtatcttattgcctcacacacaacagggtatcagaacccgctgctcttcttcaacacactagctgtttttgtgctggtggtcgcaaagttccctaacatgcacaaggtccgcatatttggaatcaatgctgatcactgaaatgcaaaggaatccaacacacttttctctggtactaggtttttattatttgt

SEQ ID NO: 15971 - DNA, 475 bp, Gossypium hirsutum
  Clone ID: GOSHI-09MAY01-C136_2
gcctcacgcgtgccttagcccccccttgccgaccaggacattaaatgagctggtcagatgttaaggtgtctgcttcatcatggtccacgcgactaatgggctgtgccgttcttgtgacattcccatggcacagtttatcgtgaatttgaatgcatcgctgccagctgcacataagtttataatacatgtgctggatagcacgcacttttttcgtgcaacctgatgtcgccgggatgatacgaagtgccatatcccagttcagagaccagaattcatacgagaagccaacttgactcttgaactcaatatcctttctttaatggagctcatatatgaaaaaccaataaagaacaacaaagaaattctagtgcatgaatatgtgcaattgctggcttcctattttcattttgacttcagaccctgatataattgagggctatatttggatttggattcggattttggatttatttat

SEQ ID NO: 15972 - DNA, 648 bp, Gossypium hirsutum
  Clone ID: GOSHI-09MAY01-C136_1
caaatttcaaaacaccccccaaatctctgggttttttttttgtaccatggtttcctcttcttcttttttcttgagcctaacccatgaagaaaaaacctacggcgctaatcgatacggcgtcgtggtactgttccgtaaccttattggccttaatattgatagggtcaatcagggcaaactccgtatcagatgaaccagtgagaggtagccagctccggaaccgaccctgcgatgaaatctatgtcgttggcgaaggtgaaacccttcactccatcagcgacaagtgtggcgatccgtttatcgtcgagcggaacccgcatatccatgaccctgacgatgttttccccggccttgttatcaagatcatcgcttcaactgataggaaattatagaggtagctgcttttacacattatacacacagaaaattttaatattgtatactgggttttggtcttcttttgtttcttagtgaaaagtctttgtaataagttgaagcctgtatactgaggcctttgatataggatcatatcatatcatatatatacatggagattggtttcttctccggagagatttcagctcttctgtaaatagctcttttatcagtatatggcataatgctagtttgggttcacaccagtacacc

SEQ ID NO: 15973 - DNA, 398 bp, Gossypium hirsutum
  unsure (1)..(398): unsure at all n locations
  Clone ID: LIB3149-036-Q1-K1-F11
gcgtgctatccancacatgtattataaacttatgtgcagctggcacgcactttttcgtgcggcctgatgtcgctggaatgatacgaagtgccatatctgagttcagagaccagaattcatacgagaagccaacttgattcttgaactcaatatcctttctttaatggagctcatatatgaaaaaccaataaagaacaacaaagaaattctaatgtatgaatatgtgcaatttctggcttcctattttcattttgacttcagaccctgatataattgagggctatatttggatttggattttgtatttatttatatgtttggctatcattccaaagacttgttcgagtatatcattatccttttgctgaaatattaggtgattgttaacaggagttatt

SEQ ID NO: 15974 - DNA, 493 bp, Gossypium hirsutum
  unsure (1)..(493): unsure at all n locations
  Clone ID: uC-gsflmaxxa009b10b1
aaaaagtgtataaaatcctccttatcgtataattttccattatttcctctgtttcatcaaatttcaaaacatcccccaaatctctgtttttttttttgtaccatggtttcctcttcttcttcttcctcgagcaaaaccatgaagaaaaaacctacggggctagtcgatacggcgtcgtggtactgttccgtaaccttattggccttaatattgatagggtcaatcagggcaaactccgtatcatatgaaccaatgtgaggcagccttgttctgaaccgtgcctgacctgtattgtttggagatgggaaagaaagggaccggctggttctctacggcgaagaaagtgttccagtcttcatctaaggacttgcccgagaaaaaggaagagagtgttgagaaatggccgtatgaggccccggaagtagtgtcatttgaacattttccggcagaagagtcaccagacatcactaaggatgagagtngaacgtcaact

SEQ ID NO: 15975 - DNA, 521 bp, Gossypium hirsutum
  unsure (1)..(521): unsure at all n locations
  Clone ID: uC-gsflmaxxa009b04b1
cccacgcgtccggaattggtgaaacccgaattcactaccaacgagcacagctttcaccattatcaatccttgagtcacccatccgtttgtttgaggaagaaagagaaagcccagaagagatataaccaaagtaaaagatgtacgtgagagctgtgccacccacagatctgaacaagaacactgagtggttcacctattggccgtaatgtacgcgaggatcaatcggggcaaactccgtatcagatgaaccagtgagaggtagccagctccggaaccgaccctgcgatgaaatctatgtcgttggcgaaggtgaaacccttcactccatcagcgacaagtgtggcgatccgtttatcgtcgagcggaacccgcatatccatgaccctgacgatgttttccccggccttgttatcaagatcatcgcttcaactgataggaaattatagaggtagctggttttacacattatacacacagaanattttaatattgtatactgggctctggtcttctttggttct

SEQ ID NO: 15976 - DNA, 284 bp, Gossypium hirsutum
  Clone ID: LIB3584-030-P1-K1-G6
tatcaatccttgagtcacccatccgtttgtttgaggaagaaagagaaagcctcagagagatataaccaaagtaaaagatgtacgtgagagctgtgccacccacagatctgaacaagaacactgagtggttcacctatccaggggtttggaccgcttatatcttgatcgttttcttttcgtggctcatggttttatctgtatttggcacctctccgggaatcgcttgaccattgttcatctcacccatttctttgtacatatcacttctttactggaaaaaggga

SEQ ID NO: 15977 - DNA, 750 bp, Gossypium hirsutum
  Clone ID: GOSHI-09MAY01-C386_1
cccagcgtccgcccacgcgtccggcacaattaggttcattcattttcattggacaaggcaccaaaatagggaatgacacaaaaatctctcattctgttattggagaaaggtgcactattggatcaaatgtcacaatagaaggctcttatatatggaataatgttaccattgaagatggctgtcagttaaggaatgcaatagtatgtgacggtgtaatactgaagtcaggagcaggtctgcaacctggagttattctatctttcacggttgtagttggacgacacttgggcgttcctgcctactcataggtttctttacttcaacagccaacccagcaagatagtgatgaggaattggaatatgctgacagtactagtggcactggggagcttcgatcggataaattgaatggggacattgcacctgatttatctgagacagcatctgagcttggtactggtggagttggttatatttggacagtctttgaaggagcgtatgatgaagaatggaggcattcagttgcacctattcccacagataaactggttaagctaatgctagataaagatgaggatgaggaactgttaactcaagatgggaatgttatttcagcttcaagagagctgaaaactgattctgatggtaatggttctgaagatgacgataatgaagactctagagatgactatgtatcctttgagaaagaggttgaagctaccttttaagggctgttcatgaaaatgtcaa

SEQ ID NO: 15978 - DNA, 602 bp, Gossypium hirsutum
  Clone ID: GOSHI-09MAY01-C356_1
tgttgaacagaaacctgatggggctgtatatgctttcaagccaaaggatatcatgatgagcaggaaaagcttgtcgcctattgaagtagctaaattaactgagagtgaaattaaacaaagaattaaccggctgtcccaaatatatgctaataagattacaattttgaggttgcctgataagggagccaagatagaaaagcagattgctgaactgaatgcagagctccaaaagatgaagacagcagaggtaactgaaaaagaaactgaagtaggtgtagatgatataactggacaactccagaaagtgttaaatgtatagataaggtctttggttgtatctgtatttagcacgcctgtatctaggcttgttccaccccacactagaccactacctagcatttggactcgaattttcaaacaagttttcgatggtccctctagattttgtggtggaaatgcataattttgtgggtggtaactgttctaaacacagctcttttgcacacaaaaattctgcgttcccccccccccccgctcatgccttcttttactctctcaatgagagattgaaattgaggatctaagtttttgagtactagcta

SEQ ID NO: 15979 - DNA, 683 bp, Gossypium hirsutum
  Clone ID: GOSHI-09MAY01-C306_1
ctgagattgataaattgaactcagccatggatgagactgcaaaagtggttcaggagttaaaaactacactatggaaaagaaaatcatcttgcaatctacatgtttccagttctgcaagtgaagttgccgcaagctcaaagaagtttagtggcaagaattcgcagttactgctcgggaagtcaggtactgggaccagagaccataatgagaccaaagtctgcagcctcccagtatttgatgatggtgaatatgccagtagtgttcttactgaagagcctgaaccagagctggaggttgtggaaatggatcaactagaggcagagctcgagttagaactgcaaaaattgagtgagactgaggtttcagccaaaagtttgcatgagccagggggagagaggtttgattcataccaaagcaagggagtattgccgtctgaactagatcagaaactgtgccatgtgttaatcgagcagcaagaaaaccaaatcgaggagctagaatctgaattgaattcggctcaatccaagctccgtgagaaagaagctgaactccaagcactaaaggattgccttaaacgcctgactaatttctctccgacgactgcctcagatgacgataccgaggcccaaggggaccaaaaatgataaaggatcaagatagctctattaaaagggatctgaaac

SEQ ID NO: 15980 - DNA, 582 bp, Gossypium hirsutum
  Clone ID: GOSHI-09MAY01-C286_91
cccacgcgtccgaaattaagctactctttttctctcgttactctttttctctcgatcctgcgtttcttttcactgtttagatatatccgcctctctcatcttccgttgtttatacgtttggttgttgttgaagaagtgctactaccatggctacaaagaagagcgttagggacttgaaggaagctgatttgaagggaaagaaagtgtttgttagagtcgatctaaacgttccattggatgcccacgccttcgcccccgcggacgcaaggatccgtgctgctgttcccaccatcaagtatttgatgggtcatggctctaaagtcatcctctctagtcatttggtaatttgttatgggatacttttggttttgatggctgttgggaactttataaacacaatacagacactcgtgacaaaatcaatgtttaaagcaaagatgaaaagatctaagagcaagccggagttggattaaaatgtccttgattgttaggactgagcaatgctttctttacaggtaaataaaccattagttatattcattgatgaaactgatgctttagcaactagacgtcaggggattt

SEQ ID NO: 15981 - DNA, 453 bp, Gossypium hirsutum
  Clone ID: GOSHI-09MAY01-C286_79
gtgaacggaggcgttgatatggggagtgtttcacaagcttatttagcgaaagcagagaccaggtgaagagagggcgagggatctttagatatttctagagctttgtcagccaaggttctaattagccttaggatagggtcttcagagaacagagtggcaagcatcactcatgaagagtctcatgataagctctatctcccaagctctcaacaacttatcctcatgtccccttctggtgtccaaaaggagagaatggaaccagaggacatgtatgtattatcaggagatggggctatcatatcttcaccttctccaaagccataccctcataagcctcctaaatgctctgattgtgctccgcttttcatgaaggcatatcatatgcgtaatgctggggctgttatccacagtcatggaatggaatcctgtcttgcaacaatgatcaatccacat

SEQ ID NO: 15982 - DNA, 598 bp, Gossypium hirsutum
  Clone ID: GOSHI-09MAY01-C286_73
tccaaaccaagccttttaggaaaatatatatactttttgatggaaggattggtgaattcacggatcattcctattcgaacttcctgtagacggcattactctgtttttctccctacattttccttgcagttaaggaataaaaacttgaataagggtcaagtttggatgatgagacgtcccaagtcattggattcggttgctgcttcgattcaaccattagaagcctcgactacaggcaacactgataacaggcagccttccaaagaggttcttgagctgtggagaagtgctgatgcagtgtgctttgatgtggatagcacggtgtgcgtagatgagggcattgatgaacttgcggaattttgtggggctggaaaggctggtgcagaatggactgctagagccatgggtggttctgttccttttgaggaggccttatctgcccgattgtctttattcaagccttcccttacttcaagtccaggattttctcgacaaaaggcccccaaggatttcgcctggcattgaagaattagtcaagaagctgatggcaaggaataccgatgtttatctaatttccgggggcttccgccaaatgatc

SEQ ID NO: 15983 - DNA, 680 bp, Gossypium hirsutum
  Clone ID: GOSHI-09MAY01-C286_72
gggacccttggttcctgttataaaatggtttattagcagagaggcatgcatttggtcacgaaggggttgggggatttgaagtgaaagagcaagccaaagctcagttggaagctacatgtccgggagtggtttcttgtactgatatagttgccttagcagctcgagatgctatagctttggcaaatggaccgtcatatgaagttccaacagggcgtagagatggaagggtttcggatgtttctctggcggctaacatgctagataattaagctaacttatggttctatttttaattaatgcaggactgagcaatgcccccgcgtccggaaggatgggttgcttcacactgcttgcgggactccaaattatgttgctccggaggtgctcactcatgaacgctgtgattaattagttgtattgatgcaactcttttttttttttttttgccttttcattctggtatctgatatttttattttcaggtgttcaaagataaaggttatgatggtacatcatctgatatttggtattgcggagttattctctttattctcatggctggttatttgccttttgagccaagccttataggcttgtataagaaaatctgggaggcttctttcagttatccatcatggttttcatctggtgctaggaatttgattaagcgtattcttgat

SEQ ID NO: 15984 - DNA, 436 bp, Gossypium hirsutum
  Clone ID: GOSHI-09MAY01-C286_70
taggctgctgcaaaaaataagaaatattggaagcagaaagcaaagatggaaaaaaattgtattttaagcttctcttttacacttgatatggatgttggggagttcattgttcctgttccatacgtaaagcaagtaaaggaattggagagaagaagagaagatcatgaagaattgctcttggcagaaagggtatgagagaatatgggtgattaagtcaaatggagaaagggacatcatttccttgttgtgtgcaagtgttttctccctgagacatgcaaggaacctgacatcaagaatggttcaacttaaagatgcttccttatactcattctcatcctgtttatattttccaatgctttcttcaagtaggatactaagaatttcctgtactatcctttctgattgcttataaaatagtttgctcattagaaccttc

SEQ ID NO: 15985 - DNA, 900 bp, Gossypium hirsutum
  Clone ID: GOSHI-09MAY01-C286_67
agaaatgagccttgggaaatgggagtgcacaagcggaatggtgttgtctatcttgacgtgcataaactgcctgagagaccacgaagtgagttggatcgtcgaaaatgttattgggggtattgttttgagagccttgccactgaagatccaagaagagaagatggtgaagggatacatcatgttgatgccaatgttgaatactgttcggtgattaaaaccaaattaggggctcatcgtattctgatgggtgctgaaatggattgctgtgattcaccagatgagggaagaagattttatgtggagttgaaaacaagtcgtgagttggattatcatacagaggaaaggtatgaaagagagaaactgctgaagttttggattcaatcattcctggcaggtgttccttatattgttattggatttagggatgatgcagggcgacttgtacgcactgagagactaagaaccaaagacatcacccatcgagtcaaaatgaagaattactggcagggaggagtctgcctggcatttgctgatgaggtactgtgctggctttacggaacagtcccagagaatgaggactacatactacaattcgcaccaccattcaaccgattggagctcccacaagcacaatcttgccctgatgcgattactaatcacgttgaacaatcatagtcatcgacagacttatttgttagtttgtaattcagatagttcaaatacaggatcaaaacaaagaggatggtttatatttttactaactttgattttgcagatgaacatcacacatgataaagttcccccaagttcagcctttgtttgtaaaggcaaaccccccaacttggtagattcataagttaaaaaattgtcctttggtaattagatttaaatagctcccat

SEQ ID NO: 15986 - DNA, 657 bp, Gossypium hirsutum
  Clone ID: GOSHI-09MAY01-C286_65
ccccaaaatcggttccctcccccctcccctctccccaaagaaatcctaaaactttgcctgaaatttcttctcttttttttccccattttatttttcccaaaccatttctcccctaccccgattccctttattttttcccccagtttccccaaatcggcagccctctgcatctccgtcggcagcccgcggctgtatctccgtcgacatatgcggtcaagtatattgaaagaggacccaagatagatgaacatgcgcagagggagattatgaaccataggtctttgaagcatccaaatattattagattcaaagagtcttttgcagtgactacctgttcaagcttctgctttttggagattctggtgttggaaaatcttgtcttcttttgagatttgcttggtgattctgctggacaagaacggtttaggacaatcactggtagctactaccgtggtgcccgtggcataataatcgtttatgatgtgacagaccaagaaagcttcaacaatgtcaagcagtggctgagtgaaattgatcgctatgctagtgataacgttaacaaactactagttggaaacaagtgtgatcttacagctaataaagttgtatcatacgaaacagccaaggcatttgcaaatgaaattggcataccttttt

SEQ ID NO: 15987 - DNA, 446 bp, Gossypium hirsutum
  Clone ID: GOSHI-09MAY01-C286_64
ttccacgcgtccggcgtttgcgtgtcttctcatctctgctttttccccctttttatctttcttcttctttttcttcttcttcttcttcttcttcttactccagccgactttttccggcaaaacggtgtcagatctttgtgatctatagccggaagtttcatttcgagttcgacgatctcatccttcgatctttccactttcttcagcctaccatgaatcccgaatatgactatcttttcaagctacttcttattggagattccggtgttggaaaatcttgccttcttttgagatttgctgatgattcatatgtagaaagttacataagcaccattggggttgattttaaaatacgcactgtggagcaggatgggaagaccattaaacttcaaatttgggacactgctggtcaagaaagatttaggacaattactagcagctactac

SEQ ID NO: 15988 - DNA, 780 bp, Gossypium hirsutum
  Clone ID: GOSHI-09MAY01-C286_63
gttttcaacagagcgttggggacttgaaagaagctgatttgaaaggaaagaaagtgtttgttagagtcgatctgaacgttccattggatgataacttcaacataactgatgacacaaggatccgtgctgctgttcccaccaccaagtatttgatgggtcatggctctaaagtcatcctctctagtcatttggatttcgcccggcattgaagaattagtcaagaagctgaaggcaaggaataccgatgtttatctaatttccaggggcttctgccaaatgatcaatcctgttgcatcaatccttggaattctgcaagaaaacatttttgccaatcagctgctctttggaaggtctgggggggttttgggattcgatgcttatgatcccacttcgaggagtggaagaaaagctacaggttgtcaactaaataagaaatgttaagggatacaaggaactagtcatgattggtgatggtgctactgatcttgaggatttcgcccggcattgaagaattagtcaagaagctaaaggcaaggaataccgatgtttatctaatttccgggggctttcgccaaatgatcaatggagtatgttggaattcacagttcgggatttagagactttctgctgaaaccggagctgcttcgatctattgtggattctggttttgaacatccttccgagggcaaagttttaaactcatgtctgatgttaacattcgtgaattcaatgaattaagtcatttgtttttcttgcttttagtgacttataatggggggc

SEQ ID NO: 15989 - DNA, 945 bp, Gossypium hirsutum
  Clone ID: GOSHI-09MAY01-C286_62
tgttaaagttcttatattcattctgtaaaacgacatgtctgtatttcatctcatgaagaatgaggtaatcattagtttgtttaaagctcttgaggactattcaattgataacagatgagatgtgggttcctgggttcgttaggctgctattgaaggcctagaaagatgtacatatatcctctgtaagagagattccatgagttctacagggaaagcagacatacttgaatctatgtcgaagcaacctaataacaatgttgttgaagaaaatcaaatgtgcttgttttttgatgtaaaatcttgctaccaatttagtgggagggatctccaagcaagctgtagaaaagatggataaactaagagaagtggctgctaaggttctccaaaggattctgtaccacaaggaaattttcgttccttttataccatatagggaaaagatagaagaaattgttccgaacgaaacagatctaaagtggggagtacctaccttttcatatccgcgatttgttcaattacttcaattcagttgttatagcagaccagtgctgtctggtttagttatttcaattggtggcttgcaagattctttgaggaaggcatcactgtcagcttttctggaatatcttaatgtcgatcaagatgttaatgaagaactcaaattgtgcaagttacccacggacatcctttggattctccaacagtataagcgatgtgacagggttattatacccacattgaagacaattgagattcttttcagcaaaaggatattcttggatatggaggcgcatacttcggctttctgttctggtgttttggattctctggcggttgaattgaaagcatcaaaggacttctctaagttatatgcaggcattgcaatacttggttacatttgttcagtttccgatcctatcaacgcccgtgccttttctcatcttc

SEQ ID NO: 15990 - DNA, 541 bp, Gossypium hirsutum
  Clone ID: GOSHI-09MAY01-C286_61
caaggtaaaagcaaaaccggcaagaaacctaaacccgagcctagcagggaagagattcatgaagtagttgtagatattctaaaaaaagtggacttcaacactgcaacattatctgatatccttaggcaactaggtacacactttgacctggatttgatgcacagaaaagctgaggtgaaggatatcattacagatgtgataaataacatgtctgatgaggatgaggaaggggatgaaagtgaggagaatgccgacacaggtgggggtgctgataaagatggtgatggagatgatgatgcctagttctcacttgaggaaattatatgaccggtaatttgtctctccctctagggatttgatttgcaattctcaatagaattataaaattgtagtcattttagatgttcaataggtgggattgtaacatatgaggtagttactcttttgtagtaacttattgtggtatgcttgtagctgaagttttctcatagtgaacatcatgttgtttattcggcagaagtttcaaagatttgagttttag

SEQ ID NO: 15991 - DNA, 1014 bp, Gossypium hirsutum
  Clone ID: GOSHI-09MAY01-C286_60
ccggattccggtcgaccacgcgtccgcccacgcgtcgggacgcgtgggcttcaatctttacattcgtatttgatgtttagattgcactagtaattgattaaaaagtctcattgcatatgtaccatgcatattgggagtaaaatttataccttcatgtgatgacacggtttcatgatttgactgattacattttggcattagaatcttgttttacttttagttgcatatctggatattttcagaggtttatgtgggactaattattgaacctgatcaatttatgtaaattctttgatgcaggatgattcatacatagatagttacatgagcaccattggggttgattttaaaatacgcactgtggagcaggatgggaagaccattaaacttcaaatttgggacaccgctggacaagaatgatttaggacaatcactagcagctactaccgtggggctcatggcataattgttgtttatgatgtgacagaccaagaaagcttcaacaatgtcaagcagtggctgagtgaaattgatcgctatgctagtgataactgttaacaaactactggttggaaacaagtgtgatcttacagctaataaagttgtatcatacgaaacagccaaggcatttgcaaatgaaattggcatacttttttggaaaccagtgcaaaagatgccacaaatgttgaacaagctttcatggactgtggctttagaaaggagatggcatgcgctagggcttggctatcactcaggtcttcggcgggctgatatcgagcgggcagcggttatacactatgatggagtcatgaaaccctggttggaaataggaattgctaaatataaaggctgttggagcaaacatatgcagtatgaccacccttacttacagcagtgcaatatccatgaataattgacatgatcacggcatagaagtggaattatttgattcattgatgtaaaattttaacctatttttacatccacaagtattagataattttattttttttt

SEQ ID NO: 15992 - DNA, 641 bp, Gossypium hirsutum
  Clone ID: GOSHI-09MAY01-C286_59
gggaattctgccaattgcaaggaaaaagtatgcccctgacttgcttattgtaatctctcctctttatatatggctggcatttatgtctctgcagccgcacaaagaagaaagattcctttatcccatataccctcttggttgtgttgctgcttctgctgtcattgagagttttcctgatcttttccgagacaaatataatccctacgataattctattatagttatgatggccaaatttctgagacctgtggccctcagcctcatattatgtgcctcacattcacgtacattctcattgatcaatggctatgctgctccaatggaggtttacaagatcttggagcaccatgatgatgcaggatctggttctgtactttgtgttggaagtgagtggcaccgttacccgtcatcattttttgttcctgattatattggtgaagtgagatggattgatgatggattccgaggtcttcttccattccctttcaatgatactctgggagggactgcggcagcaccaccatactttaacaataaaaacaaggcatcaaatgagcaatatctccgaaatattgaagcttgtacattcctggtcgagctgcagcttgaacgacctttcccttatcgtggaaatgaactaa

SEQ ID NO: 15993 - DNA, 534 bp, Gossypium hirsutum
  Clone ID: GOSHI-09MAY01-C286_58
cccccgcgcgtccggaaaatgtgcctaatgtgttcctggatatgtttactccaagaaaaataaagaggattcttatgcattggctttctcaaacattctcgccagcaaaaggtaattacaagggaacaagcagttcaagatctggaggaattggagagaagaagagaagaccttgaccaattgctgttggcagaaagggtatgagagaatatgggtgattaagtcaaatagagaaagggacctcatgtccttgttgtgtgcaggtgttttctcccctgagcacaggccaaggacacttgcacctcaaggaattggtctcacacttaagagatggcttcccttgtactcattctccccctctttatattttccaatcgctttcttcaaggtaggatactaagaatctcctatactattctttactcattctccccctctttatattttccctacgctttcttcaagtaggatgctaagaatctcctgtactttctttctgattgcttataaaatagtttgctcattagccccttc

SEQ ID NO: 15994 - DNA, 870 bp, Gossypium hirsutum
  Clone ID: GOSHI-09MAY01-C286_57
tgactttgatatctgggctgtggttaatcttagctcaaactttctccctttttatggcctttttggctactcggtgtccaaaaggagagaatagaaccggaggacatgtacgtattatcaggagatggggctatcatatcttcactttctccaaagccataccgtcataagcctcctaaatgctctgattgtgcttcgcttttcatgaaggcgtatcgtatgcgtaatgctggggctgtgatccacagtcacgaaatggaatcctgtcttgcaacaatgatcaatccacatttgaaagaatcactcatatggaaatgataaaaggaatccaaggacatggttactacgatgaacttgtgaacccaattatcgagaacacggcttatgaaaacgagcttattgattctcttgctaaagctattgaagcctatcctaaaacaactgctgtgcttgtccgcaatcatggcatatatgtatgggaagactcatggattagtgctaaaactcaggtgcatatttggctttctattctagtgttttggattctctggcggttgaattgaaagcagcaaaggacttctctaagttatatgcaggcattgcaatactttggcttcatctaagcttgaaccagccctctgttgtatattgtttcttcttcttttctgatctttttcctttgattaatgagagttgatgatgatttggcattcttttcaagtaatactttatgagtgtgtctgtgtgtgtgttttttatgtattaaattacatattgaatcaatgtttatgtattaaatttaaattcattaatttttatatttagttttaaagttaaagaattttaatagaaaatttttatatttatatc

SEQ ID NO: 15995 - DNA, 959 bp, Gossypium hirsutum
  Clone ID: GOSHI-09MAY01-C286_56
cggtcgcgtgggcagtcgcgtgggcagtcgcgtgggcggtcgcgcgggcgctgctctcagctgagtttcagggaaacaagaaggaagcatcattttcttaatccaagaaaaaatatcccttttcgttttaatctttgtcgtagctaatccatcttcgttcgcgtgagagaaaaatggctaagaatgtgggaattcttgctatggatatttacttccctcctacctttgttcaacaggaagccttggaggctcatgatggcgtgagcaaaggaaaatacaccattggacttggacaagattgtttggccttctgtactgaggtcgaagatgtgatctcaatgagtttgacagttgttacttcactccttgagaagtataagattgaccctaaacaaattggccgtcttgaagttggcagcgagaccgtgatagacaagagcaagtccattaagactttcctaatgcaaatttttgagaaatgtggaaacactgacattgaaggggtcgattcaactaatgcatgttatggagggactgcagctctgttcaactgtgtcaattgggtggaaagtagttcatgggatggacgatatggtcttgttgtctgtactgacagtgcggtctatgcaggtcgaaaatgctaggaagcacctatgtcttctggagcagccacaagatcaaactgagttacagaagttgcaggccgtggaaaagcatctttgcaagtgtacagatgctcggagaattagggactggaagagtgcattaagggaaactgatgctgccattgccactggagctgacttttctcctcagctttttatgtgtagagtggaagcccttttgaaactccatcaactcgatgatgctgaatcaagcctttcggttggttctaaattagaaccatgcaccaactcctgttcacagactaagttctttcggatgttttctgaagcata

SEQ ID NO: 15996 - DNA, 663 bp, Gossypium hirsutum
  Clone ID: GOSHI-09MAY01-C286_55
cggacgcgtggggcaatttcagttgattctatgtgctgcttcttctccttcttcctcttcaacaactccgtttttcctttcgaaaaggaataatcaataacaaaaagacaaatccaatcaatcagagcaaaatccaaatgggtaatcttttctgttgtgtacaagttgaccagtctacagtagccattaaggagagatttggcaggtttgaggatgttcttgaacctggatgccattgcctaccttggtttcttggaagtcaacttgctggccacctgtcgctaagattgcagcagttggatgttcgttgtgaaaccaagactaaggacaatgtatttgttaatgttgttgcatctattcaataccgggcactggcagacaaggcaagtgatgccttttacaagctgacaaacacaaggacacaaattcaagcctatgtgtttgatgttattagagcaagtgttccgaagctaaatctggatgatgtttttgaacaaaagactgaaattgctaaagctgttgaagaagaacttgagaaggctatgtctgcctatgggtatgagattgttcaaacacttattgtggacatagaacctgacgagcatgtgaagcgtgcgatgaatgaaattaatgccgctgcaaggctgagagtggcagctaatg

SEQ ID NO: 15997 - DNA, 889 bp, Gossypium hirsutum
  Clone ID: GOSHI-09MAY01-C286_54
cccacgcgtccgcggacgcgtgggtgctttttatttatttatttttatttttgcttctcccattttatgttttagttaattagcactcgaatgaaaccaaagccgaaaccgatgttgtgtatgatgatatttatggcttgaaattgctttaagtcctctgatttctgaagagaaaaagaaaaaaaagactgaatgtgatgtaatagggatttacgctgctgatgtgcattttctgatgttcttgtatcattttttccccttttttcttatttttaccttttagggttagttttagtttttaccactcttgttttttgttgaagagatatgtagaatattaaccatttgatttgagagatgccactgttaaagccctgagaattgtacaaaggcaataggactttgtatttatgtagggaaataccatttttatttaaagcatttttgccaatcttttgtacgtaattaaagagtgaggtgtttgaggtttatccccccccgtccggtcctcttggcattgtgtttggggtggaattgagcaaaggcttcagaactgtgatttcgagttgagttatgcattggctttctcaaacgttctcgccagcaaaaggaaatttacaggggaacagccggttcaagatctaaaggaagttctcttcctcggggaacttgaggaagtacttgaagcaacacagtctgtggagttccaacgatgtatggttccgcttttcagacagattgcacgttgcctcaatagcttacatttccagcgtataactattcctgaaattctacaagatgaatggttcaagggtacaagccaccaaaatttgagcaagatgaggatgtaaatcttgatgataatattttatattttacatggttatga

SEQ ID NO: 15998 - DNA, 705 bp, Gossypium hirsutum
  Clone ID: GOSHI-09MAY01-C286_52
cttaattattaatttactacgatgtcatatttaaggcctctcgagtattttgtattgactgggtttttgggttccgaccctgcggccccccccgcgtccgtagcgtgtgcttggaaacatcccaacaatgtttcagagtagtacaaccgctgagtcatgttttggtgctgcaatcaaggtaagtcattacaaggttataccttcataatctgtttgaggtgttgagtgtatgtaacttggttacttgaagaaaactgaggttaagatactgatacatctatccttatcttaaacaatttgtctgttgttttcatatgtagtttatttgagtgttggagtttttggactgctttctcaaaatttttattgactagaagttttctaggaaaatttgacatggtcctgaaattcaatttataatttgttgctaatattcttttatttttagctgaattaactgaccaaattcggtttgtgggttaaccattaaaaattcagtttggttaacagaagagattttaagaaactttgatatttgaatgttattttggctatttgttagggttagtcctgtttaagtttttattccttcattttatttgttttgaacttttagtatgtgttaattcaacatctgatggtgattaatatcttcattgtattatgcttttagattttgatttgttctgatattttggtcggata

SEQ ID NO: 15999 - DNA, 541 bp, Gossypium hirsutum
  Clone ID: GOSHI-09MAY01-C286_50
cccacgcgttcgcaaccatgggtgttgtgatggtcctaaaactggcagactcagggtattggataatgcaccaaagctctttgattatttggcagagggttagtgaagcacaggatatagccacaaaattaggtggacaagtcattggtcacacatggcttttagaatcaattgcagcatgactgagcaatgcttcctttacagatctgggaggcttctttcagctgtacatcatggttttcatctggtgctaggaatttgattaagcgtattcttgatccaagccctcttacgccgtataactattcctgaaattctacaagatgaatggttcaagaaagggttcaagccaccaaaatttgagcaagatgaggatgtaaatcttgatgataatatcttatattttacatggttatgatttaggtccttatttcgttgatatctttatatttaatctaatttttattatttattttcaaaaaaaaaagggatattacaaacttaaacaactaactggatttagaattaaatattaaataag

SEQ ID NO: 16000 - DNA, 747 bp, Gossypium hirsutum
  Clone ID: GOSHI-09MAY01-C286_49
cggcgcgtgggttaagaccgtgtttcatcaaccttcaaaccaaatcaaacacaagcaaaatcaacaaatttaagtaaaaacccaacatagaacatatattcgtaatatattatacgtcatatatacattttcctgggatttgggtttggaaaaatggagcgttatgagatactgaaagatattgggtctgggaactttggtgttgctaagctggttagggaaaaatggactggtgacctttatgctgtcaagtatattgaaagaggccccaagattgatgagcatgtgcagagggagattatgaaccataggtctttgaagcatccaaatataattaaattcaaagaggtgctgttaacaccaactcatcttgccatagtcatggaatatgcagctggtggagaactttttgaaagaatatgcaacgctggtagatttggtgaagatgaggcaagggtttttctttcaacaactgatatcaggagtgagttattgccatgcaatgaaaatttgtcatagagatcttaagctggaaaacactctattagatggaagcagtacacccagactaaaaatatgtgacttcggctactctaagtcgagtgtgttacattcccagcccaaatcaactgtaggaaccccagcctatattgcaccagaggtcttgtccaaaaaagaatatgatgggaagattgcagatgtttggtcatgtggggttactttgtatgtcatgctggttggcgctta

SEQ ID NO: 16001 - DNA, 687 bp, Gossypium hirsutum
  Clone ID: GOSHI-09MAY01-C286_47
ctcagcttgcgtctaagtgattcttcgccgatccttctcattttcctgttgatcagatctctcgccacaaatctcttggagattttttagcatgctgttcgattgaaagagtctctatttatgattctaagaatcattagaagcaccaaatggtcaagactgctacctggttatataggtttactattggtgaggttcttgcggtaaaggttacagatcagaaccttgatgtttgggcaaactcgctagcatctgtgcctgatgccttgtgccattactattatcagtacctgtcttcaagttcggaagctgctgagggaatcttatgcattggctttctcaaacgttctcgccagcaaaaggaaattacaagggaacaagcagttcaagatctagagataataagagaagaacttgaacaattgctgttggcagaaagggtatgagagaatgtgggtgattaagtcaaatggagaaaggtacatcatgtctttgttgtgtgcaagtgttttctccctgagacaggcaaggaacctgacatcaagaatggttcaacttaaagatgcttcccttgtactcattctcatcctctgtatttttccgatctttctcccaagtaggatattaagaatttcctgtactatcttttctgattgcttataaaatagtttgctcattagaaccttc

SEQ ID NO: 16002 - DNA, 621 bp, Gossypium hirsutum
  Clone ID: GOSHI-09MAY01-C286_46
cgcgtgcgcccacgcgtccgcccacgcgtccgcccacgcgtccgcccacgcgtccgcccacgcgtccggatatatccgcctctctcatcttcgtagcgtggtttatacgtttggttgttgttgaagaagtgctactaccatggctacaaagaagagcgttggggacttgaaggaagctgatttgaagggaaagaaagtgtttgttagagtcgatctgaacgttccattggatgataacttcaacataactgatgacacaaggatccgtgccgctgttcccaccatcaagtatttgatgggtcatggctctaaagtcatcctctctagtcatttgggacgcccaaagggtgtcactcccaagtacagtttgaagcctcttgtgccaaggttatctgaactccttggagtcgaggttaaaatggcaaatgactgtattggtgaagaagttgagaaaatggtggctgcattaccggatggaggtgtattgctgcttgagaatgtgaggttctacaaggaggaagagaagaatgatcctgaattcgcaaagaagctagcttctcttgctgatctatatgttaatgatgcatttggcactgcgcacagagcccatgcttccacaga

SEQ ID NO: 16003 - DNA, 672 bp, Gossypium hirsutum
  Clone ID: GOSHI-09MAY01-C286_43
cggacgcgtgggtcatgatgttaccttgtttatgtcgtttaaacagcctgggggtatgttggaaatcgcagttcgggattcagagactttctgctgaaaccggagctgcttcgatctattgtggattctggttttgaacatccttctgaagacaattgagattcttttcagcaaaaggatattcttagatatggaggtgcataatttggctttctgttctggtgttttggattctctggtggttgaattgaaagcatcaaaggacttctctaagttatatgcaggctttgcaatactttggcttcatctaagcttgaaccagccctctgatgtatatagatttttcttcttttctgatcttttttctttgattcccgcgcggccgtgcataatttggctttctatctcttactaggttgagaattcgctggcggttgaattgaaagcatcaaaggacttctctaagttatatgcaggcattgcaatactttggcttcatcaatgaatattgttttagaaatagtaatactttgtgagtgtgtctgtgtgttttttttatgtattaaattacatattgaatcaatgtttatgtattaaatttaaattcattaaaaaaaaaattaaaaaaaaaaaaaaataaaaataaaaatattaataaattattattatttt

SEQ ID NO: 16004 - DNA, 382 bp, Gossypium hirsutum
  Clone ID: GOSHI-09MAY01-C286_40
atgggatagctaatttccttgttttgctcaatcaggggaacgagattcctaacaattttctttattgctggaacaagtcttaaccaacatcaagatcaaagtactgcactaagttatatatgcaatcattgcaatactttggcttcatctaaagcctgaaccagccctctgttgtacattgtttcttcttcttttctaatctttttcctttgattaatgagacgtgatgatgattcggcattattttctcaccaggatgaattatgtttcagaaattctaatactttgtgtgtctgtgcgtgtgcttttatgtattaagttacatattgaatcaatgtctacgtattaaatttaaattcattaatgtttatatataagacat

SEQ ID NO: 16005 - DNA, 677 bp, Gossypium hirsutum
  Clone ID: GOSHI-09MAY01-C286_37
cccacgcgtccgcggacgcgtgggggagataaaaaaagaaagttaaaacaaaaagaaaaaagaaaattctcaatccaaaatagggttagggttatccctgatccggataacgatttccacgctcgagtcttccaactgaaaaattaaacatgggcgccaattcgtcaccaacagacttgaccaccgatctcgatgagcagatctcgcagctcatgcagtgtaagccactttcggagcagcaggtcagagcattatgtgataaggcaaaggaaatactgatgaaagaaagcaatgtccagcctgtgagaagcccggtgacaatttgtggtgacatccatgggcagtttcatgatcttgcagaactttttcgaattggagggaagtgccctgatacaaactatttgtttatgggagattatgtggatcgtggatactattctgttgaaaccgttacgctgttggtggctttaaaagttcgttatccacagcggattaccattctcagaggaaatcatgaaagccgccaggtctctcatgttccgggtcttcggggccttcattccttgttcaaacaagtgcacatgtgcaaaagtttggctttatatggtgttatatttttgcaatttgcacatctggatcttagcaaagagtttgatttgaactcgactatcatagga

SEQ ID NO: 16006 - DNA, 722 bp, Gossypium hirsutum
  Clone ID: GOSHI-09MAY01-C286_36
agcttttattcttctatggggtggctggaccacaacacaactgaattctcggtctgatcatgtactttaaacatctatgacaggttggataatggcaattgtgatggccctttagagtggatttgctggagtcgacaccgaggctataattaagaagcgcccatcaaggaatataaatgtgcagaatttttggttggatattttcggaatgaccttcaatgctatagcaatactgatacaagattttggtgctgtcatgaacaagggcttcttccatggatactcgataattaccactctcatgatccttaatcatgcactaagtggaattgctgtatcaatggtaatgaaatatgcagacaatattgtgaaggtctattctacttcagtggcactgcttctcactgccgttgtttcagtgcttctgttcggcttcaatcttacccttgctttcttcctcggtgctactgttgtatcggtatcagtatacttgcactccgccgggaagctgcaaagatagtgacttcctgcgctatgttgggctgacattgtaaagtcttgtgcactgagggtatgtcattgcatttcatttcatatttggtcccacttcttctatcactatgctacttggactcaagtgtgaatgctggatatagatatgtgcttaacatgggtcggctgcagttacttcaagcacgaatccgagcaacatagttatatta

SEQ ID NO: 16007 - DNA, 1136 bp, Gossypium hirsutum
  Clone ID: GOSHI-09MAY01-C286_35
ggggcacgggatgagtaggtgtatgtttttgttttgttttgttaggatgagcaaccagaagtacaaggaccagcagttttggtctcaactgaaagaggatcaactattagtccaattggtatttctctgtgtgtgtgtgtgtgtgtgttttcttatgatttaagggttttttattcattggatttagttgaaaaatgacatatatgttcattgcagtacttggacttgaggttttagaactttaatttgcatgaaacttttacttgtaggtctctttttgtctgtctcttactttggaaattgctccaaaattttacatattaactcctcaactcctcaatgaattaacgattttttattcttgtttgcctttctttttaatcttcgctttgacatgatgtttgatagcctagttcattattcttcttattgatctctagatttcgcccaacattgaagaattagtcaagaagctgaaggtaaggaatactgatgtatatctaattctcggggctttccccaaatgataatgtttgcactatgcttctaatgcttgaagacctctctattaacttgtctgtaagcattatgggttcattgccttctatatgcattttaatgagcctcacattcgtggagtggaggaatagctactgctgtgcaactggtacccatggtgaacggctacaaggcattagtcatgattggtgatggtgctactgatcttgaggcccgtaaaccaggaggtgccaatttgtttatttgttatgctggtgttcaacatcgggagtccgttgcagcaaaagctaattggctggtgtttagcttcacggatcttataactgccttggagtaacttgctttcattctgatttttatgccattttttggggttttctatgttctgttataagtttcctgcaaatactaattaggcattcattcttgttgttcttataacatctatggctggtatatggatttgatgagatatttaggctcaaaagaagccaacagctatgtcagagactcgggtatgagcgttgaatatgagtgtgttcgacgttgatatgtttaattgtttgtaagtttttctatgtatttagaaggtgtttagaggatcatattttcatact

SEQ ID NO: 16008 - DNA, 963 bp, Gossypium hirsutum
  Clone ID: GOSHI-09MAY01-C286_32
ccttttcgtccgattaaattgaagatggatgatactgctgaattgtatggatttgatgatgacaaggacgagaacaagtttgacatcaagaaaattgcaagtgaaaactggattgagcccccaaaaagagagcagaagcgaaaggaagagtctgcctggcatttgctaatgaggtactgtgctggctttacggaacagtcaaagagaatgaggactacatactacaattcgcaccaccattcaaccgattggagcttctacaagcacaatcttgccctgatgcgattactaatcacgttgaacaatcgtcagttctcattaggaaaattcctagagatttgacagaggcatcgatatcgggtgcatggttgtccattgcaaccccagcggccgcgttctctctgcttggtcggggggatgggttgcttcacactgcttgcggcactccaaattatgttgctcctgaggtgctcaaggataagggttatgatggcacaatcatctgatatttggtcttgcggagttattctctttgtacttatggctggttatttgccttttgatgagccaaaccttataaccttgtataacaaaattgggaaggccgttttcacttgtccgtcatggctttcgcctggtgcaaagaaattcataaagcgtattcttgatccaaaccctcttacacgtataactatccatgatatcttaaacgatgaatggttcaagaaagggtacaaaccacccaaatttgaggaggaagaggatgtaaatcttgatgatgtagatgcagcttttaatgactcaacggaacactttgtaacagaaaggaaagagaagcccgagtccttgaatgcttttgagtttatctctaggtctcaaagctttagccttgacaagttgtttgagaagcctacgggtcatgtgaagcgagaaacccgttttgcttcccattgtcctcctaat

SEQ ID NO: 16009 - DNA, 899 bp, Gossypium hirsutum
  Clone ID: GOSHI-09MAY01-C286_30
cggccgcgtcgaccatcgattctctgccgatacttgctggatcaatatcaactcatcagaaagagaaaaagaatagatttttttcaatcaataaagaagaagacttcctttttgtattgttgacatagcggttctctgtttactttggagtgagaatggcaaagaatgtgggagttctagctatggaaatctacttccctcctacctgtgttcaacaggaagcattggagactcgtgatggtgcaagcaaaggaaaatacaccattggacttggacaagattgcatggccttttgtaccgaggtcgaagatgttatctcaatgagtttgactgctgttacttcactccttgaaaagtatacgattgaccctaagcaaattggccgtcttcgaagttggcagcgagactgtgatagacaagagcaagtccattaagactttcctaatgcaaatctttgagaaatgtggtaacactgacattgaaggggtcgactcaacgaatgcttgttatggagggactgcagctctgttcaactgtgtcaattgggtggaaagtagttcatgggatggacgatatggtcattcttgtttgtactgacagcgcggtctatgctgaaggacctgcccggccaactggacgagcagctgcaattgctatgctaatagggcctgatgctcctattgcatttgaaagcaaatttagggggagtcacatgtcccatgcctacgacttttacaagcccaaccttgctagggaattccgggttgtagagggaaaactcttcacacgcgcttcaggggctttagacacgggtataaaccttgtgtcaatgctcgagacctggagagcggcattttccttttcgaggctgctacttggatttaattttcttttatagc

SEQ ID NO: 16010 - DNA, 843 bp, Gossypium hirsutum
  Clone ID: GOSHI-09MAY01-C286_29
taaaatgctagtgtgaggatctcggtactttgaacagatcttttggtgagcttttcgtggtctttgtcacataaaatgctcaaacctcggtggtttaatcttgctgtttcgggttggaagaactgtatgaaagaaatcagttaaattgctgctgttaatgaggtccggaagtgagtaaattgatgtttgaaatatctttgtatggtggattgaatgctgctgtatattgttgctcattaccgaattaatgctgaaactaagctaattaaatggtggataatttgctgtcgattatgatggaaatgcctattaaatgtttaaaattcctcttatttaattgatggttgctgctgtttaaatgctgtaaattgaagtgtttagatgctgtaaattgaagtgtttaaatgttgtaaactgaagtatttaaatgctgtaaattgaagtgtttaaatgttctttgtgtagcattttaagaacttcaaagctcacagatgatttgttatactctatatgagttcattgattctatgtttttgcaattttaggtatgatcatgggtgcagcagcttcaactgacaagtacttgtgcaggtctggagcaggtcaatcaagaagctctgctggaattaaactgacaagtaattgtagtatgcttgtagttgaagtttcttatagtgaacatcatgttgtttattcggcagaagtttcaaagattttactttttagaagaaagtgtattgtagtcattagattgggttttcaaagattgattatgttaacattttgatcaaatgaaaagttctcttattaatgtttttgaactcaaaaccccatttaattaat

SEQ ID NO: 16011 - DNA, 1102 bp, Gossypium hirsutum
  Clone ID: GOSHI-09MAY01-C286_27
agctatagcatatgcagccatgtttgtctttcatcagcttgcaagggaaggtaaaggataatgtatttgtcaatgttgttgcatctattcaataccgggcactggcagataaggcaagtgatgccttctacaaactcaccgacacaaggaagcagattcaatcctatgtttttgatgttattagggcaagcgttccaaagctaaatctagatgatgtttttgaacaaaaaactgaaattgctaaagctgttgaagaagaacttgagaaggctatgtctgcgtatgggtatgaaattgctcaaacacttattgtggacatagaacctgatgtgcatgtgaagcgcgcaatgaatgaaatcaatgctgccgcaaggatgagggtggcagctaacgagaaggcagaggcagagaaaattcagcaaatcaaacgagctgaaggtgaggccgaatctaagtacttgtcagggctgggtattgctcgccagcgacaagctattgttgatgggttacgctgcaggactgttgctactgttgattctcttgttaattcgttacctgtggtctactgcaaaggatgtcatgagtacatggtcctggtcactcctcgtttttcttccctatttcatctgggttatacttggttgtaactctgttttcgtgttatcttgtttaggccagagcattatgcgacaaggcataaaatatgcatctcaaagactagatacatttgcatgtgttaggtatagaaaaaggtgtttccattttggtgttaagattttatgcagtgtagttgcttactgccttacactatgttgtccttttaggcaaaatggttgaacacgcaattgaccaaattatggccttttgttgcagaggtgcatactttggctttctgttccggtgttttggattctctggcggttgaatcgaaagcatcaaaggacttctcttaagttatatgcaggcattgcaatactttggcttcacataagcttgaaccagccctccgttggatattggttcttcttttttttttttttatctttaccctttgattaatgagaaggggggatgaattggcattctttttttactaggatga

SEQ ID NO: 16012 - DNA, 1345 bp, Gossypium hirsutum
  Clone ID: GOSHI-09MAY01-C286_26
cggacgcgtgggcgctcactcccaaattccctcttcttctcatctatgtcactcaccctaaaggccgcaaataaaatttagctgctctttttctctcgatcattcgtttcttttcactgtctagatatatctgcctctctcatcttcaagtgctactaccatggctacaaagaagagcgttggggacttgaaggaaaatgatttgaagggaaagaaagtgtttgttagagtcgatctgaacgttccattggatgataacttcaacataactgatgacacaaggatccgtgttgctgttcccaccatcaagtaattgatcggtcatggctctaaagtcatcctctctagtcatttggatgagcaaccaaaagtacaaggaccagcagttttggtctcaactgaaagaggatcaactatcagtccaattggattttgcccggcattgaagaattagtcaagaagctgaaggcaaggaatactgatgtatatctaattttcgggggcttccgccaaatgatcaatcctgttgcatcaatccttggaatttcgcaagaaaaccatttttccaatcagctgctctttggaaagttctggccggcgtccgccctgcgatccgaatgagcccacttcgaggagtggaggaaaagctactgctgttcagcaaataagaaaggttaagggatacaaggcattagtcatggttggtgatggtgctactgatcttgagctgaagatggttcttcatcagtagctgtggatttgcagcaacttaattggcgtagtgtgatttgccaagcaaaatctggaatggtgaaaacagctgtttttgttctatcaactcttcagcaaattaaacctgttgctgggcaagctgctgcacttgttctatgtcacactagagaattagcgtaccagagtttccgagtagtacaactgctgagtcatgttttggtgctgcaatcaaggtacatattatgcacagccttttcaatgacttctgcattaacagactggagtagtgtacaaaaatcctttaggcattttcagactattcaaatctataatcatgttttccctctgctgtttcgtagattcgttggcatcttgtcttaatgagagtgtagtttatgaagtttaaactgtgcattgtcctccaaggtattagaattcctagttcaaaacttagcaatttgtcttttataaaagacctttgcattttcagcgttgtttaggttcgcaaacaagatgctgtatttggacttgtattttatttatatttatatttaatctaatttttattattaaaaaaaaaaaataaaaaatcattaaaaaaatattaaaaata

SEQ ID NO: 16013 - DNA, 930 bp, Gossypium hirsutum
  Clone ID: GOSHI-09MAY01-C286_24
cccacgcgtccggcgcaattttacaagcagtttacatgcattacggtaatgatgatgatgatggtaaaatgtttattaaaaatgatttgctgacatttgtgtacttggatcagttcttgttggaaaaccaattacctttttcgtgttcttgaattgcttacaagccagagagaaaatggcgaaaaattcatgaatgtaatccaaaggttcatcgacgatactgttatcaacccaggcgaggatagggtaattgactcttcaaagagggaaaatttgaacttgccagggcaaaatatgaaaatgtgtctaatgtgatgctggatatgtttacttcaagaaaaataaagaggaatcttacgcattggctttctcaaacgttctcgccagcaaaaggaaattacaagggttcttgcggtccttgctcgggagctagcagttcaagatctggaggtaagaatcggagagatgaagagaagaacttgtacacttgctgttggcagaaagggtatgagagaatgtggctgattaagtcaaatggagaaagggacatcatgtccttgttgtgtgcaagtgttttctccctgagacaggcaaggaacctgacatcaagaatggttcaacttaaagatgcttccttgtactcattctcatcctctttatatttttcgatgctttcttcaagtaggatactaagaatttcctgtactattctttctgattgcttataaaatagtttgctcattagaaccttcttttctcgcttgtcttttatttgtgtaaatcatttttctttgtttagtgacaacgaatctctgcacataaaaaaaaaaaccaaaagcataagatggaaacacacgagtaatacactgaagtccctggagttgtagtaaagatctaaatttggtgacagttccaacatatgatataaac

SEQ ID NO: 16014 - DNA, 568 bp, Gossypium hirsutum
  Clone ID: GOSHI-09MAY01-C286_23
gggtggagagaaaaggtcgccaaatctaatgcgcagacataaggaggatgggttgcttcacactgcttgcggaactccaaattatgttgctccggaggtgctcaaagataaaggttatgatggtacatcatctgatatttggtcttgcggagttattctctttgttctcatggctggttatttgccttttgactgagccaatgccttctaggcttgtacaagaaaatctgggaggcttctttcagctgtccatcatgggttgcatctggtgctaggaatttgattaaccgtattcttgatccaagccctcttacccgtataactattcctgaaattctacaagatgaatggttcaagaaagggtacaagccaccaaaatttgagcaagatgaggatgtaaatcttgatgataatatcttatattttacatggttatgatttaggtccttatttcgttgatatctttatatttaatctaatttttattatttattttagttttgattctaaatttttatttttattttaatatttttagttaaaattttaatagaaaatttaatttgat

SEQ ID NO: 16015 - DNA, 1025 bp, Gossypium hirsutum
  Clone ID: GOSHI-09MAY01-C286_21
ctttcatagtcatactctcttttgtcccgtcttttcagtctctgccttttcatttcctttctctcaatcttacctccgttgattgctttttgccaatcggcgtgagatcttgctgatctgtcgccggaactttcatttagattccggcgatcgcatcgatcttttttttttcgtgggggtgcgttatgctacaatgaatcccgaatatgactacctgttcaagcttctgcttattggagattctggtgttggaaaatcttgtcttcttttgagatttgctgatgattcatatgtagaaagctacataagcaccattggggttgattttaaaatacgtactgtggagcaggatgggaagaccattaaacttcaaatttgggacactgctggacaagaacggtttaggacaatcactagcagctactaccgtggggcccatggcataataatcgtttatgatgtgacagaccaagaaagcttcaacaacgtcaagcagtggctgagtgaaattgatcgctatgctagtgataacgttaacaaactactggttggaaacaagtgtgaccttacagctaataaagttgtgtcatacgaaacagccaaggcatttgcagatgaaattggcataccttttttggaaaccagtgcaaaagatgccacaaatgttgaacaagctttcatggccatggctgcctctgtcaaagatagaatggcaagccaaccaacggcaaacaatgcaaagcctccaacagtacagatcccgaggtcagcctgttgcacagcagagtggctgctgctcttcctaatgtaaaggttaatgatgtattaggaagctatctttcttatgcagtatgctgcctttcgtggcatgtaagattacttgtttcttaactccataggtttaatgaacttattatttcttcggaccgacctcattagaggatctaattcatttctgcatacttgttaatgtgaagggcttgtgcactgtatgattgttggttaaataataggtgttctttctc

SEQ ID NO: 16016 - DNA, 1061 bp, Gossypium hirsutum
  Clone ID: GOSHI-09MAY01-C286_20
cccacgcgtccgccctccccccgcggccgccctcctcatctctgcttttgcccccttttatctttcttcttctttttctccttacttcagccgaatttttccggcaaaacggtgtcagatctttgtgatctatagccggaagtttcatttcgagttcgacgatctcatccttcgatctttccactttcttcagcctaccatgaatcccgaatatgactatcttttcaagctacttcttattggagattccggtgttggaaaatcttgccttcttttgagatttgctgatgattcatatgtagaaagttacataagcaccattggggttgattttaaaatacgcactgtggagcaggatgggaagaccattaaacttcaaatttgggacactgctggtcaagaaagatttaggacaattactagcagctactaccgtggggctcatggcataataattgtttatgatgtgacagaccaagaaagcttcaataacgttaggcaatggctgagtgaaattgatcgctatgctagtgataatgttaacaaaatactggttggaaacaagtgtgatcttacagcgaataaagttgtgtcatacgaaacaggcaaggcacttgcagatgaagttggcataccttttatggaaactagtgcaaaagattcaactaatgtggaacaggcttcatggccatggctgcttccatcaaggacagaaatggcaagccaaccagccatgaacaatgcaaagcctccaacggtacaaatccgaggacagcctgttgcccaaaagggtggctgctgctcttcctaaaaaatggaatgatgagttagcaggaagctctctctatttcttctgcagtgcgctgctgccagttgcagcacggtgtgtaagattaagtgttttcttaacctcatcagtgttccaaacttatttcatatgaacaaaacctcagaagtagaggatataattcatttctacacacttggttaacgtgaaggcttgtacaatgtattattggttgtttgttgattaaataatactagtgttctttctcaaaaaa

SEQ ID NO: 16017 - DNA, 577 bp, Gossypium hirsutum
  Clone ID: GOSHI-09MAY01-C286_19
taaggctttccaaaactggtgagagaggggtatgttggaattcacagttcgggattcagagactttctgctgaaaccggagctgcttcgatctattgtggattctggttttgaacatccttccgaagtgcaacacgagtgcatccctcaagctattctgggaatggatgtgatttgccaagcaaaatctggaatggggaaaacagctgtttttgttctatcaactcttcagcaaattgagcctgttgctgggcaagttgctgcacttgttctatgtcacactagagaattagcgtaccagatttgccatgaagttgagaggctcagtcctgttctgccgctgcaatcaaggttcatcggcatcttgtcctgatgagagtgtagtttatgaagctttaaactttgcattgtcgtctgaggtattagaattcctagttcaaaacttagcgatttgtcttttataaaatacctttgcattttcagtgttgtttaggttcgcaaacaaatgttgtatttggactttgtgttagtaaaagacttgctatatttatttatatttatatttaatctaattttta

SEQ ID NO: 16018 - DNA, 1483 bp, Gossypium hirsutum
  Clone ID: GOSHI-09MAY01-C286_18
cccacgcgtccgctctttcatttcgtcttcgtcacagaagcaatgagacataaagagtgtagaggcaagaaaaagtaacatttcccaaaccaaactagggttagggttatccctaatccgcataaagttttttttacacgctctattcttgctacttaattatcaaatatgggcgcaccaacagactcagccctcgatctcgatgaacagatctcgcagctcatgcaatgtaagccactttcggagcagcaggtcagagcattatgcgacaaggcaaaggaaatattaatggaagaaagcaatgtccagcctgtaaaagcccctgttacaatttgtggtgatattcatgggcagtttcatgatcttcaagaactttttcgaattggggggaagtgtccggatacaaactacttgtttatgggagattatgtggaccgtgggtactattctgttgaaactgttacgctgttggtggctttaaaagtccgttacccccagcggattaccattctcaggggaaatcatgaaagtcgccagatcactcaagtttacgggttttacgacgaatgtctgagaaagtatggtagtgctaatgtttggaagatctttacagacctttttgactattttccattaactgctttggtggagtcagaaatattttgtctgcatggtgggttgtccccgtcaattgaaaccttggataatgtaagaaactttgatcgtgttcaagaggttcctcatgaagggcccatgtgtgatttattgtggtctgatccagatgatcgatgcggttggggtatctcgccacgtggcgctggatatacttttggtcaggatatatctgaacagttcaaccatacaaacagcttaaagttgattgctagagctcatcaactggttatggatggatttaactgggcgcatgaacaaaaggtagttactatatttagcgccccaaattattgttatcgctgtgggaacatggcatcaatcttggaagttgatgattgcaagaatcagtcattcatccagtttgagccagctccaaggagaggagaacctgatgttacccgtagaacgcctgattacttcctctgaagctgctacattccataactgattcaagatactccgcttttcggcctctcctctccccctttacattgtcaggtagttgccgatcctttacagaaatcttttgcatctactgttcttttggtgatttggggggggggtaccaaaagcatacatgggaatgggttgggttatgaacttatgatctataatcctatcatcgagttgatcaatttatcttacacttggatattctgttgaagagattgtcatagctggtgaaactctgacactatcagaatgtaaatttttgtgtttgtttttgattatctgttctctttttcttttggctttaaccctctttttggagctctggggctctgtaatcaagatgcataagttcaat

SEQ ID NO: 16019 - DNA, 718 bp, Gossypium hirsutum
  Clone ID: GOSHI-09MAY01-C286_17
aaaggacaacagaggccgctgaaacagctgggctggagctgcataagaggcgggatatatatgctttggagtcatgtgagaagctgcccattgtgatattgagagctgagcttgaccatttggcttccctagcagttttaaaacagttaaatgacatcttaagtgcaaggtgcatatttggctttctattctagtgttttggattctctggcggttgaattgaaagcatcaaaggactactctaagttatatgcaggcattgcaattccctatagcggtattttaattacatgggattgaatcaatgtttgtgtatgctgaaaggtagtattcataggcattttgtgataataagatatatcattatcatttaaatcttggaggaagtgtttctaccagaaggctgactaggctaccttcaattcctaagaatgatgcaaagttcagggggtatgttggaattcacagttcgggattcagaaactttctgctaaaactggagctgctttgatctattgtggattctggttttgaacatccttccgaaggcaaagttttaaactcatgtctaatgttaacattcgtgaattccatgaattaagtcattttgtttttcttgcttttagtgacttataatggtgggcagtataataagtttggcgctttattattttgatttctatattatttttaatctaatttttattatttattttat

SEQ ID NO: 16020 - DNA, 601 bp, Gossypium hirsutum
  Clone ID: GOSHI-09MAY01-C286_16
aacagactcggctctcagtgctcgatgaacagatctcactagctattgcattgttagcctctttcgaagtctgcaggtcagagcattatgcgacaaggcaaaggaaatattaatggaagaaagcaatgttcaggactggactggtttgaactttcaagaagtaatggatgaagcagaaaaaattcgagtaacggtatgtggcatattttatgttgcattcttcctaaatgagccattgtctggtcgtacactttacagccccatctccatgagtatgcttacaggtgcatactttggctttctattccagtattttggattctctggcggttgaattgaaagcatcgaaggacttctctaagttatatgcaagcattgcaatactctggcttcatcataagcttgaaccagccctctgttgtatattgtttcttcttctcttttttgttttatctttttcctttgattaatgagaggtgatgatgatttggcattcttttctcacgaggatgaatttgggttttagaaattgtaatactttgtctgtttgtgtgtgttattttttatgtattaaattacatattgaatcaatctttttgta

SEQ ID NO: 16021 - DNA, 848 bp, Gossypium hirsutum
  Clone ID: GOSHI-09MAY01-C286_14
cccgggtcgtcttagcgtccgcccattttccggccagcgtcagggatcccagggtggttggatgggcttggatattggacctgactccatcaaaacctttagtgagtctttggacactacccagaccattatctggaatggaccaatgggtgtgtttgagtttgagaagtttgctgccggcactgaggcggttgccaagaagcttgcggaactcagtgggaagggagtgacaacaattatcggaggaggtgactctgttgcagctgtggaaaaagctgggcttgctgacaagatgagccacatctctactggtggtggtgccagcttggagcttcttgagggcaaacaacttccaggggtccttgctcttaacgacgcttaaacttttaattttgcacctctttgctttttttgaacattgttcactgctgtaatggtggctagtatttttatccaagagtgaattttagtagagctgaggttgtagaggctgatagggtggacttgttataaataaattggtttctcctcatcatccatcagagatgcatttggattggatgtcttttttgttatcctgattgttaatgataaaattgcagtagtgcttgttctattgatcttaaattacccactcctgtgaagaaacatgatgaaacattcacttttgccgctaatcgtgcccaaaccgaacagcctgattctgattcggactttgacccattatattttcctcaagttcctaatgtgtcattgaagccaagcactaatgctgcgtcagctccggtaactaacccactgtcatcagctgctccagaacctgaaattgatcattcatctagacattt

SEQ ID NO: 16022 - DNA, 1377 bp, Gossypium hirsutum
  Clone ID: GOSHI-09MAY01-C286_13
gttctcgataaagggatgtatttttatactccattgtagaaaatgcttgattgtggttataaagctcagtatatgagtgggcggagggagaaatttgtcaggttggatgacttggactctagatgtatcatcatcctctgatacaggattgaaaaaatgtgggtttaacattgatggattaggtcgctctggccatgcaaacaatacaacatcaagatctttcaagagagggatcagaaagggatctgaaggacttaagtcaattggtcgctcccttggatttggggtttcacgagttgtatttccagaggatcttaaagtttcagagaagaagatttctgatcctcaggataaattcctcttgctatgcaataaattatttttcatatcttgtattctggcagtatcagtggaccctctatttttttatcttccagttattaacgatttgcaaaagtgtctaactattgatagaaaattagcagtcagtgcaacgactctgcggaccattatagatgctttctttcttatacgcttggccctccagtttcgtacagcttacggggctgccatcatctcgggtctttggacgaggtgaacttgtgatagatcctgcacaaatagccaagcggtacttgcagcgatatttcatcattgattttcttgcggtggctccattaccacagattgttgtttggcgatttcttcaaagttccaatggttcagatgtactagcaacaaaacaggccttgttttttgttgtcttgcttcagtacatccctaggtttcttagagttctacccttgacatcagaaatgaaaagaacagcaggtgtctttgctgaaactgcatgggctggagctgcatattatttgctattatatatgctttgcagtcatatagtaggggcattctggtacttggtagctgtagagcgaaatgatacatgctggcagaatgcatgcaaggatattggtagtgactgcaataaagatttcttgtattgtgggaatcagcaaatgaaaggttacaacatatggaagggcatgcgagattctgttcttaatgaaaagtgcccagctgatgaaaatgatgataatcctccatttgattttggaatcttcacccaggctttatcatctggcattgtttcatcaacgaaattcttttccaaatacttttactgtttgtggtggggtctacagaatttgaggtgtgtaaacatattcctcctaactgctgatcaagagatacaaaataataaaaagaaaatagcagtggattctgttatgtgatattttggaggatatgcttgtttatactacaacaaataattgcattcgtatgaaacatcaataattagaaggtggctaagtt

SEQ ID NO: 16023 - DNA, 1057 bp, Gossypium hirsutum
  Clone ID: GOSHI-09MAY01-C286_12
cgacttggttttctcttctttcttacattctatataaaaggaaagacttttcattgcttctcaccacaaaaatcctttctatttctttaaatcgatccgtaaaagaataaaaaagcttaaattctgtgaaaaatggtggaacctaagagcaagattgaatcaataagggaatgggtcgttgatcacaagcttagaactgttgggtgtctgtggctgagcggtattgcgggttctattgcctacaattggtctcaacctggtatgaaaaccagcgttaaaattattcacgctaggttgcatgcgcaagcccttacgttggcagcattagccggtgctgcagctgtggaatactatgatcataggaacagagccaaagctgatccatatgcaaagttccttccggccgatggatactcgcacaaggattagaagactttggataggcgtttaaagtctgtaaacatactcggtttaataaagtttttttttaattttttcttttggttgtgtatagaggcatcacgtttgccccttcacatcacttcttttcaactgttccccctctaatatacctgtggtatccagtggagttccttgcatacagagaatttacagagcagcattgcatgtctcttaattgcactgttaatatgcagctgcaaattgaagtgttaaagtgctgtaaattggagtgtttaagtactgcaaattgaagtgtttagttgctggaaattgagatgttaattgaggtgtataaatgttgttaattgaaatgttaatatgtgtgtgtgtgtgtgtgtgtgtcccttctgttaaattcttcgttatgtatttaataaagtcaattttgtgtctggctacaggcattagtgataataagatatatcattatcacttaaatcttggaggaagtgtttctaccaaaaggctgactaggctaccttcaattcctaagaatgatgcaaagttcagctatacgccataaacatttctctgatcttaagttatacaaaacattatgaccttatttatttgtttatttataaaaaaaactaat

SEQ ID NO: 16024 - DNA, 910 bp, Gossypium hirsutum
  Clone ID: GOSHI-09MAY01-C286_11
aggaacgacccacgcgtacgcaaaaatggtggcacctaagagcaagatcgtttcaatatgggaatgggtcgtcgatcacaggcttagaactgttgggtgtctgtggctgaccggcattgcgggttctattgcctacaattggtctcaacctgctatgaaaaccagcgttaaaattattcacgctaggttgcatgcgcaagcccttacgttggcagcattagccggtgctgcagctgtggaatactatgatcataggaacagagccaaagctgatccatatgcaaacgtccttcccgccgatggatactcgcacaaggattacaagactttggataggcgtttaaagtctgtacacagatacctcgagctctgccacaactgaaaagtgtgtgtaagctgaagcacagattgggattgatgttcatagcgcactaaactcagctctcacaggctaaccgttgtttgtcattatgttcattggagttgagaaggaaagaggatgcaatagcacgaggtgaccgagatttcgtttaacaattttttttattgctggaacaagtcttaaccaagatcaagatcaaagtacttcactaagttatatatgcaggcattgcaatactttggcttcatctaagcttgaaccagccctctgttgtatattgtttcttcttcttttctgatctttttcctttgattaatgagaggtgatgatgatttggcattattttctcattaggatgaattttgttttagaaattgtaatactttgtgtgtctctgtgtgtgtttttttatgtattaaattacatattgaatcaatgtttatgtattaaatttaaattcattaatttttttatgttagtgttatgatcaggttaatttttttatggaaatttgttattttaataaaa

SEQ ID NO: 16025 - DNA, 1787 bp, Gossypium hirsutum
  Clone ID: GOSHI-09MAY01-C286_9
ttttcgcgtccggttctctgtgcgaatttcggggatcaaatactctttcacaaaaaggagagaatataagtaattaattaacacaactttttttcgttgttgttgaaaaagctcatcttttttttgatagttagagtgagcaatggctaagaatgtgggaattcttgctatggaaatctacttccctcctacctgtgttcaacaggaagcattggaggctcatgatggtgctagtaaggggaaatacaccattggacttggacaagattgcatggccttttgtacagaagtggaagatgttatctctatgagtttaacagctgttacttcactccttgcaaaatataagattgaccccaaacaaatcggccgtcttgaagttggtagtgagactgtgatcgacaagagcaagtccattaagaccttcttgatgcaaatctttgagaaatctggaaacactgacatcgaaggggttgactcaactaatgcatgctatggagggactgcagctttatttaactgtgtcaattgggttgaaagtagttcatgggatggacgatatggtcttgttgtctgtactgacagtgcggtctatgctgaaggacctgcccggcctactggaggagcagctgcaattgctatgctaatagggcctgatgctcctattgcttttgaaagcaaatttacggggagtcatatgtcccatgcctacgacttttacaagcccaaccttgctagtgaatatccggttgttgatgggaaactttctcaaacgtgctatctcatggctctcgatacttgctacaaatatttctgtcacaagtacgagaaactagagggcaaacaattttctctttctgatgctgacgtacttcgtattccattctccatataacaagcttgtgcagaaaagctttgtctcgtttgttgttcaatgacttcttgaggaatgccagttctgtcgatgaaattaccaaggaaaaactggctccattttcaactttgaccggtgacgaaagctaccaaagccgggatcttgagaaggcatcccaacaagcttcaaagtccctttacgatgccaaggtgcaaccaactaccttgataccaaagcaagttggcaacatgtatactgcatctctttatgctgcctttgcatcccttattcacaacaaaaacagtgaattggcaggaaagcgggtgattttattctcttacggaagtggtttaactgccacaatgttttcattgcgattccatgaaggtcaacatccctttagcctatcgaacattgcatcggtgatgaatgtagctgggaaattgaagtcaaggcacgagtttccccctgagaagtttgttgagactatgaagctcatggagcataggtatggagccaaggatttcgtgacaagcaaagactgtagccttttgtctcccggaacatactacctcaccgaagttgattccatgtaccggagattctacgcaaagaaagacggggactttgctgcttgcgataatggttccgttgccaacggtcattagcggacagatttatcatgcccccaatgcaatgaagaaagcatttgtgttagatgtgtttgtgagtaccaaaatactgggttcctgtgtatgttaaaaaagcaaaaatagtttgattcagcatcaatttcagcttaagttttctttttattttatcttgtaataagttatttttctagagccagttatgttaaaacccaaagctagttggcaatctctttgatgataatataagatatttttattcc

SEQ ID NO: 16026 - DNA, 509 bp, Gossypium hirsutum
  Clone ID: GOSHI-09MAY01-C286_8
aagctgacatttaaatagttttgaattctgttaccccctttttttcttccaggctatgtctgcctatgggtatgagattgttcaaacacttattgtggacatagaacctgacgagcatgtgaaacgtgcaatgaatgaaattaatgctgttgtcctctgtgtggaaatacaaaagaagggtgaaagtatagaaaccttgtccaaatttgacggctagaaatctgctcctgctcacaaagtgatttttcagatcgaagccatggctgaagatgtgctacctgtgttatctgagcgtcgtgatagtggtctgctgattaggtgaggtgccgagaattttaccagatgtataacacaagttctttgctgattcatgtctaattcttttttttttttttttttttattttttcttaaatcttttattatttttctttctttttatttcttccttttttacttattttttattatttcctctttcactttaataatattttattttttattttt

SEQ ID NO: 16027 - DNA, 495 bp, Gossypium hirsutum
  Clone ID: GOSHI-09MAY01-C286_6
tccgggttcttcggtctaccatgtatttagacagataacggagcacgctactgttgccctccagtatttccttggaatcagaagtaaaacagcattgcattctcttttgcactggatatgcagctaccaaactttattcaccaaagtctgcaacaaatgcggacggccgtgggtggcaatgtagacaggcaatctgcttgtgtatcttgacctacggtgcttacatcagtccttatcgagttactctgtctgtttcataacatgcatcgactcaatctatttcctcaacgttagttcaaggttcgcaatgcccctgatgctgtatcatatcggacttgctgtctacggataacacgacttagttgcaacacttctttctgttaaccaaggtatattagctaaagctaggaaagagaaagatcaaattgatactagtgagtgatgaaaacaaggtttctatatttacttactttaggtgatcgaatgagaatgttc

SEQ ID NO: 16028 - DNA, 931 bp, Gossypium hirsutum
  Clone ID: GOSHI-09MAY01-C286_5
ccggaaccgccattcccgggtcgcccagcgtccgcaaaatccaggttcctttgccccacatctcggaatggaagaaaatacaggaggttgaaggagataaacaagaagatgagaagggagatttaatggaaattatttccctttcccaactatgaatttgttattattttgtttcattttattggttgattagaatgggggagataaaggacaacgacgcctacaaggaagagcttctcgactacgaagaagaagatgaaaaagcccttgactctgcctccattaaggctgctgattctgctaagagaggggtatgttggaattcacagttcgggattcagaggctctctgctgaaaccagagctgcttcgatctattgtggattctggttttgaacatccttccgaaggcaaagttttaaactcatgtaatcacgattcaggtaatcactataatggacgattttgatgactctgatatcgaattgcagtcacagttataagagtttctcattcatagtcccaaaagcaaagcaaatgttgatacgattattgaaaggtgtgcgggcgcacggcatttacgagatgatatcctccattatagtaaggaaccagctgaatacttgcttagtgacctgccaagctcttatggcgaaggtgcaaccagtagctcaatggggtatgatagcattaataacaaaatcatatttgaacttgaaggtgcacactgattatataatcagacttttgcaggagaataattgtgttaagtttcagcagcagatgaagtgtaatctgtatgcgtggtttagatttcagtgttcattgttgttgtgttgctaagctaaacaattcttccataatatataatatcatttattgttaataaaaaacaaaaacttccagcgtacatgttaaaaaaattttttatt

SEQ ID NO: 16029 - DNA, 1198 bp, Gossypium hirsutum
  Clone ID: GOSHI-09MAY01-C286_4
attttttgaaatcaaacccgattgaggctacctttgcatattacagtgacatctgtgtcggatcaattgcttgccggctggaaaagaaggaaggtggggctatccatttgtacatcatgacattggggttatccatttgccagcatattaccctagacttctgtgatgagttaaatggatttaactcaattgaataatgattaattcacttgttttaagtgttttttttttcattttatattttttatataaaaattatatatacttaaatcacaaaatgataactaaactatacttattttgccaaattgatatttaaacttttttgttgtcataagtggtacttaaactataccacttacccattttatctctgttgttaaagaaattcccttaaccaatcattttgtggcatgatataatttttaaccaatctttttgcaccggttgagtatgcaatgaagctacgcaagcctatgatctatggtgctaccaggagcacgctactgctgccctccagtatttccttggaatcagaagtaaaacagcattgcattcgagtcttttgcacatgaatatcgctggtcgtcaagaaaggctactgaacaagatgctgttgaaatcttgatgtatgagagtttacgttttgcatacggcttgcttgaggtgttgatctttgtgacttctatcaccatatggaataaaggcatcattagccaaataattctttcattccctatatcagtttttactgggagaaatatgtttgctgaaaggagtaaacaaggcattagtgataataagatatatcattatcacttaaatcttggaggaagtgtttctaccagaaggctgactaggataccttcaattcctaagaatgatgcaaagttcagaacacacttatccaggatgggaaggagatggcatcagtgctttatacttatcgcagctgtgtcaaagcacttcctcagggggtatgttggaattcacagttcgggattcagaaactttctgctgaaaccggagctgcttcgatctattgtggattctggttttgaacatctttccgaaggcaaagttttaaactcatgtctgatgttaacattcgtgaattccatgaattaagtcattttgtttttcttgcttttagtgacttataatggtgggcagtatacaagtttggtgctttataatt

SEQ ID NO: 16030 - DNA, 1358 bp, Gossypium hirsutum
  Clone ID: GOSHI-09MAY01-C286_3
gcttatgcttggaaacgacagcttgctggccaggctggtgcatctgctgttgaccggacaaggcttgctctcaaagccttcacagaccagaaaaggcgattttttcctcaccttgatgatgaagaggatggtgagggtactgacactgtgtcaaagaaacaccgcaatttgccagctctggcagaagacaatcaggataatcttagcgattgtaaaacattatctgatgttttgactaacttggagaaagaaataccaaatctgaaagtttcgacttatgaaagactggattggttgaaaagagcttcttcattgcctgcttcagcaaatgataataccatggaggcaccaaaacataattttcacggcacaagtatacttagaccagcaccccacaatgttgctgctatggataaggttgctgtaattgagctgttctttccttctatcttcagagctgtagtctcattgcatccagctggttcaacagatccagattcagtggctttcttttctccggacgagggcggcggctgcttgcctatgcttgccttcgtcggtctaccatgtatttagacagataacggagcacgctactgttgccctccagtatttccttggaatcagaagtaaaacagcattgcattctcttttgcactggatatgcagctaccaaactttattcaccaaagtctgcaacgcaatcagcgtttaactcttacggctcactggctattggcaatggacaggcaatcagctttaatcttacctctgtaactctttctgtttcaaaacaatcatcgactcaatctatttcctcaacattagatcaaggttctaatgcccctgaagcttatcatatcggttgcttctcggataacacgaaaggcagagattgaagctcaaatcttagctgctgaagcagcagcaaaaatgaaggcagaggttgagctgaaaaagcaacgggaaagagaagagaagctactggaattacattacaaaaggtttttatctttttcttgcgttttcttttttgtccttattatgtttatatagtggagggttttagaggctagaacactgtaataccatatagtatatacaaaatatgaaacagaccatgccattatttattgaacaggtaaaaaaccaattattttttccctttttcttaaataaaagaccatgccattaagtaatgccattaaatatatttgttggtgagataggcttgcctcaataaaagtattgttttattcgattacttttatttacctcatgcttttcatcaacagtctaggacataatatgccttaccactgatttcctcaccaatttatctttaagtagctcatcat

SEQ ID NO: 16031 - DNA, 1017 bp, Gossypium hirsutum
  Clone ID: GOSHI-09MAY01-C286_2
ttggctgcgctcttgcttgttcgtctcaatcctgctatttctataagaatagtttgggttttcgttttttgagtcaaactatcagtttacttcctctatcatcgcaaattctgaaagaaaagggatccgatctgatctgctgcaaatgggggagaagtgggtgttgatgaaaacggctcagacgcctaccaacattgcagtgattaagtattgggggaagagggatgagacccttattttgcccgtcaacgatagcatcagcgttactcttgatcctgctcatctctgcaccacaaccaccgtcgctgttagccctgctttccagcaagatcgtatgtggctcaatggcaaggaaatatccctttccggaggaaggtaccagaactgtttgagggaaatcagaaaacgggctagggaagttgaggataaagagaggggaataaagatagagaagaaagattgggagaaactgcatcttcatattgcatcttataacaatttccctacagctgcaggattggcttcctctgctgctggttttgcttgtcttgtttttgcacttgcaaagcttatgaatgtcagtgaagatgagagtcaactttctgctattgctaggcaaagttcaggcagtgcttggccgaatttgttaggtaaatttcgttaaatggattatgggataagaggatagtggaagtgataggtttggcagttcaactaggtagatgaaaaacactgggaagatctcttcatcattatggctgaggggaggttcacggcagaatgaaacaagttacacctttgggatgcgtgagagagttgaacaaagtcgctttacagcataggcaaaggagtgtttcaaacgcacaatcagatggagaggcataccaatcggatttcattttgcaaaatatctgtgctaaggaccatttcatcattggtggatactgcctcattttacataagatcattacaggtatgtgctgtttagaaggaatttagaaagcccggggattatta

SEQ ID NO: 16032 - DNA, 1506 bp, Gossypium hirsutum
  Clone ID: GOSHI-09MAY01-C286_1
cggccgcgtgggcggcccccccgtgcgtactcccattttcttattgattttgcagatcggttctctaatccttttttcgggtgtagcgttgtttatacgtttggttgttgttgaagaagtgctactaccatggctacaaagaagagcgttggggacttgaaggaagctgatttgaagggaaagaaagtgtttgttagagtcgatctgaacgttccattggatgataacttcaacataactgatgacacaaggatccgtgccgctgttcccaccatcaagtatttgatgggtcatggctctaaagtcatcctctctagtcatttgggacgcccaaagggtgtcactcccaagtacagtttgaagcctcttgtgccaaggttatctgaactccttggagtcgaggttaaaatggcaaatgactgtattggtgaagaagttgagaaaatggtggctgcattaccagatggcggtgtattgctgcttgagaatgtgaggttctacaaggaggaagagaagaatgatcctgaattcgcaaagaagctagcttctctcgctgatctctatgttaatgatgcatttggcactgcgcacagagcccatgcttccacagagggagtggctaagtacttaaagccttctgttgctggttttcttatgcagaaggaactcgattatcttgttggagctgtggcaaatcccaagaagccatttgctgcaattgtcggtggttctaaggtatcaaccaagattggagtgattgaatcactcttggccaaggttgatattctcatactgggtggaggaatgatgtttaccttctacaaggcccaaggacatgcagttggatcttcacttgtggaagaagacaaacttgatctagcaacatcactccttgagaaggccaaggcaaaaggagtctctctcttgctcccctctgatgtggttgttgctgacaagtttgctgctgatgctaacagcaaggtggtgccagcatcagggatcccagatggttggatgggcttggatattggacctgactccatcaaaaccttcagtgaatctttggacactacccagaccattatctggaatggaccaatgggtgtgtttgagtttgagaagtttgctgccggcactgaggcggttgccaagaagcttgcggaactcagtgggaagggagtgacaacaattatcggaggaggtgactctgttgcagctgtggaaaaagctgggcttgctgacaagatgagccacatctctactggtggtggtgccagcttggtcggggcaaccaattcctgagcctggtttaatgacctaactttaattgcccttagcgtttgacttgtcactgtgatggggtagatttaaccaaagattttataactagtgtaactgtagggcttgatatatggtgttatctactaagcttaatgtgattattttgatatgtaaaaattcttgtttatatggtctcttattcttataattaggcctggctaccat

SEQ ID NO: 16033 - DNA, 539 bp, Gossypium hirsutum
  Clone ID: uC-gsflnu33B081g08b1
cttacgcttccggttctagatcgcgagccgccgccatttacttgggctggattatcttcacgggctgttgcgagtaccatgaggatgatgagtctgacgaagaatttagccctaaaaaaataggtggaattgctatatcaatggtaatgaaatatgcagacaatattgtgaaggtctattctacttcagtggcaatgcttctcactgccgttgtttcagtgtttctgttcggcttcaatcttacccttgctttcttcctcggtgctactcaggtgaccgagattccgtttaacaattttctttattgctggaacaagtcttaaccaagatcaagatcaaagtacttcacaaagttatatatgcaggcattgcaatgagaggtgatgatgatttggcattatattctcaccaggatgaattttggtttagaaattggaatactatgtgtgtctttgcgtgtgtgttgtttttatgtataaattacatattgaatcaatgttatgtataaatttaatttcattatatttatattatttttg

SEQ ID NO: 16034 - DNA, 599 bp, Gossypium hirsutum
  unsure (1)..(599): unsure at all n locations
  Clone ID: AI054682.1
ctctgactaagccatttgcctaaattatagttcccccgaaaccctcattttctcccaaaacatagttcccccaaaaccccaaaatttccctaaatcaaacccatttgctgtctccctctctcttttcgatcgacagcaagcagaaagattaaggggatttcattttgaaatcaaacccgattgaaggctacctttggtgagtccatcaaatcgagcatattacagtgacatctgtgncggatcaattgcttgccggctggaaaagaaggaaggagcacgctactgctgccctccagtatttccttggaatangaagtaaaacagcattgcattctcttttgcactgaatatgcagctaccaaattttattcccanagtctgcaactttaatctacctnctgtacatcgtcctatcgaccttntctggttcatacaatcatcgactcatctatttctcacattgatcaggttctatgctcttgagctataatncgttgctctagatacacgaaggcnagatgaagctaatctactgtgaacacagcaaatgagcgagtgagctaaagcacggaaagagagactctggatccttccgagtt

SEQ ID NO: 16035 - DNA, 557 bp, Gossypium hirsutum
  Clone ID: LIB3825-009-Q1-N6-F12
gccaaatcatcatcaactctcattaatcaaaggaaaaagatcagaaaagaagaagaaacaatatacaagagagggctggttcaagcttagatgaagccaaagtattacaatgcctgcatataacttagagaattcctccggagtgtgagctatctcgagactgtctctaacctccattgccatttgtaacctcgtctgaattgcgttcctggacttcctataaacaccttcatcttgttctttcaagctaagggcagatatattagtctgagcacaaatacattaaaatacttacattagcatacagtgaaaaagctttctcatattgcccattgataaaataataattcgagattatgtatatgatattaataccatatttatatagataaacagaaatataatcccccttgtcatgggcaaacaaaaacagatcagtgctggtaaagaaggctattcttttttgtaaattctctgtatcaaactccactatatcacaagtatattagagcgggaacagctgaaaagaatgtgatgtgaaggggcaaacgtaatgc

SEQ ID NO: 16036 - DNA, 548 bp, Gossypium hirsutum
  unsure (1)..(548): unsure at all n locations
  Clone ID: LIB3543-032-Q1-K1-A1
atttgcctttgtcttttgtaataatttgatttttttccatattttaaatgtcagtagaaagacatcaaattgttaaagctaaaactattatattattgatatttaaatatcttttgctttaattatgaaattttcaaacttactaaatatgagattcgtatttatagcttagaatatttgtcttgtaaagaagagtttatgtatttgtattgatatttaaatatttttcttgtaaagcagtgcttcgtgtgacaacaaacatcgctcgggaaggtctcgttattggttcctaacgtttttgtacttgcaaagcttatgaatgtcagtgaagatgagagtcaactttctgctatagctaggcaaggtttaggtagtgcttgtcggagtttgtttggtggattcgttaagtggattatgggaaaagaggatgatggaagtgatagtcttgcagttcaactagtcgatgaaaaacactgggnaagatctcttcatcattattgttttgagggatagagttgcaaagcttttgggtttgcgtgcatgcaatt

SEQ ID NO: 16037 - DNA, 550 bp, Gossypium hirsutum
  unsure (1)..(550): unsure at all n locations
  Clone ID: LIB3543-050-Q6-K6-A5
ngattggtattgccaacacctattcacttgccgagcacgttgctgctgttattcaggatgcaaagcccctgctcacaaagattgaagccatggccgaagatgtgcaacctttgttatctgaacttcgtgatagtggtctgcttcaggaggttgagaatttgaccagaagtctaacacaagcctctgaggatttaagaacacacttatccaggatgggaaggagatggcatcagtgctttatacttatcgcagctgtgtcaaagcacttcctcagggggtatgttggaattcgcagttcgggattcagaaactttctgctgaaactggagctgcttcgatctattgtggattctggttttgaacatccttccgaaggcaaagttttaaactcatgtctgatgttaacattcgtgaattccatgaattaagtcattttgtttttcttgcttttagtgacttataatggtgggcagtatacaagtttggtgctttattattttgattctatatttatatttaatctaatttttattnnnnaaaaaaananaaa

SEQ ID NO: 16038 - DNA, 627 bp, Gossypium hirsutum
  unsure (1)..(627): unsure at all n locations
  Clone ID: AI055251.1
gttttattgtgctgaaaagtaaactcatatactgatgatatttttgcaagtactgaaatttctcgttaattgattctttttggtgttataagtttcatgattgatgaaattagtcttgacaaccatgggtgttgtgatggtcctaaaactggcagactcagggtattggataatgcaccaaagctctttgattatttggcagagggttagtgaagcacaggatatagccacaaaattaggtggacaagtcattggtcacacatggcttttagaatcaattgcagcatgtaagttgcagccttttgtcaactaactaaataatgatgattgaatttttttagctaaagaatgagcaataacttaatagactagtcctgttttagaaggtagaacttgctctntctctgtatatctgtattgtaatagtcatatgagctcttttgagtttggcagcaactaattgaacttggatggggcattttcatcattacatgagcaaaagtatttntgacttgtacattaccattataacagccatgaactggattacatgtgatattagtaacttgtaccagcccttaaggcttcgactttacttaaaataggaatacatgtgatctttggcan

SEQ ID NO: 16039 - DNA, 380 bp, Gossypium hirsutum
  Clone ID: LIB3493-006-P1-M1-A11
caagctgtctgattatagctgttactcctgcaaattctgacttagcaaattttgatgcgcttcaaattgctggaaatgctgatcttgatggaggttgatccgtgtgaaggcttgactgacgatgacattcgaactgctattcagagaagctcttcaatttatacttggttgattaggttcattggcatcttgtccttatgagagtgtagtttatgaagctttaaactttgcattgtcctctgaggtattagaattcctagttcaaaacttagcaatttgtctttttataaaagacctttgcattttcagtgttgtttaggttcgcaaacaagatgatgtatttggacttctattagtaaaagacttgctgtattttattt

SEQ ID NO: 16040 - DNA, 471 bp, Gossypium hirsutum
  Clone ID: LIB3825-031-Q6-N6-E10
aaaggtgtcttaaaatctactttatagaaaactatgcacccaatgttcttcacaacccctttcagggccataacatatatacaaaaaaaaaaaagcaaccacagctaaacaaaatggcaccaagaactaaacagacaaataccaaaactaattagtgtccggaaaaaagaaaaaaaaaagcatgctggccttaagcaaaacccagtataagtgtattagttactgatgtgcagcctggaggagtccctcgcgaatctgagtggcgacatcacgaacagctccaggaccatgagggatgaacacagccgaagatttaaaagcagcaccgatttctttcatggtgtcaaagtactgggtgaccaggaccatgtccatgacatcctttgcagtagtcccaggtacgttaacagagaatccaagcacactattctcgtaacccatcaacaatagcttgtcgctggcgagcaatac

SEQ ID NO: 16041 - DNA, 516 bp, Gossypium hirsutum
  Clone ID: uC-gsflnu33B004b06b1
ttcacgcgtccgctttcagcaactgatatcaggagtgagttattgccatgcaatgaaaatttgtcatagggatcttaagctggaaaacacgctgttagatgggagtactgtgccgagacttaaaatatgagactttggctactctaaggaaccccaacctacattgcaccagaggtcttgtctaggaaacaatatgatgtgaagacttagccctcgatctcgatgaacagatctcgcagctcatacaatgtaagccactttcgaaacagcaggttagagcattatgcgacaaggcaaaggaaatattaatggaagaaagcaatgtccaggattggactggtttgaactttcaggaaataatggatgaagtagaaaaaattcgaataacggtgcatactttggctttctgttccggtgttttggattctctagcggttgaattgaaagcatcaaagacttctctagttatatgcaggcattgcaatactttggcttcatccaagcttggaccagacc

SEQ ID NO: 16042 - DNA, 637 bp, Gossypium hirsutum
  unsure (1)..(637): unsure at all n locations
  Clone ID: LIB3543-045-Q1-K6-B6
gcgttcgcccagcgtccggnttttttagcgtgctgttcgattgaaagagtctctatttatgactctaagaatcattagaagcaccaaatggtcaagattgctacctggttatataggtttactattggtgaggttcttgcggtaaaggtaaacactgaggaaatttttcttttttacttttgacatgccatgagagatgttcccttctctactttaggcccattaaaggctaatgaacgtaaagatctgaattgtgcagtaaaggaatatttgctgatagatggatatcgattaactgcaatgacattttgtgaagaggtatctgtaacattcagtagtgttttcgtcttgttactgcttttttattctgtaaatctgcactagctagcattaaggacctatatagctataagggttgatcgtcctatgctaaaagcttgatgcaaaactcaataaactgaaaattgtggaaattttgaattattatttgggaactgcaagaagagagaagttcttgccccacaacaccagggtttatattttctgaacatgaagttagtttgaaaaatagaaaagcctgactgggagttatttgcatttgatgttagaacccaattatcttctttcttgattttct

SEQ ID NO: 16043 - DNA, 429 bp, Gossypium hirsutum
  unsure (1)..(429): unsure at all n locations
  Clone ID: LIB3120-007-Q1-K1-F10
gtgggtggatattctttcacttcanaagctctgcatcgatttaatgggttctgctgatcaaagatgtcgtttgtccgaagatctttgccgattatcagtcgttctcaagagctctcctccaatcattcgagtttcaatatcagatacgggcaccggtacgtgcttggaggagtttcaagaccttaagtgcaacagagaaggtattggaacggaaaagtgggatgggttgctttccatcaaaactaccagcattagtgataataagatatatcattatcacttaaatcttagaagaagcgtttctgccagaaggctgactaggctaccttcaattcttaagaatgatgccaagttcaagggcacccgaagtatgtctgtccatatttgagactattgatgccttgctgaacgatatcaaacactactttc

SEQ ID NO: 16044 - DNA, 419 bp, Gossypium hirsutum
  Clone ID: LIB3148-053-Q1-K1-E10
gtcgattataatggaaatgactattaaatgtttaaaattcattttatttaattgatggatgctgttgtttaaatgctgcgggttgaagtgtttaaatgctgtaaattgaagtgtttaaatgttgtaaattgcagtgtttaaatgttgtaaattgaagtgtttaagtactgcaaattgaagtgtttagttgctggaaattgagatgttttattgctgtaattgagttgtataaatgttgttaattgagatgttaaagtgctgcaaattgaagtgtttaaatgctataaattgaagtgcttaaatgttgtaaattggcatttgtttgtaggttcattggcatcttctcctgatgagagtgtagtttatcaagctttaaactttgcgttatcctccgaggtattagaattcctagttcaaaa

SEQ ID NO: 16045 - DNA, 444 bp, Gossypium hirsutum
  Clone ID: LIB3583-017-P1-K1-D7
cgaggaagcattggaggctcatgatggtgctagtaaggggaaatacaccattggacttggacaagattgcatggccttttgtacagaagtggaagatgttatctctatgagtttaacagctgttacttcactccttgcaaaatataagattgaccccaaacaaatcggccgtcttgaagttggtagtgagactgtgatcgacaagagcaagtccattaagaccttcttgatgcaaatctttgaggtagtcaataagcactaaaactgatttttcacagttttcttcttctatttcaggcattgcaatactttggcttcatctaaagcttgaaccagtcctctgttgtatattgtttcttcttcttttctgatctttttcctttgattaatgagatgtgatgatgatttggcattattttctcaccaggatgaattatgttttag

SEQ ID NO: 16046 - DNA, 419 bp, Gossypium hirsutum
  Clone ID: uC-gsronu33B158h04b2
ctattctagtgttttagaggcgctggcggttgaattgaaagcatcaaaggacttctctaagttatatgcaggcattgcaatactttggcttcatcaatgaatattgttttagaaatagtaatactttgtgagtgtgtctgtgtgtgttttttttatgtattaaattacatattgaatcaatgtttatgtattaaatttaaattcattaatttttatatttagttctaaagtgtcaaaaaaaaaaaaaaaaaatatatgatgatactgccgacctaaaataggaaaaatgctttccttgataacttaaaacatatatcggaacctcatattataataattattaatggctatttattatggggggggcctgttatgaggccccagattctctcccgcgggaatgtaaaggaaaccctttt

SEQ ID NO: 16047 - DNA, 402 bp, Gossypium hirsutum
  Clone ID: LIB3148-056-Q1-K1-A11
cccacgcgtccgggattttcaaggaaacaacagaccacttgtataatgcagccactcaggagcgagaaactactttgaatcagctactaatagagcttgatgggtttgatactgacaaaggtgcatactttggctttctgttccggtgttttggattctctggcggttgaattgaaagcatcaaagggattctctaagttatatgcaggcattgcaatactttggcttcatctaagcttgaaccagccctctgttgtatattgtttcttcttcttttttgatctttttcctttgattaatgagaggtaatgatgatttggcattcttttctcactaggatgaattttgttttagaaattgtaatactttgtgtgtgtgtgtgtgtgtttatgtattaaatta

SEQ ID NO: 16048 - DNA, 602 bp, Gossypium hirsutum
  Clone ID: LIB3828-005-Q1-K6-A4
cttaatttatctaggcatgaaatcttcaaaattatcatagcttttcttttctgttgattcaaactgttgattcaaactgttcattatatatcaatagtaaatataataaaatttaaactctctttgctatgttgtcattgcatgtatacataatgcaatcacaattttggcatataactgaattttgaattttgtttcttctcctgatcacttgtaatcttttgaagcttgctactagcgattacattgtcagagacactgggaattgcactcctcgttatatgagatgcactaccaatcaggttgtggattttggggaaagtggtcctgttcgatgttcccattgcaaaggttacataaatcctttcatgaagttcattgatcaggaaaggaagtttatctgcaatttatgtgtgccgccagaatttagaagcattgcttgaaaacatcccaacaatgtttcagagtagtacaactgctgagtcatgttttagtgctgcaatcaaggttcattagcatcttgtcctgatgagagtgtagtttatgaagctttaaactttgaattgtcctccgaggtattataattcctagttcaaaactta

SEQ ID NO: 16049 - DNA, 575 bp, Gossypium hirsutum
  unsure (1)..(575): unsure at all n locations
  Clone ID: uC-gsflnu33B084f09b1
tcgtgtgccatgttattgtatattaatataatcttccaatggttaaccattggccaactactgccagaaaatagttaattgagaagcatttttgtagcctgttgcatcaatccttggaattcagcaagaaaacagtttttgggatttgatgctaatgagctcacttcgaggagtagaggaaaagctactgctgttcaacaaataagaaaggttaagggatacaaggcattagacatgattggtgatggtgctactgatcttgaggttagtaaattcatcttacctttctttagatatagttaatctttaaggttaccatataaagtaatttttccttcaatgcattggcaatcaatatattaacggttaatgaacccgcacaaaagagagaaaatggaggtcatcctgttgcagggttttcatcttctgcatctggtatgcgaggaaataacatgaatcgtgtagagtgtataatgtgctttgaaatttcactttaaaagaattaaacccagaagttataacttnttgcaggaaaaantttttgaattagttcaactttatttaactaataaata

SEQ ID NO: 16050 - DNA, 415 bp, Gossypium hirsutum
  unsure (1)..(415): unsure at all n locations
  Clone ID: LIB3145-011-Q1-K1-A1
gccgagtcaagttctcgcccaccgcctccgctgatttttgccggatctgtcccgtataccgtgtcggatcgtgtcgacacgagtactcatcccaaattgctctgagcccggattgttgtttggcaatttcttcatggttcaaatggttcagatgtgctagcaacaaaataggccttgtttttcatcgtcttgtttcagtatatccctcgatttcttagagttatacacttaacatcagaaatgaaaaggacaacagatgtctttgctgaaactgcttgggctggagctgcatattatttggtattatatatgctttgtagtcatgtgagaagctgcccattgtgatattgagagctgagcttgaccatttggcttccctagcagttntaaaacagttaaatgacatcttaagtgc

SEQ ID NO: 16051 - DNA, 546 bp, Gossypium hirsutum
  Clone ID: LIB3585-059-P1-K1-D9
ctattttatacccgaaattcctctcaacttgttcttctattttatttctcagtctgttctttgatttcccgaaaccctaaacacccacttttgccccctttcctcagaggctgtaaccgagcaacagtttacccagttttccgacgcctagccacactacccagcagcgaactcagtcttagaaagtatgttcttcgcttgtcaagaggctcctggaaaaaggacacattgttcacgcaactacgaggaatttggatcccttgcacagccgaccttttgacaacatcgtctatgcagttggctttgttagttcaaccaatggctcttcctcatccgtcagaggaccctattcaagttttggattttggggaaagtggtcatgttcgatgttcccgttgcaaaggttacataaatcctttcatgaagttcattgattagggaatgaagtttatctgcaatttatgtggtcagtattaatcatctttgtgtgctcatctagtatattttgcagtatcttgtgtattttaacttattcttatattcata

SEQ ID NO: 16052 - DNA, 579 bp, Gossypium hirsutum
  Clone ID: LIB3831-002-Q1-N6-E12
ggttggggttttttttttttttttttttttttttttttttttttttttttttttttttttaaaaaggcatctctgagggataaggaggagaaaccaaattttttataacaaggccaccctatcagcctttacaacctaagctttactaaaagggggggtgggctaaaaatcctagccaccattacagcagggaacaatgctcaaaaacagcatagaggggcaaaattaaaagtttaagcgtcattaaaagcaaggactccaggaagttgtttgccctaaaaaagctccaagctggcaccaccaccagtagagatgtggctcattttgtcagcaagcccagctttttccacagctgcaacaaagtcacctcctccaataattgttgccactcccttcccactgagttccgaaagctttttggcaaccgcctcagtgccggcagaaaacttctaaaactcaaacacacccattggcccattccaaataatggtctgggtagggcccaaaaattcactgaaggttttgatggagtcaggtccaatatccaagcccatccaaccatttgggatccctgatgct

SEQ ID NO: 16053 - DNA, 652 bp, Gossypium hirsutum
  Clone ID: LIB3543-060-Q6-K6-C5
cttttcagtctctgccttttcatttcctttctctcaatcttacctccgttgattgctttttgccaatcggcgtgagatcttgctgatctgtcgccggaactttcatttagattccggcgatcgcatcgatcttttttttttcttttaatctttatgctacaatgaatcccgaatatgactacctgttcaagcttctgcttattggagattctggtgttggaaaatcttgtcttcttttgagatttgctgatgattcatatgtagaaagctacataagcaccattggggttgattttaaaatacgtactgtggagcaggatgggaaaaccattaaacttcaaatttgggatactgctggacaagaacggtttaggacaatcactagtagctactaccgtggtgcccatggcataatagtgggtgatctcccttctagatatttttcccggtctttatttgtgctacttatgaagttttattttttttttctctttttctttcccttttactgctggatcctctgttagatcgtttatgatgtgacagaccaagaaagcttcaacaatgtcaagcagtggctgagtgaaattgatcgctatgctagtgataacgttaacaaactactggttggaaacaagtgtgaccttacagc

SEQ ID NO: 16054 - DNA, 515 bp, Gossypium hirsutum
  Clone ID: LIB3828-006-Q1-N6-C12
gggttcaaaaacattaacaagagaacttttcataatgcttgatcaaaacgttaacataatcatttttgaaaacccaatctaatgactcccatacattttcttctaaaaggaaaatctttgaaacttctgctgaataaacaacatgatgttcactttaagaaacttcaactacaagcatactacaggtacttatcagtttaattccagcagagctttttgattgacctgctccaaacctgcataagggcttgtcagttgaagctgctgcacccatgatcttacctcaatgaaggcgttaacaaccattcctgcagcagagtaatcaaataacagttcctaggggttccagcctgaggagtccaagatcctaaagaagatgggccatcaaacatgggaccatgtccatgtctatcacccccataggaatacggaccccggcctacgttatggggacccatgtgacccatgccatgcaaaaagggggttggggaaccaccttttgggggggaccaaca

SEQ ID NO: 16055 - DNA, 502 bp, Gossypium hirsutum
  Clone ID: LIB3585-065-P1-K2-C1
cggaaattccgggaccgccccacgcgtccgcccacgcgtccgcccacgcgtccgtgctgcttgagaatgttaggttctacaaggaggaagagaagaatgatcctgaattcgcaaagaagctagcttctctcgctgatctctatgttaatgatgcatttggcactgcgcacagagcccatgcttccacagagggagtggctaagtacttaaagccttctgttgctggttttcttatgcagaaggaactcgattatcttgttggagctgtggcaaatcccaagaagccatttgctgcaattgtcggtggttctaaggtatcaaccaagattggagtgattgaatcactcttggccaaggttgatattctcatactgggtggaggaatgatgtttaccttctacaaggcccaaggatatgcggttggatcttcacttgtggaagaagacaaacttgatctagcaacatcactccttgagaaggccaatgcaaaaggagtctctct

SEQ ID NO: 16056 - DNA, 393 bp, Gossypium hirsutum
  unsure (1)..(393): unsure at all n locations
  Clone ID: LIB3135-037-Q1-K1-G10
cggacgcgtgggcgactaacttcttttacaggaagagttatccacggactacttttatcaactttggatgatcctaataaaaaactttgcatagcaatcagtatggttgtagcagctattgcagtctacgactggccagaaagttggccagacttggtgccattctcctaaagttgattggtgatcaaactagcatgaatagaggagttgagaaggaaagaggatgcaatagcacaggtgaccgagattccgtttaacaattttctttattgttggaacaagtcttaaccaagatcaagancaaagtacttgactaagttatgtatgcaggcatgtcaatactttggctttatctaagcttggaccaacccctcgttggatattgggtcttct

SEQ ID NO: 16057 - DNA, 477 bp, Gossypium hirsutum
  Clone ID: uC-gsronu33B167d04b1
gtcttttctgtctctgccttttcatttcctttctctcaatcttacctccgttgattgctttttgccaatcggcgtgagatcttgctgatctgtcgccggaactttcatttagattccggcgatcgcatcgatcttttttttttcttttaatctttatgctacaatgaatcccgaatatgactacctgttcaagcttctgcttattggagattctggtgttggaaaatcttgtcttcttttgagatttgctgatgattcatatgtagaaagctacataagcaccattggggttgatttttgggatactgctggacaagaacggtttaagacaatcactagtagctactaccgtggtgcccatggcataataatcgtttatgatgtgacagaccaagaaaagcttaacaatgtcaagcagtggctgagtgaaattgatcgctatgctagtgataacgttaacaaactactggttgaaac

SEQ ID NO: 16058 - DNA, 558 bp, Gossypium hirsutum
  Clone ID: LIB3828-032-Q6-N6-D2
aaacttcaaaactaaatataaaaattaatgaatttaaatttaatacataaacattgattcaatatgtaatttaatacataaaaaaacacacacacacacagagacacaaagtattacaatttctaaaacaaaattcatcctggtgagaatataatgccaaatcatcatcacctctcattgcaatgcctgcatatataacttagtgaagtactttgatcttgatcttggttaagagttgttccagcaataaagaaaattgttaaacggaatctcggtcacctgacagttcctgcatcatcatggtgctccaagatcttgtaaacctccattggagcagcatagccattgatcaatgagaatgtacgtgaatgtgaggcacataatatgaggctcagggccacaggtctaagaaatttggccatcataactttaatagaattatcgtagggattatatttgtctcggaaaagatcagtaaaactctcaatgacagcagaagcagcaacacaaacaagagggtatatgggataaaggaatctttcttctttgtgcggctgc

SEQ ID NO: 16059 - DNA, 408 bp, Gossypium hirsutum
  Clone ID: LIB3147-013-Q1-K1-A6
atgttatttagcattttaattttaattttattatttagttatattaataaaatattactggtattttatagcttatcatgtttgagcaacattgcaatattgaaaatcttggtcgagttaacaaagttaaggtcaaatggcaaatcacagtagagagtttgcaattagaaccactttgtaatcagagcatggagaagttcttcaagttctccactatgaagttggacagaaatatgaaccacaccatgattacttctgcttatcgtttctgctcttacagaggacacaaaagctcttaatcagcttaacacacttatccaggatgggaaggagatggcatcagtgctttatacttatcgcagctgtgtcaaattcacttctccgactgtatgttggaattcacagttt

SEQ ID NO: 16060 - DNA, 411 bp, Gossypium hirsutum
  Clone ID: LIB3272-037-P1-K1-B6
ggctggtgtagatggccaactgtgggttttatgtccaatacttttcgttatgcagggttttgaggcatatgttggactgctattgctcaagacagcatttgttggagttgttactgaatggcaggtaatttgttgtgggatacttttggttttgatggctgttggaaactttataaacacaatacagacactcatgacgaaatcaaggtttaaagcaaagatgaaaagatcaaagagcaaggcggagttggattagaatgtccctaattgttaggtaaatcttacatctagttttttagtgtcatttttttttatgtttccagtgtctcatatatgtttgttttagatgaggcaaagtgtttgtttttgaagtattttcattttcacaggcagttttactttatatgaaat

SEQ ID NO: 16061 - DNA, 617 bp, Gossypium hirsutum
  unsure (1)..(617): unsure at all n locations
  Clone ID: LIB3584-004-P1-K1-F4
tcgcttgngnaggtatcccaacaagtttcaaagtccctttatgatgcaaaggtgcaaccaaccaccttgataccaaagcaagttggcaatatgtataccgcatctctttatgctgcatttgcatcccttattcacaacaaacatagtgaattggctggaaagcgggtaatattgttctcgtatggaagtggtctgacttccacaatgttttcattgcgactccatgaaggtcaacatccctttagcctatcaaacattgcaacggtaatgaatgttgctgggaaattgaagtggaggcatgagttccctcctgagaagtttgttcagacaatgaagctgatggagcatagatatggagccaaggattttgtgacgagcaaggactgcggccttttgtctccaggaacgtactacctcaccgaagttgtttctatgtaccggagattctattcaaagaaggatggggactatactgnctgtgagtttggttctcttgcttacggacatttgaagaccgtgaggaagacggctttggcttggctaagatgcgtttcctcgttgtgtatgttnctgcaaaaaaattgtttcatttcggcagttcctcccgtttttttcag

SEQ ID NO: 16062 - DNA, 446 bp, Gossypium hirsutum
  Clone ID: LIB3135-056-Q1-K1-E6
ttcggaagagttgtgtgattattgaattgtagattgtaattgttggtgctttactgcactctttgctccatgatattgctgctttcttctttcaggcatttgcagatgaaattggcataccttttttggaaaccagtgcaaaagatgccacaaatgttgaacaagctttcatggccatggctgcctctgtcaaagatagaatggcaagccaaccaacggcaaacaatgcaaagcctccaacagtacacatccgaggtcagcctgttgcacagcagagtggctgctgctcttcctaatgtaaaggttaatgatgtattaggaagctatctttcttatgcagaattgctgcctttcgtggcatgtaagattacttgtttcttaactccataggtttaatgaacttattatttcttcggacccgacctcattagaagatctaattcatt

SEQ ID NO: 16063 - DNA, 410 bp, Gossypium hirsutum
  Clone ID: LIB3146-044-Q1-K1-F4
gcgattacattgtcagagacattgggaattccactcctcgttatatgagatgcaccaccaatcagaggttgtggattttgatgaaagtggtcctgttcgatgttcccattgcaaaggttacataaatcctttcatgaagttcattgatcaggaaaggaagtttatctacaatttatgtgtgccgccagcatttagatacattgcttgaaaacatcccaacaatgtttcagagtagtacaactgctaagtcatgttttggtgctgcaatcaaggttcattggcatcttgtcctgatgagagtgtagtttatgaagctttaaactttgcattgtcctccgaggtattagaattcctagttcaaaacatagcaatttgtcttttataaaagaccaaatttccaattttcaatg

SEQ ID NO: 16064 - DNA, 444 bp, Gossypium hirsutum
  Clone ID: LIB3147-055-Q1-K1-B9
gtttactatttgcaatttagcctattttatttggctccaagaatggacataactcatgagtgatcctttcccttgtatggtctatgacatttccgcccattgttttcttccaagttacaacaacgatgaattgatagtaaattttaaaaaaaaaaaaaaaaaaaaaaaaaaaaaaaaaaaaaaaaaaaatactttaaattatacaacaaaataaaacaatgtgacaagaatattatacaccacattgaagacaattgaaattcttttcaacaaaaggatattcttggatatggaggcgcatacttcaactttctgttctggtgttttggattctctagcaaatgaattgaaatcatcaaatgacttctctaagttatatgcaggcattgcaatacttggttacatttgttcagtttccgatcctatcaacccccgttccttttc

SEQ ID NO: 16065 - DNA, 413 bp, Gossypium hirsutum
  Clone ID: LIB3145-052-Q1-K1-B1
ctgtagtattatgagccatcaagggactagctttacctaaaggcctcttaatccttaataattttcttttcaaagatatcttcaaaatactcttttttcccggtaaaggaaaaaaggagtattggatttgctttacgtggtatgaaatactaagattaagtatctggaggtaatactcttaaaataaattgcatatgtggaggcaatatagttgcttcttccttttgcaaatcaatgacaatactttttctggtgatttacttataggtatggcaatgctaatgtttggaagatctttacagacctttttgactattttccattaactgctttggtggaatcagaaatattttgtctgcatggtggattgtccccttcaattgaaaccctggataatataagaaactttgatc

SEQ ID NO: 16066 - DNA, 399 bp, Gossypium hirsutum
  Clone ID: LIB3585-018-P1-K1-H8
cggacgcgtggggtcgatctgaacgttccatacatatgacacaaggatccatgctgctatgccgaccatcaactatttgatgggtcgtggctctaaagtcatcctctttagtcatttgcaatagttcatctaaaactatataattgctttggcgaatgttaaggatgagcaaccagaagtacaaggaccagcagttttggtctcaactgaaagcatattaactatcagtccaattggatttcgcctggcattgaagaattagtcaagaagctgaaggcaaggaataccgatgtttatctaatttctgagggctttctccaaatgatcaatgtatgcaactatgctacttaatgcttgaaagaccatctttgttttactttgttctgtctaggcattcat

SEQ ID NO: 16067 - DNA, 392 bp, Gossypium hirsutum
  Clone ID: LIB3145-007-Q1-K1-H12
taaatgtttaaaattcttcttatttaattgatggttgctggtgtttaaatgctgtaaatggaagtatttaaatgctgtaaattgaagtatttaaatgttgtaaattgaagtgtttaaatgttctttgtgtagcattttaagaacttcaaagctcacagatgatttgttatactctatatgagttcattgattctatgtttttgcaattttaggtatgatcatgggtgcaacagcttcaactaacaaggacttgtgcaggtctggagcaggtcaatcaagaagctctgctggaattaaactgacaagtaattgtagtatgcttgtagttgaagtttcttatagtgaacatcatgttgtttattcgacaaaagtttcaaagaatttactttttt

SEQ ID NO: 16068 - DNA, 312 bp, Gossypium hirsutum
  Clone ID: LIB3149-050-Q1-K1-G1
ctttctgtttcaaaacaatcatcgactcaatctatttcctcaacattagatcaaggttctaatgcccctgaagcttatcatatcggttgcttctcggataacacgtagtcaataagcactaaaactgatttttcacaattttcttcttctatttcaggcattgcaatactttggcttcatctaaagcttgaaccagccctctgttgtatattgtttcttcttcttttctgatctttttcctttgattaatgagatgtgatgatgatttggcattataatttctcaccaggatgaattatgttttagaaattc

SEQ ID NO: 16069 - DNA, 359 bp, Gossypium hirsutum
  Clone ID: uC-gsronu33B032h07b1
agataggtgttcgggttaccggaaaactgcgagaacatggaccaactaccttcttgagacttaataatgaactagttaatggcagctaacgagttacaacacagattcgaagagcctattaacaagttgaagccactagctagaaagacgtgtgtcacaaggaccagaaacatgagggcaagcactaatgcctttacgatgctgactactttgtatttcattctccatataataagcttgtgcaaaaaagctttgctcgtttggtgttcaacgactttgtgaggaatgccagttttgttggtgacattgcttaaaaaaaagtggctccatattaacctttgatcggtgttgaaaagcta

SEQ ID NO: 16070 - DNA, 417 bp, Gossypium hirsutum
  Clone ID: LIB3048-012-Q1-L1-B10
atttgaaatgtgatttgaagtgcttaagcagggatatcctagcgagtatcatggctcgtctagatggttcaaccctggcctcagctgcctgcacatgttctgaccttcgaggcatagctcgaaaccaaaggttatggaagcaattgtgtaattccacatggccttccactgcactcgacgaagcccaacaccttatttcatcatcaacggatggttttcgcagattctatgctgataattaatcctctatattcaatgatcacacccaatgggtgtcactctcaagtacagcttgaagcctcttgtgccaaggttatctgaactccttggagtcgatgttaaaatggcaaatgactgcattggtgaagaagttgagaaaatggtggctgcattaccagatggcggtgtattgctgct

SEQ ID NO: 16071 - DNA, 430 bp, Gossypium hirsutum
  Clone ID: LIB3584-026-P1-K1-G4
aattttaatagatttagttctgttttcaaattaaaatgttatttagtattttaattttaatattataagggagtgatattaataaaatattacttgcattttatagcttatcatgtttgagttacattgcaatattgaaaatcttggtcgagttaacaaagttaaggtcaaaaggcgaatcacagtggagagtttgcaatttagaaccactttgtaatcagagcatggagaagttcttcaagttctccactatgaagttggacagaaatatgaaccacattatgattacttctgcttatcatttctgctcttacagaggacacacaagctctcaatcagcttgatgggaaggagatggcatcaaatctttatactcattgcagctgtgtcaaagcactacctgaggggccatctttggaattcatagttc

SEQ ID NO: 16072 - DNA, 347 bp, Gossypium hirsutum
  Clone ID: LIB3166-017-P1-K1-G12
cggacgcgtgggtgttaatccacaaacggagtttttgaaaacgattcataagttagctgatacggttattagagggttgtttaagtattggcctttgactaattgttagaaggaagttctcttcctcggggaacttgaggaagtacttgaagcaacacagtctgtggagttccaacgatgtatggttccgcttttcagacagattgcacgttgcctcaatagcttacatttccaggggaacgagattcctaacaattttctttattgctggaacaagtcttaaccaagatcaagatcaaagtactgcactaagttatatatgcaatcattgcaatactttggcttca

SEQ ID NO: 16073 - DNA, 417 bp, Gossypium hirsutum
  Clone ID: LIB3584-033-P1-K1-G2
gtgaattttagtagagctgaggttgtagaggctgatagggtggacttgttataaataatttggtttctcctcattatccatcagagatgcatttgaattggatgtcttttttgttatcttgattgttaatgataaaattgcagtagtgcttgttctattaaaaaaaaaaaaaaaaaaaagggcccgctcgcgatctagaacgcgaacaatcctctttatcctttaccccgtcttatctaactcgaaaaggtgatgttgatgaacattgggtggcatataaaagggtaagcaaatttgtaaaatggacttgtgggggataggcccatatttggtttggatcttcctagggtaaaaaagacctaaggttttcatactaatgataataaaatgggcctctttgttgagatttttggaatg

SEQ ID NO: 16074 - DNA, 424 bp, Gossypium hirsutum
  unsure (1)..(424): unsure at all n locations
  Clone ID: LIB3083-060-Q1-L1-B8
cttgaggcccgtaaaccaggaggtgccaatttgtttatttgttatgggggtgttcgacatcgggagtccgttgcagcaaaagctaattggctggtgtttagcttcacagatcttataactgccttggagtaacttgctttcattctgatttttatgccatttttgggggttttctatgttctgttataagtttcctgcanatactaattaggcattcattcatgctgatcttataacatctatggctggtatatggattggtgagatattaagctcaaagaaggtcaccaccttttcaaacctcggttttaaccgttgatattaatatggggtccacctttatatggtaaaatggttggaaggttttctattgaatttaaaagggtttggagggatcctattttcatacctgcacaaaatattt

SEQ ID NO: 16075 - DNA, 368 bp, Gossypium hirsutum
  Clone ID: LIB3166-040-P1-K1-E7
ggaaattatatccctttcccatctttgaattcgttattattttgtttcattttgggggttgattagaatgggagagataaaggacaacgacgcctacgaggaagagcttatcgactacgaagaagaagatgaaaaagcccctgactctgcctgcactaaggctgctgattctgctaagaaggggtatgttggaattcatagttcgggattcagagactttctgctgaaaccagagctgcttcgatctattgtggattctggttttgaacatacttccgaagtttttgcacttgcaaagcttatgaatgtcagtgaagatgagagtcaactttctgctatagctaggcaaggtttatgcagtgcttgtc

SEQ ID NO: 16076 - DNA, 355 bp, Gossypium hirsutum
  Clone ID: LIB3197-020-Q1-M1-G12
gccaagccttataggcttgtataagaaagtaagtaccctccagatttggccagtctttttagatgagaactttattaaaattgtttgtacattgataaatttcagatctgggaggcttctttcagctgtccatcatgattttcatctggtgctaggaatttgattaagcgtattcttgatccaaaccctcttacccgtataactattcctgaaattctacaagatgaatggttcaagaaagggtacaagccaccaaaatttgagcaagatgaggatgtaaatcttgatgataatatcttgtattttacatggttatgatatctttatatttaatctaatttttattatttatttt

SEQ ID NO: 16077 - DNA, 292 bp, Gossypium hirsutum
  Clone ID: LIB3584-017-P1-K1-C12
ctgctaagcaaaggcaatagaagatatggtgttattgaatgtgatctactagttcgcaaaggacttgagaaaactgtttattggcatcttgtcctgatgagagtgtagttgatgaagctttaaactttgcattgtcctccgaggtattagaattcctagttcaaaacttagtaatttgtcttttataaaaagacctttgcatttttagtgttgtttaggttcgcaaacaagatgttgtatttggacttgctgtattttatttatatttaatctaatttttattatttatttt
